United States Patent Application Publication US 2008/0050393 A1 - sequence listing, part 15

SEQ ID NO: 57007 - DNA, 4505 bp, Homo sapiens
gccaagcctctgaaatccagcaaggaggtctgcctcccaccagaccctctccagtgtacttccccagataggaccagaggatgtctagttctaggctgagctggcaggcagctattaccccggttctttccccaccccaggtctgtctcttgccttttcttggggcatataagctactgagtggaacatggagctgatcaagaggccgtaatggtcatggctgtttcccagacctgaatattggggtgcttcttgccagtattctaagacatttgagtaattgctgtttgcacttactgcatggtcagaccacgtcactacatttctatgcaaggggacagcaaggcagcgtggtggtcatggctcttagctaacctattcaaagaccttttcctgttgattaatctattttcatatttataaaggagtcttaatgttctgccccataagactttcaaccttgtggttgggagtggggctggttttgtagggccctagggcctggcttctatgtatttatcaacatgtgatacattcaattggttaaatggtttatacagggactgatttgcttcccttcctgccatggctggagctttgggaacagtctgtccttacagagctgcaataagaaataaccaaagatgaagctggtcaaatattttcataacttgcttctgttgattttttttttttgtaaaactttcccaagacattttcagacttaaaaataaagtcagtgttacaggtgctggtcagccttcttacttgtacctcaaacactgggataaaggaggcggtccagggcaatgcagtgatgtctgtcaagacattccccctcccctaaactcagtagcagttgaggatgacatttcaggctagagagacccaaaatacctctgttccacctgagagcaaggtgggaagttgcatcagctacttgccccaagtgagcttcatcttctgattgtgggctttggaggaacgagagaactggctcttggccactgtgaggggtacagctttgccactcaaatataccttattgtggcattcagggagccagggtccagagctgcagggctgcggtccctggctcacttccacataggccatcacataacctgtcataaaggcatcaaaaccagcccggtgcaatccatcccccaggcactgggttaggactggcttggctccctggcacttctgaggtagctctatcagctatttcaggccttgctgccttaatccccatctctaagtcatttttgttgccttgcttggagtgaggcaggttcctagtttcatcggcagccacctcctgctcggtttcttcaggcttgatgctatccccacagacctgcttcttgggaggaccatccttagcttccccagaggtctgtgtccccggtaggttcaataaagccctcttccgtttttccctacgtcgtcgccgtcgccgcttgtcctctgccgcagcctcatcagtgtcaatgataaggtcaatatcgtgagactgaggacactgtggtcccagggggcaccagccataagccgagaagttgtcacagatgctggtgggatgaggacggtgggttgctgggggcaggcagcagcggtaatcaatatggtccctcatgctggaaggatagttgcagaactccagggtaaggtgtgggctgccagctgcccgctgcttcccattttcccgttcactgcaacagcgcaagagggtaatggtccactagcatataagctccataagagcagggttttgtggtctgttttgttcactgctgaatcctcagcacctaaaacactgccatttccggaaggcatattctaagtaggaggccacgaaacgggcatgaaactcagcagcatatttggtgtcataaatgcctgctgggaacatctcacacaggtcagcggtgaaggttcccagactctcagggaggtgtgcatagaagttctggtacaggaacaccaagtctataaggccattgtgtagcaccaggggccggcgggctcggattagctccaggaatagggtccgtactgactggctctggctctcatcacccttgtcattgcccttatggtaggggatgccttgggcatactgctggttgaagttgaagccatgctgtatcaggaactgcacagactttggttctatgacatactcctccatgcacagcagagtgagattgaacacttgagccagataggaatgttcacccttgtcttggtgccgcttgaagcaggcgaggccccagggaaaggatagaacgggtccctggcaagcaatgaacacacggccttgtaacgttcctcaatgcactggttcagcaaactcttcctgtccccaagcccactcagctccgtgtccacagccacgaaattagctgtctttatggctagcaggagggatggccacatctccttgaagttgttgctttgcacatccactacgggaacctggactactagctcctccccagatgttgtgcttttgctgacaccaccgttatgagctccagactacatctcccgccatgcctccatcagccccatgctcccaacgctccaggcttttgcagccggagccgcggtgtacaacggaacttgtagtctcctcgtggctagttcaggcggaaggagcagtcctctgaagcttgaggagcctctagaactatgagcccgaggccttcccctctcccagagcgcagaggctttgaaggctacctctgggaagccgctcaccgtcggaagctgcgggagctgaaactgcgccatcgtcactgtcggcggccatgacaccgctcgtctcccgcctgagtcgtctgtgggccatcatgaggaagccacgagcagccgtgggaagtggtcacaggaagcaggcagccagccaggaagggaggcagaagcatgctaagaacaacagtcaggccaagccttctgcctgtgatggcctggccaggcagccggaagaggtggtattgcaggcctctgtctcctcataccatctattcagagacgtagctgaagtcacagccttccgagggagcctgctaagctggtacgaccaagagaaacgggacctaccatggagaagacgggcagaagatgagatggacctggacaggcgggcatatgctgtgtgggtctcagaggtcatgctgcagcagacccaggttgccactgtgatcaactactataccggatggatgcagaagtggcctacactgcaggacctggccagtgcttccctggaggaggtgaatcaactctgggctggcctgggctactattctcgtggccggcggctgcaggagggagctcggaaggtggtagaggagctagggggccacatgccacgtacagcagagaccctgcagcagctcctgcctggcgtggggcgctacacagctggggccattgcctctatcgcctttggccaggcaaccggtgtggtggatggcaacgtagcacgggtgctgtgccgtgtccgagccattggtgctgatcccagcagcacccttgtttcccagcagctctggggtctagcccagcagctggtggacccagcccggccaggagatttcaaccaagcagccatggagctaggggccacagtgtgtaccccacagcgcccactgtgcagccagtgccctgtggagagcctgtgccgggcacgccagagagtggagcaggaacagctcttagcctcagggagcctgtcgggcagtcctgacgtggaggagtgtgctcccaacactggacagtgccacctgtgcctgcctccctcggagccctggggaccagaccctggggagtggtcaacttccccagaaaggccagccgcaagccccccagggaggagagctctgccacctgtgttctggaacagcctggggcccttggggcccaaattctgctggtgcagaggcccaactcaggtctgctggcaggactgtgggagttcccgtccgtgacctgggagccctcagagcagcttcagcgcaaggccctgctgcaggaactacagcgttgggctgggcccctcccagccacgcacctccggcaccttggggaggttgtccacaccttctctcacatcaagctgacatatcaagtatatgggctggccttggaagggcagaccccagtgaccaccgtaccaccaggtgctcgctggctgacgcaggaggaatttcacaccgcagctgtttccaccgccatgaaaaaggttttccgtgtgtatcagggccaacagccagggacctgtatgggttccaaaaggtcccaggtgtcctctccgtgcagtcggaaaaagccccgcatgggccagcaagtcctggataatttctttcggtctcacatctccactgatgcacacagcctcaacagtgcagcccagtgacacctctgaaagcccccattccctgagaatcctgttgttagtaaagtgcttatttttgtagttaaaaaaaaaaaaaaaa

SEQ ID NO: 57008 - DNA, 1311 bp, Homo sapiens
ttttttttttaaacttttgaaatcatgggttttagtttattatttttaatatatttctgaaaatgtataatatcaagactgtctgataatgcttttttaatactttccagttctgccaacattcctgtcatgcatccttaataacaatgctctcccagaaccgggatggggggcggtgaggtggggttggtgggggagtacgtttctgagctagttaaagtcactgaggagggcccatacctcaatgtgtgttgagttacaattagaaattagtcatggaaggacatgtctaccacagatatctttcctcacatttaaattattccatttcttcctacagtcctccttctatctttagttccattttaaataacccttcatcctacatacccatttatcttgcttcctttttctcccttttgtcccactagtataagagattgtgcttcagtaaactatcctgatgtggagagaaaaaaatcaaaatgtgatcaataataatagtttaacaaagttaagattgcatgctctaaaaacataagtgattaactgttggatgcccaaaagcactctttgtttcctttccaagttgatgactcttcgtatatttcctttttccatatgggcacccttggccttttaaaagtatcaatggcatagctcacagcttcaagagatgcagctctgtgggctgaggacacagcaatgattatgcttggcttctgacactggaaccaagccaagtctatggaacactgctatgtgtttgactggccatttctgcctaatgtcactacaaatctttctgacttcattttccgccatgggtagatatgcttcatattctaagctaatgacttttttcccttcaaagttatttcttgtagtccctacaaatagggatattgcaccacagagcggagaaatcaccaactgtgagacttcatctactgaaaagtttctcggcagtaaagtttataacatctttagatttctcttcaacttcatcccatatctttcctagatggctcaaaagcactatcctccactaatgggggggataacggcaatttcgtctcccaggctgaagcacgaggagctgatctccaagctcgacatattcttgacgaacagcaaatattatctgatttctaacatcagccaatccaggatgtcgagtttctatctccttccacagctgcaacgcttttatttcttgaggcacagaaatggtctctgaacgaactcctgttatttcagcactttttgcaaaatacaatacttcaacctggcacagcggcaccatcccgc

SEQ ID NO: 57009 - DNA, 1453 bp, Homo sapiens
tttttttttatcttttgagactgaacctttattttctgaaaaacaggtatttcatacaatctttgccatgttaatgcaaatatgcacaaagtaggcatgtatttgttttccaaaagatgcattatgaacattttcaggaagctggtgtgatttattcaacttttaaatacaatcacaaaattatatccatcaggaggcattacaaccttttgtacagaaaagccactatttatacattgttactaagacaaggaagattcagttcaactcaacttgctcttagaataagggtaaaaagtaaattaacaagtaagtgaagtatgatgttgttgccactgacattacaggtggaaatataagggaaatttaaaccagaaaaatgacacaataactttaaagaggagctgaaactttgtcaaaaaaagaaagaactattagcctgttttcaaagaaaaacattctaaaagtgtgcatttcagaacatagaattcttctaagtttaccatcttcaaaaatcttctaaattggtatgacacttttacattagcacaacaaacagctttttctaagtctagccaagttcccatggaagggcaaacgaccctaagtagttcatattttacagccccttggaccttataaagcttttctcattaagagtcagtttttcccttctgtaaataaggatggtgatactgttatccaggcctaaaaagcaggaagtgcaacaaacccttagggtttcatgatacagtgaattttcccctccccaacgtttggaaaaaattgggacacttgctagttcttccctgtgggaagaatctttctaatattacccaaatattgaaaacaaaatctaccttctttaacccttgtattagtaattctacctccttggcttatggggggaaaagtcctagttttaaattgctggcattttacaagctcaacaagataaaaaattgaacactggttttcatactctaattttatgtaaaacaaagatgcttaaatgtgcgaatagtaaagcattcactgatatttgatgtatctgaataggactaacaggctaattgtaggtgctttcatatgaaaataattgggagaaaagaagaaccagctcctttgatttcagtactgccaaaacaagtaagcccccagagttaattacaaaaatgtagaggaaaataggcccggaagactttgcaatttaaagtactgcctataataccccagattaaaaaggaccgaagattgcacatcaagtctaatatttggctgtacttgcattgccctgctcggcatttttaaaaaatggctctttccttaaatttcacacgtcagaacaaccacaattaaaaaaacaaaaaacaatgcagataacaccaaacattggacaatattaagaaaactacttactaatcttaggtaatagaggcaagggttaaggcgg

SEQ ID NO: 57010 - DNA, 871 bp, Homo sapiens
gcggcgattccgagccgacccccggctgcagcggccctgggtccgggcggtgttcgcggctttggcgacggcggtggagctccttcgtgggcccctgaggacgcctggatgggcacctcaccctaagtatctagaaatgatggaattagatataggagatgccacccaagtttatgtagcgttcttggtttacctggacctcatggaaagcaaaagctggcatgaagtaaactgtgtaggattaccagaactccagctcatctgccttgttggtactgagatagaaggggaggggttacagactgtggtgcctacccccatcactgcttccctcagccataacagaatatttctcttagaagatgacatccatgtttcctgatgcttgttttattcatacaagattggatttgagacccatcagactgcttcatcttttatctcagaaatagggttgacgtacatagtgagggttgacttccccattccataaggttttcattctgaagagtaaaacttccccaggtagaagactttctccttcttaaaaaatatagggtgatttctttaaaactttgttatctagagacagtttaattacagttatatacaggtttatgcctaggatgtattcagatgggtgggacctgtgtgctgcttttgtcatcccacactcaaagttgtctctttgtttcttgctgccactgccagctcattgttgagactgccatttctttctcttactcagctctccccagtgccttttggccactgcagctaccgtagaatggcattttatatgtaccttgtcacccacttctgtttactttttcctctccagtaaaaagtaaaagatttctttcaattggtc

SEQ ID NO: 57011 - DNA, 448 bp, Homo sapiens
acgtcgaggggagaggcagcagccgcgatggacgtgttcctcatgatccggcgccacaagaccaccatcttcacggacgccaaggagtccagcacggtgttcgaactgaagcgcatcgtcgagggcatcctcaagcggcctcctgacgagcagcggctgtacaaggatgaccaactcttggatgatggcaagacactgggcgagtgtggcttcaccagtcaaacagcacggccacaggccccagccacagtggggctggccttccgggcagatgacacctttgaggccctgtgcatcgagccgttttccagcccgccagagctgcccgatgtgatgaagccccaggactcgggaagcagtgccaatgaacaagccgtgcagtgaggacccccaagaggcccatttcccccaataaaagagatttgggagtctgaaaaaaaaaaaaaaa

SEQ ID NO: 57012 - DNA, 943 bp, Homo sapiens
  misc_feature (1)...(943): n = a,t,c or g
tgcaggcctcttccgaccaaggtggattaccagtgattacctaattagttttgagagcgttaaatgagttcttaaagatcagttgtaattatagcataatatctaaacttggcgcgtgtcttaaaagttaaatattgagtacgattccgttccagttaacatggatagaccttagggagtagcgaaataggatgttagtggttttattcctttaaatcacatctcaaaaggccaccaatggctagtttgggatcttattccgaaaatagattgatcctcatgcagtcttcgtgaggacagagcgatttccttgttgcctaccctgtccatagtggcctggcacataggcactgaaacactgcatgttaatccacaccccaccccacctatgagtgtagtcaaagctggtaagtgacaagggctttcgtggaaacttggcctgacctaatgttgggcatcaggttacccaaagagcttcagggaaatgagaaaggacttgcaggtcttgatgagaatggaggggtaactgccaatgagggctttggctttagcgaaagtctgaaagggaagccataggaacttaaacgtaccgactataaagctctgagaaaagctgatgttttagaaagaccatacattctaggtacaaatacctaaaaactaaaaaataagtacgttggccaggcgggcggatcacnaagtcaggagattgagaccatcctggccaacatggtgaaaccccacctctattaaaaatacaaaaattagctgggcgtggtggcgcttgcctgtaatctcaagctactctagaggctgaggcaggagaatcgcttgaaccccggagggcggaggctgcaatnagccgagatcgtgccactgcactccaacctggtgacancganacncttgtctcaaaaaaaaaaagttcctttnctaaannaaa

SEQ ID NO: 57013 - DNA, 1687 bp, Homo sapiens
ggatatgacctagcccttttaggtaagcgtactggtatgttagtaacgtgtacaaagtttaggttcagaccccgggagtcttgggcacgtgggtctcgggtcactggttttgactttagggctttgttacagatgtgtgaccaaggggaaaatgtgcatgacaacactagaggtatgggcgaagccagaaagaagggaagttttggctgaagtaggagtcttggtgagattttgctctgatgcatggtgtgaactttctgagcctcttgtttttcctcagctgactccatattttcctacttgtggcagcgactgcatccgacataaaggaacagttgtgctctgcccacaaacaggcgtccctttccctctggataacaacaaaagcaagccgggaggctggctgcctctcctcctgctgtctctgctggtggccacatgggtgctggtggcagggatctatctaatgtggaggcacgaaaggatcaagaagacttccttttctaccaccacactactgccccccattaaggttcttgtggtttacccatctgaaatatgtttccatcacacaatttgttacttcactgaatttcttcaaaaccattgcagaagtgaggtcatccttgaaaagtggcagaaaaagaaaatagcagagatgggtccagtgcagtggcttgccactcaaaagaaggcagcagacaaagtcgtcttccttctttccaatgacgtcaacagtgtgtgcgatggtacctgtggcaagagcgagggcagtcccagtgagaactctcaagacctcttcccccttgcctttaaccttttctgcagtgatctaagaagccagattcatctgcacaaatacgtggtggtctactttagagagattgatacaaaagacgattacaatgctctcagtgtctgccccaagtaccacctcatgaaggatgccactgctttctgtgcagaacttctccatgtcaagcagcaggtgtcagcaggaaaaagatcacaagcctgccacgatggctgctgctccttgtagcccacccatgagaagcaagagaccttaaaggcttcctatcccaccaattacagggaaaaaacgtgtgatgatcctgaagcttactatgcagcctacaaacagccttagtaattaaaacattttataccaataaaattttcaaatattgctaactaatgtagcattaactaacgattggaaactacatttacaacttcaaagctgttttatacatagaaatcaattacagttttaattgaaaactataaccattttgataatgcaacaataaagcatcttcagccaaacatctagtcttccatagaccatgcattgcagtgtacccagaactgtttagctaatattctatgtttaattaatgaatactaactctaagaacccctcactgattcactcaatagcatcttaagtgaaaaaccttctattacatgcaaaaaatcattgtttttaagataacaaaagtagggaataaacaagctgaacccacttttactggaccaaatgatctattatatgtgtaaccacttgtatgatttggtatttgcataagaccttccctctacaaactagattcatatcttgattcttgtacaggtgccttttaacatgaacaacaaaatacccacaaacttgtctacttttgcc

SEQ ID NO: 57014 - DNA, 2256 bp, Homo sapiens
gcttttttaaccctttaggtatctgatcgctttgccaattttgcgttactgggcaggctaagagatcttcttttaattcagcctgcttaagacgggaactgataactgtagtgtatcctctgccttttttcttatctattggaggaagctcagatggtgtcacaagaaggatctgaagtggagcttctagtatccccaggagcgcgaagtgaacacggaaggtacctgcaggatccaattgtgtccattgatctctcagagtggctgaggataatagagtttcttcttcaaggtctcaaggtctgaagcatcccacagaatgatcctactgaataactcccataagctgctggccctatacaaatccttggccaggagcatccctgagtccctgaaggtgtatggctctgtgtatcacatcaatcacgggaaccccttcaacatggaggtgctggtggattcctggcctgaatatcagatggttattatccggcctcaaaagcaggagatgactgatgacatggattcatacacaaacgtatatcgtatgttctccaaagagcctcaaaaatcagaagaagttttgaaaaattgtgagatcgtaaactggaaacagagactccaaatccaaggtcttcaagaaagtttaggtgaggggataagagtggctacattttcaaagtcagtgaaagtagagcattcgagagcactcctcttggttacggaagatattctgaagctcaatgcctccagtaaaagcaagcttggaagctgggctgagacaggccacccagatgatgaatttgaaagtgaaactcccaactttaagtatgccccagctggatgtctcttattctgggctggtaaatgacaactggaagcgagggaagaatgagaggagcctgcattacatcaagccgctgcatagaagacctgccagcagcctgtatgctcggcccagagggagtcccggtctcatgggtaaccatgggacccttcttgtgaagtaggaatggcctacagcatggaaaaataccgaaggacaggcaacatgggcacgagtgatggtgcgatacatggaaatatctgcgtcagaaggaatatttccatttttacatctctgtgttggaagaaaatgaagactcccgcagatttgtggggcagtttggtttctttgaggcctcctgtgagtggcaccaatggacttgctacccacagaatctagttccattttagacaatgaagctgcttagtaatctctgccaagccatctcttaatattaaagcagacaccacagaatagatttcttcacttacaaatgcatattgggcacttataatacagcaggaactcttctcacctggagccttgatgttaaaagacacagccatgctcttgaggagcttacaatcctggctggaggcaggggagggtatattctttaaatatgcttaagtgttatagggaaagacggggttaccagtaaacatgtaactagaaagccaggctcagttcttacctctgggaatcagaactctttatgcaacttggttaatagaatctactatctggaagataaatgaaggattttaataaaattttcaatagaataaacctaatctgtatggatactttatcaaaaatgaatgtccctgctatttctggatttatgaggcaatggtacactaaagaatggaatcagttcagtgagtagaaaggtatccaaggtgaagcctgagacgaatggctttcccaggctaccttccatcactgttgtacagaaaagaaatccagagaatcaaatggactggcccttgggggtctctgctatggaaatgccattttttgtgtctcctttctcctactctttctcacatcctcttcatgattgaagcatggcacaaggcaaggtgttgcctgcgagtctggttgtaagttcagcctttggtgtttgcactactgctatcataaggggtcagggacattccggggagaagtgaccactaaggtgaggattagagagtgagtagaagtgagcccagacaaaaaaagccagaaaatgccagatgatggaaaggacatgtgccatgcactatcataagaacttcctaactgaacactgatactacaattctgaatccctgatcttaaaaaataattatacttcaccaacaaaacttggcctcttttggttccactctgccaccctgccattggaacttggattactgtgaacattgcagctatagcaaaat

SEQ ID NO: 57015 - DNA, 1892 bp, Homo sapiens
ctgaggcccacgcagggcctagggtgggaagatggcaggtgggggcggcgacctgagcaccaggaggctgaatgaatgtatttcaccagtagcaaatgagatgaaccatcttcctgcacacagccacgatttgcaaaggatgttcacggaagaccagggtgtagatgacaggctgctctatgacattgtattcaagcacttcaaaagaaataaggtggagatttcaaatgcaataaaaaagacatttccattcctcgagggcctccgtgatcgtgatctcatcacaaataaaatgtttgaagattctcaagattcttgtagaaacctggtccctgtacagagagtggtgtacaatgttcttagtgaactggagaagacatttaacctgccagttctggaagcactgttcagcgatgtcaacatgcaggaataccccgatttaattcacatttataaaggctttgaaaatgtaatccatgacaaattgcctctccaagaaagtgaagaagaagagagggaggagaggtctggcctccaactaagtcttgaacaaggaactggtgaaaactcttttcgaagcctgacttggccaccttcgggttccccatctcatgctgggtacaaccccacctgaaaatggactctcagagcacccctgtgaaacagaacagataaatgcaaagagaaaagatacaaccagtgacaaagatgattcgctaggaagccaacaaacaaatgaacaatgtgctcaaaaggctgagccaacagagtcctgcgaacaaattgctgtccaagtgaataatggggatgctggaagggagatgccctgcccgttgccctgtgatgaagaaagcccagaggcagagctacacaaccatggaatccaaattaattcctgttctgtgcgactggtggatataaaaaaggaaaagccattttctaattcaaaagttgagtggccaagcccaagcaagaactcatcataaccaggcatctgacataatagtcatcagcagtgaggactctgaaggatccactgacgttgatgagcccttagaagtcttcatctcagcaccgagaagtgagcctgtgatcaataatgacaaccctttagaatcaaatgatgaaaaggagggccaagaagccacttgctcacgaccccagattgtaccagagcccatggatttcagaaaattatctacattcagagaaagttttaagaaaagagtgataggacaagaccacgacttttcagaatccagtgaggaggaggcgcccgcagaagcctcaagcggggcactgagaagcaagcatggtgagaaggctcctatgacttctagaagtacatctacttggagaatacccagcaggaagagacgtttcagcagtagtgacttttcagacctgagtaatggagaagagcttcaggaaacctgcagctcatccctaagaagagggtcaggtaaagaagattaggatgccaagacttggcctgcagaatgtcaggaatgtgaattaaaagctgctgtttcccagacgctttttattctgagcaccttcactaccttgtatccagttcatctgggaactcctttttgcattttagaaaatggaaagaggcaggaaattatgataaactcatgtttaacagaaagagtttcactgactaaatgtatgtaattatattttgttgttgtagaagaaataaatagcaaatttgtggtattcttttttttaaacctgctctcattcctattaacactaagatcttagatttttatagtgataaatgggttgacatcattgtcgtttgtaattgtaaagcctcaaaagacaactgttcctactatgtaattatagacagaaataaaaacttcagatcaaacactctc

SEQ ID NO: 57016 - DNA, 731 bp, Homo sapiens
cccacagctttgacatcattacgaatttaatacgactcactatagggaatttggccctcgaggccaagaattcggcacgagcagcgccgtaatggcgttcttggcgtcgggaccctacctgacccatcagcaaaaggtgttgcggctttataagcgggcgctacgccacctcgagtcgtggtgcgtccagagagacaaataccgatactttgcttgtttgatgagagcccggtttgaagaacataagaatgaaaaggatatggcgaaggccacccagctgctgaaggaggccgaggaagaattctggtaccgtcagcatccacagccatacatcttccctgactctcctgggggcacctcctatgagagatacgattgctacaaggtcccagaatggtgcttagatgactggcatccttctgagaaggcaatgtatcctgattactttgccaagagagaacagtggaagaaactgcggagggaaagctgggaacgagaggttaagcagctgcaggaggaaacgccacctggtggtcctttaactgaagctttgccccctgcccgaaaggaaggtgatttgcccccactgtggtggtatattgtgaccagaccccgggagcggcccatgtagaaagagagagacctcatctttcatgcttgcaagtgaaatatgttacagaacatgcacttgccctaataaaaaatcagtgaaatggtaaaaaaaaaaaaaa

SEQ ID NO: 57017 - DNA, 3807 bp, Homo sapiens
tttttttttttttttcacattataaaccagccagtttattattttgtagtaagatttagaacttttaccatgcagactgaaatatctgtgtcagcatgaacagtacattttcttcctagaggcagttacatggaaaaccaggttattatcaggttatttagcaagtatggaatccaaacaagaggagactaatcttaagacctataactcgtccatgaaggcttggggcacacttttctaccaccagaatgccttagcttccagaaagctgtggactcttccctctccgtcttggtctggctgagtacccgctactgctcagtcacttccctgcagccataccgtcaggccagcttggcctaaaagctgttatctctggtcactggtttgtgttgttacagccactgctactaacagttaaggttctgaaggggggcatgtcaattgctcccaggtaccaactaggagacacaataatcctattagtttgttctcccaaacccactccagtttatcaggtaatatgctctgtaaggttctttccaaccccattagcacatacatagattacctataatttcacctaatgtaatctaccttcctactgaggattgaggttttaacgtttgttttttttccccccactttcttgatcagtgattctcaaccatgtaggaattaatgaaaccaattctgtatcaccactgcaaccaagacagcaataccaagtgatatgtatttttcaaactaatgtcattttgttctctatactgtaaaaaacgagaagatgcagtcctcaacttagaactcaatactaggaagggtcaagttgtcaaaaaatgtctttcaacagtagaaaagtttgctttcaaattaaaaaacaaagcacgtattgcaaacatcgtgtaatgataaaattacagaaaaaaatatattcagaatgacccatggcattcacgccataccagaattttgcctgtaacaaaacagagaattttatcccaaaaagtaggttaggtccatgctggctaaaaacttcagtcccagacccaataaatgaggatgaaatacatagtgcatgcttaacagacattgcatatacatcaacaattctttaatgcccctctctagggttttgagggaaggagggatgaaatgtggacatgtgcactcacaaaggcagaattttcttcctattataaaaagtcacacgtgaccctttactatgttttgggcaatagccaagattttatctgtgggaatccacctttgaaaatcacaacaaaaatcaatagtaagtgatttaatataaaatatacaaatttctcagtatgaggactttcacagaaaaggaaggagacaacaatgaaaatgaattttcttaaaaaataacattcccttattttgtccctgctactcaacactcaaaaacaagtctgtacaaaactaggaacacagaaaaggaccagagaggatgttacactgtaaagtcttaggacctactctaaacttctgtcctcatcaagaccctcacctagagacctgagggttcccaggtccactggagaaagtaagtagtctccgatcatcacccttgcttcaccgaagatggcctcaggtcactcgctgtcaaacttaatagaattgacctggacagagattgagcctccccggtagctgccccgcttcttcttggttttctcatgccgaaaggacttgcctttggtgaacttcaaaacctgattggctcgctctccccagtctccggctgcacctcgcttggcatcaaaggagttgtccgcaactcgtgaatccacctcaatttcctcctccctgacccttcggaatggggatgatgcccttttttctcctttcttcctttttggaaatgtgttaggggtctgaagctttatcttcttggcctgaggagtctctgcctccttggcagcctcattctgcttccgcttctttaatgaacctgatttggaaactaccactgccgcctttttcttttcttcttcctcctcctcactgttcttagctgcttttccattctgggcagtcagtgcagaggtgccattggccttgggggcttgtggtcttggagagcccttgcccttgagcttctcttcctcttcctcactggagtcatcagaagaagaactgttgctgctctcagcctttcctttctttgcagaggctggcttggaaggggctgcacctcctgctaccttctgtggcttcttcttaactgcagacttagatgtcttctcttcctcctcctcactgctggagctgtctgaatcagagctgctgtccctactaccctgaggagcctgcttggcaggcagaggtagagctgctttggcagtcgccttgggcttagtggtggccaccatcttctttgtcttctcctcctcactggagctgctctcttcctcactggagctgctgtcagcctttctcgtcagaagcttctggccaccgcccacaggttgcttgggggctgcagctggcttcactgcaggtgacttggtggtgacagctggcttatttgaagaattcttggtggtaccagctggcttagaaggagcttcatcatcctcagagctgtcagagtctgagctgtctgaagagctctctgctgctttctttgctggaggtggtttagtggttgctttagagactactgccttagttgggggtttcttctcttcttcagaacttgaatcagactcatcactgctgtcttcactgctttccacaggctgctgcttctccacagccttcttgggaggctgggttcccagagacttctttggtgggggagcagaaggcggggggactgaactgtagggacctggtttatttttcatgggttttttttgctcctcttcctcgtcactggaggaatcctcactgctagaactcttccgggtaggggtggtagctgctttcactggggccttggccacaacttgctttttaggtacagtctctgccctgacagaagttatggtccagaccttcttgggggtggctgctgccttctcctcctctgagtcatcactgctactgctgctgctgcctgctactgctgctactggctgctttaccattggctattttaggtgctgctcgagctggtttgggaggggctttagtctgagctttaactgtcacaggtgttatctttggcttctggttctttggtggctcatcctcggagcttgagtcagaatcagaatcagagctcttggccttcttaggaggagctttggctgccttggcttggggcttaactcccttctggacaggctgtttcttttggtcctcctcatcatcatcatcactggactcttcactgctgctactctctgatgctttggctgcagccttcccaggaggcagaccgactcgcttggcaggtacagcagccttctttgctggaggcccttgaacttcctcctcctcctcgctgctgtcctcactgtcactggatgaggccttcttcttagctttcttagccactggtccatttgcctgtaactttcgctctgggaccttggcagacctgttgagccagaagctatagatgtctaagagggaagaggcattggcatcctgctgtgtagctcctgtcgctttggcgaacttattggccacctctgagagttggttatcgcgcaggaagccgagcacgaggggatacaggtcgctgggaaccacgcggcgaatgccggcgtccgccatcctccaggcaatacgcgtcactaccgttgtcgacgcagcacgacccacgaattc

SEQ ID NO: 57018 - DNA, 1356 bp, Homo sapiens
tttttttttttttttttatctttctgaatattttattagggcaaaacaagatatttgcatgggatgcttcttaagtcatctcaagtagttccccttcagttcttaacatgcactctcaaaatcaacacacctaccccaacccaatactcatcgcttcacagtcatccagtaaagtacaaaataaaaataaaaaaatcatcatctggcaaaaaagggaaacagggtaagagagagtgacattttaacacattactaaaatgtttaagcttttatttacacatccccttctctcagtttcccaggttatatgaacattacagcaatagaaaggggttatcatcacagcatccccttgcaaattccagtttacaggtaacttggtcaggggaaaaatatgggtcaacgaagtaagatctcagctctcccataagctattgctctcttcttctctttcccccttctcttaatgttagctgcctgttacagagagggatcatcaagactgtgtggacatgctagctgaattgacagggtgggttccagtgtcctgtgaagaaccagcaaggatgctttttataattccaaccattggcttcacatcactgaggtaacaagacttaatgttaagggtaaagacaccacgccaccctagtcagtgacatgtactccactttccaggaagacctgggccaaatgaccaagctttgcaaaagaaacctgggaagagcgttggaaaaagcagactctgagttggcttgagtctcctcgtgcatagaagcattcactcatccatgcagatggcaacaaggcaggacactcagaaagcataagatcaaggtactgctcttatctgcacctttcattcaagctcccctcaagtgctcccaaaagaacagagctttgggtattgcttcattaagaacacagtaactgcagtttaaaagccattgcattctttagggtcagtttattaataacttatccctacccagaaagaatcacagtttaaggccatttatcatgtgcactatgtagtaaacaaaaccttgtccccagctccaccaagccactcccaagggtggactgtgaatgtgacacttccagactcaccagagattagaaaaaacatttctattagggtcttaacctagcccctttggtttcctccctagaaaagagctgcttagaaaacagatgtcactggaaatgacaaaaggaacaacagtattttctatacattaaaagcaaagggatcattggctagcactagcatttattctgtgtgatagggaagccagccctctaatttggctctctggctgggcacatggcaatggctaggggcctgggcacacc

SEQ ID NO: 57019 - DNA, 2396 bp, Homo sapiens
ttccgtcgcaggcacggagcgaggagcagcccgcgccctccgaggtcagcgtcatgaggagcctgccgttcttctgccgcggccaggtggtgcggggcttcggccgcggctccaagcagctgggcatccccacagctaattttcctgagcaagtggtagataatcttccagctgatatatccactggtatttactatggttgggccagtgttggaagtggagatgtccataagatggtggtgagcataggatggaacccatattacaagaatacgaagaagtctatggaaacacatatcatgcataccttcaaagaggacttctatggggaaatcctcaatgtggccattgttggctacctgagaccagaaaagaactttgattctttagagtcacttatttcagcaattcaaggtgatattgaagaagctaagaaacgactagagttaccagaacatttgaaaatcaaagaagacaatttcttccaggtttctaaaagcaaaataatgaatggccactgatgaaaaattgtattatttattcattcactgttttctagtgtttctgtgtttattactggttcagcatcatcctggttatatactgaaaatcaaacactttactacagttgtgaattagtttaaaccgtacaatgttgttatcatatcatgcttcaactattaaattaagcccatcatatcatagcactaaaaagattgagttaaaaataagatttaaaaaatatatattgattaaaatgtaccactagaaaggtattacatgtgtataagtatgggtaaaaaggcaagtcactagtttgagatgaaaactaaaattttcatggtaaaatgccagcatgtatgtacttgtgtagtgtgtacttctaaacagagaaggcttataaaagtaaatgcattaaggccaagtgcagtggctcacaccggtaatcccagcactttgggaggccgaggtgggaggattgcttgagctcatgagttcaagaccagcctgggcaacatagcgagactccatctctataaataaaaaaaaaggaaatgcattaaatagaaggttgatagtttatcataaacctgcggggaagaaactcagactttctatttttgatattttgtgcattaatacattacaaacatgaagatgtttgtaaagttttgttttagtcattttctttgcagtcacatcattgtaccaccttcattattgtatagagctgcttcaattctgagtcctctggacttcccctgcctatctgtttgttgttgttgttgaagacagtaaaataagtgttttcaaatctatatgtctcctttttgttggataatgtttcttctttttaatggtaaatattcttgttcttcaacatttttctttggttcttttttccttttttaggaaaaacaaaacaacagacttcatccttaggttttctcaagatttaagtgaacacatttacacatatcaatttcttaaagaacacaaaatgtttcctccctagcaaaactatttaagagccaattaaactatgaaatagttataaaattatttttaatatttaaggccttgaaattatattccaaggcaaatctaaatgggtgtagttgtatatgcacgatgtaatttaatgctaaagagtacttacagcttgagggaaaagcataaagttttagttaaatagccttcatactgtggatttttcctcctactaactaatatgtgggaaattaagattacagatgctttgggccccctcaaacagtacattgctacagttcactgtagcaacagatttggtggtgatggggggatagaggtagaagcagatagaaggtaattttaaagttaatttattatgaatcattttcccctaatctggcataaatgaattagaactgattttaataaaaatattctgtgtaaaaagtactcagaaaaacatctaaagctgttggagaagagggactcatataaatagttggattgcgttttgctttttatttctttataaaaatatgtcaaaaacagtttttaattttagaaatcttatacttgaaagaaacctcaattatcagtggctttatgaagtaaagttaaaaacaaacataggaaatgtgaaaatatttgtgtttgttttgtctgactaacttgctgctaaatgctatctttaggtgtgtgaaagttctttgatatgttattgtccttttacatcttgttaaatagccattgcttttgagaatcagatagtgtgttgtttaggggttaattgtgtctatatctttcaaaaacttttatattatgtattataagaagttacagtagtaccattttgattagtctgaatgttttcaggccttgaaataaattttgactaagtgaaa

SEQ ID NO: 57020 - DNA, 3080 bp, Homo sapiens
gaagctggactgcagctggtttcaggaacttctcttgacgagaagagagaccaaggaggccaagcaggggctgggccagaggtgccaacatggggaaactgaggctcggctcggaaaggtgaagtaacttgtccaagatcacaaagctggtgaacatcaagttggtgctatggcaaggctgggaaactgcagcctgacttgggctgccctgatcatcctgctgctccccggaagtctggaggagtgcgggcacatcagtgtctcagcccccatcgtccacctgggggatcccatcacagcctcctgcatcatcaagcagaactgcagccatctggacccggagccacagattctgtggagactgggagcagagcttcagcccgggggcaggcagcagcgtctgtctgatgggacccaggaatctatcatcaccctgccccacctcaaccacactcaggcctttctctcctgctgcctgaactggggcaacagcctgcagatcctggaccaggttgagctgcgcgcaggctaccctccagccataccccacaacctctcctgcctcatgaacctcacaaccagcagcctcatctgccagtgggagccaggacctgagacccacctacccaccagcttcactctgaagagtttcaagagccggggcaactgtcagacccaaggggactccatcctggactgcgtgcccaaggacgggcagagccactgctgcatcccacgcaaacacctgctgttgtaccagaatatgggcatctgggtgcaggcagagaatgcgctggggaccagcatgtccccacaactgtgtcttgatcccatggatgttgtgaaactggagccccccatgctgcggaccatggaccccagccctgaagcggcccctccccaggcaggctgcctacagctgtgctgggagccatggcagccaggcctgcacataaatcagaagtgtgagctgcgccacaagccgcagcgtggagaagccagctgggcactggtgggccccctccccttggaggcccttcagtatgagctctgcgggctcctcccagccacggcctacaccctgcagatacgctgcatccgctggcccctgcctggccactggagcgactggagccccagcctggagctgagaactaccgaacgggcccccactgtcagactggacacatggtggcggcagaggcagctggaccccaggacagtgcagctgttctggaagccagtgcccctggaggaagacagcggacggatccaaggttatgtggtttcttggagaccctcaggccaggctggggccatcctgcccctctgcaacaccacagagctcagctgcaccttccacctgccttcagaagcccaggaggtggcccttgtggcctataactcagccgggacctctcgccccaccccggtggtcttctcagaaagcagaggcccagctctgaccagactccatgccatggcccgagaccctcacagcctctgggtaggctgggagccccccaatccatggcctcagggctatgtgattgagtggggcctgggcccccccagcgcgagcaatagcaacaagacctggaggatggaacagaatgggagagccacggggtttctgctgaaggagaacatcaggccctttcagctctatgagatcatcgtgactcccttgtaccaggacaccatgggaccctcccagcatgtctatgcctactctcaagaaatggctccctcccatgccccagagctgcatctaaagcacattggcaagacctgggcacagctggagtgggtgcctgagccccctgagctggggaagagcccccttacccactacaccatcttctggaccaacgctcagaaccagtccttctccgccatcctgaatgcctcctcccgtggctttgtcctccatggcctggagcccgccagtctgtatcacatccacctcatggctgccagccaggctggggccaccaacagtacagtcctcaccctgatgaccttgaccccagaggggtcggagctacacatcatcctgggcctgttcggcctcctgctgttgctcacctgcctctgtggaactgcctggctctgttgcagccccaacaggaagaatcccctctggccaagtgtcccagacccagctcacagcagcctgggctcctgggtgcccacaatcatggaggagctgcccggacccagacagggacagtggctggggcagacatctgaaatgagccgtgctctcaccccacatccttgtgtgcaggatgccttccagctgcccggccttggcacgccacccatcaccaagctcacagtgctggaggaggatgaaaagaagccggtgccctgggagtcccataacagctcagagacctgtggcctccccactctggtccagacctatgtgctccagggggacccaagagcagtttccacccagccccaatcccagtctggcaccagcgatcaggtcctttatgggcagctgctgggcagccccacaagcccagggccagggcactatctccgctgtgactccactcagcccctcttggcgggcctcacccccagccccaagtcctatgagaacctctggttccaggccagccccttggggacccctggtaaccccagccccaagccaggaggacgactgtgtctttgggccactgctcaacttccccctcctgcaggggatccgggtccatgggatggaggcgctggggagcttctagggcttcctggggttcccttcttgggcctgcctcttaaaggcctgagctagctggagaagaggggagggtcccataagcccatgactaaaaactaccccagcccaggctctcaccatctccagtcaccagcatctccctctcctcccaatctccataggctgggcctcccaggcgatctgcatactttaaggaccagatcatgctccatccagccccacccaatggccttttgtgcttgtttcctataacttcagtattgtaaactagtttttggtttgcagtttttgttgttgtttatagacactcttggggtgtaaa

SEQ ID NO: 57021 - DNA, 837 bp, Homo sapiens
ttttttttttttttttttaagaaaggatgtttattcaggcctgatgcctcgatacagctagatgtacaaaaatatatcattcaaagtcatgaaaaccatcatcatattggtgtgacctccttcctccccttgggcacagcttttgcaactacctcctttgaaatctgggagttggtggggcaagggtcacttcttggcagcttcttcttgggcagccaaatctgcctccttctgagcagccagggaagatggctcgttccttctggaaagctgcaagctcttctgaactgaggtccttcaccacgcgaatgcccagagaacgggcagacccgatgatggagcggacaacagacgacaggggtacatcctgcagggcaaatgcctcatcctgagctttgatgcggggcaatctcatacacatgcttcaaggtcaccaggcctgccacctctttccctgtttgccgggcccccttttcaatcccagctgctgccttcaggaagtaggaaacagtgggctgtccaatcttaatttcaaatgtcctgtcaggcttcactaaaatcttggtaggcagaggaatgccttccttgatgtcctttgtcctctcattgaactccttgcaaaactggttgatggaaacgcctctctgacccagcactgggcctagtgggggcccgggcatggccaggcctgcccgcacgatcgcccggatcacaccgccgacctcgggcttcctgaggccccgggcggcccggccgagctttgacatgatgcggggctgctggcttcagttcacctcaggggagcagcaagagcgaagctctgggcgccaccatctc

SEQ ID NO: 57022 - DNA, 1348 bp, Homo sapiens
ataagagctcaaatttggaggatgacgagatagctgcctctgcctttgccggtgcagtgagagcagcttcaggaatcttatggcctctgaatattttggcatcttcaacctaccgcaactgtgtcaagaatgcctctcttatttctgcattgtccactggacgttttagtcatattcagacaccagttgtttcctccactcccagacttaccacatctgagagaaacctgacatgtgggcatacctcagtgatccttaatagaatggcccccgtgcttccaagtgtcctgaagctgccagtcagatctctaacatacttcagtgcaagaaaaggcaagagaaagaccgtgaaagctgtcatcgataggtttcttcgacttcattgtggcctttgggtgaggagaaaggctggctataagaaaaaattatggaaaaagacacctgcaaggaagaagcgattgagggaatttgtattctgcaataaaacccagagtaaactcttagataaaatgacgacgtccttctggaagaggcgaaactggtacgttgatgatccttatcagaagtatcatgatcgaacaaacctgaaagtatagatcagaagtttcacttgtttctcagttattggatatgtatctttgtgtacatatctttgcaaaaatggataagtacaaaacttgatgtaaattgtaccaatgaatacgtaaacatacagtgacaacattaaacttagaaaagttttaaaacttaatggatcagactttgccagatttggttagggaaacaaatttagaatggtgcattatttttaacaaatggtattggcttaactagttgtttcagttatgctcttttagttgcaaggaatctcaagtgggacaaacataaaaagactcaaaagctacaagttagctcaagcaatgtgacattatttcaaggatatgtgccggggaattcaggaaccacctcaccaaccccatctcccactcagaaatcacctcccagcctcaggaagagtagaaattgggtggtgctcctcagcaggggaaggtggatgtttaggcttgggctctgcatgcatgtgacttgcttctttttgcattgttaactccattctctctattcaccaacttctctacacagcttttgcatacttacagtttctgttcctttgtaataactttaacttgcacctttgaggttcttttctacatgatgaccttcaggctcctgctgctagtctccaattgccaagggaatttaactgggccagactacctttttatactaggtctggttgggtcattgtctagagtagggattggctgtccttaagtcaggagcccgc

SEQ ID NO: 57023 - DNA, 1132 bp, Homo sapiens
ggctcagtgtatcttttaggtcactaaagaggacacatcagtaaataaattgttttcagtgtaatatttttacataaaaatagatttcccccccaaaatttaagatttatttagattcttgagacatctttttatgaaaaggaattaataacatacatcatcaaaacttttcttaggggcgttgaaacaatataagaaggttacagaaggccttctaaaatatgaattcccatctgtatgaggtacttctttccaactcagtgactttttgcccagagacttggaagactgggcaatgttttctttcccctttcccaactcctggagacaaggccctaggagcaatttcctccagtagggcaggccgtagtcctgctctgtcttacttcccactgcagcaggaacatgtcctcgcctctgattccttctgtaccaagccattggtccattgaggtcaattgaggactcactgtaaattttaaatctgttaataaagcaaggatattggcatgttcctcttctcatcaatatcctaaaagacatttattttttacacactccttgggaaaaattaactttttttcactgaaaatatttccttttttggttatcttgatctcagattattttgtgaaagaattttactgtacttagttcaaaagagtagaaagaatgatttactattgcagacatatgtagggtaaaatcataatttatttaaactgactgtacaacaccatttagagttgatattgacataaatgttattagcctactaatttggaactgcatttctcaacaatgctggcaagcatcttccgtacttagcataccaagttgtaggggagagactgtgtatatattttttaaaagcaatccaatggatttgtttttgttcatattttgaaaacaactcgaaggatttttcttattttagaaggtagaaaatatgtggacctgtgttttaaattaatatgtatttataaattataacattgaatgatacaacagagctctaatattgatgttctcactttctgatatttaatttttataaatgtttttgtaagtaactaattgtagtattgcttttaaatagttttaaaatctatctcaaataagttctgcccag

SEQ ID NO: 57024 - DNA, 1597 bp, Homo sapiens
ccgcgccggtccgaagcaaagctaaatgtaattttatgtactgttttaacagtataaacctatgggataaaggcccccaatcatcagaaggactactgaaaagaaaagaaagcaaacgtagatgtcaaattgtctaaacattcttaagtaccactgattttttttttctggactattatacaaagatgtctgtaaaaagtataccagtggcttttatgcatatacacgattaggctagattgtgaagtacatgggatttcatgagccagaggaggcatttggatccattgggccacatgtgactataagcacattgtgtacacaataaaattgtagccactcatgtattaaaactgttttggtaaaagctgtattaaaagaataattttttgcttgagctacttagtcacttttttgcagggcaccaaaatgtaggctacttttccatagcttggttgctatgtttttatttcatcttaaatctgagccatttttggcaatatcttttaaaaaatcattattaaacatttattggaaatgttgtatagattcacaagaaagagacaccaaagtgtttgggaattttaatcccaagaagtaaacatcccagagtcagatcccatttgctgttgttcagccatgtttgtatgactgaatgtaatttaggaaatcaggagttagagatgaaaaatacaaacatgtcaaatggttgtaattgctttttttgaacttactggctttaacttaagtaatataggtgtgtagttgttttatctaaagatgtcagattatctgtggccctgttaattaactgcagggaccagagagaggacaaaaatgcctgtataatttgctttaaaggcttgtccttatgtttgtaatttcagttaaatattttctacagattgcttcacttcccctttcccccaataacaagttcatattcttgtaatgtttactttggtcaacgtggtaatttttggaagaaaatgccaaaatgtaagcttctcacaagcagcaaaggaatgtaactgcctgtagctaccacatcaagggagagaagaggcttgcgtactttgggttgatctcactgtacaaaaaaagtgtacccctattggaagaaataaggaatacttgaaggtttctcctttttttacacttgagtcatgtgcaaggttgaaccatatgaaattgccagtgttcaaccattgctgatctgcaaaagcgacaatatcatatgcctcaacctaacacttactcttaaatgcaggttaaaatctctgtgaggcaaagggataatattctctaggaactcacttttgagagtatttttctctaacccatgtggatctaaattttaaaaataggaatgaatctcttaattgcagcttgtggagagtataaaacattttgagcacaatatgcagcacataacttttcagattgtgtttgccatagaaaaggttaaaatcaattctttcagttactgtattgttcatttcttgtaaaggtcttcctacatttgagacgagaccctttaacataggctgccttagtaacaaaataaaacagatgtgtccataataaaaaaaaaaaa

SEQ ID NO: 57025 - DNA, 2521 bp, Homo sapiens
  misc_feature (1)...(2521): n = a,t,c or g
attttttacaattgtaggcaatcaatcataaaacaggaatcccatacaatccctgagggccaggcattatagaatgggcacatcaaacattacaacgaatgttgaaaagacaaaaagggggtataggaggccaactaccacctcaatcaaaactacatttagccttatttactttaaaatttttgactcctggtacggatggtaagactccagcagaaagacattggcaagtgttagaggaaaagaggaaagtttatctgaaagtgttacggaaatccccagaagaaggacaatggaaaggcccggtggatttactgacatggggaagagggtatgcttgtgtgtttacaggagatggacaaaccgtgtgggtgccctccaggtgtgtgtgaccatggaatgggagactggaggaacccagggtggccaaccatgggtccggtccctctggtgtgagccatgagccagctgagcctgagtgcgaagacggagagaaggccgacttggagttcacgacacagtcttaatgttacatttgtaaagaatatcaccactcaatttgtggtttgtctttttaatccttatgtcttttttggcaactaagaaggaccagctccaggtaaacaatatccaattgacctgtaaatcttgccagttatgtcactgcattaatcatagcacattgcaaacatgtaatatctctactttgataattttgggtcgcatccctgggctatggattcctgttaatctgtccgaggcttgggctgccacacctgctttgcattttgtgaaacttcttctaactgagcttactcatcatgtctgtagagccttagacataataattttagctattgtttccttggtcgcactaataacttctgttgtgatgtcctctgtagctttgcataattctgttcaaacagctcagtatgtggaggactggaagcatgcagccaactaagcatggctacttcagtgtaaaattaacactgagttacaaactgaagtggtaatgttaaaatccatggttctgtggttaggggaacaagtacaaagcttacagttgcaacagcaattgcactgtcattttaatcacactcatatttgtgtaaccaacttagaatataaccaaagagtatccatgggaccttgtaaaagcccatttgcagggagcttccacatccaacatcacctttgatatcagtaacttacagagtaaaattcttaacttgaataagcaaactcaaaaataacagccctttttagaagcttaaacagaattccagcagggcttagaaagcctcaacccttggacctatctaaagtaccacattaacatcttatatgtagttcttggaataatgttgttttgtctctgtcttctgtttatagtctgtaaaatcggatggaccgccaatcggagaatgagagctgcccagcctggtcttacattctttcaattaattcataaacagggggatatgcagggagccgaaggcccatgggacgtgaccaactcagcattcnnnnnnnnnnnnnnnnnnnnnnnnnnnnnnnnnnntancatgaatacaggatgtgagcaaactcacgactgtgcctgccgccagaaggtttgctgagggcaatcgcttcctgacgccaagctctttgaagttatctactggaacatctagagaatgcagtcttgcaagcctactctggaccaaccaactgacctcttcttccaccccccttctcactatcgcttttctctaataaatacagagggccgtgtaaagctcagggcccttgtccactagaggcaaggtgcccccggaccccttcttccaaatatactcttttgtctcttgtcttttattcctgcgttcacccccctttgtttagtccacctaggtccgtgcaggttacaaatggcaaccagaacagggactccaagcacgcccaactagcagcatccaaacatgggacttcaaggacgtgaatgaagaaggtctgctggagcagaggaactgaaattgacaaggcgaaaggggaccctgggaagagtctgccggcagcagatataagtctgtaaaatcggatggaccaccaattggagaatgagagcctcccagcccagccttacattctttcaattaatacataaacagaaagggggatatgcagggagccaaaggcctgtnnnnnnnnnnnnnnnnnnnnnnnnnnnnnnnnnnnnnnnnnnnnnnnnnnnnnnnnntatcatgaatacaggatgtgagcaaactcaggactgctcctgccaacataaggtttgctggaggcaatcactccctggcaccgaggttatctactgcgacatctagagaatgcagtcttgcaagcctactctgaactgagcagccgaccccttcttccacccccccccaccctcctatctcttttgcctaataaatacggagggctgtgtaaagctcagggcccttgtccactagaggtaaggtgctccctgaccccttctcccaaatataaa

SEQ ID NO: 57026 - DNA, 1442 bp, Homo sapiens
tttttttttaaaaattttaaatcaaacactttatttccacataacaagcgcaaaaaactcccaaacactttaacaatacaattaacgcagttatggaattatatactactcaaagccccaaggtcagaaggtcaatcagcttaacgctccaaacatttccagacatggtttttcaaagctacctttggtttttggaaaaaccagtatggaagtcaatatacattgaacgcactgaataacatttgcttatagtaaggtgtccgacaacattagctcacacctggcaagttggagcatgatctgaagtcatacactgaaatccatacacaggtttcgcccccgagctcctgcagggagaagcgagggccgtgaagggggaagaaaaggccagtcccgggtgtggcgtttctcgctttgtaacagaggtatgagagtttaacactagtacactgtcaagtcattaagcttcatgttccacatggtttcttgctgaggcttgagatgggcacaaatggtggggaagatgaagtcacagaagagttttgagcaacaagatcccaaagatgctcagagagggtgggaaggagcaagctacagtttcccattgttctcacattatttcagggtgaaattgtgatgagttcagataaaatgttcaaatatttgcttagatttttaatcggttgctctatgagaaccctcatacatagcaactttgaaactttcattataaaaaagagcctacaaataaattcacaaaaaggagacaattaatgttgagcagccaaaaagtcatggtttattatatctgaagaaatttcataattcaaacacaaccaaactgtacattttacaatcacattctatttgtaaacagttaaaagccactgacttcttttgcatcttaggacacaaacagttagaatcaaggcaatgatatgatggcaaattctgtactgttaaaatttttacccttgtttagtctctcttctttgactaagcaagcattataataccatttgtgggcaaaaaaaggggggaggaaagaaagtttaaaatggtgtaactcgttagtttgcaacaacatttaaaattttctttatacaacaaacaactctgtaagcccaataccttggttacagtatgcatagttactgatttcggctttaaggtacaacagttaaacattaacacagtcacgagagagcagaaacatatggagccacttgatgggattacaaaaaattattacctattgattattagcaaaccatcatcactcactaataaaaagacagcatctgaaagcagaatgtcaaactccagctttaagcgtttttttgttttttctttttttttggcagagaaaattctttaacagagcaatatgtagtatcagtgctaaaagttggggtttatctttttttcctctaaggtcgagc

SEQ ID NO: 57027 - DNA, 764 bp, Homo sapiens
gaagaaaagtaaaccgagaacataattaggcatcgggcctaagtgtcctggggagattggaggggacggcagcgttctgcatgatggaggcgctgccgggccccgggtctgtgggggccgtgctctcagggcgtgtgcgggacgccacctgtgcacacctgctcagagcacggctcctcgcaggggtgaaggggcagaccaacgaaaccagatgagaccaacgacaccatgcgagacacgcttgcagacactgttgttttggaaatgtgcttccctccatctgaaatctcatccctccacccgcccactcgggcagctgtgctgtgggcagggcatgcgctcccctggctgagcaccccagagattctcctgcaccttcctcatgccgcacgctgctcatccgtctccatgtgtgtttagatccatgccattcactgactcacttaacacctgcaaaatctttaaggaaaaaagctgaagggtacgaccatgcacatatgtgacctggaaaatgcaaatttagatcttttatgatttaattattattgtttcccatagaagttccctccctttgaaattaatatataatgtataaattctgcactgagccatggcggagctgggcagcccctaggttagagtggagacggaggcccaggcgcaggggtcacacctcatctggtttccttcccatctcacagcttagcttgtgcttctcaacaccaagtctttaagagcaataaaaactacaccatgaaaaaaaa

SEQ ID NO: 57028 - DNA, 2073 bp, Homo sapiens
gtgaatttaagtgcagccacatactgttttttaaaccatatgttttaccactaatttcccaaagttataataaaatcctgaaagtaaaaatctactagaatttgctgtaaggcagactgttaaatgatagagaattatttcacattttaggcactgaaatgttgaggtttcgaggtatagtaagtatacaatgcacttcacttggatgccttttcatttttaggcagcctcaggagcaccaaaatacattggaattctaagtactaagatatatttgttccgtaatgttaaaagacattactaattatttggaaagagatggccaaaataatcaactctacaggcttcaagctggtgggggaatgctgttactcattaatgcttttttactgaatggtcggaatcacatatgcaccacacatactgatcttaagtaacattattttatagaactgtttaaatgggtttaaatggtgttctttagatgaaatgtgttctgttttgttcattgtcttaaactgaatagggctgaataggctttatgtaattcttcatttcatggtagagtttgatgctgtgtttaagtgggttcttgtttataggattttcaactacagtttgaatgccatggaggaatttgaataatatattaatgaaggacatattcttgtaatcacaaatttgcatttgctcaggtttcattgctgtgtgataggatttttcctctaacttgaaatttaaaaacttttatttcctattccttttgtcggtaaagcagtctgaatttggaacattttatcatggagtcaacagtgaagactaccagataattttgtattggagaagagggaataacagctaaattgtggatttcagtgctttacatggtgcctttcgagtcagcttttacattataggggcttgttatagtttagctaagatgaccacttaacagtttatacagaactcatatgtataaatcaacattcttaggatattatttatatcctttgaataaatccctgtgaagtttttcctccccactaaaatggtgcataataaaacatgaaatatgtagtatgcagatatcatttattagatagtttgtagtgtatacatttagaacatacttcttttgacaaagggtgatctgattgctaatttaccattttattctgtcaggtacaggtgaaacaaattctcatcttgaatgatcagatgcaaaatcatttctgaaccctagagcagaagttagaaataacaaaatggccgtttcaaccttgactggccaaaaataactaataaacttttttgttttaagtcaggcaagtgattttctacatttagcagtttgaaagtccagtgttaatgcaatatttctagtgagaaatgcttgttattaaaagcatgggagtgatagtgtgaaatggtggtgagtgcttctatcatattactgtaggtacttggactggtgcaaacttgattccttttcatccccctgtttaggagctattaaaatattactgttaaaaatccaaaccattctttgttccatgtaataagaaaatagccaaaatcactttagagcttctcaactatttatgaagagctatcctgcttttattgaaagtcactagagttgaatgtggtaagaaaccacttagcctatgtattggacgagaaaatcagtatcatgataaaattttgaattaagagaacccttgtagagtttttaaaaaatgatttattttcaattaggtttaagaaatctatgttatgcagggaggcatatcagatgaatgttgtagcagacaaaagttttaaatcgtgttagacttgaattcatcaattgtttgaatgagggtgggtgggtagaaggataacaaaattactgttagtgtttctttccttacggaaaaagatgtgaatcccagccttatttcagggaagcctttgaagctatgatggacataagtctaaattaaatgtatgtatgtttcattatattgctcttaagactactgaggtggcagtttaattccttaaaaacaataaaatggaagcataaatact

SEQ ID NO: 57029 - DNA, 1733 bp, Homo sapiens
gattcggcatgaggcacgcagccaacatggctccagtggcacagttgtggcggatgctggggctttcctgcggcatgcggctctgcaggacatcgggaagaacatttacaccatccgggaggtgggtcacctgagattcgggacaaggccacacgcaggcggctcgctgtcctgccctacgagctgcggttcaaggagcccttaccggaatacgtgcggctggtgactgagttttcaaagaaaacaggagactaccccagcctctctgccacggacatccaagtgcttgcattcacataccagttggaagcagagtttgttgggggtgttctcacctaaaaccaaggaccacagagggttaaggtgagctcatcgattcagcacccagaaacacctctgcacatttctgggtttccatctggccctacaagcctaaacccccacaagaaacagaaaaaggacactcagcttgtgagcctgagaacctggaatttagttccttcatgttctggagaaaccctttgcccaacatcgatcatgaactgcaggagctgctgattgacagaggtgaggacgttccaagtgaggaggaggaggaggaagaaaacgggtttgaagacagaaaagatgacagcgatgacgacgggggtggctggataacccccagtaacatcaagcagatccagcaggagctggagcagtgtgacgtccccgaggacgtgcgggttggctgcctgaccacagacttcgccatgcagaatgttctgctgcagatggggctgcacgtgctggcggtgaacggcatgctgattcgtgaggcccggagctacatcttgcgctgccatggctgtttcaagacaacgtctgacatgaacccgagtgttctgctcacactgtgggaacaagaccctgaagaaagtgtccgtgaccgtcagcgacgacggcaccctgcacatgcacttctcccgcaaccccaaggtgctgaacccccgcggcctccggtactcgcttcccactcccaaagggggcaaatacgccatcaacccccatctcaccgaggatcaagcgcttccctcagctgcgactctcccaaaaggccaggcagaaaaccaacgtgttcgcccctgactacatcgccggggtgtcaccctttgtcgagaatgacatctccagccgctcagctaccctgcaggtccgggacagcaccttgggagctgggcggagacgcttaaatcccaacgcttccagaaagaagtttgtgaagaaaaggtgaagagcgagttccccgcaggcaaattggatgggcgtctggccgccgtggagttccggtgacccatttccccagccgtgtcgtctccaggaccacccgatggaaataacaggcgggcttcacggtgcggctctgtccgcccattgccccgctgggtctgcagggaactggactgtcccatggcctgtgagcaccggagcgcctggctgcctgccaaggaagtgcaattgcataaaaacagaaagaacaacgccctggagccaatcttcaagaaaggaatttccaaaggataatatttttctaataaatgcggctgcaacctcctgtgcatttaattaaataggccaaatttttgctgcttaggtcatctcaaggctgatacttgagctgtgtgcccagagatcatgcatttagatttatatttttgccagaaaatacaaggttataataaaactaagaacta

SEQ ID NO: 57030 - DNA, 1623 bp, Homo sapiens
ttttttttttttggatggaatttttaatttatttatcatgtttgtaagttacagacatttatgttttcagcaacagtttataatagttacatctcatacttcaactattagaacagagagaacattaaagtacaaagaaagacttcaaaaatgaggttactgtgatgtatcataaaaggagttaaaattcaaaatatcaaagacctcacctatcggactaaacataaatcttaaaacctcctatggtcctctgagcctaaaattacaaaacttaggcaactgcttaaaccaagggatttaacggttctgtgttttcaaggtaagaaaacaaaaaatgctttggtaaactacctttaatactagtttaaatgtttctgccttgtttgtatctctcttgaaagactgtatataagtacaggcacagcatatatttgagaaaacatctcacaaatttcatttactataggtttctcaataatctttacatttaatcaatgagaaaagtgattcagtctcttgaattttaagttaaaaaaattaaaaagtatttccagggactcttaaagctctctcccaaagtataaaatattatgtactttcaaaatcttaagcattcacgttctttctgagaccaacgcaggatacaaacttactctcaacatagatgcttatgtgcttttgggcacacatagtcttagaacagtggtcaaacagctcacaggaccctgtactcctcttcatcctggactgtgacggtggccacagccagaccagccccctcccatctgccttccaggtcagattccctggcatttattaagctgtcactcttcaatgggttcttccttgggggactcaagctcattcaataagtctttgccagctgctccggcttttgaagcaaagagaactgctccctgcttaaaaccgaggttcttcaaactccgggcataatctgcatatatagcagtgatgagtttctctgtgtcctcagtgacttcaaatgctccatacttgaggcaagcttccacaaataaggctgctctatcaaagtatctcatgctgtgaagcgtctctgccacgctaaaaaagcagcccagagagaggagaaccaggagagcctttgatttctgattgacttgtggagaacaaaggtggtcaacccaccgccttaaaacatcggcacactcctcaggattcaaacggacttttgccagccatgcagcccgattccactcgccgtatgtctgcaggtagcggcaggcgtctgcagccttatctatcaggcagagcaactgaacgccctctgccaatttgccattggcaatcatattcgttgccaccaacttaatggtgctctgagaggggcctgacgaggtgacagtagtgactaaacaggctttcagtgaatcacagtaataatgctggttatctgcacttgtttccaacagcaactgcacagctctgtctgtttgacccaagagcagtagctggtctgtacatttccttgtatgatcataagttgaccgtttcacttcctgtagattaaccctttctagctgaaatttctgaaagtaggcattttcacagagcacgtcatagcatatatccagtgggttgctc

SEQ ID NO: 57031 - DNA, 800 bp, Homo sapiens
gggttgcagtgagccgtgattgcaccactgcactccagcctgggcaacagagcaagaccctgtcttggagaaaccagaattttggaagagcaaatggggctgagtgcagtggctcatgcctgtaatcccagcacttagggtgccaatgtggattacctgagcccaggagtttgagaccagcctgggtaacagtgagacccccctccctacaaaagattttaataattagttgggcgtagtggtgcatgcctgtaatcccagctactctggagacaggtggaggggattgcttgagcctgggaagctgaggctgcagtagccatgactgcaccactgcattccagcctggttgacagagtgacccttgtctccaagaaaaaaaaaaagcaaatgggattaaggactcatggaatgggaaggggaaggggagtcttactatatgtggaataaacttgctcagtgttgccacagagttacattaccaatgtgtagaagtcagaaactagacttctagtttggttcaacatttgagggttgttttatagccatcaaagtattcaagaggttggatggcactcaaaagattctacatgtctagaatcaaactcaaatctggcacgtaggtgcttcttagtaaatgcttaatgaatgccaccaactctgcaaagtattcattgattttgagaccttagtcatgttgctactaaaagtagggcatatgaccgcctaagaaacagaacttcgagaagtcctaacgtaaccacagtaaagcagactcccctttcagcaacctcaaagca

SEQ ID NO: 57032 - DNA, 2062 bp, Homo sapiens
ttacagaaaaaaaatttgaacaagtattggatttcttaaaatttacttaagggattagagctaatatataatagaacatttaatataaccatttggagttatgtcaacataaaaatagctgtggttacaattagcacatgcaattcactgcaaaggtaaaaatacatgctatactctagacaagccttccaaatgaagttagagtagatgggggtaaaacagcaagtgaacatgaaaggattgcacttaggaaggaaagtgggacatagctaggatataaaagaaacatacctaatgctagtcagtcactgcattgtcctactagcaaattgcacatttatttttaggagtatattcaatacacatacatattgagactagagaattttccaaatatctacctttggaaatatccctttgtttctaacacatcacattatggtattaatgtaacagcacttaaaacctgtagttatcattcaaagcttgtgttcaagagataaaagaacatcattcagacaaagcctgtgttcaagaaataaaaaaaacatctatcactatcggccttaaatgcatctcatcacacgacccatcaacttttaatgaaatgggtaatgaagttaaactaaccagtttgtacaaactattgactgagaaaaagcccttaaaaatttaggaacaaatgagcaacagaagagctcaccctgagctgccaccttttaatttttaatgcaatgtatatgagaatatcatgctaatgcacatactagtagcatgtatgatggaaaaaaataggttaatgcaaaagataatacgcttggctttgtaaagttttgttttgacttacatcatctgaattctgtttatcgagtctgaaaaggaactgctgccaaggaccagtccaaagaagaattaggctgtaagactgctagttcataccttctttgaaatcaatgacaatgtccaattttaggctaatcctaaaacacttgccattttatgactccatattcttttaatttacagaaaagtacaaattttttagaaagtaatcttatcagcacaatataatctaatataatctaacaatacctgtaatagaaagctatcccagtaaattttttttgaacaattgaacttttgtcttatgcagcttataactttgttattttattcatctcaacaaaataaaactttattgaaacaaaagtgtatggtttaggaatatgctcttaataacaactgagcaaaattagaatgatgtggactataacagaatgaaggaagatctctcctgcttgatgtacttggtcaatatatgttagtaaacagaaatattttagggaattctatgattattctacttctacatttacatgtcatggttttaactagttaaatgggtagaaaaaagacatctttaataattgatttctatttctcaaactagatgctctactttaaatatgagctttaatgaatgttttgtaacattttaaagttgtaacatttctaagtatactccactaacttcacaataagagctagggtcactggatgacttcatgtggtaaaatcccttatcaaggaataaggctgaaatttaaatgaacaattaggtagagaagaggtatgaacacagaacatgtgaatgaaatttgctttttttccttgctgctgttcccgagtgccgagtgatccatagtaaaaaaggacaagattaaaattttaggttttaatggtacaaagtgtgaagttttatagttttctaataattattcagtattatccctttcagagatgagggtaggatacacagacatcagtaactgacaagttataatatcaacacatgtaacatttgggtcattattttataaccctaaagggagcaactgcaggtgcagaagcagtgagtgaactagttttgtccagacaaggttttctgatgtgctattactttaaacaccacttttggacactaaagatttaaagtgataaagccactaactaactttattagactagtttttacataaataaccagatttctttgcctacc

SEQ ID NO: 57033 - DNA, 1004 bp, Homo sapiens
ttttttgcagcaacttcccaggatggtttattccaaagctgtggacggtgaacattaagacgaaagaggtgactcgcgtggaacctgaaacacagacgcctttcttccaagaagggctgtggcgatcaggccactcaaggcagccagcccctcagcagggcacgatggctaatgctgcctggaccgcagggactttttgttcgatttcaagacaccagactccctctccttctcagggtcgaagacttttgggatctcgtggggccagtagtcgttgcagtgggggcagcgcggttcagcattcgactggaagtacttggccacgcagggtaagtgcatcctgatcccacaggtttcgcagctttgaccctggatgaggaggctgtgacagatattgcagatcttcaccgcgtcggggtacgtctcccggatgtattgctccatctccaggatggcccggccgtgcagggtgaactccccttccttctcaatcagccacttgttttgaacaaacttctgcagcacctcgtccgcttccttcttcctcatcttcttgcctttaagttgatcaaccaggttcaatatgtttgtggaagacgcaaagcccggtttctgagtcaataatcagttccagagcctttctaaacaaatccagttcattctctgcaaaatccgtagccattttggaaattgaagttgtagcaagattcaccaacgcataaatgggtctcccatcatcttccgtgactcctctctttatctcaatatacaaggactccaagacactgttaatgttgttgatgaagtcctccaacttatctacggtggcattgcggtcatggaccttgtagcagtgcgtctgcaagcgcttcacgtcccattcctctagcacgccatgggtcatcagcaactggaggaagcgccggtggacatcagtcatgacgcccattctccttgtgctgccctgcatgtgggaacgaacagggagcccaagcgcatcccag

SEQ ID NO: 57034 - DNA, 958 bp, Homo sapiens
ctcactcatccatcacattaggctgatgtccttgcccattgccaagaagtacatgtcagaaaataagggagttcctctgcatgggggtgatgaagacagaccctttccagactttgacccctggtggacaaacgactgtgagcagaatgagtcagagcccattcctgccaactgcactggctgtgcccagaaacacctgaaggtgatgctcctggaagacgccccaaggaaatttgagaggctccatccactggtgatcaagacgggaaagcccctgttggaggaagagattcagcattttttgtgccagtaccctgaggcgacagaaggcttctctgaagggtttttcgccaagtggtggcgctgctttcctgagcggtggttcccatttccttatccatggaggagacctctgaacagatcacaaatgttacgtgagctttttcctgttttcactcacctgccatttccaaaagatgcctctttaaacaagtgctcctttcttcacccagaacctgttgtggggagtaagatgcataagatgcctgacctatttatcattggcagcggtgaggccatgttgcagctcatccctcccttccagtgccgaagacattgtcagtctgtggccatgccaatagagccaggggatatcggctatgtcgacaccacccactggaaggtctacgttatagccagaggggtccagcctttggtcatctgcgatggaaccgctttctcagaactgtaggaaatagaactgtgcacaggaacagcttccagagccgaaaaccaggttgaaaggggaaaaataaaaacaaaaacgatgaaactgctttctgggggttggttacttagttacctgccctttgcatgcatgtgtgaaccagctgtgagctgcaaggcagtgggccagagcctccgccctcctgaactcttcctgcaggtggctcaggaa

SEQ ID NO: 57035 - DNA, 514 bp, Homo sapiens
  misc_feature (1)...(514): n = a,t,c or g
cttggnnnccaacagctatgacatgattacgaatttaatacgactcactatagggaatttggccctcgaggccaagaattcggcacgagcacggtgattgtgaatggagttgctatggcctctaggccatcccagcccacccacgtcaacgtccacatccaccaggagtcagctttgacacaactgctgaaagctggaggttctctgaagaagtttctttttcaccctggggacactgtgtcttccacagccaggattggttatgagcagctggctctaggggtgactcagatattgctgggggttgtgagttgtgttcttggagtgtgtctcagcttggggccctggactgtgctgagtgcctcaggctgtgccttctgggcggggctgtggtgatcgcancaggaactggggccattgtcatgagaacacccggcaaacttgctgctatatatccagcctgttaccctggcaggctttgctacagctatggctgtggtggcctctgcgtgaa

SEQ ID NO: 57036 - DNA, 476 bp, Homo sapiens
ggaccagggacgggccagctaggcacatgtcctgggtgatgggcaggaagagggacagatgtctggtgatcaaccatttgttcatccattcatctatggagtactcaccctgtgccaggcctgggcattcagcaaggaataacacagacaaaaacctgccccacacagccatcattctagtgacaagcaacacatacacaaccataaaaattaacttccaggctgggcgcagtggctcatgcctgtaatcccaacactttgagaggctaaagtgggtggatcacctggggccaggagttcaagaccagcctggccaacaagttgaaaccccatctctactaaaaatacaaaaattagctgggtggggtggtgtgcacctgtaatcccagttacttgggaggctgagacatgagaatcacttgaacctgggaggtggaggatgcagtgagctgagattgagccattgcactccagcc

SEQ ID NO: 57037 - DNA, 1509 bp, Homo sapiens
  misc_feature (1)...(1509): n = a,t,c or g
attcgcggccgctcgacgggcaacagcaggaccctggggcctagagcaggcatcatcgccagccagagcgatcagtcaccatgtcaccttcgcacctctgctctcagataatgtcccccaaaccccagagcctcctacacaagagagccaaagcaatgtcaagtttgtccaggatacatccaagttctggtacaagccacacctgtcccgtgaccaagccattgccctgctgaaggacaaggaccctggggccttcctgatcagggacagtcattcattccaaggagcttatgggctggccctcaaggtggccacaccgccacccagtgcccagccctgggaaaggggaccccgtggaacagctggtccgccatttcctcatcgagactgggcccaaaggggtgaagatcaagggctgccccagtgagccctactttggcagcctgtccgccttggtctcccagcactccatctcccccatctccctgccctgctgcctgcgcattcccagcaaagatcctctggaagagaccccagaggctccagtgcccaccaacatgaggcacagcggcagacctcctgcgtcagggtgctgcctgcagcgtgctctacttgacctcagtggagacagagtcactgacgggcccccaagctgtggcccgggccagctctgcagctctgagctgtagcccccgcccgacaccagctgttgtccacttcaaggtgtcagcccagggcattacactgacggacaaccaaaggaagctcttctttcgccgccattatccagtgaacagcatcaccttctccagcactgaccctcaagaccggagatggaccaacccagacgggaccacctccaagatctttggtttcgtggccaagaagccgggaagcccctggggagaatgtgtgtcacctctttgcagagcttgacccagatcagcctgctggcgccattgtcaccttcatcaccaaagttctactgggccagagaaaatgaaggaaggccacaagctcagagcccacatcaacactgcccccctcccagcaccccacagccctcacatcccctggcctggacccaggagacccaggagaaagcaccctcccttaggaatgaggagtgggcatcaggcctgggacactgctctccttccccgcccccagcctgctaagttaagtggacaggcccacaagatgaccttgcatgtgagcagatggcagagatgggtgtgtgaggggtgaggaggcatcagcagttgagccccgaaggagatcaggcagccccacctgcaggagaacgtcagccctccaggggattncaggggatcagcccctgccagttccacccagctgcaggttgccagcacggcagggatgggagaggggtggggagcgagtcactgcctcctctgagcagagattcagagtaggatcacatgaataggggaaaaaagagagtctatttttgtctaataataaagaatttctataaactttagccga

SEQ ID NO: 57038 - DNA, 1856 bp, Homo sapiens
ttttttttttttttttttcccatgcccttttaaaaattaaaactctttatttaaacctcttaatagcatcttatcaatttggtggcagcagcagaagcactaccaaagacagatattttgaaaagcatttacaaaaatacattgcacaaagtcctatcttgcatctttaaaaataaattaatattcaaaatatttccaccccaaatcccaaatcagttttatataggaaattttgatttatatatgtaacctgtaatatatgaaacatctgtacattttatctgccttaactgcatagttccaattctaaggagagtgaaaaaaatgctgcttgatgtatgaatagtttcatacatcagtgtatttgaggactgttgtgccaatatacagaaaaccagtcagcaccatcgttttgtctttttctgaaaacacaacatttacggtacactgaaaactgtcttaacccaacacaacttaaataattcttaaggtaaaacatctgtaacactttaagtgccttgtagatatctcatttataaagtctgcctcagtaaaatagtctaaatattaaatagtaattataaccaaaaagagtctcacaagaatcacgtgagaatggtgacagctgtgataaaaggcagattccagccacagccagtaagaaatgctgctgaaggaaaaaggatcgtcctgaaatgtaacgggttcgtgaccctgacacaccagacggctcctcttatcaccaccagtgagagggaggctcagggcgtcttgcgctccctattcagcaaaactcaaaacaagccctgaaaacacccaagatgagatttttgggtttctgtttactgtgactcccaacaggaaaagccttgctgagaccagagaaccccatctgggtgtttgccttagatcccaaacccaggccccttcaagtcagactgacttcagccctacaaggaagagcgaaacgctccccatattccctcccatggatattggtacagcgagtcctgactggaaaccttcctcagaagtaagagcgaacaaagcagaaaaacaccattttagttatttcccccatctggagacttagtacctactggtgctgaaaaaaaggaaaaattccggcttgaaggaaaggagtttaaaaactctgaaaaatttggtgacattgtttttccctgaaagaaatgtgtgttggatttaacagatgaaattatctgccctccaaaagtcctttagaagagccagtgcaaggctgaagaccaaagcgtcaagaacacgccagactctcagcttcctctgctttgctcctttgttgaggaaatgcaaatgcaaagagcttcccgttaaaaacaaggagtgtctgagagccacgtgttcaacacgcttctcctgctgctgacccctctgcacctgcagaggcagtgagcacccaaacatggcgaaggcgcccgtcacacgctcacgtcctctggccagcagccacgtttattgaaggagtgtggcactgtcccatcattgtatatgccctcgtccatgaaggattccagtgtttcacgctgtcccagtatatacaaaaatgtacaaaaataatgagtagtgtcttcacttgacaggttcgccatgaactctgaaccgatacagacaggtatactcaggatggccccagttagaaaaaatccgaagttccactattggaaagctgtgtcgtcgggtcttttcagggcctggaacatctggagcgactccccatcctgatcatacgtgaaactgtcccagaagctgcccttcttcctgatactcattttctaatccatagacggcgaagtccttgcgggcgcgaattcttccag

SEQ ID NO: 57039 - DNA, 1452 bp, Homo sapiens
ttttttttttttttttttgggaagagtgattaagaaactttattacagaaaatgaatgcatccaacgtccccaaatacatttgtgacaagaacagacacacacaggagacacagacaatagtcactacatcacagccttgttctttccgaaggataaaatgtcattcaagaatggggtgaggtggttagagggagtaggtactatccttttaaatgggggaaaaaaaaaaaaaaagcaacaggttggcatcttaagaacacagacagtgggcccagaaatcaagctaagcctaagccttagggtaacatcatgccacttacatcatctcagagaaactagggcattattccactagaagagcaatcttgccacagtgtgaaaacgttgagtagtgatcttgctgccccagctaatggaccaagtggcctcaacttgacagcctctttaaaactcaatgtttgcctaatcaaagatcatctggctaaactgctcccccacttctgcttagctactttggaagcacaaaagttacccctttccatccttggcccttccctggttggtacatctagttatgagatagacgcgcaccacttaacaaatcactcccttttgaccgcaggttgtttctcttccatatttgacgaggctggcaacagctcccgaatcttggccctagccacatcacgaattgggaagctaaagctttagcttagaatgcccaagtgaacaaggacatggctgaagcaggaggggaaattctggaacaagtgcctctgggcaaacctcacaaccgagttttttaaattagtggtcattttctagaactagaggaacacattcaggacaaacagttctgatgggagagcgaatggctatgaacacataagagatcaggctgtgaccgtgaccataactcgtactcatccaggacccgacagggcggagaggacaccgcctccagacatgcaagtttctcaacagtgaattttaagaaaaagctgctttctcttaaaattaatagcacaaaaacactcctgcgtgtttcatagcctcaaacatacacacccaaatattaatgctgggcaatagcaacactcacccacaacacagtactgtatccttcattgctacggacagtaatgatgtatatacacatcagccttcaaaatggtatttagtgtcaccacttgctactgtggccatctcccctcaccccaacctggataaaatgttacactacccactaatataaccactgacacacaaaccaagctccttccagtttaacattgaacatcaatctacatttccagtgaatgagctaaacttatgagcaggccattcaacttttcatgatacatttagtgctcagaaatggttgattccattagcctgccctatagctcaggtggcccaagatggagcctatcatcttccttggggtgttt

SEQ ID NO: 57040 - DNA, 1326 bp, Homo sapiens
tttttttttttttatttgggttttttttctcttaaaaagatttattatcaaaaagtttgctccctttaaatactgagccaattcatcaatgcagctccattctttttaggattattagggcccaaataatttcagactaaaacaagaaataaaaaaactggactataggttcagtaacatattcacagacatgtcagtgtgcactcaggaacactggtttcatttcttgattggaatgcttatcaccataaaatcttctgctagagtcacttcttggagatctaacactgattcagcttgcttttttagttctgcaatgccatctgtttctccttctcttggccaaggcaactggtttgtacctctgactgaagtggagtcagaaccagcctctttgcacggcacaactttgcaaatgttgctgccatctgtggtgtgctgtggccatgctcctttgctttggtccatctgggcatcatccagggttgcttcgtggatcaacaggtctgcttcaaagcacagttttactcctccatcacccacaaccccagagcagtcacccaatatgcagatttttcttccaacaataggcttttttaagacatcttggggagaaattgtaaccccattttccagaacaacagaaattccatttttcagcttcccataggcaggacctggtggaacaccaaggtctttaagtttctgtgcattgagtttacctgggcgtttcttttccacgactgaaaacccaaatgagggaattctgtgaaagaggcgaaatgcttttacaacaaattgttcatcatcaaacagaaggtatgagttttcttctgagtctaacaggatagttcttccttgttcctctttgggaggactgtctgctctattcacatgcgcaaattcttttagttcttctgcaggacattgatctgctgtaggaaccagttcatgaaccacataatggaagaccagctccgtgtgagagagttccatggttcgccagataaagtcccgaagccctacagggccatagatttcaataggctgtttggacaccatggagccactctgcaggctgattgtgcagaggagcccaggaaggccaaagaaatggtctccatgaaggtgtgtgatgaagatcttggtaattctccctgctttaagttggcttttcataagctgtgtctgtgttccctccccacagtcaaagagccagcactcgccttcacaccgaaggaccacagcagaggcaccccgggttggagatgggtatgctgcacccgtccccaggaatgtcacatccatagacatcttccacccctc

SEQ ID NO: 57041 - DNA, 1091 bp, Homo sapiens
cacttccaggtttaacagacaaaataaacttactctagtttccatctctatcattttataataaccgtagcccacattgtagtagtttttcagctctttactaagtcccaccaattcatgttttcacccttaaaatctttctcactgatactctctctggacagaaaaaaggtgaaataagcctactataaggaatatatgacatgctaaattttatttttaaacggttcttcaagtcagattaaagtaataatagcaaattatgtgattatccatgtcccagcctctctccaaaaaaatagtaaacaagatgtcttcttcttttcccaaagatacacatacacacatgtacaaatttttttatcagataataatagctaatatttaatgagtacttaccttagtttgtcccctttacaacagcttttacatctgtgtggattggatacagttcatattcccattttataactgaggaaaactgggtgcacagagagggataaggcaacttgcccaaagggcacacagttaataagtggaaatgctggggtatgaaccaggtagtctgcccccatagctctgccccccagagctgtactgtctcccatgagggtacttctccatggagcagcctgaggcgatccctttattctgggcttctctcagaaatggattcccacacagtattcaaagcaaatttccccagaggaaatcctattggaagaacttaaaaactcagaatctttttctttgtccagagagttgaggaagcttaagctaaatgatacatgtttttaaaaaaaaatcagattataaatttagtttttggtgattcattaaattctttactattatagttattttctagctgttcatcttttagctaaatttgttccaaagaagcaaaagtttggtttctactaagttctggattctggatgggagattgcactgtgtgtgacatgcaagtttcatggtgtgggagattgcagagcatttgggttactgcttttactctttggaagctgttatcatctgtatctgctttaaataaagttaaagatttggaacaaaaaaaaacaaaaaaaaaa

SEQ ID NO: 57042 - DNA, 1902 bp, Homo sapiens
ttttttttttatccattatgatttattctctacaatacttcgttaaagtgttcaatgatttgcactcagaagttatatagccaagaggcaaccaagtgtaatacaaagaattggtctgaagtctttgcactgaaggccatatagtctcttgcttcagggaagtaagaacgaaatgaacaaaaagaacacatagctccctaggctccagaatctcaatagaaaataacgtcaacagttagtgaaattgtagatgtcaacacatcatggaaaacagatcttgtgcaaaatattaacacccaggacttcttttgtatagatgatttttattataaacaataaaatatatgtaatgtctcaactacaaacctttcatgttgaaagggtctctaacatgagttgttttattattatgaagcaaaaaagttttaagaatctcacagtggaaataatccaacaccgacagactctagtgatcaaagacattctcttttaatgtaaaacaaggacaattcataattacagagagaatgtcctagctgtgggtattatgagacaagccaactttccagaccaaaaggcactcacagctagggatgaaacgaactccgaaccaagccagagaaattgggctggtccttgaaaacagtggttacctactgtccagctcgagcagcccaaggacaaaggaaacactcagcagaaaacattcccttttctttaaacctaccacgcacaccgcaggtactggccgccctcatcactgctttggtcaagcgtgcagagaaggcagttcagttccagttcggagctatcctctccctatggcaaagctgccacatggatgatccagacttggtatttttcctgagagccacctgctacacactttcatgaggcgacccgtgaccgtacacttctagaccgcttcctgactaggccccgttcaggacggatactgacaatgcccattcctcacggggccaaatggtttcccttggtcgactcctgagtcccctgacaaagcaagaggaacccaagcatttccattgctggacttgtgtgggagcatgagggaatgtgcagggagtaaggcttcttcactccaaaaaccactgagcccacttcagtgtggtgctgggcctaaccagcccaattcttgtgcactgattttttttttccccatttctcgggttttaaaattttctattcattttcttaaatggcaggtatcggtaccccccctcgataaaataaaataaaataaaataaaataataaaataaaataacataccatacattggagaagacaaatagggcaacatttctacaagaaaaaatcggcttgaggagcatggcactgtaaatgcttgcatgaccagtctcactgagcgtgctcaggggtgaaggtttagcaccaatttttttgctttttttaatctttagaaattaaacacaactcttaacatagaacacttgaacagtaatgagtgtagccctatgtatcaatactgttgtacaaattggaggtgggtggcttagtccagagctgaccaccctgacatcgatccatggcacctaagagtaaccgttgccacgtttttaacaagacatttattctcagcagcaggaaatcacgaaacgacccctccatcttcatttacattgccaagggaaacgtagcaggctgcaggaacccagcacagcagtgaagggccgcagcctaggcaccgtcacccacgtttccctcgcacgtcccaggtcctctcgagcagcacaggacggtgtggagcaaacccactcacccttgcccatcccttcccacaaacttgccagcgatgcctagaacagcacaggtgtcctttctcagattgtgcccccactccccttccccattcctggca

SEQ ID NO: 57043 - DNA, 128 bp, Homo sapiens
ttgaacctgggaggtagaggttgcagtgagccaagatagcgccattgcactccagcctgggcaacaagagcaaaactccatctcaaaaaataaaataaaataaaataaaataaaataaaataaaataa

SEQ ID NO: 57044 - DNA, 378 bp, Homo sapiens
atttttgacgtgaggggccatggcacctgcaaggtgtttctcagcaagattgaggaccgtgtttcagggcgtggggcattgggctttgtccacatgggctggcctgaagcccagccggctactgccacagcgggcttctcccaggctgctctcggtcggccgtgcggacctcgccaagcatcaggaactcccggggaagaagctgctctctgagaaaaagctgaaaaggtactttgtggactatcggagagtgcttgtctgtggaggaaacggaggcgctggggcaagctgcttccacagtgagccccgcaaggagtttggaggccctgatggaggggacggaggcaacggtggacacgtcattctgagagttgacca

SEQ ID NO: 57045 - DNA, 1870 bp, Homo sapiens
  misc_feature (1)...(1870): n = a,t,c or g
taaactcagtaattcctttattttgattttaaattaatcacaaccatcgaagtggtaagaaacagctgacaggtgtacttaaaaatactgaattgacagctacattgaatgcagggtttcccagggtagttcttattttgtcacttactccaattacattcaaggtcgttatgcctcatctttttcctgagctgtggcagctctaactggggcacccagagagatacataccaggtaatctccacttctacttttctggtagcttggccctggcaaaatgagccccacaatctagaaagtaggatgctaaacaaagttgaatcaacatatctttttagaaaatatcaggttagagaatactcctgaggacctgtttctaaccagagttgacaaatgtgaaaaatgcatcagctagacagcagtcatgtgaacacagcccggaactgcaagtcaaggaaatgggttctgggcctgccttcccaggtaaccaaaaccattattcaaaagcaactactgaaatgccagcttgtggggaaagaaatgggaaaggtgataaaatcacaattaaatgcatgtatatacatgaataccaaagctattatgtagaaataaaatcaaaacactttagaccaagaagaaatcagagacctcctagtctattgccccagtgtaaaaattaaaaaactctggagtaatcattgccattaagcattagtatgagggaaataattttaactctgaggaaaaaaaatgattttttaacattttcaattttatatcaaattagatactggatcacatatatccataaaattaataaatccaagcagatttttctactccataattcatgtcacatttaatagtctcttcacggattctttgtactgagaaatggaattttcattttcctcctcatttttaagactaacaacagactttttgtactcttcaatttctttagtaccaaggagctcttctttatttatttccatatttttcctcagcagctttcatctggagaagcgtttccaggatatttctttctgatgagctattttcccatatatactcttccatgtctgcttcagtcttacttttttccccattcttcagtattccaagactcatggtataacactgttagtagatacactgcataatcgtaattctgcctccttaaagggcacctatctgttttgatggtaagcacatctgtggtcttgcagtatcgctctcctacaagtttaattaatttcttctttgcgtgatcatctaaattcaaactggaaagctttactcttaagactactactcgtgctctggggttccgaacagatggtcctgatgaaacataatcagtgctgtcaatttcaattggaaaatgcttctcacatttctcgtcactgtccagtgcggctggccactcagtgcaaaaatctttaagggcttcacagtgctttttaattgctacaggagtcaaatgcagaaaattgggaatctttaaaagttctagatttccctcctttgccatgggcacgcccttttttactggataacccattcgaacaggaagaggtactgcagagggtttaaatggtgctgcaactgggtaaacactaggccagtcctggtcaacagccattttctctgtcctaggaggtagtgcctttcttcttggtggcctttcatttctgggtgttctttccggcaggctaggtgtcgggaccggagtggccgagtagacggcagtggagaatgcacgcagagtccttgccctcgactgcaganacagccatgctgggagcgcggcggccgccatggctgcgaggacngcaagccggaggggacaagcggcgttcagtgtcag

SEQ ID NO: 57046 - DNA, 1763 bp, Homo sapiens
  misc_feature (1)...(1763): n = a,t,c or g
ttttttttttttttctggttttcctttttatttaatcaaagactggtgaataaacataaatacagcacaattacttcagatcattcttcatattgtatacacacaaacccatgaacataatctgaaagaaacctgtagacagcaatgaaatgcatacagctttttcttccctcgctcaaaaaaaagtttaaacacacaaacttacaatctcatcagcacacactctcttgtgacaaatgattcagacataaatagtgggtgcaaagaaactatatgctaacatatgaataacctttgttaatgaaaaaacagaagcagccataatgattaagatacattcagttactgataactagttgtgccctaaagggcattatcaaaagagaaatcgtgctgcagagaaaagcgatatatacatacacaatgagaaaataaactgcaagattaatgcatgcatgtttaatactggaaaaatcacagccctccaaaatttctgcacgtttgttataaaagccctctgcactcaactaaaattaaaatgatcttaaaaggataatacttgtaaagtttaagtctcctcagccacagaaattgcaatggaaataaatgttcagagtcattttcaaaacaaaaccaaaacaaaaatctattcttccgatgacatgcaagatacactgctctacattcccaatgactaggaaaaaaaaaacctcaagtcaatttttagtttgcagatgctcaagaattttgtattccagcaggagttcaaatcttttggatcttttcaccaacaactactggattttcttttctgattttctcagcagcatcggctttgtaattgtaagagcaattgtgtacatctgagtaacggtgtacaccacagtaaacatttccacaccggcattcaaacccagtaagtcccactttcttcctgcacatgaaacagcgattctttttttgtttcggtttttcaagagacttgctttgctcttcagatggctgctgtgctgtgtctgatactgaagcctgcacatcttctgtttcaggtactgctttgtccacagatgtactgtccaattgagaagatgctacagattctgataaaagtgactgatttgataccagggctgggctgcatagatgaagatgtagagtctaatgctgactgggcttctggcacactgccatctgtgcattgaactggtaaagattcagacagactactgacagaggttgcaggtgggcttattctaccattactactattctgtctttgaagatgttctttatagcatactgaacacatgccatttgtacgagggtttccataaaatccacagccagtggaacaaagcataggcacttggctgtgattagtttcttgagccatgttcctcagttgcacacacagttgaggttgatgagcaaacagctgtcctgtatcttgagacagacattagctttctgccttccctattctcataagcagctacttaaaagttttgaattttatgcaagaaaacattttaaagccttctgtgttttactgcagcagacttcagattcattcctggcggcgggtctctccgcctgacacgctgcgcgccgccgccggtagccgccggtgaatgggtacaggtaatgccgccgaacccctgcttgctccggctccgccaccgctcgtgccgaattcttggcctcgagggccaaattccctatagtgagtcgtattaaattcgtaatcagtcaanaagtntcaa

SEQ ID NO: 57047 - DNA, 807 bp, Homo sapiens
acgccaccagggcagccgagcatttattacccgggcctccacccagcttggcagactttagacttgaggctggaggaaagggaactgaacgcggttctgggagcagcaagcccacgggtagcagccgaggccccagaatggccaagtttctttcccaagaccaaattaatgagtacaaggaatgcttctccctgtatgacaagcagcagagggggaagataaaagccaccgacctcatggtggccatgaggtgcctgggggccagcccgacgccaggggaggtgcagcggcacctgcagacccacgggatagacggaaatggagagctggatttctccacttttctgaccattatgcacatgcaaataaaacaagaagacccaaagaaagaaattcttctagccatgttgatggtggacaaggagaagaaaggttacgtcatggcgtccgacctgcggtcaaaactcacgagtctgggggagaagctcacccacaaggaagtggatgatctcttcagggaagcagatatcgaacccaatggcaaagtgaagtatgatgaatttatccacaagatcacccttcctggacgggactattgaaggaggagaatgggagagcctcccctgggcctgaaaacttggagcaattaattttttttaaaaagtgttcttttcacttgggagagatggcaaacacagtggcaagacaacattacccaactatagaagagaggctaactagcaacaataatagatgatttcagccatggtatgagtagatctttaataaaagatttgtattgatttt

SEQ ID NO: 57048 - DNA, 1804 bp, Homo sapiens
tttttttttttttttttctgaccaacgagaagagtgtttatttgctgggggcatctgagacagcagaggtggtacacagagaagatgctgctctggcagtgagggagggattccgtggaagctgcaggcagccatcttttcatcctcggaggtggtggcctgggatgtagcagataccaacgcagagggaggcagaagacactgggtgaaattgctcacctgctgccaatgccaataccactggacttttcactttcataagccaagaaatttccgttaactgattaaacaaattgcctttattgttaaaccaatgattggatatcagaaacagcctagctaatatagctccttttggataaaagtagaagcctcacattcacctttaatgttatttcactttttccaaaatcaatttcctggcaccacacaaacaagaacactggtaaatgtatcacctgaactgcaggccacacatgctcacgagtgtgtccctgccgtaggtggctttgaagccatatacatggctctccagctctcgtggggggccaggggcttctgtgtgctcttcaaagccttcacccattgggcctctgtccatctttccagcctggggacccaatatttgccccacaaggcccaggcaggagggcctccagcacgcgcagccctgaccacactgtgagcagctcacttggcaagggtgaagggccggagtggcgtcctcctgatgtggcttccttccagcctctaccacccctgggggcctcctccaaggagcaggtggttagatgtcctcttgtgcccacacacacggcagggtggtaggagggatgaaccggaaaccagtccatgcttctggccccaccctgggaccccaaggtttcttctcaggcaacaaggagcacacaaagtgagcccctgtacacaggtggctgggatatgttcatcttccacagggaggccagtgctggggatgaggacaaaggcctacgcccagtcccagctctgacactgccttgctgagtcacccatcagccctaacgcttcctggacgaaacaagcagatagggtgccccagagaggagctgtgtcactaagggccaggacaccccatctctgggtcacacttggccacggcttcatttttggcttcagtttgtttactgaacagaagggagaggggccctgtgagacagaggacactgactcaggtcggtgagtggccctcactgtatagagtccatggctggggaccaagtggcactgagactcgcccaaagtcacatcacagagctggggtgccttgctgactccctggccccaaaatcttgcttttccatttgtcgaacgcacactggcacactggctgcagcagctgcgggggtcggggggttcccagggctggctgtcactcggcctcctgcagaggtaagctgagggctatgttggacccgccagaagtcaggtgacagctgctttccctttcaggatcgggagggagtcacctgagggtatattctcagtgggctaaacatgacatgcgagagcccagctctccaagcggccccttcctccttctcacaccaaggcactttcagaagccgctggattccgactggggctgtgccacttcatcgccggtgcctctgctgtgccggctctcctcttctgagggtgtggaagcaaacccaggtcaagctgtgaggagtgcctagcacctggccagagccaggtacatgccagctatgacgatgatgagcccaactgcaacaggagaacacacttagtgcgacatgcagcg

SEQ ID NO: 57049 - DNA, 882 bp, Homo sapiens
ccgccccgacaggtttgttttgtgaccgcgggcggccgctgcttctttcccgagcttggaacttcgttatccgcgatgcgtttcctggcagctacattcctgctcctggcgctcagcaccgctgcccaggccgaaccggtgcagttcaaggactgcggttctgtggatggagttataaaggaagtgaatgtgagcccatgccccacccaaccctgccagctgagcaaaggacagtcttacagcgtcaatgtcaccttcaccagcaatattcagtctaaaagcagcaaggccgtggtgcatggcatcctgatgggcgtcccaagttccctttcccattcctgagcctgatggttgtaagagtggaattaactgccctatccaaaaagacaagacctatagctacctgaataaactaccagtgaaaagccgaatatccctctataaaactggtggtggagtggcaacttcaggatgacaaaaacccaaagtctcttctgctggggaaatccccagtacagatcgtttctcatctctaaagtgcctcattgagttcggtgcatctggccaatgagtctgctgagactcttgacagcacctccagctctgctgcttcaacaacagtgacttgctctccaatggtatcccagtgattcgttgaagaggaggtgctctgtagcagaaactgagctccgggtggctggttctcagtggttgtctcatgtctctttttctgtcttaggtggtttcattaaatgcagcacttggttagcagatgtttaatttttttttttaacaacattaacttgtggcctctttctacacctggaaatttactcttgaataaataaaaactcgtttgtcttgtcttctgcatgtggaaaa

SEQ ID NO: 57050 - DNA, 855 bp, Homo sapiens
caaggggcgggcagaagttggaaacatgcggctgtcggtcgctgcagcgatctcccatggccgcgtatttcgccgtatgggcctcggtcccgagtcccgcatccatctgttgcggaacttgctcacagggctggtgcggcacgaacgcatcagaggcaccatgggcgcgtgtggacgaaatgaggggctacgcggagaagctcatcgacttatgggaagctgggaagacactaacgaacgagcccatgcgcatggctgacttctggctcacagagaaggatttgatcccaaagctgtttcaagtactggcccctcggtacaaagatcaaactgggggctacacaagaatgctgcagatcccaaatcggagtttggatcgggccaagatggcagtgatcgagtataaagggaattgcctcccacccctgcctctgcctcgcagagacagccaccttacactcctaaaccagctgctgcagggtttgcggcaggaccttcaggcaaagccaggaagcaagcaaccacagctcccacacagctcaaacaccagggatttaactggatctgaagagtctgcagcccttaatcagtacccatgatcacaggcctttggagcacttttactctctgagaagaactggagctagagatgtaaaatggacagtcttgatggggttgagaaccttctggggagccagatgaccctctctttgcacaatagataaaagtctttatatgaatatatataaatttatttattttttccttcctgtgggatttctggagaatgagaattatccaaatgctcagtctacctgagatagtaaattcatggcttatgcttctggtccttaa

SEQ ID NO: 57051 - DNA, 1388 bp, Homo sapiens
gatacctctgtggtatgagtatttcagggaaaaagaaagcaggcatggcacccattcgattttccctgacagcatctgagatccttttggggagacgctgaggagtgtttgctgccatgtactcttacagctctatgctgacactcccatttgatgtggtccagaacttagacctcagtccttggatcagccctgtggtccctgcaagcaggggcatctttctgcatgtgagccagcccccttcctgttcaagggttctgctggatctgggcttttcctgtccttcacttctgggatgattcaccccacatcttccagtaccctgtaaaccattttaaaatatttagaaaactatcctcccaaaaatgcttttgaaaatgagagccctctgtccctgccacttacagctagtctctttgggataggggtgtatgtggagagattcatgtaagtctcacatgagtgacctggtgcccctatgtgtactaatgtgtgtactgggtcagaaggtgccctgggttcccacagaccttggtttcctgcctgggtgggtgggagggagggaacttcagagagtatgtgcgaacagccatagcagagccacccctgccaaggacccagtgagggaaactcaggagcaggtggttggttcagttcccgcgctgatgtctggggcagtgcatgtgtgagaagagaggcgcaaagcagtgaaaggagtgatttggcatccagagggcccgggagccccacggataccccagggaagccactgactcacaccgctgcagaggctcctgggcccaatgcccgacccctgctggccagcatggggcctagcactggaagatgcctcaggtgtgtttggagtgggggaaacggaagtagggcacgctctcagagaccaggatagagagtcagggaacctgggaaagagtagtgccagttccgggtaggctgctgcaccaggccctaccagctcaggctataaacagtctgctttgccccaagtcttttccgtccacccccaacagccttgtcatcacttagctactgatcaaccccatggcttgacattggagggttacattagtggagtcccgccacagcttcgaaccctctccccagatgccctttgcctctgctgtggccctggggttttatcaactgtccccttcctatcctcctctccaccctgttttttgttttttttttttttaaataatattttgctatgggggaggggaatatcaaatggacaagatcacttttaaatggtagtttttataagatgttataaacttgtatctttttaccattaaagtgcagtgtatgttccttcgtgatatatttaggatatttaaataaaaggaaaatggggcttttctaca

SEQ ID NO: 57052 - DNA, 1005 bp, Homo sapiens
gctgtggccccagcgtgctgtggcctccgggagtgggaagtggaggcaggagccttccttacacttcgccatgagtttcctcatcgactccagcatcatgattacctcccagatactattttttggatttgggtggcttttcttcatgcgccaattgtttaaagactatgagatacgtcagtatgttgtacaggtgatcttctccgtgacgtttgcattttcttgcaccatgtttgagctcatcatctttgaaatcttaggagtattgaatagcagctcccgttattttcactggaaaatgaacctgtgtgtaattctgctgatcctggttttcatggtgcctttttacattggctattttattgtgagcaatatccgactacttttgtctcctctgtctcagtgcataaacaacgactgcttttttcctgtctcttatggctgacctttatgtatttcttctggaaactaggagatccctttcccattctcagcccaaaacatgggatcttatccatagaacagctcatcagccgggttggtgtgattggagtgactctcatggctcttctttctggatttggtgctgtcaactgcccatacacttacatgtcttacttcctcaggaatgtgactgacacggatattctagccctggaacggcgactgctgcaaaccatggatatgatcataaccacaaagaaaaggatggcaatggcacagagaacgatgttccagaaaggggaggtgcataacaaaccatcaggattctggggaatgatagaaagtattaccacttcagcatcaggaggtgaaaatcttactcttattcaacaggaggtggatgctttggaggattaagcaggcagctttttctggaacagctgatctatatgctaccacggagagatagatactccaaacctcaggggaatatttaatttcttgtactttctctattactgtgttggaatttcatggctacatcatatgttttgatcgagt

SEQ ID NO: 57053 - DNA, 1490 bp, Homo sapiens
  misc_feature (1)...(1490): n = a,t,c or g
ctagcactctgacctagcagtcaacatgaaggctctcattgttctggggcttgtcctcctttctgttacggtccagggcaaggtctttgaaaggtgtgagttggccagaactctgaaaagattgggaatggatggctacaggggaatcagcctagcaaactggatgtgtttggccaaatgggagagtggttacaacacacgagctacaaactacaatgctggagacagaagcactgattatgggatatttcagatcaatagccgctactggtgtaatgatggcaaaaccccaggagcagttaatgcctgtcatttatcctgcagtgctttgctgcaagataacatcgctgatgctgtagcttgtgcaaagagggttgtccgtgatccacaaggcattagagcatgggtggcatggagaaatcgttgtcaaaacagagatgtccgtcagtatgttcaaggttgtggagtgtaactccagaattttccttcttcagctcattttgtctctctcacattaagggagtaggaattaagtgaaaggtcacactaccattatttccccttcaaacaaataatatttttacagaagcaggagcaaaatatggcctttcttctaagagatataatgttcactaatgtggttattttacattaagcctacaacatttttcagtttgcaaatagaactaatactggtgaaaatttacctaaaaccttggttatcaaatacatctccagtacattccgtnnnnnnnnnnnnnnnnnnnnnnnnnnnnnnnnnnnnnnnnnnnnnnnnnnnnnnnnnnnnnnnnnnnnnnnnnnnnnnnnnnnnnnnnnnnnnnnnnnnnnnnnnnnnnnnnnnnnnnnnnnnnnnnnnnnnnnnnnnnnnnnnnnnnnnnnnnnnnnnnnnnnnnnnnnnnnnnnnnnnnnnnnnnnnnnnnnnnnnnnnnnnnnnnnnnnnnnnnnnnnnnnnnnnnnnnnnnnnnnnnnnnnnnnnnnnnnnnnnnnnnnnnnnnnnnnnnnnnnnnnnnnnnnnnnnnnnnnntcagttcttatcaaagaaataacccagacttaatcttgaatgatacgattatgcccaatattaagtaaaaaatataagaaaaggttatcttaaatagatcttaggcaaaataccagctgatgaaggcatctgatgccttcatctgttcagtcatctccaaaaacagtaaaaataaccactttttgttgggcaatatgaaatttttaaaggagtagaataccaaatgatagaaacagactgcctgaattgagaattttgatttcttaaagtgtgtttctttctaaattgctgttccttaatttgattaatttaattcatgtattatgattaaatctgaggcagatgagcttacaagtattgaaataattactaattaatcacaaatgtgaagttatgcatgatgtaaaaaatacaaacattctaattaaaggctttgcaacacaaa

SEQ ID NO: 57054 - DNA, 978 bp, Homo sapiens
  misc_feature (1)...(978): n = a,t,c or g
tttttttcactttctctgaattcatttatttagaggtaaaacacagccattcaaaattgtggaatacaatgtctacacacagaataaggttggggaattaagctgaattgttatattccattcacattaataaatatttttaaagaagaaattgtagattttaaaagcttcattagacactagtgacacatacaaataactaaactctcatactgcttgattttcaggttgaaaggttacaataatctatatatttcaattacatggcagtaaataccaaaagcattttaaacatcttttggaactgtgtagtatactataagcaggagtttattcctaaaacattccatcattcttctgacctgtttatgggtcatgctggacaccagcaatcccacatcacataaattatccaccagtaatgaggtgtaaaatcaattatgcatgtattttgaatagaaattatttttaaatgtcagagagaatgctattattggccaacttgaaatttcctaattagctatctgagctatttaagtctgtacttcagtgtcttcatttttttaaatgagagaactggactagattttatataagtacctactaaagcctagtgttttgcagttacttccttccctgtcaaaattttgcctcctttgattttcaatatatatannnnnnnnnnnnnnnnnnnnnnnnnnnnnnnnnnnnnnnnnnnnnnnnnnnnnnnnnnnnnnnnnnnnnnnnnnnnnnnnnnnnnnnnnnnnnnntgaaggcaggcaagtccttcgggcgcgcgatgcagctcgcggatcagttccatggctttttcgcagaacatggcggacgcatctcctcccgcgccttgccaaccaccagctctcacgccaaaatggtatctggctctcggcgcctcactcctttcgttctagtcctacaagccgccagtctcgcctcggcncntnnnnccntttggcg

SEQ ID NO: 57055 - DNA, 1988 bp, Homo sapiens
tttttttttttctgaaatagctttttattaaacggcaaagcagaactgcaacacaatttaaatgtctgtaaattaggtcacaaaagggatgcaaaatgtttgcagtttgactattatatattcacacagctaaagtcattcatcaactcttacaccaatacataagattattccatgattaaaagcccaaatctaataaccttaagctacattagtggatctcttttcatattataagattttagcaatacttccaatattgatttccttaccaaatggaatctagaagctaaatttttaaaaattgttaaaggatgactaaaactcttcaaacccagtagcagggtttacagaaaattctagaacaagtgagataaaatactgagcaagataataagtatacatgtataactttcccattttattcactattctaatactaatacaccattacggaattttgcagaagttgacccactgggtacaaatcaacttagagaccaaactctttgtaactgttctcatccagatgtggctaacataagggtagtcaaacttaatccactttcatatatatttcccaaaagatctactctgtgccagagaaaacacaaatctggagtgaaaatatttggttactactgtttaccgagtacttttccaccctatttccatttttcctcaaaattttctattttaacatacacatgaccagaaattatatattttcagataatacaaaatgagttattttgggcaaaaagaagtttttaacaacaaatattcccaagttaattcagtttcaaagaaaaaccttcatttttagcctccatctatttccaattaattaaagagacactagcattcctatcttaacactaaatacacaaatgacaagccctagctgagacagtatcttattttggttaagtttcaacaattaaaatacaggttactctcagagatgattaactattaaaattacttttacaaatgtgacaccaatttttttccttagcggaagggaaataggaaggaagaggcaaatggagaagaggcacaagatggtggacagggtacataaagctgtgcatttagtacatgattttggtcactttttcacaacacggtggttattttcttgtatatcttactaatcctataataaaagacagtgctaaacctacaaattcaataaaacattcatctttaagtttcataaatatatgcaattctaatcataaagtctctacaatacatttgcacgttttccatagactaacataatacacaaacttatggaagtctcctgttattgtgttatttttgtctacatctgacattatcttcataaatattcaatgaagccacaaaggtactgtaacttttggaatctatccaagttttaaagaaaaaatgatcagcagcaattccataaaacagaagggtgtcaatcccttactttccttttgcctttttgtgtcagttgtttgaaaaacactagaagctgacatgagattttctatatattgtccaagaacttggttttctgattttagcttcagattttcttccttaactgcatctactcttgcagagagatcttcaagtgtggtgttggagttccaacacttgattaataagtcttgttttttcctccagttccacttgattttcagcatcaactgcatccatgtcagcattcatcatcttgggtaacaaacttttgggccttggatacaaaattcttgaggaatggtcttccgcttgaggcgccgggagaaggagggatccggccgacacctcaggccgggacacttggaccaactgaccccggcagctccgcccactccgcccacagaacgtgcgccgtgagaagaatcccatcccgtcccagccgctcgcccgccactcgtgccgaattcttggcctcgagggccaaattccctatagtgagtcgtattaaattcgtaatcagtcatagaagt

SEQ ID NO: 57056 - DNA, 1176 bp, Homo sapiens
caactcaaccctgtgggctggattgcagtgtatgggcagggctacagccccaactccggggacgtgcagggcctgcaggcagcctgggaagctctgcagaccagtgggcggcccatcacaccgggtaccctgcgccagctcgccatcacccaccacgtgctctcgggcaagtggcttatgcatctggcaccgggcttcaagctggaccacgcctgggctggcattgcccgggccgtggttgaaggccggcttcaggtggccaaggtgagcccacgtgccaaggagggtgggcgccaggtcatctgtgtttacacggacgacttcacggaccgcttgggtgtactggaggcggattcagccatccgtgcagcgggcattaagtgcctgctcacctacaagcctgatgtctacacctacctgggcatctaccgggccaatcgctggcacctctgccccactctctatgagagccgtttccagcttgggggtagtgcccgtggctcccgagtgcttgaccgtgccaacaacgtggaactgacctagaggggccaaattggggagactgcccactcccccctccatgctggggttggatcctcctgtcttcctccttgtcccatgaaggccacaccccccagctctggggactcctaggtcacttgggaactacctgcatcttcagtccccttgaacttctgccctctgttcagggctgacacaagccccacaggctggggggctccggttccctgagggatgagccttcagcctccctttgtaatgctgctcctctccactgcccagcaccatgagttgggtgcagacacctagaaggagagacttcttggaacgctcatcccccgctatacctccccttcctcctgcatctccccttctttccttccccctcaggagagagaaaacttagtgcttccagcccttcttggagccttcatggtccaggggtaggggccccactggcctgagcatgccattttgaggggagggtagttgtgcctacttatcccctggcagaggggatgccaggaccatggacatgaggcttgcccatccctgccaacttacacagcctgtaccactgtccccccttccttggctactttgacatgtgcctgctcctggcatttcaataaaaccgggttgggtcaaaaaaaa

SEQ ID NO: 57057 - DNA, 1029 bp, Homo sapiens
ccccgcgtccgcctatataggcttttttcttaaacctatttagtaatgttttcccaagtttattttttatttttaattttttccccaagtttatttttctatttttttttcatggaaaaatggggtaacttagcagtttcaatattgaagactgaagtttaaaaaacatttaaattcaaggtacttttaaaattcagttagaaaagtaggctttaaaaattattagagacaagagtaccaaagcggtgtgtgtatgtgtgtgtgtgtatgcatgcttgtggattggaaaaactttggagactgattacttttcattatatatgtgtcacagtgaaacagcttttatgtgtcatgtaagattactgcttgcctctctaaggaaggtcgtgactgtttaaatagacgggcaaggtggaaccttttgaaagatgagcttttgaatataagttgtctgctagatcatggtttgtattgaactaacaaggtttgcagatctgctgacttatataaagctttttgattcctactaagctttaagatttaaaaaatgttcaatgttgaaatttctgtggggctctatttttgctttggctttctgggtgagagagtgaggaagcattctttccttcactaagtttgtctttcttgtcttctggatagattgattttaagagactaagggaatttacaaactaaagattttagtcatctggtggaaaaggagactttaagattgtttaggggctgggcggggtgactcacatctgtaatcccagcactttgggaggccaaggcaggcagaacacttgaaggagttcaagaccagcgtggccaacgtgggtgaaaccctgtctctactaaaaatacaaaaattgtttagctctgtttttcataatagaaatagaaaaggtaaaattgcttttcttctgaaaagaacaagtattgttcatccaagaagggtttttgtgactgaatcagcagtgcctgccctagtcatagctgtgcttcaaaaacctcagcatgattagt

SEQ ID NO: 57058 - DNA, 329 bp, Homo sapiens
  misc_feature (1)...(329): n = a,t,c or g
tccttttngctatgacatgattacgaatttaatacgactcactatagggaatttggccctcgaggccaagaattcggcacgagagcagaaagatgccgaggcggaagggctgagcggcacgaccctgctgccgaagctgattccctccggtgcaggccgggagtggctggagcggcgccgcgcgaccatccggccctggagcaccttcgtggaccagcagcgcttctcacggccccgcaacctgggagagctgtgccagcgcctcgtacgcaacgtggagtactaccagagcaactatgtgttcgtgtcctgggcctnatcctgtactg

SEQ ID NO: 57059 - DNA, 1195 bp, Homo sapiens
  misc_feature (1)...(1195): n = a,t,c or g
aagaatgcaggctttgagcaatagttttattacttgtcacaaataaagcaccgggcatagtctccaaagcaggaaagtgacaggagggttttatggggtgatagagagggaagagggtatgtcgttgcatggaaaggggttgcagttgtgcagatgctggcggtgggagagacagtaaaaagctggaggtgaagctttggaactcttttatcactgtggtgggtctttctttctgggggtcagaatgtctcagttcttttgaaagtcccatgaaattcagggacttccctccaaggaaaagcacagaatcttgcaggaaattactgggtttttttcacatcattggttgtccatgaatcccaggttgacaatttttgctctaccaggacaaacagtatgtttatgaagatacacacgattcactaatttcaatattatgtgccagggactatgactggactaatttataattctgaacaagaaacatgctcccttgtcctcacagaggttaaacgtagtatggatacagaaattagacaaaccaccaaatacatgtttacaaaatttgtgttaatgttatgaaagaatatggcaacttgaaagtttgtaacagaactaatttaaatgaggattagagaaagcttcaggtagcattaatgcttcttagttaagtgaaaagtttggaaatgagtatcgtaggcccaaggaacaacctgtacaaagacccagaggacagagctctggcacattcaaggaaatggaatgctaaaaccaagagtaaagaaagttaacagggagctcagtaccagatgaggaaaatgtaatttggaagcaaaaaggagcgagtacaactgtgaagaacagtgctaggggcagacaagtaagataagaactgaaaactagataatggattggagatcattgatgattttagtaaaagctactttgatggactgatgaagacagaacccaaatttcagtgcatttgaaaagcacatgagagattaagtagagacagtaagtacagataacttcttagaacttaaatatgaagcagtgatgaaaacaggtttggggccgggcacggtggctcacgccctcgtgccgaattcttggcctcgagggccaaattccctatagtgagtcgtattaaattcgtaatcatgtcatagatggtanncaancaatnancacc

SEQ ID NO: 57060 - DNA, 5329 bp, Homo sapiens
gaattcggcacgagcgggagcccaggacgccgcttccccgcccatccccgctccccgaggccggccgcctggtcatggcgcagccgggcccggcttcccagcctgacgtttctcttcagcaacgggtagcagaattggaaaaaattaatgcagaatttttacgtgcacaacagcagcttgaacaagaatttaatcaaaagagagcaaaatttaaggagttatatttggctaaagaggaggatctgaagaggcaaaatgcagtattacaagctgcacaagatgatttgggacaccttcgaacccagctgtgggaagctcaagcagagatggagaatattaaggcgattgccacagtctctgagaacaccaagcaagaagctatagatgaagtgaaaagacagtggagagaagaagttgcttcacttcaggctgttatgaaagaaacagttcgtgactatgagcaccagttccaccttaggctggagcaggagcgaacacagtgggcacagtatagagaatccgcagagagggaaatagctgatttaagaagaaggctgtctgaaggtcaagaggaggaaaatttagaaaatgaaatgaaaaaggcccaagaggatgctgagaaacttcggtccgttgtgatgccaatggaaaaggaaattgcagctttgaaggataaactgacagaggctgaagacaaaattaaagagctggaggcctcaaaggttaaagaactgaatcattatctggaagctgagaaatcttgtaggactgatctagagatgtatgtagctgttttgaatactcagaaatctgttctacaggaagatgctgagaaactgcggaaagaattgcatgaagtttgccatctcttggagcaagagcgacaacaacacaaccagttaaaacatacgtggcagaaggccaatgaccagtttctggaatctcagcgtttactgatgagagacatgcagcgaatggagattgtgctaacttcagaacagctccgacaagttgaagaactgaagaagaaagatcaggaggatgatgaacaacaaagactcaataagagaaaggatcacaaaaaagcagatgttgaggaagaaataaaaataccagtagtgtgtgctttaactcaagaagaatcttcagcccagttatcaaatgaagaggagcatttagacagcacccgtggctcagttcattccttagatgcaggcttgctgttgccatctggagatcctttcagtaaatcggacaatgacatgtttaaagatggactcaggagagcacagtctacagacagcttgggaacctcgggctcattgcaatccaaagctttaggctataactacaaagcaaaatctgctggaaacctggacgagtcagattttggaccactggtaggagcagattcagtgtctgagaactttgatactgcatcccttgggtcactccagatgccaagtgggtttatgttaaccaaagatcaggaaagagcaatcaaggcgatgacaccagaacaagaagagacagcgtccctcctctccagcgttacccagggcatggagagtgcctatgtgtcccctagtggttatcgtttagttagtgaaacagaatggaatctcttgcagaaagaggtacataatgctggaaataaacttggtagacgttgtgatatgtgttccaattacgaaaaacagttacaaggaattcagattcaggaggctgaaacgagagaccaggtgaaaaaactacagctgatgctaaggcaagctaatgaccagttagagaagacaatgaaagataagcaggagctggaagacttcataaagcaaagcagcgaagattcgagtcaccagatctctgcactcgtcctaagagcccaggcctccgagatcttacttgaagagttacagcaggggctttcccaggcaaagagggatgttcaggaacagatggcggtgctgatgcagtcacgggaacaggtttcagaagagctggtgaggttacagaaagataatgacagtctccagggaaagcacagcctgcatgtgtcattacagcaagcagaagacttcatcctcccagacactacagaggcactgcgggagttggtattaaaataccgtgaggacatcattaatgtgcggacagcagcagaccacgtagaagaaaagctgaaggctgagatacttttcctaaaagagcagatccaagcagaacagtgtttaaaagaaaatcttgaagaaactctgcaactatgaaatagaaaactgcaaggaggaaatagcttctatttctagcctaaaagctgaattagaaagaataaaagtggaaaaaggacagttggagtccacattaagagagaagtctcaacagcttgagagtcttcaggaaataaagatcagtttggaagagcagttaaagaaagagactgctgctaaggctaccgttgaacaactaatgtttgaagagaagaataaagctcagagattacagacagaattagatgtcagtgagcaagtccagagagattttgtaaagctttcacagacccttcaggtgcagttagagcggatccggcaagctgactccttggagagaatccgggcaattctgaatgatactaaactgacagacattaaccagcttcctgagacatgacaccctcatggcaggattctagcctgcactttgggtttttaactcatctttagagcaacagtaattattatttaactcttaactgaagaaagagaagtcacaacaaaaggaagactggagaaatgcttacttctagagggagaagactgtgcggcacaggaaacagcaaacagcggggtgatctgcagcccagagaccttcaaatgcgaacactataaactccaggcttgattccaacaggcgtgggatcagatttggtgatggaaaaagcgctgtttccttgcctgctttctccaagacagattttcggaacacatttccctaccctaaagcgacatcccagtagtgtttggaattttctgttcatagatattggaagagagaatttgctttatctgttgtctagagctcatcagtaacagtattcagttagcagacagaagtgtagtatgctgtatgaatattttatattaaaatatgaaggtttgagagcaggccattggctaactggactgtatttcccttgctcagtacatttttgttttcctttttaccattttatcttgctttggaggaccttaaatgctactgaaacttacctgagaaccataggactgtggcaaacaaaaccaattcatgaagtgaattaatgatgaggatctgaaaacttggctggggcctatatatactggaagttgaaggttaaaggaaaagcacaagaaactttggaagcactttttctgcatacttagatgatcttcatgggcccacagggtaccaggataaagccgaactggtaccatctactcttttgaagtgttttagtctagttattggatcagtgaaaaacattaggtataccgtttttaaataggctaatttttcaacttggatcattaggcttacgtactacttgtttcaaatgtgtcaaatacaaaaatggtaactaggttgacagatactttgtatttttcttttgaattcagacctggaatgtaagtaagtgacaatgcttatggaaagccagttagttagaattggaaatctgtcttgtcattttacaagcattagattcctttcctgtgtgaagaaagcctcagtgaaaacgggtctttgccataactttatgaagtgctacagaaagcacaaagaattgattcatgttcatcaatacctgctgagagtactgtcccaggaatatccagtggatggattcatcatccaggaggttcaaaagtaagatggttttcaaatcatttttgagactggttgcataacagcagggtacctgaaagagccttctgggagttagtgaactaggtagattgttttgttcacataacgccaccatcaacttaaagtgaattgtctttgttataaatgaggtcactatggacttaccctaaagatcttctgtacttctgtcttccataggacaaatgataagtactacatacctcatctcttgggttattattgtagtcttgcattcatgattatgaatttaaaaataaataccaattatggaaatagtactaaaggcttgccgcagcatgaaacattattttaattggtttaaagtccctttataaagagtgctacatggtttagataaaggaaacatataactattgagttacaggggattttattaattataaaatgcaatcaatttaaattacgtaggtttaagactagtcccttgggataagccccaagcgaatttgtcttcagattattaaaattagtgctgtaaatcagggtgggcaattcacagcctttctgaactgactgaactagagcttgcagtgaagtgttctgctgagactgagcaccttacagatatttttctccagaagatggtgctgggtaataaaatcatcacaattagggaatggttagtggtctctactgtggcaaatgccaactgttggaattcactttattgtagaaaaacccaaactgagactcttaagttttgtttagcaatgtgtttctggtatgaaacaaactactgtgtcactgtccaggtaggaaacaattctttcaactgggttttcagcataaatgggaactgatgtagaaggcaggatttagcccttctaggcaaaagaaaagctcagttgggtttcacgagtgttcctgtgcttatattcagtctgtgcctacatgttctcatgcatgtctaacctgatttacctcttacctgtaacctaccttatcatgtggcttttaattggcagtcactcagccatttctaagcagatatagtagtacctttcagaactcacattggcaagtgtaaaaagatgacttaaggtgaagtgaggacaaaatcacattctgcatactaacctatttttttctccctttaaggtgctaaacttgcacctcatgtccactcagtaacaagtattgggacgtagagcacagcctcactcagctctgaaaggtaatacagcctgtgaggaagtgagccagcagtggcctttgcaattgtggatcttgagctctgctctcagcagatttcaggtgtaaccatttgttaactgtactgaaggtgtgtcctcaagaagaaagtgttcaaattaaaaaagctgctgccaagtacactgtgtggtcttctcctttgaatcctagggttctatccctcttcagagtcatg

SEQ ID NO: 57061 - DNA, 1704 bp, Homo sapiens
tcataactatatactattccattgcatgaatattctgtaatttatttaatcccctatggattgataattaggttcattatagatagaagtgtaattaacattcctgtacatgtattttgctacttgtgtgggtatttctgtaggatgaataactagaaatttattggatcaggtttcacatttgcagttttgaaaactactaccaaaaagatttcaccaatttacaactccatcattagtaagaatgcctgtttgcctatagtctgccaaccctgaatccttaaaaatttttgccaatctggtaggcaaaatttctttcttttctttgaatattaatgaggaggaacatcttttcatgtttcttggccatttgcatttcctattatgaattgcttttgcccattttcctttttttaattatgaaagtctaatgactaccttctcattgtataaaaaacacagttctttgaatagagagacccttttctccaatgctaccaatcacattccacttaccacagtttaacatacatcctctagtcacctttccgtacgaatatacatacacataaaaacactttttacataaatagggatctcatattctgtagctttttaaaattttgggtctcaaaaaaaggataacagggtctttaaatttctttaatgggttggaatatggattaaatactatggaaaatgccattatttattcccttaatttttttcctctcgctattacattgccaaagtaaacatcctattcagatgtctttgtgcatgtgtgtgaatatttctttagtctggagtccagtaaggtggatttttggatcaaagggtttgttctctgtccaccttcagtcttcccaaaggccttcataactgtattttcaccaagtgtatggagaatgttcatttccccatataaccatacctacacttgatagtttttatctgttgggcgaaaaagaaccttttcttattttgcatttccctgattataaaaaaaaatggtgagattggggttattttcatgtttattggccatttatagtttactgtggattgtttgtatcccttacctgctttctattgggttatgtgtggatatattgtttttatttgttcagcatctccttccccatcttctggtaacacaacctttatttatttgtggggaacctattccctgtggcttaggtgagcatgtgaccaggcctggcctcctgagtcccacagcttcctagccacagtgataaaagaatgggtatataacttaagccaggctaaggaaagcccttaacagaacttctgctggaactactggaaagaaggctttatggagatcccaggaaccaaggaccatgtaagcctgaatttgtgccatgtggagagagtctgtctgaggagaaactcggatgctagcagaaatggaaagagaactaagttctgatgtcatttttctggaggccctagatccagctgtgcctaaagcctgccctacctccggactttaaagttttgtgagccaataaagtccctttcttgtttaagataattgaattgagtttctgttctgattaatataggttatttgtattttcttattgatttgtagaaaacctttgtaattttaaattctagactttatgcactatataagttaataaaattagcatggccttccatgatttgaaaaaaaaa

SEQ ID NO: 57062 - DNA, 755 bp, Homo sapiens; identical to SEQ ID NO: 13372

SEQ ID NO: 57063 - DNA, 1949 bp, Homo sapiens
ggcattgacccatagcctggtcctgcattacggtctctataagaagatgatcgtcttcaagccataccaggcctcccagcatgacatgtgccgcttccactacggagctggacaccctatgaagccccatcgcctggcattgacccatagcctggtcctgcattacggtctctataagaagatgatcgtcttcaagccataccaggcctcccaacatgacatgtgccgcttccactccgaggactacattgacttcctgcagagagtcagccccaccaatatgcaaggcttcaccaagagtcttaatgccttcaacgtaggcgatgactgcccagtgtttcccgggctctttgagttctgctcgcgttacacaggcgcatctctgcaaggagcaacccagctgaacaacaagatctgtgatattgccattaactgggctggtggtctgcaccatgccaagaagtttgaggcctctggcttctgctatgtcaacgacattgtgattggcatcctgggagctgctcaagtaccaccctcgggtgcttctacattgacattgacatccaccatggtgacggggttcaagaagctttctacctcactgaccgggtcatgacggtgtccttccacaaatacggaaattacttcttccctggcacaggtgacatgtatgaagtcggggcagagagtggccgctactactgtctgaacgtgcccctgcgggatggcattgatgaccagagttacaagcaccttttccagccggttatcaaccaggtagtggacttctaccaacccacgtgcattgtgctccagtgtggagctgactctctgggctgtgatcgattgggctgctttaacctcagcatccgagggcatggggaatgcgttgaatatgtcaagagcttcaatatccctctactcgtgctgggtggtggtggttatactgtccgaaatgttgcccgctgctggacatatgagacatcgctgctggtagaagaggccattagtgaggagcttccctatagtgaatacttcgagtactttgccccagacttcacacttcatccagatgtcagcacccgcatcgagaatcagaactcacgccagtatctggaccagatccgccagacaatctttgaaaacctgaagatgctgaaccatgcacctagtgtccagattcatgacgtgcctgcagacctcctgacctatgacaggactgatgaggctgatgcagaggagaggggtcctgaggagaactatagcaggccagaggcacccaatgagttctatgatggagaccatgacaatgacaaggaaagcgatgtggagatttaagagtggcttgggatgctgtgtcccaaggaatttcttttcacctcttggaagggctggagggaaaaggagtggctcctagagtcctgggggtcaccccagggcttttgctgactctgggaaagagtctggagaccacatttggttctcgaaccatctacctgcttttcctctctctcccaaggcctgacaatggtacctattagggatgagatacagacaaggatagctatctgggacattattggcagtgggccctggaggccagtccctagccccccttgccccttatttcttccctgcttccctcgaacccagagatttttgagggatgaacgggtagacaaggactgagattgcctctgacttcctcctcccctgggttctgacttcttcctccccttgcttccagggaagatgaagagagagagatttggaaggggctctggctccctaacacctgaatcccagatgatgggaagtatgttttcaagtgtggggaggatatgaaaatgttctgttctcacttttggctttatgtccattttaccactgtttttatccaataaactaagtcggtattttttgtacctttgatggtttagcggccgcgc

SEQ ID NO: 57064 - DNA, 981 bp, Homo sapiens
aatccaatttgagagttgcccactgaaatcaattaaaaatgtttattctgaaagatgctactataaagtttatagactcaaatgcttataatgcttaatcaaaactaaatttacaaaaaaacctagaaacaggttgaattgaaacctgtagatcattttataatattcatgagcaacaacttttttaaagacaaaggctactgttttaatataaattaagagctttaacatgatctccctttagtgcttttaattgtcacatggctgtaaaccaaagacccctccaaattttaaatgatcactgatactacttgagcagaaattctcaggtgtcagtacttttaatgttgtgtacatcaaattacagtacaaagatgactataaacaagatgcagccctcggtttccatgaacagcacactattacagtaaaccaagtttatattccaccatcaagtgtggctctcccatgacttcgctttgtgatgggatcattaaggaatatcctcaaatccaatagtctcatcattaccccctcaaaacatccagtgaaagatttgagcttgaaagaaatgggaagacgctgaacctgctgcactgccttgaattccatctgtaattttagcggagcaaatagaccctgaatgtttctcagtgtggaaaaattcattttatcttggttgagctggaaatttttttctgataattcaagggggatgactaggcaaaagttcatttttcacacaagaaaaacctttccgaagaagatcatgactttcaaaaggtccacttgctgaaagttcagtaactggaatactgtcctttagctcagatccaagtcctctggcattcatcttccgcagctctgcgaacagcctctctgcccgtacctcgggcgaattttggcccgaggccaattcctaaaagggggcgaataaatcgaaacaggcaagcgtttcgggggaaatgtatcggcccaatc

SEQ ID NO: 57065 - DNA, 915 bp, Homo sapiens
ttttttttttttttttttcacaatgtcagatcatttatttcagagcagttacacccagcagaggggcacaggcttaaacgccggcatattagttttcccgcacgcgagccctgcatggcggtgggctggggagccggggcgttgcgattctgccacacgccacgctctactaggcccccttactcctaattaattgcctgctcaccagactgtgagaaaataattgccactataaattttccctcctctgcataaaatattcgggggaaccagcacttaaaaaacagacttcatgaaagaagggcagcaaggcgtggatgctgcgccccccacaacccccactgcagaggacacagagaggccaggagccccttcctggttccccctggttccaaatgagacagaaaggctcaaagagctcccaggaatggtcacagctgaaaaaaagtcgagtgagtggctacatgcggcagccgcttgtgttcacctgccgtccacccaggacagtccccggcagcagcttgtgttcacctgccctccacccaggacagtccccgggctggctccaggctgcagggggtcagcagagggagcctcctgccccatatccttggcaaactcacttctccttctgggaccacacaagagacatgggagaatgttcctaattaggcaagagcacagaacccctaatcccagtctctgcttggcatgagtacccaggcaggcaaggaagatggagacaggtggatttcagctcctggaaggagccccggctcagagtggctgctgagtacccagccttgccctcctctgacgtgggaacgggtgtggctgtgctgccacctggtggcctcttccctcactgtgctgactgctgctcaaggggtcagcctggaggtcttcccggtgctt

SEQ ID NO: 57066 - DNA, 1303 bp, Homo sapiens
  misc_feature (1)...(1303): n = a,t,c or g
ggtggcaaacaactgtaatccgagctactagggaggctgaggcagaagaatcgcttgaacccaggagacagaggttgcagtgagccaagattgcaccactgcactccagcctgggcgacagagtgagaccctgcctcaaaaactaaaaataaaaaatgaacagtgtccaacaccttgaaagcattccgcatgactgaacgatcactgttacgtgattaccaacatgacgaccccacttctcttggccaaactgagttctcttctcttgtaaaaacttctgcatatgaagtcacccattccatttgactctttagccctcatcctggcattcaagggcatggacgactcaaccccactctctagccagcctgacctctccattcccttctctggcgtagaggccactcncaccacctgcccttaccccctgcccacttttgtcagcctgtactgtgttgaagctcccaggagagacaactgcagtcatcactttccactgtgttcagtgatgtcagttcggcccagctggaggtattcacatcatggaaacagaccatcagatttggtgtgtgtgtgttttattttgctttttcagagagccagctgttaaacactagccaacaccccattgatgctgttccttctacctgaaacacctcgcattgccgctgctccctctacctggaaacctccatttgtcaagctgctgctgtcttcaagatctacctggtcagaatctcctgctgtcctcttctgccacccacagcaatgtgagccttcactggctggccttccctactcactggagcagagctacggcatcagaatgccctggagcaggggttagaaacacagatttctgagtctacactcgaagnnnnnnnnnnnnnnnnnnnnnnnnnnnnnnnnnccaatttttctaattttagagatggggtctcacccacgttgccccaggctggtctcaagctccctggactcaggtcatcctaccacctaggccttctaaagtgttaggatgagccctgaaccttgtaacatgaacatttattagttatatctggaaaaaaatataaagttatttttatttgggtgatactgccttcaaaaaaaaaaaccaaaaaaaancaggaggccnancncaggggctnatncctgnaatcccagggctttggnaggctgaggcaggngnatcacttgaaaccaggagttcaanaccagcctggccaacntagngaanccccgnttntattaaaantncaaaannggnccaggcncgggggctnanacctgnaatcccagc

SEQ ID NO: 57067 - DNA, 728 bp, Homo sapiens
gctgccgccggggcacgtgcgagcgtcgggcccctccctgcgccaccgcctccgggacggcgggtggcggcccaggaccacgcgtctactttcagagccccccccgggccgcaggagagggcccgggcggggcggacgatgagggcccagtgaggcgccaagggaaggtcaccgtcaagtatgaccgcaaggagctacggaagcgcctcaacctagaggagtggatcctggagcagctcacgcgcctctacgactgccaggaagaggagatcccagaactggagattgacgtggatgagctcctggacatggagagtgacgatgcccgggctgccagggtcaaggagctgctggttgacttgttacaaacccacagaggccttcatttctggcctgctggacaagatccggggcatgcagaagctgagcacaccccagaagaagtgagggtccccgacccaggagaacggtggctcccacaggacaatcgctgccccccaacctcgtagcaacagcaattaccgggggaccctgcggccaggcctggtgccatgagcagggctcctcgtgcccctggcccaggggtctcttcccctgccccctcagttttccacttttggggttttttattgttattaaactgatgggactttttgtgtttttatattgactctgcggcgcgggccctttaataaagctaggatacgcctttggtgcagctaaaaaaa

SEQ ID NO: 57068 - DNA, 1784 bp, Homo sapiens
tttgtgagagctttaatggcacaaaatgtttatagctacaagttatacatgtattgtaaactgtatataacgatacaaagtgctaactaaaatagatgaagaatgcataatcactttggctcagttaattccaataatttccacaacgggttcatgaaaaaacttatctgactggctaagtcttcaattctcatttttttagaatagtaaatatttttactgcaatcacgggaacttgttgcactttccaatgtgcaagtttgtgcagttttgctcttggattctatttacaaacatcttgagccagttttcatcaaacatatgaaaaatgaagcctgcctttttgtccccaaattgtaaacaggtgtaaagctttttaaaacattaacctcacaatttcaactattaattgttgaattctcctttccaaaccacaatgttttcgttcaacacaaatctgggtgtagcagtaaaacgttcatcccatgtgttagggctacagatacatactacatgctctcataataaattctactgtgatgatgtattcacgttttaagtaattttccataatttcactgatgctttaagaaaaagggcaacactatgtttctttttaacgctgaaagaaatcataaatatacccagtttcagtggcaccactgatagaactgctgctgaacttggaaagagcacaatgcactagctgtaagaagtcactttcaggtaaagtgtaattttacttttcccccctgtaataccaattgtaatagaaattgcatactgtagcagtttagctagtcagttctcctaactttccagtctttccaattttattcaggcttttcaaaaatcagtgagccatcagatttactttcttcccaaagaaattcaaatatgaacacttgaaataaataggttatagaaggcaaatcaagtgttaccaggtttaagagtaagacagaaacatggtctaggaaaaagatgtccaaaattatttagacatcaaatgctagaaagaaaaaagaaaattactttcaaaactaggatatatcatctttcttaaagatagcccagctatattcttgaaaaaagataaaaattttgtttaatctatatgttattttccactataacacatcaattttacaaatgttgatgtgagaaaagagttagtttctgcaaactggcaaacctgtctgtcatagtgtttttattcaagttgacctgatgcactttatagattgctagttttaaaattaacaacggttctctaaatagtcaatatcaatgtctatatcataaacagtaattatttatatataaaacatgtggtatccttcagagtcatgctagatgttctgaaatccaagaaaatctactcgagataactggtcatcctgatgctttctaacaatttggtcctaaagcttcacattttagaaatgaacgaacaagtatatcactgaaggaatctgttgagtgttctgaactttaagagtttaccataactgaaaagacagctacatgagaaaatgaccagtgcctgcagtcgcaggaatcaccttgggaagactgtacagtaaacattattcagtgagagatcagaaggaaacaaatggcatcttttcagaacgctgtcaactgttcccacaacccaagtctgtttttccaagttgcacaagtgcttggaataactctgaaacaattctcttcagagtttaaaggcttcagagtataggtgatgcttcctaaaacaagaagcctgtattaacatcacaaat

SEQ ID NO: 57069 - DNA, 787 bp, Homo sapiens
  misc_feature (1)...(787): n = a,t,c or g
taagattgtccgggcccaagggcagtacatgtacgatgaacagggggcagaatacatcgattgcatcagcaatgtggcgcacgttgggcactgccaccctctcgtggtccaagcagcacatgagcagaaccaggtgctcaacaccaacagccggtacctgcatgacaacatcgtggactatgcgcagaggctgtcagagaccctgccggagcagctctgtgtgttctatttcctgaattctgggtcagaagccaatgacctggccctgaggctggctcgccactacacgggacaccaggacgtggctnaananncnnannnttatctgggcntngtggnnannnnnnnnnnnnnnnnnnnnnnnnnnnnnnnnnnnnnnnnnnnnnnnnnnnnnnnnnnnnnnnnnnnnnnnnnnnnnnnnnnnnnnnnnnnnnnnnnnnnnnnnnnnnnnnnnnnnnnnnnnnnnnnnnnnnnnnnnnnnnnnnnnnnnnngacccaatctgagtcttatcgttgtactgatagaagggtcagatatccccacatggagttgagtgggagaaagagattcactagagaataactccttagagaccaatgtctgtagcaggtgtacagcatcttgtgaaagttatggagcatgaaaagactgaagggccaggacagtttgcatgggctgagttataccagctagaccaggaatagaacaaagaattctatacctcaggatttcaaaaagttagcaacttgagaggccagtgctgagcaacccagtacccaggaaatg

SEQ ID NO: 57070 - DNA, 1309 bp, Homo sapiens
tttttcactttacaagaagttcactcttattcatggaggcatcatgctgacaggactggatccaaggaaaatgctagtgactttcccaacttcattccccaatcaaagaggacagtttctggtttgccactggtgagtttattacacgactaaagttcaaataaaaaaataaaaaccaaaatcttggcagggaagctagagccagaatcaggaaaatctgcttccttgtccccagactccctggccaagcccagctccactaactcatcttgactcgatcaagttcctcatcaagacttgcatctgtaccctggacatctctgctgctcccactggagagtgagtctggagtccctggcactggggctttggtgagggctccatatacacccatggcctgagccaccatgctggtgacatcgccagggttggagggcagtaggatagtgttggagtccttggccagtttggagaacgcgctgacatactgctcggccacagtcagtgaagctgctgcatctccattatgttgtgtcagagctgcagccaggattcgaatagcttcagctttagccttggccttcgccagaactgcactggcctctcctgctgcctgatttatctgttcagccttttctgcttcggaggccaggatctgggcctgtttcttcccttctgccacattgatggccgactctcgggtcccctcagactctagaactgtggcccgtttcccgcgctctgcctccacctgcatctgcatagactctttcacccggggtgggcacatggatatccttgatctcataacggaggcagcggataccccagcagtcagcagcttggttgatggcatccacaatgctggcattcagggactcccgttcccggaagactttgtccagagagagtttgccgagctctgatctcatggttgtttgagctagctgggtgacggcatactcagggtcctccacaccgtagcttgccttgtaagggtccatgatgcgcaggtaaaggactccatcgatttgcagagttacattgtcgagagtcacagccgactgctcaggcacgttgatgacaatttccttgagactctgcacatatcggatccggtctaacacagggatgaggatgttcaaaccaggctccaggatccggtggaatcggcccattcgctccaccaccccaggcctcctgctgcggcacgaacagtaccacggtgtttcggggcaatccagaggaggcgcggcgcggagcgcggccagaagccagtagagagcccctcagcaaaagggccccaagt

SEQ ID NO: 57071 - DNA, 761 bp, Homo sapiens
  misc_feature (1)...(761): n = a,t,c or g
tttcactcttatcgcccaggctggggtgcaatggcgcaaccttgctggtcactgcaacctctgcctcctgggttcaagaaattctcctgccttagcctcccaagttgctgggattacaggtgcccaccaccacaccaggctaatttttgtatttttagtggagatggggtttcaccatgttggccaggccagtctcaaactcctgacgtcaagtgatcttcccgcctcggcctcccagagtgctgagattacagatgtgaacccatgccaggcccnggaattttgttttttaggaaggctttctactaatggaattcctggccttgagaggatgttactttcgaaggaaaggatttttttgttattaaaagagccacctaagctgaagattcccttgagaacaagtactgtccctagtttcccagtgctggaatatagaaaatggatggacaagtaaatcccactcagcacccatagtcccggcatggggacctcaacacacctgagccccagacatcacctttcattgcgagtagctctggacctaccatgaaagacttctgaatccaggaagagaaactgactgggcaacatgttattcagatggggtcttcttatgttgcccaggttggtctcaaattgctgggctcaagtgattccacccacctctgcctcccacagtgctgggattatgggcatgagccagcgcatctggccaccttattttcaattactggctcaatgtaatggctccatctcag

SEQ ID NO: 57072 - DNA, 1043 bp, Homo sapiens
  misc_feature (1)...(1043): n = a,t,c or g
cgagggttatttatttgctttttagcccaatttaaagttttagtgtgaaaacttaatttttaaaagtttactcataagcttatcaaattaaagcatattttatagagaactacattatagtctagatttttctttctcaaatttctcaacctcatgccatctactgtatgtccacttgtaccaaaaaaggaagaaaatcccagctactcaggaggctaaggcaggagaatggcttgaacctgggaggcgaaggttgcagtgagccaagattgtgtcactgcactccagccttgagtgacagagcgaggctctgtatcaaaaaaaaaagttgcgggggggtgctcaatcttaactgcagaggatctacagatgaaaaaaaatgtggggaaatgctttaaaaaaatagcaaaatgtgcaacttcttacaaaaattgttaacgttaggtacttctatatattttatatgaccataatgtccgtgtgtgttttgtaccttcagtcccttgttattgttccgtatattacctgtaagcagatactgtattttattttagcctatttgacagaacacatcactcagaaaaagtgaagtttcagagcaaacagtgaagaaatcagtgtgattgtagacaaaaagtcggttcacagaacggagcagcggggagaggaagggaaaagcttcatagtttggtgcttatcacatcaagagattggtaaatttctgaggaaagacaggctaatggggcactgaaatggaacaactcctttaaacgtgcagccttttgaatttttcctcaaaaccaagaagttgacctctgagctgtcaggtgaccactgtgtgcaaaggggatggattctcttgtcagtagacggtcttctccatgaagcgagagtaggaagtgtactggaatggccaagtgggactgcttcagctgaccaggttcttttaaaccgtagtcatgctttcccactaactcttaaatccttatgcttanaaaattgangataangctgggcacagtggctcatcctgtaatcccagc

SEQ ID NO: 57073 - DNA, 430 bp, Homo sapiens; identical to SEQ ID NO: 22657

SEQ ID NO: 57074 - DNA, 869 bp, Homo sapiens
gtataaacccaaggcacagtcacatacccagggatacaagacactgcagactcccgagagacataacacagaattgcaccatgccaaactacaaactcacttattttaatatgagggggagagcagaaattattcgttacatatttgcttatttggacatacagtatgaagaccacagaatagaacaagctgactggcctgaaatcaaatcaactctcccatttggaaaaatccccattttggaagttgatggacttactcttcaccagagcctagcaatagcaagatatttgaccaaaaacacagatttggctggaaacacagaaatggaacaatgtcatgttgatgctattgtggacactctggatgatttcatgtcatgttttccttgggcagagaaaaagcaagatgtgaaagagcagatgttcaatgagctgctcacgtataatgcgcctcatcttatgcaagacttggacacatatttaggggggagagaatggcttattggtaactctgtaacttgggcagacttctactgggagatttgcagtaccacacttttggtctttaagcctgacctgttagacaaccatccaaggctggtgactttacggaagaaagtccaagccattcctgccgtcgctaactggataaaacgaaggccccaaaccaaactctagctgatccatgttgccttcaagtttgtttttctcgggggcatctctctcatcagataagacagctacatcagcctgccagataatccacatgctccctccccagctccactaagattttcactttagccatattctgatttttaaaaaggaaaataaaaacaaatctttcttcagtaaaaaaaaaaaaaa

SEQ ID NO: 57075 - DNA, 351 bp, Homo sapiens; identical to SEQ ID NO: 13383

SEQ ID NO: 57076 - DNA, 1101 bp, Homo sapiens
ttcgcctttcgcggccttcctggtgacggagctgctccccccgttccagagactcatccagccggaggagatgtggctctaccggaacccctacgtggaggcggagtatttccccaccaagccgatgtttgttattgcatttctctctccactgtctctgatcttcctggccaaatttctcaagaaggcagacacaagagacagcagacaagcctgccctggctgccagccttgccctggctctgaatggcgtctttaccaacacaataaaactgatcgtagggaggccacgcccagatttcttctaccgctgcttccctgaatgggctagcccattctgacttgatgtgtacaggggataaggacgtggtgaatgagggccgaaagagcttccccagtggacattcttcctttgcatttgctggtctggcctttgcgtccttctacctggcagggaagttacactgcttcacaccacaaggccgtgggaaatcttggaggttctgtgcctttctgtcacctctactttttgcagctgtgattgcactgtcccgcacatgtgactacaagcatcactggcaaggaccctttaaatggtgaaaatgggcagatgaatagcaataagtggacctttgttactcttctgagttagaaaaattctaatttagtacactctgaacaaagcttattatacttacttaagatgtgttttgatttggtgttcagaaagcaacctgacaatgataatactgtaactatgataaaattgagaataaaaagattttatttagaaatcataagtctggaattgaggttattttagccccacagtagagtatcctggagggccaggtcctctatgctatgtgtatgtaataggatttaggagcctaatattaagagaagaccttgtttccactctcttcagatgtactagttggatccatgattggaatgacatttgcctatgtctgctatcggcagtattatcctcctctgactgatgcagaatgccataaaccatttcaagacaaacttgtactttccactgcacagaagcctggggattcttattgttttgatatttaaaaattgaatccg

SEQ ID NO: 57077 - DNA, 1783 bp, Homo sapiens
cggggcttcgcgtctgtgcttcctgtggctgacgtcatctggaggagatttgctttctttttctccaaaaggggaggaaattgaaactgagtggcccacgatgggaagaggggaaagcccaggggtacaggaggcctctgggtgaaggcagaggctaacatggggttcggagcgaccttggccgttggcctgaccatctttgtgctgtctgtcgtcactatcatcatctgcttcacctgctcctgctgctgcctttacaagacgtgccgccgaccacgtccggttgtcaccaccaccacatccaccactgtggtgcatgccccttatcctcagcctccaagtgtgccgcccagctaccctggaccaagctaccagggctaccacaccatgccgcctcagccagggatgccagcagcaccctacccaatgcagtacccaccaccttacccagcccagcccatgggcccaccggcctaccacgagaccctggctggaggagcagccgcgccctaccccgccaggccagcctccttacaacccggcctacatggatgccccgaagcggccctctgagcattccctggcctctctggctgccacttggttatgttgtgtgtgtgcgtgagtggtgtgcaggcgcggttccttacgccccatgtgtgctgtgtgtgtcctgcctgtatatgtggcttcctctgatgctgacaaggtggggaacaatccttgccagagtgggctgggaccagactttgttctcttcctcacctgaaattatgcttcctaaaatctcaagccaaactcaaagaatggggtggtggggggcaccctgtgaggtggcccctgagaggtgggggcctctccagggcacatctggagttcttctccagcttaccctagggtgaccaagtagggcctgtcacaccagggtggcgcagctttctgtgtgatgcagatgtgtcctggtttcggcagcgtacgcagctgctgcttgaggccatggctcgtccccggagttgggggtacccgttgcagagccagggacatgatgcaggcgaagcttgggatctggccaagttggactttgatcctttgggcagatgtcccattgctccctggagcctgtcatgcctgttggggatcaggcagcctcctgatgccagaacacctcaggcagagccctactcagctgtacctgtctgcctggactgtcccctgtccccgcatctcccctgggaccagctggagggccacatgcacacacagcctagctgcccccagggagctctgctgcccttgctggccctgcccttcccacaggtgagcagggctcctgtccaccagcacactcagttctcttccctgcagtgttttcattttattttagccaaacattttgcctgttttctgtttcaaacatgatagttgatatgagactgaaacccctgggttgtggagggaaattggctcagagatggacaacctggcaactgtgagtccctgcttcccgacaccagcctcatggaatatgcaacaactcctgtaccccagtccacggtgttctggcagcagggacacctgggccaatgggccatctggaccaaaggtggggtgtggggccctggatggcagctctggcccagacatgaatacctcgtgttcctcctccctctattactgtttcaccagagctgtcttagctcaaatctgttgtgtttctgagtctagggtctgtacacttgtttataataaatgcaatcgtttggaaaaaaaaaaaaaaaaacaa

SEQ ID NO: 57078 - DNA, 1229 bp, Homo sapiens
ttccaaaagtgttcttttatttctagtaacatatattgtataaatactctattttatatgcacttccacaaaagcgatataatttaaaagtttttttcattagaaataaatgtataaaaataaatatgttattataggcatttattactaactatagtccttcttggaaggaacacccaaaccaatacttataaagtacatgtaatttatagtaacatattttactatatacatatggaaaaaatcatattctcacagaagagctgaacagacattcaccaggatacgactgttggaccagctgctggagatggacctgctacccctcagcagcctccccaccacaagacaagtgatctcaatgtcccccaaacctgtgggaccctgttctacacacctcatttttgttccggcgtttcatcctccttgtgtgattgtactgattttcatgagacacaagttacttcttttacatccatattcccaaagcagggttacatggtaggaaagaaaggaagttggaggtactaagctcattgtgtctcctctagcttttaccagcatctaatgcttcactgctttttttccattgtagactttaatgcacttgaataaatacatggagttgttttttcctcaaaatgaattacacaaataaagactgagatggtccaaaaaaggaaagaggaagccatttgcgttatttcacgttgctgagcctttctctcatgttgaacaatctgaagttttaattctcggtagaaataatgtataaacattctctgaaaccatagcagccataaacagtgctggtcaaagatcctatttgtactcctttctccccccattgttagtgaggtaaagtaaaacaggtcttagtaaaatctcacttttctcctacttttcatttcccaacccccatgatactaagtatttgataagtaccaggaaacaggggttgtaatagttctaactttttttgacaattgctttgttttttctaaacttgtaatagatgtaacaaaagaaataataataataatgcccggggctttattatgctatatcactgctcagaggttaataatcctcactaactatcctatcaaatttgcaactggcagtttactttgatgattcaactccttttctatctacccccataatcccaccttactgatacacctcactggttactggcaagatacgctggatccctccagccttcc

SEQ ID NO: 57079 - DNA, 502 bp, Homo sapiens; identical to SEQ ID NO: 22668

SEQ ID NO: 57080 - DNA, 1486 bp, Homo sapiens
  misc_feature (1)...(1486): n = a,t,c or g
ggcctatgtaactgtttgcaaccagtgtggcagagagtctaagcttttgtcaaaattttatgagctggagttaaatatccaaggccacaaacagttaacagattgtatctcggaatttttgaaggaagaaaaattataaggagacaatcgctatttttgcgagaactgtcaaagcaaacagaatgcaacaagaaagattcgacttcttagccttccttgcactctgaacttgcagctaatgcgttttgtctttgacaggcaaactggacataagaaaaagctgaatacctacattggcttctcagaaattttggatatggagccttatgtggaacataaaggtgggtcctacgtgtatgaactcagcgcagtcctcatacacagaggagtgagtgcttattctggccactacatcgcccacgtgaaagatccacagtctggtgaatggtataagtttaatgatgaagacatagaaaagatggaggggaagaaattacaactagggattgaggaagatctagcagtgtggcaaaggaactcattgctctcgaaatgcatatatgttggtttatagactgcaaactcaagaaaagcccaacactactgttcaagttccagcctttcttcaagagctggtagatcgggataattccaaatttgaggagtggtgtattgaaatggctgagatgcgtacnaagatgtggataaaggaaaagcaaaacacgaagaggttaaggagctgtaccaaaggttacctgctggagctggtctgtaagatattctgggacagcactgttgccattaagtgccttgtttttttatgttcacaaatgtatatgaagaaactttctcaaacttactctttctaataacccactaaagccagcttaaacactctaaaagtactttgtaaaccaacaataacttgatgtgtagcattccatattatttccattacgttgtactcctaaaatggggagctgttaataaattataacatttaggtcagcactctgcatccatgagtattgtagatatttatattttgtgagatattaacttgtttaaggaaaaatccggatgggattactatggaaaaagcaacttgcctgttctgtttcttggcatactttgtgacctaacagttttaacagacattctattatatgaatacagtttttttgatactattagattaacttgaagtttaataccaaatattatgctaagagtagaaaagctttctgctgacccctgatttcttagaaatatcccacataatccagcttatcccttttctgtatatgtttattcaggtttacctgatgtctcaaaatgaaaccaaattaagcctttttaaaggctgatgtgccatttgtattaagttatctttgtcattttaaagacatgaattccccaagcctaattcctacttaaggaagagagacaatttagtccttactttagaaaataaatacttaagcat

SEQ ID NO: 57081 - DNA, 2664 bp, Homo sapiens
  misc_feature (1)...(2664): n = a,t,c or g
atggcgggcggagaagctggagtgactctagggcagccgcatctttcgcgtcaggatctcaccaccttggatgttaccaagttgacgccactttcacatgaagttatcagcagacaagccacaattaacataggtacaattggtcatgtagctcatgggaaatccacagtcgtcaaagctatttctggagttcatactgtcaggttcaaaaatgaactagaaagaaatattacaatcaagcttggatatgctaatgctaagatttataagcttgatgacccaagttgccctcgccagaatgttatagatcttgtgggagcagtacacctgacgagtttcctacggacattccagggaccaaagggaacttcaaattagtcagacatgtttcctttgttgactgtcctggccacgatattttgatggctactatgctgaacggtgcagcagtgatggatgcagctcttctgttgatagctggtaatgaatcttgccctcagcctcagacatcgggacacctggctgctatagagatcatgaacttaggcatattttggatcctccaaattaaattggatttggtaaaggaaggtcagcttaaggaccattacgagcagatccttgcattttgtccagggtacagtagcagagggagctcccattattccaatttcagctcagctgnaatacaatattgaagttgtttgtgngtacatagtaaagaaaattccagtacccccaagagactttacttcagagccccggcttattgttattagatcttttgatgtcaacaaacctggctgtgaagttgatgnccttaagggaggtgtagctggtggtagtatcctaaaaggngtattaaaggtgggccaggagatagaagtaagacctggtattgtttccaaagatagtgaaggaaactcatgtggtaaaccaatctttccaaaatngtatcactttttgcggagcataatgatctgcaatatgctgctccaggcggtcttattggagttggaacaaaaattgaccccactttgtgccgggctgacagaatggtggggcaagtacttggtgcagtcggagctttacctgagatattcacagaattggaaatttcctatttcctgcttagacggcttctaggtgtacgcactgaaggagacaagaaagcagcaaaggttcaaaagctgtctaagaatgaagtgctcatggtgaacataggatccctgtcaacaggagggagagttagtgctgtcaaggccgatttgggtaaaattgttttgaccaatccagtgtgcacagaggtaggagaaaaaattgcccttagccgaagagttgaaaaacactggcgtttaattggttggggtcagataagaagaggagtgacaatcaagccaacagtagatgatgactgaagaataccagttaaataatacattcggatggatttggaagttggaattcctcttaacaaccaaggggtttattttcaaagcaatattggggaattgatttcacagttcgttaccttagtaggtaacggtaaggttattcttttttttttttttttttggttatgaaaacttagggactaaaattaatataaaaattggcataatgttggattgaatctacattttggcagaagttaaacattcccacataatgtcaaaattatacatcatgcagttctgtttttttgtttgttttattttgttttgtttttgagtctggctctgtcacccaggctggagtgcagtggcgtgatctgcaacctctgccccccgggtttcaaggcgatttctcctgccttcagcctcccgagtagctgagattacaggtgcgcgnccacnnnnnnnnnnnnnnnnnnnnnnnnnnnnnnnnnnnnnnnnnnnnnnnnnnnnnnnnnnnnccggtctctcctgacctcagnnnnnnnnnnnnnnnnnnnnnnnnnnnnnnnnnnnnnnnnnnnnnnnnnnnntttgcccagcccacatcatacagtttgaaatgaaactttgccacaaccagcctttgctgtagcacacacatatatcactgaacctgtttgaaataaagttttttttctttttcatgattcgtctttgagtacctccaggctgaaagactgttgtaccagtaaaaacttaaaggcacaaattctccttgaagaccttctcccttttatgtggccccatattttatgttgctttatctttgaaattttgcatgaaaaggaaatgaatggattcgaatgaaattgtcctttagagcatgattacttgttcccatggacaaatatttttctccccttgctcttcctggcctgaaacacgggaaaccagagtcaaaagttatctccctctccctgtgatgccttgagatttttttctgcgttgtttaatgcctgaaatccaagtcttcctccatgggaaaatactgttataccaaataattctagatgagtaacaaagatctttttaggccttcattttatgttttttcttaactgttatattatgattgtgacatagattatactactactaatttttggatgtttcaaaaggtcaagaagtaaaagatgttagaaagcaatgagtgagtccttttgatttttaacttattccccatgtccctatacttcgtgtgcttttc

SEQ ID NO: 57082 - DNA, 2209 bp, Homo sapiens
aagcccgcgagcagacgcggaggctggtggccctgggcgagatgccgtacgccaaccagcctaccgtgcggatcacggagctcactgacgagaatgtcaagttcatcatcgagaacaccgacctggcggtggccagaatcgattcggagggtcttcatcgctgaggttcccataatagccattgactgggttcagattgatgccaattcctcagtccttcatgatgaattcattgctcacaggcttggattaattcccctcattagtgatgacattgtggacaagctgcagtactctcgggactgcacatgtgaggagttctgcccccgagtgctcgggtggagttcaccctccgatgtgccggtgcaatgaagaccagacgcgacatgtcacggtctccgaagacctcatctccaacagcccccggggtcattccggtgacatcccggaaccgagataatgaccccaatgactacgtggagcaggatgacatcctcatcgtcaagttgagaaagggccaggagctgagacttcgagcctatgccaaaaagggctttggcaaggagcatgccaagtggaaccctactgcaggggtggcttttgaatacgatccagacaatgccctgaggcacacagtgtaccccaagcccgaggaatggccaaagagtgagtactcggagctggatgaggatgagtcgcaggctccctatgaccccaacggcaagccagaaaggttttactacaatgtggagtcctgtggctctctgcgtcctgaaaccattgtcctgtcagccctctcaggattgaagaagaaactgagtgatttacaaactcaattaagccacgagatccagagtgatgtgctaaccataaattaactgcagcttgcctgcttcagcaaaaacggagattcaggccagcagctggatatgggggtctctcttcagactcttctcgtttctgagaatctagtctactgttggttgagcttcttggcaggacatcagtaccaactagaagtgggtcatagatagattaccagggatgcagtggtgtttaggcaggataggtctttactggccctgactgctgttaataattgggcagcagtgctccccagatcccagaaggtccctgctggagtgtttccagtgcacctgtagggaaccaactagacttctctcctggttagtccagctctttactctaaaccctttctgtccaaaatgagtcattttcagttgtaccttagatgtctggtgttgaggatcaagtgccatagcctttattcagggggcctataaacccttccagttcttgccccagggctggcctcgtagcgcttcaaattcccaggtgtccctaatttgagaagtaaccttttggaatagcattagaccctggctgtcccctccccaccaaataaacatgatatttcattctctgtccagcagtcatgaaccccttcacctccaatgacctgatcatttagtttggtgggggtgggggtgggggtgggggtggaagcagccgcaggagcaagggcccctcccacatacacaggaggagtatttcatttctccttaatgaaggctctggccctaacccctcagcactgtctccagataggaacatgcacaaagcagttaattaggcagcctggagaaaaccagagatccagtacagaaaggaaaggatatttattgattaacagaagttgtctttttaaaagtgtttatttttggcaataaagagcacaacataatctccttcatgcgtcatcgtgccaacttagctgagccagccagctctgccctccctccccaaagacctttggaccccagttcccctctacaggctagctcatccctctgggtggtcattccccgggtcacgttgagagcgaggctgactgcaccacctccctagctcaagggctcctttgggaggggccgcgtgctttatcatcctcctgccacaactcaaatagtggttatttacaagaaggtctgttcccacaaatcaggaccctaaagtattaaaaaacaaaacccaaaaaacaacaaaaaaccccacacaaccaaaagtttgacgtgaatagaaagatagcccttctgcatggtagtcaacaaataccagcactagaaaatcaatttgctttaattggcatttgcaggcaggggaggccttcaggcacccttcgtgcccg

SEQ ID NO: 57083 - DNA, 1424 bp, Homo sapiens
  misc_feature (1)...(1424): n = a,t,c or g
gctgaagctgaagaacgtgtttctcgcctacttcctggtgtcgatcgccggcctcctctacgcgctggtacagctcggccagccatgtgactgccttcctcccctgcgggcagcagccgagcagctacggcagaaggatctgaggatttcccagctgcaagcggaactccgacggccaccccctgcccctgcccagccccctgaacccgaggccctgcctactatctatgttgttacccccacctatgccaggctggtacagaaggcagagctggtacgactgtcccagacactgagcctggtgccccggctgcattggctgctggtggaggatgctgagggtcccaccccgctggtctcagggctgctggctgcctctggcctcctcttcacacacctggtggtcctcacgcccaaagcccagcggcttcgggagggcgagcctggctgggttcatccccgtggtgtcgagcagcggaacaaggccctggactggctccggggcagagggggtgctgtgggtggggagaaggacccaccaccaccagggacccaaggagtcgtctactttgctgacgatgacaacacctacagccgggagctgtttgaggagatgcgctggacccgtggtgtctcagtgtggcctgtggggctggtgggcggcctgcgattcgagggccctcaggtacaggacggccgggtagtgggcttccacacagcatgggagcccagcaggcccttccctgtggatatggctggatttgccgtggccctgcccttgctgttagataagcccaatgcccaatttgattccaccgctccccggggccacctggagagcagtcttctgagccaccttgtggatcccaaggacctggagccacgggctgccaactgcactcgggtactggtgtggcatactcggacagagaagcccaagatgaagcaggaggagcagctgcagcggcagggccggggctcagacccagcaattgaggtgtgatggcggccccaccccaactaccacctcttttcaggcacagaccttgtgggactgggccccagncctgcccaggaatgtggttttccaagtcctgacccttggaagccaaaaatggcccctctgcccctccaggcccagggcatggtcctgctgcttcacccctcccctagcctgccgtgtggcactgcccacaggctggggacaagcagcccttgtgttgagtcaggttggccctgtctagggtggaacagaaggacagatggacccaggagggagggcagctgagtaactgggtaacttattggggctgggcatgcactggggggctggaggagctgggctggacccttcccacctgagcatgctgacccccttcctacctccagaataaagaatctcaacctggaaaaaaaaaaaaaaa

SEQ ID NO: 57084 - DNA, 1746 bp, Homo sapiens
ttttttttttttttcatttaacttttggtaataaaatactttattggtaccatttaataaatgtcaaaaacgtatagcatttccattgcttagcttccatctttaaacttaaagctagttaaaaacaacaggaacaaaagtaaactcatttgattctctcaaaaaacaagctgtaacttacctttgcaaataattaagttctctcactttaaatatcgtaattcactggtcttcataataaataattataataatatataaaaggagacagtggcctgaattattttgcagagaacatttcacacatcttttaaaaaaatcactaaactaccacaacttaaaacttgtaagaataattaggtaagagttattgtaatattgaattaatatagcacctagaaatttgaaatttgtaatatttcagatgatatgatttactgagaaaaagagtaatgatttttcttcagtgaattttcaggggttttcaacataggtctcttttaaaagggttaaaaaatttatgcatactaggaattgacctgatggtaacagatccatgtgtgacaaataatgtagtgcagtcctatctgaatataatttctttttcactttgtctcattaatttatacctcaattaaaacattctatatgcaagtgacatatttctctaaaacattccgtatttcagatttccattcagactatcttcccctcctcccttttctcaaatcagaagtgatcttgtggcataccatttgctttttctctccacaatgaaactctttttcaactcaaagtattatagtaatgcaaatacaaatgtagcatatattaatatattagaaaaaggatagtaaatacatatggatccatgccaaattagaaaattgaaagcaaaaacaaacaaaaccatgctatgctcatctattctgaaccaccatgggaagaccctgatagagctggctcacataaactaatgttcccagacagagctaggatcctgtattccaacataattaaatgctctgttaaaaatgtttccgtgttcttttctgtttgttcaaaatagtttacagcaactgactactaatcctaatcctgaacatgataatgtaataacatatttttaatcaagccatagattctaacctattttctactattacccatttgcttaaaaacagactttcaggggtgtaagcaacagtaagttaaggagtttttagttctacctttctcttgattgattgattggggatttcagatgtgtcaaataaatatcctctaattcagtggaaaaggattcttcaagctatcaaagtcaaggaggctgactcaggggcgggcaggtgaagatacctatccacatactatgctcataacgctccatctcctctgtaagaatgtgctgctctccacccaacagtggcccagcacattccatccgctccacctagatgcaatcaggacaccatgcaatcccacacacaatcagaacatgggcaccaggtagaactaactcaaaacaacttttgggacaaatatgagatttcaatttgtcaattattccatagtgcagtattctcacaaaacagagattttgtgttgaaacatttgttttttcttctcacatcaagttgaattgctaaagtaatgtcagaaagaacatgaaaaataagcatgtcttctccaaaagaggcactgcatctggaagtagaagtaaggctaaataaatagtgctgtttt

SEQ ID NO: 57085 - DNA, 342 bp, Homo sapiens; identical to SEQ ID NO: 13400

SEQ ID NO: 57086 - DNA, 1851 bp, Homo sapiens
ataaaaactcaacacacattggattttaatgagaaaataactgtatacttgcattgaatgcctcacaatcactctaaaaccaaagcaggataataacatttaagtggttaacatacacaggaaaaccagatacagagtataatttccaaacacagtattgctgcttttttcccctcctcccccaaaaaaagaaaaacaaagaaaaaataatttgggtaaagagcaacacaaaatcaaaattggcagctcactgaatgcttaaaattcaggaaatttgttctttaactaaaatggaatatattcaccatctctaacacttaggctacttttttttcaatacatagtttaattaaatccattctttagttgggaaaaaaaaggtttaattatttgtcttcagagacaagaatcaacactgttttagtgttccttgttacactttatatatatatatgtgtgtgtgtatatatatgtggacattgatctatatacggcttatatgtcattgtctagggtgagcagcatgcatgggggtatgaagaggcaagtaaactgcattgtgtcatccaagtaaaacacagcacggcctcctgccactgacagaccctgtttccataatttctggatgagaaagccaagtcatgtcagtagttaatcagctctggaggaaagtgaaacacctataaacacggcagaatgcaatacttccagaaaggcttttaacacctacagaatctaaacattttgtaagaggtggggttaacaagcttgtgtgctatttgggggtggggctgagcatcagaggcaaagtttttcgtaagcctctttctctcgatggattaggcaggaatgactttcctccaggggacggtcccatcttcagaaagttaaaagggtccatttgggatcccagagcctagcacggtgctatgtacaaagcggtggcccaaggtttcttgaatgaataaaaaactcaagagcacagagaaaatctggctctcccaagtaaactgtaatttacattttcatgggattataataggatcttcagtgagtggagcaagaagatagacagcagtaatccggaaggcagcataggagtaatagcaaaagttaagagatgtaggggccacagtgaaaacagctttgtgactgtgggagagtcccagaaacagtatttctttccttatccacacacggagcatggcccaagaacccccagctctagaactctgttattctttaagcaataagtgctctggttcaatcaactgtggtcaaagaccacttcatctgcctctaaagccattccgcgaatagtgtggcctcttaagcttttctcttagctgtacattctcttgtcaactgtaggtttcatgaagcacatggtttccttcaaaacagaacaaaaaactttaaggtaagtcataaggatggtttcctcttgtgaaaaatggggaagttagtctatatcatgtctatggtctctaccagatccatgagtcagagaaaacatgaagcgcatcacattttttgggcaacccatagaactatcctactctccagccatcctaactgccactgtgcctggggctgtgcaatgctgctgcctcctctgttcttatccctgtgtctgctttgggaacgcccccttatcgctgggttctcagcccaggcatctgggacctctggctagaaatcctcaggtaaagacgatcctccttcctgagtcctcccatttcacatcaggacttctaatctaacacggatctcattttcctgagaattttagtctccatgccaacctccctcactataaaatgaatttcttgcaacagggatcttacttgc

SEQ ID NO: 57087 - DNA, 822 bp, Homo sapiens
tttttttttttttttttgacaacttgctcttttaatgtggaatggatgaccctccaatatttccccagagcaccccatgctcttctatcagggaacttattaaaatcatgtaacatgtttcttggtgacaagatttaggtcttttgtttctgtaacacatgccagatacttagcccggtatctggcatgtggcatgcccagtaaatgtttgccgaataagtgaatccatgtctcttgcttgccgctatttgcccactgaatccatgaagtgagttttcataatggataccactgaaaattcaaccctgaaaagaatgtcttcggttgtgggcccataaagtcttagaaatagtgaagctcctactgtcagtccttgaaagggaacaggacagctgctgtatgccttgagaatgggcaaaagacaagcgacaaaaagagcaccgaaggcacctacttgtccctctgggccagggcctcagtgtattggtcgggcttgacctggtctcctggtacatcttcccagtttttggtgactcccttcagtttctctgagagctccaggttacactccttctctgcttccaccagagctgccatccgcgcagcttcattctttgctagcctggattcctcctgcagaagctgcatcttattctccaagagctcataaacatgctccgtctcctgctgtcgctcctcaaactggcgtcggagctcagcttcattctgactgttgagattctccacatcagcccatgttttatccagatgctgtttcttgtcctggagttctcgtttcaagctctccacttcaaccttcag

SEQ ID NO: 57088 - DNA, 1674 bp, Homo sapiens
ttttttttttttttttttaagcacattacagcaatttatttagatgcttaaaatgaatacaaagggaaaataaagatcacaaaattatacatactacaacagtgtgtcatatattagatggtataaatgaatccaccatgatggtgttgaactaaagataaaactaaatatccaaaatgcagcactcattggtttgctgcttcaacacaacacacttttatacagatctaaaaggtgtcaaaattagtagctgcaaagtcaattcttgcatgtgattttagcttaaaagatttcagaaaacagatctgaaataccagtttttgtttttgacagctgtaatgtcaaggatattcagaacaagaaaaatcctataatacaagagagtccagatatatatcttacgtggctggcctctgttgcaagattgtacaaggttatgtgcaaaaactaagtctgtccaaaaagtccatactagcgcagttttgagcttttgctaggtaaactagatagagcgtttattacacagcaagggcaacactaaaaaaagaaatctatgatgggcacacagtaacaggatcatgagcatcacttgaataggtctaaaagactgtacaaatatacatttcaactattcagaatgaatacatgaaaaaaaatcgcttttcccaaagtctactatacacattagactggtagcttgtatgttggccctacactaccatgtgaattagtttaacacttctcaaagacatctgaccaatcatttcacagagggaaagaaatgttgaaaaggcagataaaataaacctctgcttttccctcgtgtgtaattcaaggagtcaccagcttattggtttttcaacatttagttaccgtgtctgtcagagaaggttctgaagcaagaaaagcctgtccctgtcatagacttagaaataaccactggaactgcagcggccacatgccccacagtccaaccagtactcacaaggcagtaccagtgagaagacagctttgcagtcacactggagatcagagttccaggctgcagcatgtcaccaacgccagggaacctggcacttaggcctgttggctgctcagtttaactccggctaagctgccatgcatgggctcagctactccatcagtcatgttgtcaaactgttccccatcctcactgtcaattgtgctattctgccactcaatctgggggttagataagcgctcatcattctcagatgcattcttccactgtgactggtccttagaccaaaacccttcaacttttccataggaactattcttccatttcaactgctctctgtcaccttgcatggtagccttttttttggcagctggcttactgctccttgcatcttcgctttgggaagactcgtcagaccaggttcctggtttcatttcgcaggtattgtcctcaaagtctgacacttgttgggatccaggcccactctcagatggagaagcaccgtctttccactcaacaacatcgtcttggtcaacctcactatcagatgcattgtgcattagtttggttggttcctcagtcaaatgaatagtttcgtattttgaaccatcctctttttggtctagcttctcctcagattctgaagcatcctcaggaattaccttcagtacatgttcctctgggttatcgtt

SEQ ID NO: 57089 - DNA, 774 bp, Homo sapiens
  misc_feature (1)...(774): n = a,t,c or g
gaagagcggcggctgcgagggcggccattggcgcgcgangngccttcggacacttgcgggtcgttagggcgcgacgctgggaggcatgtcggagcacgtggagcccgcagctccggggcccgggcccaacggcgtgcggcggcggctcggcccccgcgcgcgggcctcgcacccccaatctcaaccccaaccccctcatcaacgtgcgcgaccggctcttccacgcgctgttcttcaagatggctgtcacctattcgcggctcttcccgcccgccttccgccgtctcttcgagttcttcgtgctgctcaaggccctgtttgtgctcttcgtcctggcctacatccacatcgtcttctcccgctcgcccatcaactgcctggagcacgtgcgtgacaagtggccgcgcgagggcatcctgcgtgtggaagtgcggcacaactcgagccgcgcgcccgtcttcctacagttctgtgacagcggcggccgctctagaggatccctcgaggggcccaagcttacgcgtgcatgcgacgtcatagctctctccctatagtgagtcgtattataagctagcttgggatctttgtgaaggaaccttacttctgtggtgtgacataattggacaaactacctacagagatttaaagctctaaggtaaatataaaatttttaagtgtataatgtgttaaactagctgcatatgcttgctgcttgagagttttgcttactgagtatgatttatgaaaatattatacacaggagctagtggatta

SEQ ID NO: 57090 - DNA, 1307 bp, Homo sapiens
gaattttcactcattacctagagtaaacttattgcatattttcataatcagtcaaaataataaaactaaaaacaaaaagtaaaaattagttcccaagtaaatatatcagtgtttcctgtgtttgggcagaagtgcaaagtagttttaatttctcacgttgtagaaaaagaggccaaaaaggtcaccttagtttatttttccaaaacataactttaggtattctaatgtattttgttagttgcttagaaatggaaataaaatatatgtgcttattaaataatgcacagtacactagattatagagtttatttttgcttttatgctttaaagaatgcatgcccaaaacactactaccaacaagaggattttttaaaatcacagaattgatatttatctcaagactatcttaagctaatgtacttctgttacataattaaactatttctgctattatttttaaagcagtattattttataaccaattctaaaattcagctttaaaaatattgaacataccttcctaccacttacgcttcaagtttcatttattgaataccagggtcatatcttagaattgtatataaaacaacatgtaacccattcatgaaaaacgtttttaagtattgctttttgctgctatgttctgcattgagcctagttttgccattgtcccctgaatgtagtattatctatagattatacataactacatctattgcttttggtggtaaatcaagatttagttgtaattttccagctgtgaaaatgttgccttgtatttaaaagggtttcatgaatggaaacctaagtaaaactaagctcattagtgacagacttgttttcttcttgttattcctccagcaactccctcaccaccacgcctccctgcctaccatccccggaagggtgcttattctttaacaaagagaatctaaaaaaaaaaacaaaaaactgttgtctaatatatctacagtaaatgttacactagagcttttattttcctctgtagcttttcagaagaagcaatttaccttggatttgtaaatcaagctgaaacttttttgatgttcatgtactcatatgtcttgtaggtggtaggtgtcacttgtgtgtatgtgtaagtgaagtatgatgcatgctcattcacttggtccctttgaaataagggaaaggatcacagtgctgctgggccatgatggtatgtagaagggtctgtcagcacacatggaaagcccccatttgcacagatgtagaactttaataatccagatgcaatcattggaagtatttaatatgcaattggtagc

SEQ ID NO: 57091 - DNA, 1006 bp, Homo sapiens
cactcccaagatggcggacctactgggctccatcctgagctccatggagaagccacccagcctcggtgaccaggagactcggcgcaaggcccgagaacaggccgcccgcctgaagaaactacaagagcaagagaaacaacagaaagtggagtttcgtaaaaggatggagaaggaggtgtcagatttcattcaagacagtgggcagatcaagaaaaagtttcagccaatgaacaagatcgagaggagcatactacatgatgtggtggaagtggctggcctgacatccttctcctttggggaagatgatgactgtcgctatgtcatgatcttcaaaaaggagtttgcaccctcagatgaagagctagactcttaccgtcgtggagaggaatggggacccccagaaggctgaggagaagcggaagcctgaaggagctggcccagaggcaagaggaggaggcagcccagcaggggcctgtggtggtgagccctgccagcgactacaaggacaagtacagccacctcatcggcaagggagcagccaaagacgcagcccacatgctacaggccaataagacctacggctgtgtgcccgtggccaataagagggacacacgctccattgaagaggctatgaatgagatcagagccaagaagcgtctgcggcagagtggggaaagagttgccgccaacctcctaggcgccccgcccagctccctttgacccctggggcagggcagggggcagggagagacaaggctgctgctattagagcccatcctggagccccacctctgaaccacctcctaccagctgtccctcaggctgggggaaaacaggtgtttgatttgtcaccgttggagcttggatatgtgcgtggcatgtgtgtgtgtgtgtgtgagagtgtgaatgcacaggtgggtatttaatctgtattattccccgttcttggaattttcttccccatggggctggggtactttacattcaataaatactgtttaaccca

SEQ ID NO: 57092 - DNA, 847 bp, Homo sapiens
gggtttcgatctcctgacctcgtgatccgccccgcctcagcctcccaaaggcatgagccaccgtactcggcctgcccaggctggtcttaaactcctggcctcaggtgatcctactgcctcagcctcctgagtagctgggattacagacacagcccccgttcccagctctagcatttcttaaggacaaaattggtgtgtaagtaacagggaaatttcacattatgctgtactcattctctaatatcacagccatgttagaacaaatttgggttttcaaaacaagcgtaactgaacagagtatatatatgtatgtatataaatatatagaaatcctaaatggtccctgtgacataagaaatacacatttggtctctgcccccaggttcctggcacagagcttctaaaatgctagtaacttcctgagtggtaggggtgaggggaacatcttttgttatacataagaagcccttttcaaacagatctgagtttatgctaatgatgtgactggcagaggatgggggctggttgccagagaaaccaaccatgtgattagaaggttgaaactttcagccttatccttcctaccgggaggggacaggggctgaagactgagctcatcatcaatgatttaatcaattgtgcccatgtaatggagcctccacttccaaacgaagggtttcagagagcttctaggttggtgaacacatccatgtaccaggaggtctaccccactccacggggacagaaactcttgtgtaggggacccttttagatttcattctatatacctcttcagctggctgttcattttataatcaaccaataaatgttaagtaaagtgttaaaa

SEQ ID NO: 57093 - DNA, 1753 bp, Homo sapiens
ttttttttttttttttgtagcacaattcaagtttattccatttgttcttgcaacacaaaacttaaaacacagtattatttagcattcggatgtacatgaactaggatacttatgagaaacccaactgcgtcaaaagtatgacattgtggaaaaaatgaactcaaatatatcaaaatgcacaaagcactagtcttcctccattaccgcttagaaagatatgattgtttctccatttacaaaatagaatcaggacaatttaaattttttatattttgcatgcaaaacactgcaattgcttatttatgtaggagggcactctcaccagcttcttctatacacaattgagtatacaatattgcatggaagaaaacagcagctcaactgaaatattagaaaaaaaaaatcaaacagatacatacagatttaaaatccagtacttgggaaaagatatcaatgaataaaaggcctacttgtttgcagcttccacacactgcacctacctactacctctcttccatgcttaactgggtttagaaaggtgagctatgcgtagaagaactacttgggatattcaagtgctgtatttgaacgataagcctatagataacagtctgaagctgcaagggagactttgttagtacactactataaacaggtaaactacctgtttgtacttgatatagtgcatatgaaatgactgatttaatacaaaactacagaacatgcaaaattttttctgagatgttaagtattacttcagtggagaacaaaacttacttaacctttcgctaatgcatgtagtaccagaaagcaaacatggttttagcttcctttactcaaaatatgaacattaagtgttgtgaatttgtctgccaagtggttcagaaatacattataaataacctagttaaaaaaagaaactgtgaaccatcttggtcagtctattctattctatgtttatatgttattttctcaagcaatcgcttcataattatagggtttacaaaaaggtcgagaaagaaaagcgaaggcgaaatagcctctactgcattacaagcaacatcaggataaactgtacaaagaatcacatggtttccataccatgaatgtagaaagcagaccaggtttaggaatgataggacaatgcactctctgcaatagccaactacaacaaaacactttgaaagtaaaggtgaaaattatataaagggaaaaattcaagcctttaaatagcattatgtcaagaggtgaaaacaaaggtatcaaaacaccctgttgcactacgttgatagttatagactgatagagtgccctccattttcaatgaggatgtctccatattttagttcagtgatgtaataaagtactgattactgatttttaaccccaactcttaataggctgcattaagacagcaaaattagccaaattccaaccaaagtatttaaaccactactttgtgattggttttcttggatgtaggaaaattacagggttaggctagttgtaagtgaaaaagccacaggattaaaaaaaggactcatggggaaaaatacacacacacacccacacacacctatacaccccacacacccacatgccaaccaaccaaccaaccagcaactgatcagtaaaacttgttattaaccagggtgactgttcttgataatagattaaccctgctgtagaatgctatgttgcctttaaaaaccaattcaattattatccacaatctgagtatcagtccctaacc

SEQ ID NO: 57094 - DNA, 1296 bp, Homo sapiens
  misc_feature (1)...(1296): n = a,t,c or g
gggctgatgaaggtcagctatcaccacggcaaccacgcagaccctgaggagcgggactgccccacagcacgcacagacatcggagacgtccagatcctgagcagctttgtcagagatcacttacctgatctgaagcccgagcctgctgtcattgagagctgcatgtacacgaatacccctgatgagcagttcattctcgatcgccacccaaagtatgacaacattgtcattggtgctggattctctgggcacgggttcaagctggcccctgtggtggggaagatcctgtatgaattaagcatgaaattaacaccatcttatgacttggcaccttttcgaatcagccgtttcccaagcctgggcaaagcccacctttgacctctggccagaagcctcccttctgtgcacaggagccagtttcacagatggagaagatgtctcagatgaagggagtgtccctgagatatcatccttttcttctgcctcgcctgaatcccccataaacaccagatgattgagtctaccttctttccttggcccgctccctttttcttctgcctcacttgaatcccccgtaaacaccagacgattgagtctaccttcttttcttggccacctccccattcacaactactttctcgctcccagaaggttgatcagatattctacaatcacagagtagcaaggacgtttgagatgggtatatcagtaagaagagggcacaagaactggctctggagaccaaagcagttgttaaaaattctctttgctgggggccgggtgtggtggctcacacctgtaatctcggcactttggggggctgagacaggcggatcacctgaggccaggaattcaagaccagcctgggccaacatggtgaaaccctatctccactaaaaatacaaaattagctgggtgtggtggcgcatgcctgtaatcccagctacttgggagactgaggcaagagaatcacttgaacccgggaggtggaggtggcagtgagcccgagattgcgcccattgcactccancctgggcaacaagagtgagactctgtctcaaaaaaaaaaaccttaccanaaaaaccctctttgctggtatatttgaagagcttgggatggatttgactaaatctgccccgaggagggtgaacaaggtgatctcagagatcactactgctcttggagttccttctcctaaagctaaggccagcctccatcacaaatgcccataaaatctggctcgtctttgatgaacaataaatatttgttgaacaaataaataactgccctgcatt

SEQ ID NO: 57095 - DNA, 450 bp, Homo sapiens; identical to SEQ ID NO: 13417
  misc_feature (1)...(450): n = a,t,c or g

SEQ ID NO: 57096 - DNA, 751 bp, Homo sapiens
gctgatccacaaacaagaggagcaccagacctcctcttggcttcgagatggcttcgccacaccaagagcccaaacctggagacctgattgagattttccgccttggctatgagcactgggccctgtatataggagatggctacgtgatccatctggctcctccaagtgagtaccccggggctggctcctccagtgtcttctcagtcctgagcaacagtgcagaggtgaaacgggagcgcctggaagatgtggtgggaggctgttgctatcgggtcaacaacagcttggaccatgagtaccaaccacggcccgtggaggtgatcatcagttctgcgaaggagatggttggtcagaagatgaagtacagtattgtgagcaggaactgtgagcactttgtcacccagctgagatatggcaagtcccgctgtaaacaggtggaaaaggccaaggttgaagtcggtgtggccacggcgcttggaatcctggttgttgctggatgctcttttgcgattaggagataccaaaaaaaagcgacagcctgaagcagccacaaaatcctgtgttagaagcagctgtgggggtcccagtggagatgagcctcccccatgcctccagcagcctgaccctcgtgccctgtctcaggcgttctctagatcctttcctctgtttccctctctcgctggcaaaagtatgatctaattgaaacaagactgaaggatcaataaacagccatctgccccttcaaaaaaaa

SEQ ID NO: 57097 - DNA, 791 bp, Homo sapiens
tttttttgaagttagaaaagtctctttttaagtttttaaattaaaatttcgccctggtgagatgggattctgattcgggaactaaacccaaaggcaggctctccactttggacctggacacgcagcgggaggggcagggcgcccagggcagtcaagtctccctgcttgggcagagcctggcctttgaccaaagtcagctcctcagtgccacatcagccctgcacattcagcaggagacaggggtgatgagctatggggccacaaccagcaatcagaggtggggaagaggccatggggagagagccctgataccaagagggcctttccacagctttgacctcaggccctcctgggacctgcagctgctatgtggctgcccagtgactgcaggagtggtgtcctcttccagattccagaaggcatggctgttaaaggaggcagctgacagatgccttgtgcccacaacatcactccatcagctctgcagcatggcagccctacccccgagcaccccaggtgtgccaggcccattctcacgcacattagttatatttatctattcatatatattatagttatatattaaaaacagaggaaaaacttgcctgaaaaactcctgaaggacccacgtggcccaggaagtttactgtccccccgacccacaaaaattcttttataaaatcttccagtgcgatcttcgggaaaccccctgccctccccggctcccccctccctggccctcctgtgtccccacaaccctgggctgcccccagctccagcccagcgcccgg

SEQ ID NO: 57098 - DNA, 1467 bp, Homo sapiens
  misc_feature (1)...(1467): n = a,t,c or g
gcgaccgcctgccccgcccctgcccccgccccctgtcctgagcaccgttgctaacccccagtcctgtcacagtgaccgtgtctaccaggtgggtgaggccacgggtggagnctggggcggcgtctcagggctctctggaggggagtgaagccctggctgtgtctccctgtagggctgcctgacgcccgcccgcctggagccgcagcccacggaggtcggagcctgcccacccgccttgtcctccaggatcggagtcaccctgaggaagccccgcggcgacgcgaagaagtgccggaaggtgtatggcatggagcgccgggacctctggtgcacagcctgccgctggaagaaagcctgccagcggttcctggactaagtccggctcgttcaagaacataagctaccaccttctccctccccaccccctccaggcccggggctgaaacagcccgaggcacagccccaggggctggctttcaccagctgcagggtctgcttttacttggggtgggggggcggggctgaccctgaaccctcccccccgccaggtcggggaggggtcccaccactcaaagtgcctctaaagaaaccagctttttgcactaaagccaaaccacaccgctgtccccttagccccaagggccctgggggcagccaccctcccgcctgtcggcccgtagatttatcaagggtgttatgggcccagctttggggggccagtcccgatgcactttgaggggtgttggagaggggactcccccactcgcacttaactcaacggctctcgggccctggggctgtttttaccatgtttgtttttgaagctcaggtgtctcacgtctgggctgcaccaggcgaagagagaaattaaagatttgaggtttttccagaagctttgtctgcctctcgggaggaaggccgtggggctgggaccctgtggtggtcaagtgggtggagtctggcagctgcccacagagggccgagggtcacccgtcggccgccgccaccccaggcgaggccggaggaaggatcatctgagacgcatggaggcatctgctggagcagcaatttcccaatttattgaaagtgatcgctttgcaaggatgtctaagctaatcccgtcacagaaaggaaacgcacaggcgcctaggcagaaacttggagactcaccgcagaggccacgtgaaacccacggccacagagaggcaggacggcagagccatgatttcccaccgagcgattacgagaacctcttcccccaatagtagacacatctccaatacaaacacaggtttataataagtaataggaagtcaatataatatagattatccccagaaaaaaatcaacaatcttcaaacactgccctttttttgtgtgttttgtttttgttgacaggttgaaagcatgttgaaaaaaataaatatttaagaaaagcacacacagcaccctcactacaagtagttc

SEQ ID NO: 57099 - DNA, 1344 bp, Homo sapiens
cggaagtggcgtcaggggcgctttagggactggacttgcagtgtaaacagagacgctgcaaattgcttgtggacggtgtaggccgctgcaggccaccatgaaccggcttccggatgactacgacccctacgcggttgaagagcctagcgacgaggagccggctttgagcagctctgaggatgaagtggatgtgcttttacatggaactcctgaccaaaaacgaaaactcatcagagaatgtcttaccggagaaagtgaatcatctagtgaagatgaatttgaaaaggagatggaagctgaattaaattctaccatgaaaacaatggaggacaagttatcctctctgggaactggatcttcctcaggaaatggaaaagttgcaacagctccgacaaggtactacgatgatatatattttgattctgattccgaggatgaagacagagcagtacaggtgaccaagaaaaaaaagaagaaacaacacaagattccaacaaatgacgaattactgtatgatcctgaaaaagataacagagatcaggcctgggttgatgcacagagaaggggttaccatggtttggggaccacagagatcacgtcaacaacagcctgttccaaatagtgatgctgtcttgaattgtcctgcctgcatgaccacactttgccttgattgccaaaggcatgaatcatacaaaactcaatatagagcaatgtttgtaatgaattgttctattaacaaagaggaggttctaagatataaagcctcagagaacaggaagaaaaggcggggtcccataagaagatgaggtctaaccgggaagatgctgccgagaaggcagagacagatgtggaagaaatctatcacccagtcatgtgcactgaatgttccactgaagtggcagtctacgacaaggatgaagtctttcattttttcaatgttttagcaagccattcctaaacagcccaactggcatttaattacccaatactgtatataaggcaaatatggacagttactttcctcttgcctgttcatatccttcagtgacattgaggaagcagtgtttctctttttaaaggagaatagttgtcaaccttcattcatctcttacatctctcaccctctccttttttttttctttgattttcccccttattgatgggactgatattcattctgtttttgatgaacatttggaaactgtcgggctttttattaaagctctgtagaattaaaatgttctggaattataagcaatctttgtttctgagtgttatttttattttggatatagctttgatgtaattaaactggaaactctttcctgaaaaaaaaaaaccaaa

SEQ ID NO: 57100 - DNA, 1855 bp, Homo sapiens
  misc_feature (1)...(1855): n = a,t,c or g
ttttttttttacaaagcagaggctcttttagtaatgtgctagaaatccagagacacaatgggttttctaggaaacaaaccaccagtgtacaaaaccgtacagcattgctcccgtgatccgtaacaaaaatgattgtccgcatggtggagtaaggctggggctgtgggaggggaagcgaggagctgaggaggggcacagttctattgccaccaccaccagggctgtgccccctggccgccagtgggtgccacttgggtgcactcaactatgacatcaaggatgagagggcatctgagctagatcacatcccagggcccacagagctcacagcctgtggggggaccccaactccctgctgggtggggccaggcataacctggggatagctgtccctaacctcaatgacaagggcacccaccctggctggactcccgtctgttgacactgctgccattgggtatttgtcaggtcctggccaaaaccaggtcctttctcaggacagggttgggcagatggacacattaactcgctctggacagggccgagatcccactcctcctggaataggcccccccacctcggggccttgactcccctgggcagaccccggggtgctgctggcccctccacgtttccacccctggggaggaagaagggcccaggcgaggcccagatgctcaggtcagagactcacacctttagaagctgtcccctgacccttgcttccaaaacgcccatttcaacacacaaaagctaaaaggcacccaattgtgcaataaagttccctctctgtgaaagggagggggttctggcctggggctcgatgtggagctcctgctgatggcccatggccctccagagaggaagaggacaaagccagtctgactcccgggggaatcacagtgagtctcaataatgtgttgctttcccaaagggctgtgctttaaaaacaaacacctgctacttgtccaactcccctgaccctgggaaggggggaaggggagaaccatgccgtgctggctatgggacccagcttggccttggaggtggttgggaggagggggtgggggaccaggtactgctcccctggggtcgggtgccaccctgcccgttctgtggctgggaagaggacaaggccagagggaggctctgtccacctgccttctgaagtcacaggaagcaggcaccagagggccggggctggccaggaatgcccagcagtgcactccttgcccttcgcaccctccatcctgccactgcggctcctgctgcagaacctatgctgtgttccgttctgtggcccagggaagcggaaccaaagcgacctctgcanctgaccctgcctctgtggcagggtcactgcagctggcaaccctcctacctccaccacgctcagatgtcatacagggctcctacagggtaccatggtgggaggaggggtggcgacgttaactgaggttcatctgaacctacttctgcacaaacgctcctgctatggaaatctctggtgtgagcagagcccagggagggtggctgggaactggaccggggccacggggctgctgcgtcccacagggagcgtctctctgtgctgttcgctcctgttcctagtgcacacgtgtgaaggacctggtatcggctttagcacaatccttagttaaccaaaacgttgttttgcttgaacgggtaaatcgcaaaaaaagggatttggtcaagagcccattccacgaagtggtctgggttgcagacatcggccccacttcctgcctcatgccccttcctccgggttctgggtccccaaggaggccactgtggaagagttttcgccaacaagggttaagccagagaaggctgc

SEQ ID NO: 57101 - DNA, 1683 bp, Homo sapiens
cagctatgacatgattacgaatttaatacgactcactatagggaatttggccctcgaggccaagaattcggcacgagtgcagatttaaactgagtgaggtgtggagtgggggaagttgattgggtctagaccaaagaactttgaggaacttgcccagagccctgcatgcatcagacctacagcagacattgcaggcctgaagaaagcaccttttctgctgccatgacaaccatgcaaggaatggaacaggccatgccaggggctggccctggtgtgccccagctgggaaacatggctgtcatacattcacatctgtggaaaggattgcaagagaagttcttgaagggagaacccaaagtccttggggttgtgcagattctgactgccctgatgagccttagcatgggaataacaatgatgtgtatggcatctaatacttatgggaagtaacccctatttccgtgtatatcggggtacacaatttgggggtcagtaatgtttattatttcaggatccttgtcaattgcagcaggaattagaactacaaaaggcctggtccgaggtagtctaggaatgaatatcaccagctctgtactggctgcatcagggatcttaatcaacacatttagcttggcgttttattcattccatcacccttactgtaactactatggcaactcaaataattgtcatgggactatgtccatcttaatgggtctggatggcatggtgctcctcttaagtgtgctggaattctgcattgctgtgtccctctctgcctttggatgtaaagtgctctgttgtacccctggtggggttgtgttaattctgccatcacattctcacatggcagaaacagcatctcccacaccacttaatgaggtttgaggccaccaaaagatcaacagacaaatgctccagaaatctatgctgactgtgacacaagagcctcacatgagaaattaccagtatccaacttcgatactgatagacttgttgatattattattatatgtaatccaattatgaactgtgtgtgtatagagagataataaattcaaaattatgttctcatttttttccctggaactcaataactcatttcactggctctttatcgagagtactagaagttaaattaataaataatgcatttaatgaggcaacagcacttgaaagtttttcattcatcataagaactttatataaaggcattacattggcaaataaggtttggaagcagaagagcaaaaaaaagatattgttaaaatgaggcctccatgcaaaacacatacttccctcccatttatttaactttttttttctcctacctatggggaccaaagtgctttttccttcaggaagtggagatgcatggccatctccccctccctttttccttctcctgcttttctttccccatagaaagtaccttgaagtagcacagtccgtccttgcatgtgcacgagctatcatttgagtaaaagtatacatggagtaaaaatcatattaagcatcagattcaacttatattttctatttcatcttcttcctttcccttctcccaccttctactgggcataattatatcttaatcatatatggaaatgtgcaacatatggtatttgttaaatacgtttgtttttattgcagagcaaaaataaatcaaattagaagcaaaaa

SEQ ID NO: 57102 - DNA, 393 bp, Homo sapiens
ggttttctcagctgtgaaaggaatattctggtggggacaaggttacagagttgctgagagggtctcatgacatgaaggtactggccttggcacagtgcctgggggggcggggactccgcacatgcctgtgatgtcacagttactgtcagttcacagcgaaccttccctccttttcctgttgactttcccacactcctgtaaccctccctccctcccttcttcctctctctctctctcactcacgcacacgcacacacacacacacacactccattcactgtctccatgactctggagtaaactaacgtctcgagttgccattggaagccccattgtcctcatttacactttcatgggttataggcacttttgacttcctggggccttcttcaa

SEQ ID NO: 57103 - DNA, 1537 bp, Homo sapiens
ggctgctgtttctaaaacccctttccctctaacccacaccacctttctactcactgatgccttcaggaagccataatggatggcacagagattgctgtttcccctcggtcactgcattcagaactcatgtgccctatctgcctggacatgctgaagaatacgatgaccaccaaggagtgcctccacagattctgctctgactgcattgtcacagccctacggagcgggaacaaggagtgtcctacctgccgaaagaagctggtgtccaagcgatccctacggccagaccccaactttgatgccctgatctctaagatctatcctagccgggaggaatacgaggcccatcaagaccgagtgcttatccgcctgagccgcctgcacaaccagcaggcattgagctccagcattgaggaggggctacgcatgcaggccatgcacagggcccagcgtgtgaggcggccgataccagggtcagatcagaccacaacgatgagtgggggggaaggagagcccggggagggagaaggggatggagaagatgtgagctcagactccgcccctgactctgccccaggccctgctcccaagcgaccccgtggagggggcgcaggggggagcagtgtagggacggggggaggcggcactggtggggtgggtgggggtgccggttcggaagactctggtgaccggggagggactctgggagggggaacgctgggccccccaagccctcctggggcccccagccccccagagccaggtggagaaattgagctcgtgttccggccccaccccctgctcgtggagaagggagaatactgccagacgaggtatgtgaagacaactgggaatgccacagtggaccacctctccaagtacttggccctgcgcattgccctcgagcggaggcaacagcaggaagcaggggagccaggagggcctggagggggcgcctctgacaccggaggacctgatgggtgtggcggggagggtgggggtgccggaggaggtgacggtcctgaggagcctgctttgcccagcctggagggcgtcagtgaaaagcagtacaccatctacatcgcacctggaggcggggcgttcacgacgttgaatggctcgctgaccctggagctggtgaatgagaaattctggaaggtgtcccggccactggagctgtgctatgctcccaccaaggatccaaagtgaccccaccaggggacagccagaggaaggggaccatggggtatccctgtgtcctggtctatcaccccagcttctttgtcccccagtacccccagcccagccagccaataagaggacacaaatgaggacacgtggcttttatacaaagtatctatatgagattcttctatattgtacagagtggggcaaaacacgcccccatctgctgccttttctattgccctgcaacgtcccatctatacgaggtgttggagaaggtgaagaaccctcccattcacgcccgcctaccaacaacaaacgtgcttttttcctctttgaaaaaaaaaaaaaa

SEQ ID NO: 57104 - DNA, 2984 bp, Homo sapiens
ccattccggctccagtccccgggctcggcctcggcgaggtgtaattcgcagcgcggccggccccggaagctctcggcgagcgcggcgggtaacaagtgggcgaggatgccgtacgagatcaagaaggtgttcgccagcctcccgcatgtggagaggggcgtctccaagatcatcggcggcgaccctaagggcaacaattttctgtacaccaatggaaagtgcgtcatcctaaaggaacatcgacaacccaagcccttgctgacatctacacagagcacgcccatcaggtggtggtggccaagtatgcgcccagcggattctacattgcctccggagatgtgtctgggaagctgaggatctgggataccacgcagaaggagcacctgttgaagtatgagtaccagcctttcgctgggaagatcaaagacattgcttggactgaagacagtaagaggatcgccgtggtcggggaaggaagggagaagtttggagcagtcttcctctgggatagtggctcttctgtgggcgagattacaggacacaacaaagtcatcaacagcgtggacatcaagcagagccggccataccggtgtgccacgggaagcgatgataactgcgcggcattctttgagggacccccattcaagttcaagttcacagttggcgaccacagccgctttgtcaactgtgtgcgattctctcctgatgggaacagatttgccacagccagtgctgacggccagatatacatctatgacgggaagactggggagaaggtgtgcgcgctgggcggaagcaaggcccacgacggtgggatttacgcaattagttggagtcccgacagcacccatttgctttctgcttctggggacaaaacttccaagatttgggacgtcagcgtgaactccgtggtcagcacatttcccatgggctccacggttctggaccagcagctgggctgcctatggcagaaggaccacctgctcagtgtctccctgtccgggtacatcaactatctggacagaaacaaccccagcaagcccctgcacgtcatcaagggtcacagtaaatcgatccagtgtctgacggtgcataaaaacggcggcaagtcctacatttactctgggagccacgacggacacattaattactgggattcagagacgggggagaacgactccttcgctgggaaaggccacacgaaccaggtgtccaggatgaccgtggatgagtcggggcagctcatcagctgcagcatggacgacaccgtgcggtacaccagcctcatgctgcgggactacagcggacaaggagttgtgaaacctggacgttcagccaaagtgccgtagccgtcggccccgggggatacgccgtggtcgtgtgcattggacagattgtcctgctgaaggatcagaggaagtgcttcagcatcgacaaccccggctacgagcccgaagttgtggcagtgcaccccggcggggacacggtggcaattgggggtgtggacggcaacgtccgcctgtattccatcctgggcaccacgctgaaggatgagggcaagctcctagaggccaagggccccgtgaccgacgtggcctactcccacgacggcgccttcctcgcggtgtgcgacgccagcaaggtggtcacagtgttcagcgttgctgacggctactcggagaacaatgttttttatggacaccatgcaaaaatcgtctgcctggcctggtccccagacaatgaacactttgcctccggtggcatggacatgatggtgtatgtttggaccctgagtgacccggaaaccagagtcaagatccaagatgcacaccggctgcaccatgtcagcagcctggcctggctggacgagcacacgctggtcacgacctcccatgatgcctctgtcaaggagtggacaatcacctactgaggagccccacccccgcctctggatggaccgaatcagggactagagtttaactgcagcggaacatgtcatttctctatttctgtgacgcgcccccatgcccccaccccaccacaagaggcaggagggcccagtcatgaccctcgtctctgcagggtgtctgtacacgttcttctgaaagctttagacagtaacagtttgcacatgaaaaataaagcgagcacctaaacaatgtgtggagcataactaaaacccacagcccaaccaaaccttgagaatgcgaaacattccagaggcagtagcctccaaagcacacagagcccctggccccgccgcggctctcactatctgtcaggggaggttgtacaggtgaatgagccggggggctcatgttcctgcctgcagaacatttctgtactagtgagaagagggaatatgcattgcagttcagcaaagccggaattctgtgttgaacagatgtctgtctccctagtgtgtgactcacaccttgtggctgccttcagagcgccacctccagatcagatggggacacacaacccctggatatgtttccattgtcagattttgtgcttgattttaagaatggaattgtgggtatctttccttttttttttaatgtatcttaactgttgcctgtcagtgtttacaaactagtgcgttgacggcaccgtgtccaagtttttagaacccttgttagccagaccgaggtgtcctggtcaccgtttcaccatcatgctttgatgttcccctgtctttccctcttctgctctcaagagcaaaggttaatttaaggacaaagatgaagtcactgtaaactaatctgtcattgtttttaccttccttttctttttcagtgcagaaattaaaagtaagtataaagcaccgtgattgggagtgtttttgcgtgtgtcggaatcactggtaaatgttggctgagaacaatccctccccttgcacttgtgaaaacactttgagcgctttaagagattagcctgagaaataattaaatatcttttctcttcaaaaaaaaaaaaaa

SEQ ID NO: 57105 - DNA, 724 bp, Homo sapiens
  misc_feature (1)...(724): n = a,t,c or g
ttttttttttttttttttcaggatactccatttattgaactccaaatctaacaaaattaagatcgctgcagtgtttcaaaaggaccttgaccttgttcccactgctatgctcactaaagtcagctcatttatgtttctgtagcctctgtatctgtagcttctgcatctgttttctgagaagctaacaggacttcacgtgcccgtttccttcgcagtctctcagcatttgtgatcatcataggatgcagagggaaaaagccagcaagacccagaagcttttccataggcttagagaggtgggccccgcagccaatccaatgacggatcctgtctaggttgagggcaacgagtttttctccatgactgttgggcaatggatcataggagcccagctgctctacgaaacggccatccctgggacacttgttgtgagcagccacaatgcggtagaacggccgattggtgcagccacccagggcaaggcggatggttaagtggcccccacggtaggccttgcagaggagagtagtgaggtggaccatggtgccgccggcgtgcggctcctcggagagccccgctacccgcacgcaccagctctacggccttggcagggcagagaacaaacacagaaagaacctgcaagccgacaccaggccgcaccgccaagcgcgnacgcgtgggtngancggtnaattccgganctgtnccngcggncttcaaaggt

SEQ ID NO: 57106 - DNA, 1532 bp, Homo sapiens
gagcttgcagtagcgggcggcagagctggagtgaagggagctagtgtttaggtagcagtcaccattatgctcaaagcggtgatcctgattggaggccctcaaaagggaactcgcttcagacctttgtcttttgaggtgcccaaaccattgtttcctgtggcaggggtccctatgatccaacaccatattgaagcctgtgcccaggtccctgggaatgcaggagattctgctcattggcttctaccaacctgatgagcccctcacccagttcctagaagccgcccagcaggagttttaaccttccagtcaggtacctgcaggaattttgcccccctaggcacagggggtggtctttaccattttccgagaccagatcctgggctgggagccccgaggcattctttccgtggctcaatgctgatgtctgctccgacttccccttgagtgctatgttggaagcccaccgacgccagcgtcaccctttcttactcctttggcactacggctaacaggacgcaatccctcaactacggctgcatcgttgagaatccacagacacacggaggtatttgcactatggtggagaaacccaagcacatttatcagtgacatcatcaactgcgggcatctacctcttttctcctggaagccttgaagcctcttcgggatgtctttcagcgtaatcagcaggatgggcaattggaggactcaccaggcttgtggccaggggcaggtaccatccgcctagagcaggatgtgttttcagccctggcagggcagggccagatatacgtgcatctcactgatggtatctggagtcagatcaagtccgcaggttcagccctctacgcctcccgcctctacctgagccgataccaggacactcacccagaacggctggccaagcacaccccagggggcccatggatccgagggaatgtgtacatccacccgaccgccaaggtggccccctcggctgtgctgggccccaacgtcttccatcgggaagggggtgacccgtgggtgaaggtgtgcggctccgggagagcatcgtcctccatggagccactttgcaggagcacacgtgtgttctgcatagcatcgtgggctgggggagcaccgtgggacgctgggcccgcgtggagggtaccccccagtgaccctaaccccaacgatccccgagcccgcatggacagtgagagcctcttcaaggacgggaagctgctgcctgctatcaccatcctgggctgccgagtccggatccctgccgaggtgctcatcctgaactcgattgttctgccacacaaggagctgagccgaagcttcaccaaccagatcatcctctgagtagggctgccagaaggcccccagctcctacccactccccttgaggctgctgcctgcttggccagcctctgtccagaaaggaccagagaaagccaggctggatcgtcacatgccggggagcaatgtggatggcctggggactcctgggttttctccctcccgactccctaataaaccccgtgaac

SEQ ID NO: 57107 - DNA, 1972 bp, Homo sapiens
ggcccggggactcgcattccccggttccccctccaccccacgcggcctggaccatggacgccagatggtgggcagtgatggtgttggctgcgttcccctccctatgggcaggtggggagactccctaagcccctccggagtcatggacccagctatggttcttccgatttgtggtgaatgctgctggctatgccagctttatggtacctggctacctcctggtgcagtacttcaggcggaagaactacctggagaccggtaggggcctctgctttcccctggtgaaagcttgtgtgtttggcaatgagcccaaggcctctgatgaggttcccctggcgccccgaacagaggcggcagagaccaccccgatgtggcaggccctgaagctgctcttctgtgccacagggctccaggtgtcttatctgacttggggtgtgctgcaggaaagagtgatgacccgcagctatggggccacagccacatcaccgggtgagcgctttacggactcgcagttcctggtgctaatgaaccgagtgctggcactgattgtggctggcctctcctgtgttctctgcaagcagccccggcatggggcacccatggtaccggtactcctttgccagcctgtccaatgtgcttagcagctggtgccaatacgaagctcttaagttcgtcagcttccccacccaggtgctggccaaggcctctaaggtgatccctgtcatgctgatgggaaagcttgtgtctcggcgcagctacgaacactgggagtacctgacagccaccctcatctccattggggtcagcatgtttctgctatccagcggaccagagccccgcagctccccagccaccacactctcaggcctcatcttactggcaggttatattgcttttgacagcttcacctcaaactgggcaggatgccctgtttgcctataagatgtcatcggtgcagatgatgtttggggtcaatttcttctcctgcctcttcacagtgggctcactgctagaacagggggccctactggagggaacccgcttcatggggcgacacagtgagtttgctgcccatgccctgctactctccatctgctccgcatgtggccagctcttcatcttttacaccattgggcagtttggggctgccgtcttcaccatcatcatgaccctccgccaggcctttgccatccttctttcctgccttctctatggccacactgtcactgtggtgggagggctgggggtggctgtggtctttgctgccctcctgctcagagtctacgcgcggggccgtctaaagcaacggggaaagaaggctgtgcctgttgagtctcctgtgcagaaggtttgagggtggaaagggcctgaggggtgaagtgaaataggaccctcccaccatccccttctgctgtaacctctgagggagctggctgaaagggcaaaatgcaggtgttttctcagtatcacagaccagctctgcagcaggggattggggagcccaggaggcagccttcccttttgccttaagtcacccatcttccagtaagcagtttattctgagccccgggggtagacagtcctcagtgaggggttttggggagtttggggtcaagagagcataggtaggttccacagttactcttcccacaagttcccttaagtcttgccctagctgtgctctgccactttccagactcactcccctctgcaaatacctgcatttcttaccctggtgagaaaagcacaagtggtgtaggctccaatgctgctttcccaggagggtgaagatggtgctgtgctgaggaaaggggatgcagagccctgcccagcaccaccacctcctatgctcctggatccctaggctctgttccatgagcctgttgcaggttttggtactttagaaatgtaactttttgctcttataattttattttattaaattaaattactgcagtggaaaaaaaaaaaa

SEQ ID NO: 57108 - DNA, 2332 bp, Homo sapiens
cttcagaacctggaggagacaattgaatacaacgagatcctagagtgggtgaactcccttcagccagcaagagtgacccgctggggagggatgatctcgactcctgatgctgtgctccaggctgtaatcaagcgctccctggtggagagtggctgtcctgcttctattgtcaacgagctgattgaaaatgcccacgagcgtatgggccccagggtctggccacactagagactagacagatgaaccgacgctactatgagaactacgtgggccaagcgcatccctggcaagcaggctgttgtcgtgatggcctgtgagaaccagcacatgggggatgacatggtgcaagagccaggccttgtcatgatatttgcgcatggcgtggaagagatataagagaactcgactggctatcaggaagagatggaaatcagaaaatcccatcactccagcagctgggacctgagtcctacccaccattcttaatactgtggcttatacctgagccacacatctccctgcccttctggcactgaagggccttggggtagtttgctcagcctttcaggtgggaaacccagatttcctccctttgccatattcccctaaaatgtctataaattatcagtctgggtgggaaagcccccacctccatccattttcctgcttagggtccctggttccagttattttcagaaagcacaaagagattcaatttccctggaggatcaggacagaggaaggaatctctaatcgtccctctcctccaaaaccagggaatcagagcagtcaggcctgttgactctaagcagcagacatcctgaagaaatggtaagggtggagccaaatctctagaaataagtagtgaggccgttaattggccatcactgatggcccttagggaaagactggacctctgtgccaagcagtatccctgttcagcccaccttaaaggtgtaggcacccactgggtctaccagtatgcaggttgggatactgaaaatttccagatgagctcttctttcctacaagttttcataattagggaatgccagggtttagggtaggggttaatctgttgggggttgatgtgtttagcaagaagctactcctagcttttgctaaaatatggttggcactgcctcttgtggcacaggccataattgttccatagacccctctctagccctgtgactgtagttagttactttgataattttctttggccattgtttgtttatatttcacaaactccacctactgcccccccccctcttttttttaagaatggcctgatcatggctatctcagccacattgttggcaatttaatttatttacttccttttttttttttaagaaaggaaaaaagaaaaaaaaatcaaacttgaaacttttcttttgatgttcctattgtgggggttctggatagggtgggacagggatgggggtgtgttttatattttttccttttcagcacaacctttggctttaatataggaagagccaagggagtcctcggctgaacttacgatatctgccccaaacctctgtaaccccaactgaaatgaggagcttcctctcttcctgtgaaggatatgacagtccagcatcgatgcctgtgccctctggaaaaatttcctcctagcccttccagggccttatcataaaactctggatttagagtattcattttgaaggcaactcccccttccccaagtttccttggagctgtatagctgggttctaagcttcaccatgcaaatcagaaattttatctctaagtacaggctgtgccgtgtctcacccacacccccctggggacgttcagttccatttcaggttacctggggtataccttgatccctagagtgactggcagagtaagagaaggggagagataataggtgtgattattttaatatggaggtgggagtgtggttggagatagaaaggctcctccccaccatgtaatggcttcctctcagaattttattccaggctagcttgctgcaggtctgggtagttggatcatggctccactgggattggggtggaaagcttgaggggagtagggttcccagctctgggacattgtgctcaggaatttgaaaacgctgctatacttactctggttactacatttcttccactcccctttcccctacctgccttaaccaaggctcatactgtcctgtccttaccctcagatggagccaggaagctcagtgaaaggcttccctaccctttgcactagtgtctctgcaggttgctggttgtgttgtatgtgctgttccatggtgttgactgcactaataataaaccttttactc

SEQ ID NO: 57109 - DNA, 526 bp, Homo sapiens
ctatgacatgattacgaatttaatacgactcactatagggaatttggccctcgaggccaagaattcggcacgagtgtgtccccatcctggcagggcattgtgacctttgaggacgtggctgtttacttctcctggaaggaatggggtcttcttgatgaggctcagaaatgcctgtaccacgatgtgatgctggagaacttgacacttacaacctccctgggtggttctggagcaggggatgaggaggcaccttatcagcagagcacttctccacagcgggtgtcacaggttaggattcctaaggcccttccttctccccagaagaccaacccctgtgagatatgtggcccagtcttgagacagattttgcacttggttgaacaccaaggaacacaccatggtcagaaactgtatacagacggggcatgtaggaaacaattacaatttactgcataccttcatcagcaccagaagcagcatgttggacagaaacacttcagaacaatgggggcagagacatgttttt

SEQ ID NO: 57110 - DNA, 1730 bp, Homo sapiens
ttttttttttttttttttatcagtgacaaacttttattcagaaaataaaagtattatttcattttattattcccaaagaatcaagcccatcatgagtagcccacatggttgctgttcaaaggtactgaaaagggaggcatttggtcaccattacccatcaaggaactctttacaaggataggttccaagtccttcgtgctgctcttggtcattcagtgactgcagttttggcccagaagccatccaagatgagcaagtgctgagccatccttaactcatacctagatgaaacaacttgcgcaggaaacgctggtcctccccagtaaccccttagcatcatattccaatacaggaaaggcatcaggtcagctttcatgagatacatggaaaggcgctctttgctttgatcaaaggggaaggtttctagcggctctgctttgtagtcaaactcagcaagaatcacacggttgtagccggtcaccagtggacatgatgtgtagccatcatacttctttgttggtgtttgattcttcataattacagaaattgtcctatcaagtattcctgactgggcagctactgcagcagcggtctttgacgtaggaaggttggtgcagtccccaatcccaaacacatttgggtacctcctgtgttgcagagtttctttatccacatccacccaaccagcagcatcagccacaggactggtcttgaggacatactggtgggctcattggaggtgtgaacatgaagcatttcatatgaaatcacttgggtctctcctggtttgtccaggttctcaaatacagcctcttgtttatcggctcggacttcaatgaggtttttcttgtagttaacagtgaggttccgctccctggatgatctcctgcagggcatctgccatacttcttaaccccgaaaatggctccaagagaagtgttgaaaatgatattggccttggatcgcttccctgtcttcctgaagtaggcttctgataagtacatgatcttctgaggggctccagcacacttcactggagtatttgggaaggtgaagatggcattgccctctttgaagtcctgcagagctttccatgtcttctctacagtcttaactgaataattcgaccctattttgggatgagcgaaaccttcaggtaggcctttaatcttctcatagtccagctggattccgagagcaataataagatatcggtaggagatcttctcgtcgtcatctgtgtgaatgcagttcttgtctgggttcaactcagtcactctaagctttgatccattctacaccagatggaatcacacttgccgtgggaacgaccagatgaggacaattgtttggcaccagcacccaccagtgtccagattggctggtagaaatgtctctcactgggctcaacaatggccacattctctgcacccactttcctcttcatgcgggcagccatggtgattccgccactgcccccacccagcaccagcacctcataatggttcctggccgcatggctggccccggtgtgcagctgaagggggccgacctgctgagtgcccagcctgagcaggcaggcaaagagctgggcacggggccctgataccacagccaccagtggcaccatcttcaggcaggatcaggccgggcgtgagcggagccttcgcgctactgcgttggcgcagcaaaaaccttcgctcccttctgggtctcaaggcctggactgg

SEQ ID NO: 57111 - DNA, 959 bp, Homo sapiens
tttttttgagccacccaagcaggaaggtcggagagcatctttattgtggggaggggcccggcccccaaagttctgacaccaaagacagacaccagacaggcagctgcagacagtgagttgtgtggatgaccacggcctgtgtggcggacaggggaccaggagccatcgcctcagactctgcccttctgtgcaagggctagtgccccgagctcaggcatgcaggaagcggttgaaggcgttgtaggctgactccaggtcgaacagcatctgacgcacctgtgagtcgtccagctcatctgacgccgacatgccgctcagggtcttgcagccactggctgaccgtctggcggccctcaaagtcgggtgggaggtggctcatgcggtgcatggtctccatcagctctcgcaggtcgggctggatctcatccatggcgcggatctccaggcgcagcttgtccatgaccgtgatgaagagcgagaccacgtctgcgatgcagcggttgaggttgcccttgtcgtccttgatggtgatgggccggtcctccttgatccgctccatggccagcgggcagtccaggcggaacttgcggcagaattcgtcaatagagctgatttctgagccctggacctgcctgaaggcagctttgtattggaccaggagccgggagcaggctgcagtgtactcgctgggggaagacacagtccttgatgtaggccttctccagggcttgcattgtcttcaccaccgcaaacagctctgccatgttgtcgtacttctccctctcccgggcgttcttgtacaacttcacttcctcatacagctccggcttgttcccaggggctcctattgcccggcgtggctgggatcccatgaaacatcctctaggctctggggggggcacagcactgagacctggacggctcgcggtcgggaagatggcgccgggggcggggtgcgc

SEQ ID NO: 57112 - DNA, 1083 bp, Homo sapiens
cgaaagtctcctgctttcactgcggtcccgcttagcgacccgccgccgccgccaagcgaggctgaggactccgatcgcgatgtctcatctgacagctccatgagatagagacctgcctcccccttgcacccgaggccctcgcagcagggagctcagcgaggcagagggtggggctgcacagaggggaacatcagctgcagctctgcaccaggccggtccctggggactggggcgctcctccctcaggctttctccctcagtcttggcttctccagggctctggggtgtctggagctaggcttggccctaccattctggggccatttccaccacagttggggctctcctgccttcacgcgtgggtgtctgctacttccccatctttaaaatgctgccagagcgattgcggcccctcaccttgtccacgtatcaggaatgtgaatgtgggacctttcctccatccctgttgtccggagccagctcagctgtcttccacactggtgctaactggcccaggcactggagtggaatagaatgcagctggaggctacgcatggcctctgcagcacacgcagctggagagggcttctgtccctgtcagcggcagagggcgttggggctggccggggccaccttgtccctgctatggtccacatgctcacgctgtccacctgccaggtggagtgtatgtggctgtggccctccctcgtggaggtgccgtgctttaaagaggccttagtgcccgggatgggcacagtgttttgaagggaggtgggagctcttgctctcctggtcactgcagaatgacagagaaggtgaagctccatgcatgtgtgcgcgggtgtatgtgcgctcagggtctctgtttaagtatcagctaaagatgtgcttcctccgtgtctgtcatacactgagaccaacaggctacagtgtccctgattcttggaaaagcctggagaagctggggagatgcggttcacaatgcctcggtataggaggctgtgttgagctgacattcaaatggattctttaataataatgaaactggcgagtatttattgtgcaaaaaaaaaaaaaaaaaaa

SEQ ID NO: 57113 - DNA, 864 bp, Homo sapiens
cagctatgacatgattacgaatttaatacgactcactatagggaatttggccctcgaggccaagaattcggcacgaggtgctccgcagccgtctgtgccacccagagccggcgggccgctaggtccccggagaccctgctatggtgcgtgcgggcgccgtgggggctcatctccccgcgtccggcttggatatcttcggggacctgaagaagatgaacaagcgccagctctattaccaggttttaaacttcgccatgatcgtgtcttctgcactcatgatatggaaaggcttgatcgtgctcacaggcagtgagagccccatcgtggtggtgctgagtggcagtatggagccggcctttcacagaggagacctcctgttcctcacaaatttccgggaagacccaatcagagctggtgaaatagttgtttttaaagttgaaggacgagacattccaatagttcacagagtaatcaaagttcatgaaaaagataatggagacatcaaatttctgactaaaggagataataatgaagttgatgatagaggcttgtacaaagaaggccagaactggctggaaaagaaggacgtggtgggaagagcaagagggtttttaccatatgttggtatggtcaccataataatgaatgactatccaaaattcaagtatgctcttttggctgtaatgggtgcatatgtgttactaaaacgtgaatcctaaaatgagaagcagttcctgggaccagattgaaatgaattctgttgaaaaagagaaaaactaatatatttgagatgttccattttctgtataaaagggaacagtgtggagatgtttttgtcttgtccaaataaaagattcaccagta

SEQ ID NO: 57114 - DNA, 1337 bp, Homo sapiens
tttttttttcatttttgttttctttttttgattgaggtaaataaaaaagctttatccagcaacacggagataagagtctgtccaacccgacaagttccagaccccaccctgccctcacatcaggctcttccggtactgactgtgcggggtggtctgtctgaggtgggagtccggggtctgcaggtccatctgtctgtacaggtctctcagctccctgacctcctgcagcaccctctttgcctggctccaattcgatgatgcctctcccagcagccgttccgtctccagcagcagctgctctgactcagaatccggcggagaccgaggggggtccttggcctttcgcttcccatctcccagtccctgaacctctgccagaagctcctgagtctcctccagtttccttgctaccaggtcctggatccgggacagctgccccgggttggggagggcaggggttgggggttcctcagcccgcagctggagggtgcgggcagaggcagcatcccgctgagataggatctcctccagggaggcgcagcggcctttctctgtgggcgtcaacttcttgggtgcctggggggtgtaggtggcccctttgtctgttttttcccaaggtcgggagagactgcttgcccggtctgcggagggctggatgcggtctgagtccgctctccgccggctccctgcccagctgggcccacagacttgtccaggtcaacccgaaagctctcagcacaagaggttggttcctcaggggaagggtcttcctcttggatcaagtccaaggtcagcatcccatccgaggtagaggtggaagccacagccattaggtgtccccttgttggggggcggcgggagtgctggatttttgccctgtctcgagtgggatgggcaagatagctgtcctcctcaacggtgacctgaagagatgtactcatccaagatacggttcttggctcgggtgatggcagagttgagggcattgatccacgattccttctcttctggactcactgccaggaagatcaggttgggtgccgtgttaccgggctgtttggagtgggcaagagtaaacttgctatgatttttcttgctcctgctcttggacttccggagctcttcacacttctcatagtcactcaggtcaaatacctcttgaatatttttctcatcttttacctccttctcagagatgtagagctggtcccctttcagcaccacatagcggtttttccaaatctccctgaaaatccctttcccgcagaatttccggacccagccgaccttctcgggcggtgcaggctgctggtttccatcctgaggtcccctcgtgc

SEQ ID NO: 57115 - DNA, 1419 bp, Homo sapiens
ttaattaaatttaatcccagggaaattagatgtcgaatttgaacacctaactttccatgtactctctcatttttgtcggaagtgtttctatactctaatgcctttacaaatgtgatttttctcttagctcgtttgaagtatgagaattagagtttttggtctcgcattcacctgctacatctaggattgcccactgtcatgactcccagggaaaaggtcctatcttaggcttcctcctccctactttcctctacatgggtcagcactgtaatgtaggctaagatatagtaaggcattgctccctccccctacacttcaaggagttcacagtctaatggggagttcaggaaggccagagtattaatatccccatctgtgtcttttgccttccatgaacctgggttttgagccctctcttgtaaaatggggcacagtaatattacctacctcagggagttgtgaggattaaacatgaagtgctaagcatagtgcctggtacaaagacagtactcaataagtgctacctaaaactagtattcatagcaatactgttaggataaagaattatcatatatgagatagttccaaatttttgtttttttaaaaaaaaaagagttttataagttcaagataatattttcttacttcaaagaaacaatctcacaacgagggaatggtaagaatcaggagagattactaacctggcagaggagctatcacaatcacaaaggtggtttttccagggcacggctcatccattacactccagatgtgctgacccctgccatttccccaaatgtgggaaacccaactgcacagtttgtagtagtgggtgactgtgttcatgcgctcccctgaaaacaacaacaacaacaaagaatcagaagagatactaggctgtctaattcctaaatccaaacctgatatttctaagtaagattataagaatttttattgcattttctgaatttgcttttgcataagttatgttatttttacagggtctatattactattatttcttagaataatactaattataaaacaaaattctgtatatcacatttaaatgtaatttaatagaattataatcacaagacaagaccaaactttgttgataatcctcagtaattgcgaaaggggtatatacatgtaggccagcatacatgcataaactacttcttattgctagtctaattgttccatatgtagcaaatacagcagttcagcaatatcttgtgcttacagggtcctaagcagaggtgatgagtcaagtgtaaatatatatatatatttttttatttttcatggcaattgtatattagtaacctggggagaaaaggtttattgacaaccactctgatccatctgctgctatttttactgctaatttggtgcacattaaaaagaatgatcatg

SEQ ID NO: 57116 - DNA, 955 bp, Homo sapiens
gcccgtccgactggaaagatctgcctcttctccaagaaactcaaccactagtgacaatgaccagcctcctgactactccttctccaagagaagaactgatgaccaccccaattttacagcccactgaggccctgtccccagaagatggagccagcacagcactcattgcagttgttatcaccgttgtcttcctcaccctgctctcggtcgtgatcttggatcttcttttacctgttacaaggaacaaagggcaggttacgtcacctatggaacctacaggaagggtgaggcccagtgccatcgttccagatggagagtgactttggccaagggcagcgagaaagaggaatatttcatctaatgactcccaggccccaaggagcttattcctggctccatcgctaacacgttgactgcttattatgggaaagttttctctgaagccagggagaagcattgattgatgtgggcaaatccaagctccagccaggtcgcagtcccaaatgccgacatcactgactccagggaccagggacatggagaaagctgtttatgatatctttaaccaggccctcttactagagctggtgtttgtgactggccaacaagatgtggctatgccaggggacatctgagtatgtgcccagtcatcttttttcacaggttgaagggagagaaaagattttgagttaaggtcattggctgctctactctgtcccctacctggtcacctagtgatagccccagtggagatactgtccatacaaggtcttcccagaggctggataccacagtaaaaggccaggccaggaggggtaggagactatggagatcttacctcctgataaatgtgctacaccccctaatctgagcccttcctttccgtgttccccaacaacctcatgcttacgtgatttttattcaaattaaaaattttcattgctaaagaaatcag

SEQ ID NO: 57117 - DNA, 1356 bp, Homo sapiens
  misc_feature (1)...(1356): n = a,t,c or g
ggggagaaagatagggagaaatattcccaaagagaacaagaaagagatagacaacaaaatgatcagaaccgacccagtgagaaaggagagaaggaagagaaaagcaaagcaaaggaagagcatatgaaagtaaggaaggaaagatatgaaaataatgataaatacagagatagagaaaaacgagaggtaggtgttcagtcttcagaaagaaatcaagacagaaaggaaagcagcccaaattctagggcaaaggataaatttcttgaccaagaaagatccaacaaaatgagaaacatggcaaaggacaaagaaagaaaccaagagaaaccctctaattctgaatcatcactgggagcaaaacacagactcacagaggaagggcaagagaagggtaaagaacaagagagaccacctgaggcagtgagcaagtttgcaaagcggaacaatgaagaaactgtaatgtcagctagagacaggtacttggccaggcagatggcgcgggttaatgcaaagacctatattgagaaagaagatgattgatggctaccccaagagaaagatttaaggaagcacagaaaactgtaattcctggaacctgctgcgtaaaaccataaaggagtgtgttaccagtagtttggagggcatttttaaatttattttcaaaattttaagttaaaagtcagtcttacagcttggatgtttggatgtggatgtttggctgaatttatatatagtgtgtactcatcaataccacattctttgttgtattcaagaaccgttaagagtgtgctaattccctgtaggtacataatgaggaaaatttgctccactacaaccattaaaaaataattttgggccaggatacggtagctcgtgcctgtaaaccccaacattttggggaggccaaggcaggaaggatattgagggctaggcattcaagaccagcctaggcaggataataagaccttgtctctatttaaaaaacaaaaagccctagcatgggtagtcccatgccctgtagtcccccagctgttccgagaggctgaggcaagaagatcacttgagccctnnnnnnnnnnnnnnnnnnnnnnnnnnnnnnnnnnnnnnnnnnnnnnnnnnnnnnnnnnnnnnnnnnnnnnnnnnnnnnaaaaattttttttaaataaataatttaactcttctaataatgttttgttgcaggaaatgtatttcagataaaatatggatttgaaaaacagaaaatatactttatgttctgaaatttgtatttaagtataaaatgtgaatcatcttgtctaaatagcttacagcatagttggcttaaatgaaaataaaatgatatgcttataaaaaaaa

SEQ ID NO: 57118 - DNA, 861 bp, Homo sapiens
  misc_feature (1)...(861): n = a,t,c or g
cttaattaaaaganctttttttttttttttttttcatctctatggtttattgtcactgaaataagaacactgattggggggagggtgggtgttgcaaattgcaaacctcaggtaacctgacctccaactttagagcccagagtacagagaggtgggccttgaagccaataaatacaaagcttcctctgccttgtaacaaaggcaggttggcatagggccctggagcctgactgcccaggcccactttgggatggggagcagctatcactcctctgctggcttcacttgcgtggcggcctctagctggcaaagtagctcatcccactgcacgaattgcttggagagaagcattgtagtcttgttgtattcctccaggagagccttggactcctcagtgatttcccacacactggtcctgctgctgaatgtggatctgggccaagcgctgcaggcgggcagcatgctcaggaacggctttgatgtgagcactgtccagcatgggcaccaaggcattcacctgctccaggagtgcaaacctgggaaaggataaaactgctcctcttgctaggatgaatttgcaggcttaggagggcatcaggtatggcaatgcggtctgatgtactcaggatccaggtacttgatcagatcttcaatctttttgtagagaatcttcaccctctccctcttgctggaaatgttccccaaagccacctgcaccttgaccaggccgtcagccaccttcctgtagacgcgcgcgccccgcccggcccgtacacccatgcgctccagctcttccactcgggcctgtagccgctgcaagtcagtcagacccgccatcgctactaccgacccacctcggcc

SEQ ID NO: 57119 - DNA, 2532 bp, Homo sapiens
ggtcttagttttgaggagctctatagaaatgcatatacaatggttttgcataaacatggagaaaagctctacactggactaagagaagttgttaccgaacatctcataaataaggtgcgagaagatgtactaaattcattgaataacaactttcttcaaacgctaaatcaagcttggaatgatcatcaaacagctatggtgatgattagagacatactaatgtacatggaccgtgtgtatgtacaacaaaataatgtggagaacgtctacaatttgggattaattatttttcgagatcaagttgtacgttatgggtgtattagggatcatctacggcaaactctattggatatgattgcaagagagcggaaaggagaagtcgtagacagaggcgcaataagaaatgcttgccagatgttaatgattttaggtctcgaaggaagatcagtctatgaagaagattttgaggctccttttttggaaatgtctgcagaattttttcagatggaaagccagaaatttttagcagaaaatagtgcttcagtatatataaagaaagtagaagctagaattaatgaagaaatagaacgagtgatgcactgccttgacaaatcaacggaagaaccaattgtaaaggtggttgaaagggaactcatttccaagcacatgaagactatagtagaaatggagaattctgggctagtacatatgttgaaaaatggaaagacagaagaccttggttgcatgtacaagttatttagtcgtgtgccaaatggtttgaaaacaatgtgtgagtgtatgagttcctatttgagggagcaaggtaaagctcttgtttctgaagaaggagaaggaaagaatcctgttgactatatccagggcttattggatctgaagagtaggttcgatcgcttcctcctggaatcattcaacaatgaccgtctctttaaacaaactattgcgggtgactttgagtattttctcaacctcaactccagggtctcctggaatacctctcattatttattgatgataagctgaaaaagggagtcaaagggctaacagaacaagaagtagaaacaatattggataaagcaatggtcctttttaggtttatgcaagaaaaagatgtatttgaacgttattataaacaacacttggcaaggagacttctcacaaataaaagtgtttctgatgactctgaaaaaaacatgatatctaagttaaagactgaatgtggatgtcagttcacgtcaaaactggaaggaatgtttagggatatgagcatctcaaacacaacgatggatgaattcaggcaacatctacaggcaactgggtgtatctttagggtgggtgttgatcttacagtccgggtgctcacggacagggatattggcccactcagtcagccacaccaaagtgcaacatcccaccagcaccaagacatggcttttgaggtatttcagaaggttctactttaggcccaaacacagtgggtcgacagcttcacactcccggcttcttatggggttctgcagatctcaatgccacattttatggaccagttaaaaaggaagatggatctgaagttggtgttggaggtgcacaagtaactggctctaatacacggaagcacatattgcaagtttccactttccagatgaccatattaatgctctttaataatagagaaaaatacacatttgaggaaattcagcaagagacagatatccctgaaagagagcttgttagagccctacagtccctcgcctgtggtaaaccaacacagcgggttcttacaaaagaacccaaatcaaaggaaatagaaaatggtcatatatttacagttaatgatcaattcacatccaaactacacagagtcaagattcaaacagttgctgccaaacaaggtgaatccgacccagagaggaaagaaacaaggcagaaagtagacgacgacagaaaacatgagatagaagctgctatagtgcggataatgaaatctagaaagaagatgcagcacaatgttctagtagcggaggtaactcagcagttgaaggcgcgattcttaccaagtccagttgttattaagaaacgtattgaaggacttattgagagagaatatttgggcacgaacacctgaggatcgcaaagtatacacatatgtagcataaaatgcgttcagaaatttgatttattcttggactgtactcttcgcatggactgggaagttcttttaaatcattaaatattaagacgaccatctcttctattaaattacagtacatgttctagaccattgagatcaagcctttactccctttgagagtttccaacatcagttgattgagcttcaggctttacaacgtttatccctgtagagatcatctttacagttcctcgggaaaatgtgaatgtgctgcgttttgttttctttactgtatgaaaacaggaaaataaaagagaaatttagaaaatacagctcattacaataaaattgttggatttcatttcaaaaaaaaaaaaaaaaaa

SEQ ID NO: 57120 - DNA, 1800 bp, Homo sapiens
tcccagaaattttacccaagctccctcagcaccatgtaccgagcacttcggctcctcgcgcgctcgcgtcccctcgtgcgggctccagccgcagccttagcttcggctcccggcttgggtggcgcggccgtgccctcgttttggcctccgaacgcggctcgaatggcaagccaaaattccttccggatagaatatgatacctttggtgaactaaaggtgccaaatgataagtattatggcgcccagaccgtgagatctacgatgaactttaagattggaggtgtgacagaacgcatgccaaccccagttattaaagcttttggcatcttgaagcgagcggccgctgaagtaaaccaggattatggtcttgatccaaagattgctaatgcaataatgaaggcagcagatgaggtagctgaaggtaaattaaatgatcattttcctctcgtggtatggcagactggatcaggaactcagacaaatatgaatgtaaatgaagtcattagcaatagagcaattgaaatgttaggaggtgaacttggcagcaagatacctgtgcatcccaacgatcatgttaataaaagccagagctcaaatgatacttttcccacaggcaatgcacattgctgctgcaatagaagttcatgaagtactgttaccagggactacagaagttacatgatgctcttgatgcaaaatccaaagagtttgcacagatcatcaagattggacgtactcatactcaggatgctggtttccacttactcttggggcaggaatttagtggttatgttcaacaagtaaaatatggcaatgacaagaataaaagctgccatgccaagaatctatgagctcgcagctggaggcactgctgttggtacaggtttaaatactagaattggctttgcagaaaaggttgctgcaaaagtggctgcacttacaggcttgccttttgtcactgctccgaataaatttgaagctctggctgctcatgacgctctggttgagctcagtggagccatgaacactactgcctgcagtctgatgaagatagcaaatgatattcgatttttgggttctggtcctcggtcaggtctgggagaattgatcttgcctgaaaatgaaccaggaagcagtatcatgccaggcaaggtgaaccctactcagtgtgaagcaatgaccatggttgcagcccaagtcatggggaaccatgttgctgtcactgtcggaggcagcaatggacattttgagttgaatgttttcaagccaatgatgattaaaaatgtgttacactcagccaggctgctgggggatgcttcagtttcctttacagaaaactgcgtggtgggaatccaggccaatacagaaaggatcaacaagctgatgaatgagtctctaatgttggtgacagctctcaatcctcatatagggtatgacaaggcagcaaagattgctaagacagcacacaaaaatggatcaaccttaaaggaaactgctatcgaacttggctatctcacagcagagcagtttgacgaatgggtaaaacctaaggacatgctgggtccaaagtgatttacataaatttataatgaaaataaacatgtataaaatttaaaaaaacagactcccatttcttaaaaacggataagtttgaaaggaaactgctattgaacttaagcatctctagcagagcaatttgatcagtatataaaaccctaggatgtgctaggtctaagatggattaaacaagtataaaataaaatacatttataaaataaaaaggaaaacagacttaaaaaa

SEQ ID NO: 57121 - DNA, 1539 bp, Homo sapiens
  misc_feature (1)...(1539): n = a,t,c or g
ttttttttttaacagtgttatagtttataaggttttaaaaggaggaaataaaataggatatatggttttattttcatttaaaaaaaatatatatctgtttaaaggcacagaaaaaagttcagaggtatacttacaccaaggcattaaaagtggttatttggggcatcagaattttggttgatttaaatttcttttctgcttattttgtattttcatatgacatgaggaatgttaatatgcataacatgtactcctcacaaaagagtagtaaagctaaaaagagaaagcagtgccaggtagacaaaatgtctctttcaacactggctgaccctggatattatactggtaacaagatgatagactctgtgttctaccatgttcctgctgtgacagctgcatggcataaagagacagagatgctctacttccaggattccttgaatgtacttagagtcttcttcctagtgggtctgaccaccttcttagtctgggctaagagctggccgacattcagcagcagcaggaaccccaggcagacaatggctgggatacaggtgcttagtgactctttcagagctgccaaggtgaagatagcccccatcatgagcagaatcaagaacaagttactgatctcttgcagcatcggtgggcccatgaccagcagcaacccagccagcagttccagaaagcccacagctatttggtagttcaggggatctggctggtagcccaaataccttcagcgggaacacctcagcaaactgcacgaacagggcattctgtctgacattctttgtgctgtgtatgtggtttgcaagaagtggccttggtctgtgtgacgggtttgcatgatatgcctttgttctttaaaagcctggaaggctgggaagattgggaagatggaaatttcatagcatcttcctgtgtactttcatcttgaatgatctttgctgcctctttagtaactgcaccttttaaaacactgttagtgttccctgtagataaggtagcaggtatttttgccaatgacatcacactggttataactggtgttgtatctgtccttgcagaagggagctccgtcacagcagtttttgctttagaaatatttactttattttgtggaagacagtcattcataatttgctgatgacaaaactccaagacacaaaataggttacagaaatgtttaatgttgcctcgccactttatggactcgcttagtttaccctgtcgtttacaaccatcacacttggccatctgataaaacagaactgtaaatttggacatacaatcttcacaacaaaactcttctaacttgccctccaatcgattttctaccaaatttggggatgtctgtgaacagtagctgcacatcttacagtagtttccccatcgttctccaaagtcacgggcagagaggaatttgcaaacttcactacagaatggctcgtgccgaattcttggcctcgagggccaaattccctatagtgagtcgtattaaattcgtnatcagtcaaaggttcagatnnnnacacc

SEQ ID NO: 57122 - DNA, 2506 bp, Homo sapiens
ctcagatttgctcccagtcccccatcagctgcttttcccttgtataaaagagatcaaaggaatatacaggatctattcacaggtcccacaaggaaggtggttggaagagtcacagataagggtgttgggtgagaagagctggactgagtccagagattgaaattacaggaagccccattagtccaaagcactgaactcggtgtcctgtttctgccttccagcctcctcctcatcttcacctttccccctcaccagtgttgcttggctaaaccagtatttcttgtgtactaaagaaactgaaaagcttaccacaaaagcaaaagtagctttcatccttttttttttatttcatagtatatttattagaataagagattagatttgttaaacatctaggttaaaatggttaaaaggattttcatacaattttaggcactatacacgttgtttacaacagcattggtacttggatatggggaaagataaatccgacattttaatatcttgatcaatttgtgacattcaaaataattccatttaagaaacattaatcaaaacttaaagagacataccactaagtatcccacacagtatactgaaaataaatatagaaatacaaccagaagtctacagatcaccacagtagacagactggtgaagccccagctatcatggcagtgaagggctctggctagatttggatgtcaactgctgagttctacatgaaaagcaaataataataataaaataacatgatgtacactctctgatgctcattttcatagcagcaaagcatgcttcacatgcactgcctgtgaaggatctcacaaggctccctcctagagagaaagtatgcccagcaagaataaagtaccaccaaatgtcaaagaatcccgaaaatacaggcagacagccagtcatggagcaggaacagcagtgcaattgtaagaatgactacccacattcaccaaaatttcactgtaattcagcctggcacaggttttgatcatcagcatacacacaaatagccccaagcacaaagccaatccacttaggggaacaataatagtaataagaataaagacagtaatattaaaaatgacaagagtagaatcttggcacatgctgtgttcttcatcctttgtcacaggtgaaatgcacatctgaacagagacaggcatgggaaggaggcccaaaagcgacatggcaaaccaccgggcaggggactcgctctttgttgcttcccaaacacttagacgccagcagcatgggttggtgtgctgggctggttaaggccgatggtggagcagagccaacctgcaaaatccacttcctcagcatcagatctcttgataaaagcatgaaccatgagttgcttcaaatctgctctctctgcggggttttttattaagcatttattcacaaaatcttgaaattccagactgaacactccactgggcagttttggaggaggctcgttgactatgtaatccaacaactcaaaaattgccatgggaggtcggctgtccattccgtatgagctaaggggcctcccgggggtccttggcctgggtggggtctcagccgcatctccttccacctggcacccaaacatcagctccagctccttggcatctggaggagggatgggatacctcccaaccgccatctctaccagagacagtcccatgctccagatgtctgactgcacagagtaatgagtcccctggagtctttctggcgacatgtaggaccttgtgcccacgaaggagttggccatggagtcgatgagctgcccgctgaccccaaagtcacagagcttgatctccccacgggagttgactaggatgttggagggcttgacatctctgtgcatgatcttgtgcttctccctcagatatgtcaggccttttattacagcaatgctaacttttcctaaaatttgttcaggaattcttccagctttcttcaggacttgatccagagaacctccatccatgtgctccatgcagatactgatctcgccatcgctgtagaacgcaccatagaagcccacgatgtacggagagttgcactcatgcagaacctgcagctcccttatgatctggttccggattgcgggtttgatctccagatgaattagctttctggccatgaccaggccagaaggcttgtgggagaccttgaacaccacaccgccattgccagcccccagctcactgatcttctcaaagtcgtcatccttcagttctcccaccttctgcttctgggtaagaaaggcctcaaggcgctttcgctgctgctcatcaagctctagctcctccagcttcttctgcaaggcctccaagttggtctccgcagagctggtcccgttaactgcagagccgtcgggggccgggttcagctggatgggcgtcggcttcttcttgggcattttggacccgggtaacgcgcttccaactccggggggagggcagcacctctcgcttcctccctcgtgccgaat

SEQ ID NO: 57123 - DNA, 982 bp, Homo sapiens
cagacgtgaagcctagcagaggactttttagctgctcactggccccgcttgtctggccgactcatccgcccgcgacccctaatcccctctgcctgccccaagatgctgaagccagccctggagccccgagggggcttctccttcgagaactgccaaagaaatgcatcattggaacgcgtcctcccggggctcaaggtccctcacgcacgcaagaccggggaccaccatcgcggggcctggtgttccaagacggggtcattctgggcgccgatacgcgagccactaacgattcggtcgtggcggacaagagctgcgagaagatccacttcatcgcccccaaaatctactgctgtggggctggagtagccgcggacgccgagatgaccacacggatggtggcgtccaagatggagctacacgcgttatctacgggccgcgagccccgcgtggccacggtcactcgcatcctgcgccagacgctcttcaggtaccagggccacgtgggtgcatcgctgatcgtgggcggcgtagacctgactggaccgcagctctacggtgtgcatccccatggctcctacagccgtctgcccttcacagccctgggctctggtcaggacgcggccctggcggtgctagaagaccggttccagccgaacatgacgctggaggctgctcaggggctgctggtggaagccgtcaccgccgggatcttgggtgacctgggctccgggggcaatgtggacgcatgtgtgatcacaaagactggcgccaagctgctgcggacactgagctcacccacagagcccgtgaagaggtctggccgctaccactttgtgcctggaaccacagctgtcctgacccagacagtgaagccactaaccctggagctagtggaggaaactgtgcaggctatggaggtggagtaagctgaggcttagagcttggaacaagggggaataaacccagaaaatacagttaaaca

SEQ ID NO: 57124 - DNA, 963 bp, Homo sapiens
ttttggctttgatgagctgatctatttagtacatgaaaataaattcagaagcatattaagatgaaacagtgttcactcacaaatctcccagttgccgttgtgttccccaggcttcacagacagcctggaaaaactcctctagggcttgcagacttagctggaaactaatcctgagcaggaagcttggcttgaagggataagaggggaccctccaggttggcaatcacgccgtttattcgcacttggcagcaagacaatggatgatgtgggaggtgccaggcccctgggttggcactaatttggagtatggttgagacagggctggagagaggcatcttagaggtggcccccaaatccgcaatcgggagaaaaaggcaagaatcgactagagattgtcaggataaagggaggcactgcccacccctgctatgtctgtctgcccccacaggggcttctttaatacctggggttccctgggtgatgaatgtcctcctaccctggcaaggggccatacctgtcgccgtggccccataggcaaccctgatgaaagagtatcatttccaagggggctttggtttctgggtggccccacctcgtcgtggggtagatggcactgaaatgctaactgagcgagccctggaagtcaccagggggctccggaaggtcacccctgacgtggaaggcctgagatcctgaggcccatttgtgtggggggggcgtgaagagtgtaacccacccatagataacttctgggagtctgccgctggccccggctctgtcttggagggaccagctgggtgaatggctcgcagtggtgcctccctggggcggggcgagtggctacccctgggggtaggtggtggcgtccacaagagagcacggagctttgcggcatcccccttcgccatccgcggggccccgaagctggcgccttcagatcgggagccaaacagcgactcatcc

SEQ ID NO: 57125 - DNA, 2715 bp, Homo sapiens
  misc_feature (1)...(2715): n = a,t,c or g
atcatcttttgagtttctgttgtatgtggggacttcctacactggctgctgtgaaggaggtatggaagaaaggagaggctttctgcctagaaattctttgagaacacctgaaaagacagtttaatcatgtcacaacactcttaaggctcaagtcagtgttctggtttccggtagctttaggattggattctaaacgagggctggtggtgagtttggtgtttgtctcgtgtcaccctcacccctcacctcctcagtttaggataagagacataatgatttctaccagaatccaaagtaaatccaaagggggaaaaaagacataactgttttttcttctaccttttttttgttaaagagttacatctctcacaggaggaaagaattcaagagtctatatgattagttacagagaatattttcatcccctctccctgaatagaaaagcaggggtcaccatttgtatccttacccttgaggtgtttttgaagatgctgtaactcttgaagttgagctgaggcagaaaggttggaaaaatgcagccctctgggtattgtggggagggatgtgatgtagtaagagggtgttttgtggtgctaggattcccacgccaccaacttgcagctttataaaagagcgctaccaagaaccaccgctggggaaaaggttcttattcattgtttctgttggaatgtgatcttgctttctggattttaggaattcaggttactcagtataaaactctgagaaatcagtgtgacttagtccttcacctcctaagataaagtgaatatttctttacaaaataattcatgtccttaatgttaaagatgtaattttattttcaaaacatctataacatgactttcagaagcagttcatttttccaagattcctcacattatactagataaataataggccctcagttaatacccttcagttattgaattaatctagtttgtggaatgaggtgtatcctgccaacttccctctgctcccaagtacactctgagaggtaaaatgctctgggaaatggaacaagaatcgagtggatgctgactctgtgtgcccacctcctcaactgattgataatggttgaccttgggcaagtcacttctttcaatgcctcagttccccatctgtcaaatggggttaataatactgacctacctcacaggggtgttgttgtgaggcattgtaaatcaaagttaatagaatacttcagggtcctctgtggaggatgtcttgagccagagtttaagcctgacacacaggctttggtcctcactgagctgtctccaagactggaactacttagtgactcggcaaattttctgccccccacccctcatcaaagctgctagttcagatgttgacagtgttttcatgaatgttggaatcttactagtccagacttacttaggatgttgttggggaaggcacttgggattttctgtgtcttgcattcacagagggaggccatttcagattcaagagcattggattagggaatcgtgaggcagggatgctactgcgtatttctctctgcaggttggggattaaagttcctttccccatgggttttgaagcagactcagactgtctcaggatcaaagcaaccctcaatggttttgatttatgtcattgcttaccactccccaaccaatcccaggacagctgggtcactgtacccctttgtggtatctgtacctgggcctctccttcctcatagggaccagctgattgaataaatgtgaccaccttatttccaccccccacccccaaaagctacattggaattatttttcctagaaatgtgtataacactcagaattgggcattgatccttaaagcttcatcccattcaccgtattcaacatctgtcatctcttagtgtctgcagtctgaacctaaccttgaccttttttccctctggtttgagaaaactttggacactatttctacttggccaggtgtggggctcaagagccttactctttccatctcagtttaggggcgcagccagctcctcttcccaatagggctctttctgctttccctctccttggccctagatttgtaatccatgaaaaagcacaaggtcctggctccttgcggtcacattctggttctctgtgttttgtggactctgctctcactgttcacccagcactagcagtaccagatggttctgtggagtcctggggaatggagagagcacagtctgactccctgccaagtagccaggagttgacttgcccatggtccgctggctttcccaccacttcctacaggatgggatctaagagactcaagagctgggtttctttcagcactctgtactgtcccaaatagcaaacaaatcactttgtagccagatttctgaatggaaatgagaaattgaattctccatggacttttaggtttatgggggagttttagctgtgtttcttggttttatttcagccaaacatgtctgcttttgattttttttttaaagtataagtggtctatatatatgttcaccttttaaatgtaaatgtttaaaaagtaagcatttatgtgtttccataactgacatctgatgcagacctcattctctccccctcttctaccctcctcttttcccccttttcatactcttgtattggttctaataaatggttgcttttcaaaaaaaaaaaaaaaaaactgcctctgccgaattngcacgag

SEQ ID NO: 57126 - DNA, 2272 bp, Homo sapiens
  misc_feature (1)...(2272): n = a,t,c or g
ttttttttaacttggaacatgaacaacataagtatttatttgaaaaacattttccatttaagtaaaatggcaaattagctagagtagcttcttactgctaattctatttgcactcacagtcacttttattcatcatattcaaagatattgctaccaaaaatgatttcacaaagtatttagaaaaaatatatacagtctctctaatagaaagttaattaaaacaacaaagctagggcaatatcaagctaagaaaggaaaccaattgacatatataaacacaaataaataaatatggtacaaaagaatctatgccaacaacagacaaagaaaatctttacaatgcaagtgaatggtgacaagaatggaaaatctctcaggatcctagactatgactctaacacaatgtagtttaaaaagagggaaaaagaaaagaaaacataatgaaaagagagtctgaattgatgctattctcaaaggtaagctgaactaaatttaggctccccagctaaattcctgacctctgttctgatgggggactaaatggaggtgagaactgcatgcttagaactgacaacagaatttggctcaatctttcaaatccatttacaaatgtttcccttgagcaatttcttaatttttttctcatctggttattgaaaatttctaaagtggagctgacattgtcaaatatgaaaaaaatatttttctggagccatacgaatatgagtagaaatcaaaagcaaagccatttttgaagctatatcttaattactattgactaagcactttgggcagaaatctgactagttagaaagctaactaattaaaatctactatgaatgtctaaggttttgggggaaatgtatatgaatattcagtgactaagattcattttcatccatatgtaacctccgccaaaataagcagcctgttaatatatgcctattgaaaaggatttggctcagtgaccttagatttactatcttacttagaatctcagtgaccttaatatttactattcttttttactgaatacaaccctcccccgtgaaagccaagctgggtaatgctcttgtctcccaggatggtgttgcaggatgttgcaaaatggaacagtaataaaaaacccactacctcattatctcatcatctggctggagccaggcaaatagcttcctgattgaagctcagcaaaaggtgagaggtcccttgggttgctgtgtagcctaaaagctctcccatatctcagactgcaaactacctgtttttcgtgcagagagaaaggcctctaggttcccaggttctggactttgcctttaagcagattggctttgccagaatgtctccttttcttatcacttaatgctgttgcctcccagaacctgatacttcccagataacccagagcaaatgtgaaaaagcacagcatgcactgagaccgatttctaagaaactgcatggactccatcatctaagaacaattacaatgtggtctcctatacattcattagcaagcaagcattactcagaatagtctgagagttaggtaagctgcataatagtatgcaaggtttgtatgcagcagcctgatccataaataatacaccatctatcttgccagacctcctcaggctcttatatactataaccagaggactgacacacaagtagtttttagactagctattgcagacccagctcttcataaattattttgattattatgactcacccatatgtctcacttcatattccttggaacaaaactctcaatggggaaatacgaggcttttatttgtgctttaggaaatgtcttaaagtctccaaagcaaggacagaaccagagagtcttaattgtgtgtctcctaaaaggaaaattccactgcatacagcttgcctaatggaaattctccttcctcccacaagcctatgggcttaatacacagtagaggggcaaaagtagaggtgtaagagattcattcttaaacaactcctgggaggtccagaatgatggaacatcaacactaaacttaactcgaatgtatgggattaaattatacttaatgctttggccctatgccttgaatagaataagtaaaatattagaaatttatatagcctcatttaactaggtcaacattttgggaaagttttcttaagcatgttatggttctgaaggtgtaatatttaaaataataaaaaatcctttttaatctttgggtcaaggngtaaacagtcttttctgcctgtggttgaaatgtcattgaaaaat

SEQ ID NO: 57127 - DNA, 434 bp, Homo sapiens; identical to SEQ ID NO: 13475
  misc_feature (1)...(434): n = a,t,c or g

SEQ ID NO: 57128 - DNA, 2012 bp, Homo sapiens
ggtcgactttttttttttttttttcgtctagaaacatcttttatttgggtaacaggtcccaaaacaggtcagttaataaaatagattctaaagaatatgtccctatgcacagccctccctccccaaaaataacgctgggggtaggcattgcccttcccccttgggctcctcgggtgtatttaaaaaaatgttttggcagctcagtgtttatcatctgggcatgggacaccatgtccatgtccccatattcctagggtacagcagcagtagatggctgcaacaaccttcctcctaccccagcccagaaaatatttctgccccaccccaggatccgggaccaaaataaagagcaagcaggcccccttcactgaggtgctgggtagggctcagtgccacattactgtgctttgagaaagaggaaggggatttgtttggcactttaaaaatagaggagtaagcaggactggagaggccagagaagataccaaaattggcagggagagaccatttggcgccagtcccctaggagatgggaggagggagataggtatgagggtaggcgctaagaagagtaggaggggtccactccaagtggcagggtgctgaaatgggctaggaccaacaggacactgactctaggttatgacctctccatacccgttccacagcagctgggtacccacctccagcctcccatgtgagcctgtccttatgtatagtgtccaacctctgattctagcagtcaagtgtcttccccaatcctaatgtcccctgaatatgtctctaagcgacttgaccatctcttgttccttgggactggggccagcctcttgtctgcccacttccctctcattagtcagatagccccaaaggctctatctttagctcccagagaactttttggtcctcagtatttcccttcccctttccttcctattccccacaactgggggagggaagggagaacaggggcacctgatcatcaatctcccctgcccctctcttgaagccccctagatttggatgaagagcaggccagtgagcagggcaaagcctgctaggagcagaatgaccttgaggatcctttgctcagaactggccagctcctggggcaggatttccagaaaggtgatatagagaaaggtgccagctgccatgccctctagcacagactgggccagctggtgcagaggtcctgccgactctgccagagctgcacccagcccgatgcctagaggtgtcatgcatgagaagaggatcccacagccagccaccacctgtgccctaaggtggctctgcaacagccgcagggacaggctgacagcccaggatgcccttgtggagcagcaaagccaggcacagctccatggcccgagcccggtctcgctgcagccctaccgccagcccctcgaacacggagtggagggccagggagaacaccagtacacaggcaacgcaaggctgagggggttgctggggctccactcgcctgtgggacccctggcccatcatgccaatgctgcggcccaccattcactgttcccagcagagcccttgtttcctccagaggtgacggccctgactgctccttgtaagccagtgtgatctgctccatcaccaggaccagaagaagccatggcccaggatgaactcttgcagtgggaactggagcgtcacgtgcaaggctgccagggcctcatctatggcagccaggtagtcaggcagcaggtccaggagacaagtggccaaaaagacgccccccgcgaaacagcttactaggctcagggctttctggcgggaagctgagccttcatggttagctcctggccggcgcagcacacagatgggcaccaggctgcagaggagggtgagcaccagcagcagcaccagggcccccaacttcacctccagccccacaggcactggaggctctgaagctaccgcctcggggcgccacaccaggagctctggctctccccagggccccatgatgcttctggtagctccagtga

SEQ ID NO: 57129 - DNA, 2189 bp, Homo sapiens
  misc_feature (1)...(2189): n = a,t,c or g
aagcaaaatctttcctgggctgtgctaaaactgctgctgctgatgctgctatttggtttgacgggaggcctggtgccttgtcgggtgacagagctgcagcagcagcccctctgcacccagcgtgaacaccatctatgacaatgcggtccagggtctacgccgccatgagatcctccagtgggtcctccagaccgactctcagcagtgagcttgtccccagcacctgctgcctcccagccttggagtttggattcctatggaattgggttctgctggacacaacctctttttagcatcagacctacctgccatcatcaaatggctgcagattggtacatgagacctcctctttgtaggacttcttcattccttagtcagggttccctgaaggaatgaggagaaatgggaggtggcgggggggcgtggggggcagttacctgcatgcctaaaggagtaggcttgggggtggggagagagaaaacatagccttttctagttgttatataaagctgtgtaaaggcaaggctcgtttctactaaatggtcagctgtcactacatttatacttttgtatgccacaaaccctttcattcctccctgggaatcagggtagatcaggaggaactgggggggactagaacaccacgctcagtaaatccagtctaaactgggaggtaggggtattcctgttttctttaggacctcagagatgtaagcattttagcagccacacaaaatctctggctatgaaagggacttcatgaccatccagtccaatataacacttgcagacagagaaactgaggtcttccatgacttgcctagtctcccagctagtttgaggcaaaactggattcccactctggtattctttcttccctttacatcattttccctcctttataatgtcctgagagaccagaactcacaccagaatcgattattcctcaggtgaagcatagactctttcatggtagacagatttcacgactcagagatagaaatctcttgctatcatcaggtcacgggcagctcctgtggagtcctgcccaacttatgtggcttccataaaatggcaacagtccaggctccttgcctaattttagagcattaactccctaattgccagtaagcaaggaggtggatctctgcaaacctacactgtctatgacagctctagttgtacttggtgtgactaaatacctcaaaggcaacctgcttctgcaggttttgaagtgttcagcttcataagacactgaggtttagaattgtttgattctagaccataactgaagggcataaatggaaacaggatatgaagggaaacaagtagcatcatggagctgaaaagtggtgcatcacccaatggctaggcacagacaaggatcacactgtccattctcttgtctgctaaattaagcattttcttgcctcctttgcttcatcttttcacaacagctggatagagggatcagaaatgactgtgtcatggtgctcattcactgcaaactcccagttgcaagctcccttggctcccccggagggagcaagaatctcatagttcagagacacagagggccttttagccctaaatgaccttttggatgggactgcaactcatgactatcctgatattggaagaaaggactttgttaatcttctcccccatagctctgctgcgtaggtctacatcttactcagaatcactacacattcctttagtcttcctccaagctccagagccattggtacaaatgctttattgaaactaaatacataatacacacaatgagatgaagacaatatagaagtccgcatagtcatcataatcccgttccttggccggttgaggcagctcagtggctgagcccagtcaagccaacccgcagcttcactcacgacttcaagatttgatgctaattcttttggatttctacagttattaaataagtgtctgagtggactgtctttgttcctttgtgttttgagggctggctgggtaggagtgggggtggtttgtctgtgggcagtgaatttttgccagggagagggaacattaaatgccaaaggtagggtgggcagtatttcagtctctgccccagccgacaggggnaggaggaccttcacaaataataagggcccnagaaagancggggccccacccgggtttntttccgggggggtnctgcc

SEQ ID NO: 57130 - DNA, 458 bp, Homo sapiens
  misc_feature (1)...(458): n = a,t,c or g
ttngnnnnccnnnnttttgagaaccgntatgacatgattacgaatttaatacgactcactatagggaatttggccctcgaggccaagaattcggcacgagcagagatgaaattgaaggcctttcatctgatgaagagcactgaattattcatactagggtttgaccaacaaagatgctagctgtctctgagatacctctctactcagcccagtcatattttgccaaaattgcccttatcatgttggctgcctgacttgtttatagggcccccttaattttagtttttagtaggaggttaaggagaaatcttttttttcctcagtatattgtaagagagtgaggaatacagtgatagtaatgagtgaggatttcttaaatatactttttttttgttctaggaatgagggtaggataaatctcaaaggtctgtgtgatttactcaagttgaagacaacct

SEQ ID NO: 57131 - DNA, 1119 bp, Homo sapiens; identical to SEQ ID NO: 13483

SEQ ID NO: 57132 - DNA, 1465 bp, Homo sapiens
gcaccccgtccctgttttttgtgctcctccgagctcgctgttcgtccgggttttttacgttttaatttccaggacttgaactgccatgtcctctgaagaaggaaagctcttcgtgggagggctcaactttaacaccgacgagcaggcactggaagaccacttcagcagtttcggacctatctctgaggtggtcgttgtcaaggaccgggagacctcagcggtccaggggttttggtttcatcaccttcaccaacccagagcatgcttcagttgccatgagagccatgaacggagagtctcctgggatggtcgtcagatccgtgtgggatcatggcaggcaagtctgcttcggggaaccagaggaaggtggctttggggcccatgggccttggtcgcagctactctagaggtggtggggaccaggggctatgggagtggcaggtattatgacagtcgacctggagggtatggatatggatatggacgttccagagactataatggcagaaaccagggtggttatgaccgctactcaggaggaaattacagagacaattatgacaactgaaatgagacatgcacataatatagatacacaaggaataatttctgatccaggatcgtccttccaaatggctgtatttataaaggtttttggagctgcaccgaagcatcttattttatagtatatcaaccttttgtttttaaattgacctgccaaggtagctgaagaccttttagacagttccatctttttttttaaattttttctgcctatttaaagacaaattatgggacgtttgtagaacctgagtatttttctttttaccagttttttagtttgagctcttaggtttattggagctagcaataattggttctggcaagtttggccagactgacttcaaaaaattaatgtgtatccagggacattttaaaaacctgtacacagtgtttattgtggttaggaagcaatttcccaatgtacctataagaaatgtgcatcaagccagcctgaccaacatgggtggaaaccccatcctgtacctaaacataaaaaaattagccctggcatggtggtgtacgcctgtaatcccccagtgacttgggaggctgaggcaggagaatcgcttgaacccgggaggcggaggttgcagtgagctaagatcgcgccactgtactccagccctgggcaacagcgagactccatctcaaaaaaaaaggaaatgtgtatcaagaacatgattatccaggggtattttctaattcagatcatcaaactgattatatagaagagttggctttaaaatgtttgcaaatgtctttttttttttaatactggaagaaaaaatattctgttgtgtctcatacagtgcttaggatgtctttcacagagcttattaaaaagatgaaacctgagaacaaactgctttattcttactcagcccattttgcaaattaaaag

SEQ ID NO: 57133 - DNA, 641 bp, Homo sapiens; identical to SEQ ID NO: 13487

SEQ ID NO: 57134 - DNA, 2733 bp, Homo sapiens
  misc_feature (1)...(2733): n = a,t,c or g
ttttttttttttttaaaaagtagatttattaaaaaacagttgaaggtctgagtgttgagaggcaaatggggtctctgggggatcctgtcctgcagcaggcctgactttcagatgactgtgcttataaggcagatcagtgccttcctggttgccttagttctttccatttcagacaccacatttggatcctggggcagctgctcaactctacccaactctaccatggctacctgggattggagaacatgtgagtattagctacttttacagtcaaatagggatcttgtagaagaaacaggtagacagacccaccagtctctcattctgacctagcaagctggtgaagtcactgtcggtcctagttcccttgtttgttgggctgcaggcccattccaacacagcccaactccccccccccgnnnnnnnnnnnnnnnnnnnnnnnnnnnnnnnnnnnnnnnnnnnnnnnnnnnnnnnnnnnnnnnnnnnnnnnnnnnnnnnnnnnnnnnnnnnnnnnnnnnnnnnnnnnnnnnnnnnnnnnnnnnnnnnnnnnnnnnnnnnnnnnnnnnnnnnnnnnnnnnnnnnnnnnnnnnnnnnnnnnnnnnnnnnnnnnnnnnnnnnnnnnnnnnnnnnnnnnnnnnnnnnnnnnnnnnnnnnnnnnnnnnnnnncaactcctttctttatgcaaatacaaaaggcaaaccttggtgcgacacttagtccttagtagcaaccctggctcatcctcctagtctttccctagtatttgcatcaatggctaactaagctgatggcagacctcatcctggggtaatactcattcagggaagcagcaacaaaggagggtggggaaagaggtcaggtcagatttacctaacatgatatgtagcataataggtgcccattaaatctcagctactagtaaagttggtgaggaagaggtatggaggcgttaagacctgaagcactgagttggtccataaccctgggctttagaacaaggtctggttttattttctggcagaatcttttaaaatataaaacagataaaacacatctcaaccctgcaatctgccagcatgccttgtttctacaagatgcatgctagaccatgagactacatagcaaagggtctttaagaggatttggttgggagaaatagaaaaagcagatcttagggaagcctgggctagcccaaaagctgagctacatccctgaacactagagcagtccttgtcttttcagatcctcgtatgtcttcttattcacaacattcccacttgagtcttcatattcttcctcagtgtcaggctgccatcgttctgaagccttctgcaatttcagtttggcccacaaggagacagcatcttcaatctgtgtcacattagcaaagtgagcagtgtttgggatgcccaaacacctcatgccatgagcatgacgccattcagcaaagtgtcgctggaaggctttgggccctcggtaggtgtagtttccacaaatctcacagttgtagttgatatttaggccatgaagcttatacagccagtagggaataggtttgccatcccagccaagtggcaggtttttggggttgtaaatgatctcgttctcttcatcttcactctcactctcactgatctgctcttcttcctcttcttctcgctcttctcctgtcctggcttgcttgcgctgtacattttcatgagtgagatgtcgctgttccccgagaatctctacatattcatagatctgggcttctagaaaagcaatgtctttgttcctttcagtgtctcgcttggtgccctttgacttgggatttttggcaaacaaagaggtatcaagtgactccagggactttcctttggtactgaatagtctctgggctcgctcttctagggtcccgccacatttcaagcctaaagctaagagagcagatttcaatctgtccaaacccagagaagccaactcctcccaggaggagaatgcagagaggtcaagatgggctccagcatgggtcagggcactgcttgtctctttcggccatccaggaaaggtcccattctcccatttcttctcaaactcagcctgaatcttcccaaaaagttcattctgatcttggagaggcttcactctatctgtgtaatcctgaaggtactcaagcagcatctctaggtatctcttatactctgcattcttcctttctttaggaatgtcaaataattggtcaaagatggacaggtatgtgatataatccagcttctcagatgccttcaggttaatgtacttgaggtaacagtcatggagatcgagataacgaccatatccctcctcatctgtgaactccaccaagttttgtgcctcttcacttggattctctcgagccttcaggagttcctcaaattccactgacattggcacacagatctcatttgggtgcttccggtggaattcctttatttgcttgagtctattatagaattcagcaaactcattgggtcctgaaatggcattgagctcctcctttcgtaatccatccttatcatcatacaaatccctcaggttcccactgacctccatatacctatcttgcatggcccgagtgcggtgatcagaattgatctggtcccggagcgtggacttcttggtgagcatctctttagccatgacgtccatgagccgttccttctcctcatgatagcgccgctgctgctccagtattgtctccatcttccctt

SEQ ID NO: 57135 - DNA, 720 bp, Homo sapiens
  misc_feature (1)...(720): n = a,t,c or g
cgggtattgagtccatggagcgagctgagagctagagtacagaacctgctaaggccatcaaacctatcgatcggaagtcagtccatcagatttgctctgggccggtggtactgagtctaagcactgcggtgaaggagttagtagaaaacagtctggatgctggtgccaccaatattgatctaaagcttaaggactatggaatggatctcattgaagtttcaggcaatggatgtggggtagaagaagaaaactttgaaggcttaatgatgtcaccatttctacctgccacgtatcggcgaaggttgggactcgactggtgtttgatcacgatgggaaaatcatccagaaaaccccctacccccaccccagagggaccacagtcagcgtgaagcagttattttctacgctacctgtgcgccataaggaatttcaaaggaatattaagaagaannnnnnnnnnnnnnnnnnnnnnnnnnnnnnnnnnnnnnnnnnnnnnnnnnnnnnnnnnnccatgcttcctgtacagcctgcaaaactgactcctagaagtaccccaccccacccctgctccttggaggacaacgtgatcactgtattcagctctgtcaagaatggtccaggttcttctagatgatctgcacaaatggttcctctcctccttcctgatgtctgccattagcattggaataaagttcctgctgaaaatccaaaaaaaaaaaa

SEQ ID NO: 57136 - DNA, 1128 bp, Homo sapiens
ataaacattattaaattttattaacaaaacattttgtacattttaatacatgtggaattttacatctaggtaaaataacaacacattcaaaatttaccatttatacaaactgttacagaataacaaccagtgggttaaataagtaaaataaaccacactgattttttaaattatctacaaaagatttgactttaaaattcccctgaacatataaaaataaattaattttacttttcaattaaatctaccaattagaaatattacaaatcaaaatatcaatgttatcttatgaatttgtcacaatacaaaacagattcacaaaactttatttacagaaatgaggtaagaactgtgcaatgtttaaccaagaaacatattgcagaattaacatgttcttccagctaagtacacagtggaggtctaattacagctgggtcttttccactaataattcgacacaccaaagaagagtttgatgatgacatcctccagtgggggaatcactctgcggtactgtcacatcaaaagcgtggctccccaaagtggaagggctgtcaatacaggtttcacctgtttcaggaactctagtggtgagcttttaatggtcagtaatgggaagtggtttaaataaaacaaatctctattcttaccaaatccactccttttcttgtgactcattagtggataaatacccaggtaatagttttgcctgagcctatctacagtggcacagaaagttctgaataaaggcggaagccatgggaaggctgcaggtgacgggatgattccctgctgctcggaggactgactgtcccaccctgctgtctacagcccttgcagcacaatggaggcacttgatcaagggcaaaccccaccagcactttccacagtggcccctttctgaaagaagtatttagctttgaattgatctggttcccccagcagcctcagaactcacttaactcaagatttcttcaaaatatgagtaggtcttaacactaaagaaagcaattctcaaaagaaaattacctttagcagatgcagacattaccatcctaacttcattaccaaaattggccaaatcccattagaaaggaaatttttttttaacaaagattgccaagtccc

SEQ ID NO: 57137 - DNA, 1066 bp, Homo sapiens
ttttcatctagtactttcttaatgcctttattggagtccgcatcctctatctttaaaaaaaaaaaaaaaaaaacagctttagcctaaagccactttcaactttttttagttcacaaaaaggatttaatagccacaatgtgatttttgccacaactgtgtgattttaatattctctaatatcaagggcggatttagaattgcaggaaatacctggagaaatcacagtggaatgaatttttgctttaagagaaatgagagttggctgtctctgtaattgataatacagcttcatcctagtcccatctgcatttcagaaaataaccctcatctttacaaaacacaggacacttgtgggacagttaactcaagcagctatggggagggaggagattattgaatggtgattaaataatgcaaatggctcttctgtttcttaaagactgtggaagaggtcagactgcccagttgaggtgggcagttcatactgctcagttgaggtggcagtcatttattctgagtcctgttggatagagcctatctcctcaaggctacagaggcttccaggatatggagctgtgcatgttaatggctcagccttgcctccatcagggcacctgcctaacttggagcaagtgggagagcaccctagagtcatcctctgtgctgtttcgtgagttttgcagcggagacttcaccatccggaggagctgtgtttctgtgtcacttgggatatcacctaaaaatgaaacatttgatattttaaggtataaaaaaaaagtaaattggggaacattggctgcagtccctaaaagatactgttgtctgtgcatcaggttagcttgaggtcaccacaggtcctgggagcccagagagtttaggcatactctcctttggaggccagcagcctttcacaaaccctgcctctaaaagggcggtttcacatttgaccatgtttttgcattagcctcagaaactcttgtctttagctgataacctttgagggatgtgagaagcctagttggagcatctgagaaaatgatacctctcaccttcaaattaatcaaat

SEQ ID NO: 57138 - DNA, 445 bp, Homo sapiens
ggagaagttccaggccttgtgtaacctctacggggccatcaccattgctcaagccatgatcttctgccatactcgcaaaacagctagttggctggcagcagagctctcaaaagaaggccaccaggtggctctgctgagtggggagatgatggtggagcagagggctgcggtgattgagcgcttccgagagggcaaagagaaggttttggtgaccaccaacgtgtgtgccccgcggtgagcagaggacgtgtcccacctggtctgccaggctcggggtcccaggcccaattagagccagaaatccttgtatacagggaagtcggatggtctcagggagatgggtggggttggtgacactattcctttctaggagagactgtttggatttccctgaggtggtaagaactcacacatgccaggtgcggtgctcatgcctgcaatccca

SEQ ID NO: 57139 - DNA, 1327 bp, Homo sapiens
gaatgacttcctctttgtccaagccaccagctcccccatggcgttgggggccaaccctaccgccacccggaagctcaccatcatatttaagaacatgcaggaatgcattgatcagaaggtgtatcaggctgaggtggataatcttcctgtagcctttgaagatggttctatcaatggaggtgaccgacctgggggatccagtttgtcgattcaaactgctaaccctgggaaccatgtggagatccaagctgcctacattggcacaactataatcattcggcagacagctgggcagctctccttctccatcaaggtagcagaggatgtggccatggccttctcagctgaacaggacctgcagctctgtgttggggggtgccctccaagtcagcgactctctcgatcagagcgcaatcgtcggggagctataaccattgatactgccagacggctgtgcaaggaagggcttccagtggaagatgcttacttccattcctgtgtctttgatgttttaatttctggtgatcccaactttaccgtggcagctcaggcagcactggaggatgcccgagccttcctgccagacttagagaagctgcatctcttcccctcagatgctggggttcctctttcctcagcaaccctcttagctccactcctttctgggctctttgttctgtgggctttgcatttcagtaaggggaccatcagtcccattactagtttgggaaatgatttgggagatacagattgggcataggaagaattttaaaggaatcatttaaagggaaggcaggggcctagggagacacgtggaaacaatggacatttttccagagtcagatgtaggctgcagtccagggttgaaattatcacagaataaggattctgggcaaggttactgcattccggatctctgtggggctcttcaccaatttttccagcctcatttatagtaaacaaattgttctaatccatttactgcagatttcacccttataagtttagaggtcatgaaggttttaatgatcagtaaagatttaagggttgagatttttaagaggcaagagctgaaagcagaagacatgatcattagccataagaaactcaaaggaggaagacataattagggaaagaagtctatttgatgaatatgtgtgtgtaaggtatgttctgctttcttgattcaaaaatgaagcaggcattgtctagctcttaggtgaagggagtctctgcttttgaagaatggcacaggtaggacagaagtatcatccctaccccctaactaatctgttattaaagctacaaattcttcacaccaaaaaag

SEQ ID NO: 57140 - DNA, 1449 bp, Homo sapiens
  misc_feature (1)...(1449): n = a,t,c or g
ggcacgaggttgcggccttcctcgcgtcaccgccgggatgaagccgatcctactgcagggccatgagcggtccattacgcagattaagtataaccgcgaaggagacctcctctttactgtggccaaggaccctatcgtcaatgtatggtactctgtgaatggtgagaggctgggcaccctacatgggccataccggagcctgtgtggtgtgtggacgctgactgggacaccaagcatgtcctcactggctcagcttgacaacagctgtccgtctctgggactgtgaaacaggaaagcagcttggcccttctcaagaccaattcggctgtccggacctgcggttttgactttggggggcaacatcatcatgttctccacggacaagcagatggggctaccagtgctttgtgagcttttttgacctgcgggatccgagccagattgacaacaatgagccctacatgaagatcccttgcaatgactctaaaaatcaccagtgctgtttggggacccctgggggagtgcatcatcgctgggccatggagagtgggagagctcaaccagtatagtgccaagtctgggagaggtgttggtgaatgttaaggagcactcccggcagatcaacgacatccagttatccagggacatggaccatgtttgtggaccgcgtccaagggacaacacaggccaagctttttgactccacaactcttgaacatcagaagactttccggacagaacgtcctgtcaactcagctgccctttcccccaactatgaccatgtggtcctgggcggtggtcaggaagccatggatgtaaccacaacctccaccaggattggcaagtttgaggccaggttcttccatttggcctttgaagaagagtttggaagagtcaagggtcactttggacctatcaacagtgttgccttccatcctgatggcaagagctacagcagcggcggcgaagatggttacgtccgtatccattacttcgacccacagtacttcgaatttgagtttgaggcttaagaagctggatctcctgccgggccgtggtggctcatgcctgtaatcccacccactttttttttaaggcaggcggatcaccctgaggtcaggagtttaagacccagccctgacccaacatggagaaacctcgtctcctactaaaaatacaaaaattagcccaggcatggtggcannnnnnnnnnnnnnnnnnnnnnnnnnnnnnnnnnnnnnnnnnnnnnnnnnnnnnnnnnnnnnnnnnnnnnnnnnnnnnnnnnnnnnnnnnnnnnnnnnnnnnnnnnnnnnnnnnnnnnnnnnnnnnnnnnnnnnnnnnnnnnnnnnnnnnnnngtggatctccaaccaggccagagaagattctcacagaaggttttgaactctaagaaataaattggtttggtaataaatggcttctggtcagat

SEQ ID NO: 57141 - DNA, 2059 bp, Homo sapiens
cgggtccggcgggcggttggcttgagcgggaccggagctgaggcaggaagagccggcgccatggtggagaaggaggaggctggcggcggcattagcgaggaggaggcggcacagtatgaccggcagatccgcctgtggggactggaggcccagaaacggctgcgggcctctcgggtgcttcttgtcggcttgaaaggacttggggctgaaattgccaagaatctcatcttggcaggagtgaaaggactgaccatgctggatcacgaacaggtaactccagaagatcccggagctcagttcttgattcgtactgggtctgttggccgaaatagggcttgaagcctcttttggagcgagctcagaatttcaaccccatggtggatgtgaaggtggacactgaggatatagagaagaaaccagagtcatttttcactcaattcgatgctgtgtgtctgacttgctgctccagggatgtcatagttaaagttgaccagatctgtcacaaaaatagcatcaagttctttacaggagatgtttttggctaccatggatacacatttgccaatctaggagagcatgagtttgtagaggagaaaactaaagttgccaaagttagccaaggagtagaagatgggcccgacaccaagagagcaaaacttgattcttctgagacaacgatggtcaaaaagaaggtggtcttctgccctgttaaagaagccctggaggtggactggagcagtgagaaagcaaaggctgctctgaagcgcacgacctccgactactttctccttcaagtgctcttaaagttccgtacagataaaggaagagatcccagttctgatacatatgaggaagattctgagttgttgctccagatacgaaatgatgtgcttgactcactgggtattagtcctgacctgcttcctgaggactttgtcaggtactgcttctccgagatggccccagtgtgtgcggtggttggagggattttggcacaggaaattgtgaaggccctgtctcagcgggaccctcctcacaacaacttcttcttcttcgatggcatgaaggggaatgggattgtggagtgccttggcccccaagtgaactcaagatttggcagccccagagatgccaactgcagcatgcccacctgtattccctgtccccttccttcatgaaggcatctccaggcaaggaaaactgaagtcattggcccgatacaaaacatttcctgcaacgaaggaggtggtgccgacgtgctgcttcccatcaccagcagctgctcgacaaggggcgcagggtggctgtctttgttccagcactgttcaggctgcctgtcatcccgggcctgccagctcccctgagtgatgagcacttccaagcacccctctgccctttctctgtccttatgctgtcccgggcctcgccaggccctctggggcattgtgggagatgcctgccaggaatgagcaagctctgttgctcgggagcctcttgtcaccttcttggacttattccccacctgataccttatagagaaaagtgtgaattcaggtggagagtaggcccaggccccatgaggcaccagtggaaagcacagctccaaagttcagacaggtgcccttagagaggaaaaccatgacaggcaaatgcatttcctctggagtttgagaccctgacaaacaacaggtggcatctggtgtgctgttcttgagttttcgtttaggattagttgagttccagctgggttttgggagaaaggagatgctaccaagtcttggatgttagggcgagaccctgcaagttgagtattagagagcttgtctttcaaggcaggttccctggggcttcagggctaggagggaggagcctgcccttttaacagaaccccagtcacatgcggctcaagtcactcagaggctgttgcatttcagggctatgttggtcctttgtttacctcctaaaccacagctgtttgtgtttcacatatgttgtgaattttccttggttctttttaaaggaatgataataaagttacttgctttaggaaaaaggggga

SEQ ID NO: 57142 - DNA, 1049 bp, Homo sapiens
gaacataggacattctaaagttccttgatttgatcattataagaagtgtgggactcaagcacaggaaactgaactcttttggtgtcattggatgtttcatttttgacactaattttttctggacaaactctttatgtgtttttcccaagaatagttatctacttcctggaggcaaaatccttggatttactaacatgatgatttaccttttcttcaccgttgtcgttacattgttagaaaagcaacaggaaaaaatccaattcatttgacctaaaaacaagcctcaagtttaaaaccaagctcacgtttttcttaagggaaaaattttctttcttaaacttacatctagcaacttggaaagcactttctctggggatcttcttttgtaactttgcagacaaataagtatgagtcactggggagagagtttggttattgaaatagatgttgcccatggaagaattctccttcctgggattgactcttaatcatcagggcatcattcctgggtttgcttctctacgaatctcaattccaacttctctgcagagtctgtacagtgattaagccatgcccagatggtctttggtgcacacagttatttaagaatccacttccacaggtggctgcccttgtaaggaagaatgcatccctaaatgtggccaccagagagttccagtgggcagatgtctgtggctgcccttctcatttaaggacatgagttcactggagtattactccaaaaagtctgtggttcatttccagtattgtgaatatttagtttatgtggccgtttctttgtttctttgaacagtgggattttcagtgaaaaagtaccctctttttcatttcctattgcagtggtcacagctaatagtgtctgaacatggttcaagaataagagattccatgtagcattttctttattattttcatttcccttatattatccatcattccttaaggacaattattcttaataatgcttatagaaaatgttctctaattaaacatgccaaaaggaaaaagtaagagaaagagggagcaag

SEQ ID NO: 57143 - DNA, 2783 bp, Homo sapiens
  misc_feature (1)...(2783): n = a,t,c or g
ggatccagctcactcccctgttgattgtgtgttatggtgcagagtccagccactgtttgtccagtggggtctctgacctgccttcctgtagctcttggagtcattctggcctccccctcccccaaggccagccctacctggcctccagatagaggcactgagagatgtggaaaccattgatttttattaatttcataactgggaaattccatgtgaaagtgaaacaagcatgagtcaagtcaaccagggaaggaatctggggacaggccaaggagcgggaggtggggcagcgaggcagtcctgctggtaggagccctgaggatttcccagcttgtgtgcgctgcctctggcatcctagagacccggatttactcagctaggagagaggatggatcacagggtctaagggtggccattcagaggtagaagatggaggggcggcagattctggcagggcagcagagggctcagtggccatggctaagaggggtaaaaaattcaggacatcccccaggtgctgcctcagccagggctgcatgcggaagagattgatgtgaaagtctcgtggcggcgggaccttgctacgaggggcccttttgcgggagtttttgtcagcagagccaaggcaggggttgtaaagaccccagctcaccagacccacctgaaaaaacctgaatctccgctcaaggaaaactgctcccccagattctcccttgcagggactctcatcctcctgggtcccactgcataggaactggtctgtcaccacctccctgacatctgtcaagttggggaacatggttttttcttgggagacaacctcggcacagcttgtccactccactcccatcttaaggttaatgttcagtttgctcccattcaaggcgacaaaatgagcaggaacactctgtttgttcagcagttcattctcatggtccctacaggtgctgccttgaggtctccgcagagccagattggcctcccatcgtgcagggaaggcagatgggccctggcatgggtggaacatctttactttctgggccagcttcaagcagagctatgtcatcaccatagaactcccaggattccctggttctttttggcaaagacatcaaaccctggggagatcaccgccttctcaataaggaattctttgccccactgggatttggggtctcccacattgaccctccacagggagtggtcgttgccatcgcggaagcaatgagctgctgtcaggacccattggtcggagatgagggccccccgggcagggtctcttggctcttgggcttaatagtgacatgccagggtgtcctctcctggtcagaggcgtttgctgacatgttccccaccccgcagatggtgtctgtgagcttggagacatccagcatatgttcaaagacctggtgcagagcctttgtgtcctgcagaatgaaggcatgcctctcaccatccttcttggaccctagctcattcagttctctccagtccacatccagcttgcccaccccgatggcatagatgtccagatagtcattcctcttctggttgatgttcaggatctctctgatatggtcaacagctgtcttgggagagccacccatattggactttccatctgtcagaaggatgatggcatgtcggatttcctgcccagnccatcgtttccatgccgaggagtcgcatttggttgttcatcatgagatagacactgtttaaggccgcataggtgttagtcccagttccattttcatgatctttatagttggcattttccaggctgctgatcacctcagtcatatcccgggagttgtcgttcaggacagacatgaggactttgggctctgaggcaaaggtgataatggcaacgctcacattgatctcaaagctgaagatcctgtccaccatgagggaggcgctctccttgaagatgagaaagtcattttccgacacactctgcgaacagtccaggagcaggtagaggttcagatgaccagagcgctggatttggattttacggcccaggctttcctttgtcttctgggtgggattggtggccccaagcatgtgggagaaggaagtgcccagggcaggggccacgtcctcagggaagtcataagagtagggttgcggcagatgggctccgttccactccagaccccgttgccctggcactcccgctccgaagaccccgtgagcacaagattcgaggagcagcgatagcggaccttgtccccatgaccaaagcggaagcctgtccgcactgcgcccagtgaaatgcctgggttggggcagtggccagccccattatcacacacagctgtttctccatcccacatgccgttggggcgacactgacgcacaggcgagccccgcaatatgaagccatcctcacactcgaagctcacattgccacccacgggataggaccccagccgtggggtataaatgccattctcaaaggagacaggggctggacagcgcacaggtttgcagaccgccttagacagagaccgggtggctcctggggtctgccactgtccgctgctcttgcacagccgtgatgctggggatgggtacaggccctgggggcaggagtaggtgagaaggctcccaggagcccagccatggctgagggtgaaggtgccacccgagatattcacgttctgagggcaggagggagccgagtctgccagacctgggtacaggaacagcaggcaaaaaagaaccatcagtgggcccatggtgtcctccctaggggcggcgagaggtagagagcc

SEQ ID NO: 57144 - DNA, 386 bp, Homo sapiens; identical to SEQ ID NO: 13506
  misc_feature (1)...(386): n = a,t,c or g

SEQ ID NO: 57145 - DNA, 1098 bp, Homo sapiens
gctcgtgggttttccgtgaagtcgcggtgcagcggtgggcggcatgtctgtggccggtggggagattcgtggggacacggggggagaggacactgctgctcccggccggttcagcttcagcccggagcccacgctcgaggacatccgccgcctccatgctgagtttgctgcggaacgagactgggaacagttccatcagcctcggaatctcctcctggccttggttggggaagtgggggagctggcagaactctttcagtggaaaaccgatggggaacctggcccccaaggctggtcccccagggaacgggcagcccttcaagaggagcttagtgacgtcctcatctacctggtggcattagcagcccgctgccgtgtggatctgccgctagcagtgctctccaaaatggacatcaaccggcgacgctacccagcccatctggcccgcagctcttcccgcaagtatacagaattggccccatggggccatctctgaagaccaggctgtggggcctgcggacattccctgtgactccacaggccagacctcaacctagaaagatggccacaggacttgcaactcagggtggtgtctgaagagcagagagtggcctggccctggagcctttttctagtcttttcagaatagatcatgggcctgaggcctccacttcttgaggtctgaggcccagcagcctctagaaggtagcctcctggtgtttgttctcccagtaaaatggttttgggcgataacttctagattattcctggatggccagggaggctctctgtctcagcaggtgatgacgggggtaccaggggtgcctctgagacccattctcgtgtttccctgttgtaccttttgcctgcagggcagagagatctggtttctagcaaattcccagtaggatgtcatgtaagttccttccccctcttagagattgaaggctgtaagagtccagatggtggagccaggctgtctgggttcaaatgccatctttgacacttgcaagctaaatgacattactcaaattaatcgttctgcacttcagcttccttgtctatcaaataaaaagaatagtacctgcaaaaaaaaaa

SEQ ID NO: 57146 - DNA, 462 bp, Homo sapiens
gtataacctgcgactgaggtcccagatggtcatgaaaatgcgggaatatctctgtaatctgcatgggtttgtggatatagaaacccccacattgtttaagaggaccccagggggtgccaaagagtttttagtaccatccagggaacctggaaagttttattctctccctcagagtcctcaacagtttaagcaacttctgatggttggcggtttagacagatattttcaggttgcccgatgttatcgagatgaaggttcaagaccagacagacagcctgagtttactcagattgacatagagatgtcatttgtagaccagactgggatccagagtttaattgagggtttgctccagtattcctggcccaatgacaaagatcctgtggttgttccttttcctactatgacttttgctgaggtgctggccacctatggaactgataaacctgacactcgctttgg

SEQ ID NO: 57147 - DNA, 1063 bp, Homo sapiens
gcgtcgactttgtttttttttttttttttttccgtcctccaccaatttatttgcccatccgcaggaggtaacagctcctgtggtgtctgaccacccccaactccgaagtccagacaagctgtccgcccagaatatgaggctgacttgggcacactaggggaataccccaaaggcctgaaggaggtgccactgggctgccagcacttcaggaaggcacagggccccacacccccgagatccaagctgcactggctggcagggggcagggcggggggtggcgaggacacagtcccgtgtgtcccagcaccggtgccaccctcctaagccccgggcaggcagtacgtacatgcggaccccgcctctcaaagcacgtttatggaaatgaacagggtggggtggcccgcgctcgccggtcacatgttggctcgttcccgctgcagccgcgagttgtaggcgcgagacacggtgttccaggcgtccatgtagcggtccatgcacatggcgatgcacttctgctcggagttgtccagggagcccccaggtttccctatacacttccggaaacacttgtccgtcatcctctgcagcagctcctgcgcgttggccacggcgatctgcactttcacctgctccattatgagccctgggtccagcttcccgctgccggagcccccgaaatcggagccgaagccgccctccatggctccgcaaagtcaaccggaccgaggccgcgtgcgccgactcgtaactaactgcgccggaagcgggccgcccggggcaccacgggaaacggagtccgcgcggacggggacggaggactacaactcccacacgaccgcgcgcgcccgggccattcaaggtcgcgcggggggccctccgctcatgcggaggcctggacctgccgttacctacacgagctacccgtggttgcgactccgcgggaagagggaggccctgacttggccggggagtaggggggctactacgtgcggccgaggccgatcactttgtactcacgctctgcctccagctcgtcccgaagggcctgccgcgcatgcgcacg

SEQ ID NO: 57148 - DNA, 339 bp, Homo sapiens
gccttgtgatgcttttgcctgaaaccaagggtattgccttgccagagacagtggatgatgtagaaaaacttggcagtccacattcctgtaaatgtggcaggaataagaaaaccccagtttcccgctctcacctttgaggcccccgacaaagacagaaagaaggagctatccagggagctgatcctccttgcaaagctgtgccttgcagagatgcaccgtgtgcatttcagctacatcatgccgcgctgttgtaatactgtataaagacctcaatctatccagagtatttttatataatgttggatgagttaggatttgtaatgctgttgaagtttctgg

SEQ ID NO: 57149 - DNA, 1212 bp, Homo sapiens
tttttttttttttttttttaacgtttttagtaaatgtttattttttgtattccttaaaaacaaaacaaaaatcacaagtttaatactagtcctttgaaatactgtacaccaatcaaagccaccttactcatgcagcaagttggtctatgttctcttgacttctgtttgccagatgctcctcaataatttctgcaaacagattcctcttcaacagattatatgcaagaggtaaaagctggccagcaactttatgaaaataatgtgagccatagcaaaagagatccattcccaattcaagccccatgccataatcacattcatcattagcaaactgcacaaaagtcatcatttcctgaatgggagcaaaagcttttagtctctcctcatcacttgcagcctcaactattgtcttgcaaattctcttgaggtcagcatctgtttcagggagctctcgggtacccaacatcatttttatctactggaacaaccaagcctgcaccatgaaaggtctttgtcacaactttcttatctctctgtttcatcttcacggttctctgttcaagcgagtaccccaattctctggctgcttctgtgagtttttcatctatgtttttcaagagattgattttctttttatccgttatttctttaagttttttcgtcaaaaataatttgactgcagcaaatacattatctccatttggaacaattatacaatttttctttgcttcatttataccaacatatacaggaaattcatcaggagaatccctgaaataccccatgtggtactggagttttattatctccaataataatggtctggaactcaggagggatcatagtaaaacctccagtgaaggttaaaattcaggcctgttgattttttcttcgttttatgttttccagcaaggatatcataaggaccaactaattgaagtccaaggcttgcagaaagtgaatcagatggcttttcaggatcaagttcttcacagaacttccagaagtgatagaaatcttcaggtaaagaaagatttataatgattttctacttcttttcgaaggtcactggagacatcagcttcacagaatttacttttcttcacatcagttgttttttcacactgcggcccctccccgccgggcctgcgcttcccgccaccgccgaccattctgcagctgcagcgccagcagaattccccgatccgcggg

SEQ ID NO: 57150 - DNA, 417 bp, Homo sapiens
gctgactggagagctcaagtgcagcaaagagaagtgtcagagcatgagcgccaagtccagaaccatagggattattggagctcctttctcaaagggacagagtgtgatgtgaaggattatggggacctgccctttgctgacatccctaatgacagtccctttcaaattgtgaagaatccaaggtctgtgggaaaagcaagcgagcagctggctggcaaggtggcagaagtcaagaagaacggaagaatcagcctggtgctgggcggagaccacagtttggcaattggaagcatctctggccatgccagggtccaccctgatcttggagtcatctgggtggatgctcacactgatatcaacactccactgacaaccacaagtggaaacttgcatggacaacctgtatctttcctcctg

SEQ ID NO: 57151 - DNA, 1170 bp, Homo sapiens
  misc_feature (1)...(1170): n = a,t,c or g
ccggaagtgccggcggcagtgtgtaagacgctcacgggcgcgcggactatcgggcggctaggctctctgaggaggctgccacagtgaagcaaccgtgacaagtggtgcccgaccagggacctgaacgaggaaggtctgccagagcagagaaagtgaaactgatcagacgaactacgaacccctggacgggagagtctgccggcggagaatataaggagatggacaaaccgtgtgggtgccctccaggtgtgtgtgaccatggaacgggagaccggagggatccatggtattcaaccgtgggcctgttacctccagtacgagccatgagccagcggaatctgaatgcaaagacagaacaagggcccgaccggagtcacaatgacatccaaccccataacatggggacagatcaagaaaacgacacaagaagctgagaaactactggagcgccagggtcaggcaaaaacccctgactccatgttcttggccatgctagctgtagtgtcctgtgcgtctataggatcgggtgaaccaccaaccggcaattgaaagctgcacagcctgaaattacctttattcaattaatgcaaaaacaaaaggggagatgttggaggccgaagaattgnnnnnnnnnnnnnnnnnnnnnnnnnnnnnnnnnnnctgtgannnnnnnnnnnnnnnnnnnnnnnnnnnnnnnnnnnnnnnnnnnnnnnnactctgnnnnnnnnnnnnnnnnnnnnnnnnnnnnnnnnngtcccaggtccccgtgctccttgaggttatccacaaggaacatccagaacnnnnnnnnnnnnnnnnnnnnnnnnnnnnnnnnnnnnnnnnnnnnnnnnnnnnnnnnnnnnnnnnnnnnnnnnnnnnnnnnnnnnnnnnnnnnnnnnnnnnnnnnnnnnnnnnnnnnnnnnnnngttccctaatatcaaggagccccctgaccccttctttcaaacagatccttttgtctgtctcatttctgcattcgtcgtccttcgttcggtccagaagcaaccgcgacagtcctgcatgtgttgatgccacctgtatgtgcaggtgtgacctcaggtgtgtgagtatccctcataccccttatcatcactgcctattcgctcttcctccacgctctggcaaccactaatccacgttatatgtcta

SEQ ID NO: 57152 - DNA, 1933 bp, Homo sapiens
tggcagtcctcatttctgtggaatctgaagaagcccacgcagattttaattcccactctagattctggcttcatcgttatgaagcatatgatgatcccgtggatagtatctagatcaccatggcgactggacagaagttgatgagagctgttagagtttttgaatttggtggaccagaagtcctgaaattgcgatcagatattgcagtaccgattccaaaagaccatcaggttctaatcaaggtccatgcatgtgggtgtcaaccccgtggagacatacattcgctctggtacttatagtagaaaaccactcttaccctatactcctgggctcagatgtggctggggtgatagaagctgttggagataatgcatctgctttcaagaaaggtgacagagttttcactagcagcacgatctctgggggttatgcagagtatgctcttgcagcagaccacactgtttacaaactacctggaaaaactggactttaaacaaggagctgccatcggaatttccatattttactgcttatcgagctctgatccacagtgcctgtgtgaaagctggagagagtgttctggttcatggggcaagtggaggagttggattagcagcatgccaaattgctagagcttatggcttaaagattttgggcactgctggtactgaggaaggacaaaagattgttttgcaaaatggagcccatgaagtgttcaatcacagagaagtgaattacattgataaaattaagaagtatgttggtgagaaaggaattgatataattattgaaatgttagctaatgtaaatcttagtaaagacttgagtcttctgtcacatggaggacgagtgatagttgttggcagcagaggtactattgaaataaacccacgagacaccatggcaaaggagtcgagtataattggagttactctcttttcctcaaccaaggaggaatttcagcaatatgcagcagcccttcaagctggaatggaaattggctggttgaaacctgtgataggttctcaatatccattggagaaggtggccgaggctcatgaaaatatcattcatggtagtggggctactggaaaaatgattcttctcttatgatgattaattctttcatggatttcctatgtaattagaggtactgtctttcccccagttgtacttaccctatcttttctttaattaacattcgattccatgagcttcttatgtgaaaaaataagatttttctttagagagcagaagcagaagagtaaaatttattgtatagctagcaatatttttttatgccatctgtctcaaatcaaagagtcatcatagtaggaaataacatgttagttgtcatttggcatgagtgtgcattccagtaattcttaattgatatttgattaattccatacctttgattaaaacatgctagttcaaaataagactgctcagtttccaagggttttcaagcctacttacctttataaaggttctctagtctctgattagccatgactgtattggactttgaacattttctgaactaaaaacctctattctaaactaatctcatttggatgtgtaagtcttttgtaaaggcaagaataaataatatccaggacaatttattagttttctcagtattttcccaaatattagaatatttacttcattattggttggctgccaatgaccccatatgttctgtgagaatagtagctttatctttgatataatacatagtctccaaataggtaatacttcgcaattgattagattttcagagtagatttagagttatctgtttttctggtgagggtcaaatatttttgttaattaagctcacaaatttgataaattaagaattatctgcatttgtctcgtaacataataatgtgtaataaagtctatagaaaattaaaaaaaaaaaaaa

SEQ ID NO: 57153 - DNA, 2348 bp, Homo sapiens
ccgccggcggcgcaggagcggcactcgtggctgtggtggcttcggcagcggcttcagcagatcggcggcatcagcggtagcaccagcactagcagcatgttgagccgggcagtgtgcggcaccagcaggcagctggctccggctttggggtatctgggctccaggcagaagcacagcctccccgacctgccctacgactacggcgccctggaacctcacatcaacgcgcagatcatgcagctgcaccacagcaagcaccacgcggcctacgtgaacaacctgaacgtcaccgaggagaagtaccagggaggcgttggccaagggagatgttacagcccagatagctcttcagccctgcacttgaagttcaatggtggtggtcatatcaatcatagcattttctggacaaacctcagcccctaacggtggtggagaacccaaaggggagttgctggaagccatcaaacgtgactttggttcctttgacaagtttaaggagaagctgacggctgcatctgttggtgtccaaggctcaggttggggttggcttggtttcaataaggaacggggacacttacaaattgctgcttgtccaaatcaggatccactgcaaggaacaacaggccttattccactgctggggattgatgtgtgggagcacgcttactaccttcagtataaaaatgtcaggcctgattatctaaaagctatttggaatgtaatcaactgggagaatgtaactgaaagatacatggcttgcaaaaagtaaaccacgatcgttatgctgagtatgttaagctctttatgactgtttttgtagtggtatagagtactgcagaatacagtaagctgctctattgtagcatttcttgatgttgcttagtcacttatttcataaacaacttaatgttctgaataatttcttactaaacattttgttattgggcaagtgattgaaaatagtaaatgctttgtgtgattgaatctgattggacattttcttcagagagctaaattacaattgtcatttataaaaccatcaaaaatattccatccatatactttggggacttgtagggatgcctttctagtcctattctattgcagttatagaaaatctagtcttttgccccagttacttaaaaataaaatattaacactttcccaagggaaacactcggctttctatagaaaattgcactttttgtcgagtaatcctctgcagtgatacttctggtagatgtcacccagtggtttttgttaggtcaaatgttcctgtatagtttttgcaaatagagctgtatactgtttaaatgtagcaggtgaactgaactggggtttgctcacctgcacagtaaaggcaaacttcaacagcaaaactgcaaaaaggtggtttttgcagtaggagaaaggaggatgtttatttgcagggcgccaagcaaggagaattgggcagctcatgcttgagacccaatctccatgatgacctacaagcaagggtttttaaaggcaggggtaaatttcaggaaagcagaagttaaaggcaaaattgtaaatcagtcgagatcgggggccttcaggggggtatggctgaataccaaaattgtaaatcactacatgaagcttatatattggtttggcctgaaaggtgaagtggggtaggcagggggcgggcttacaggttatggtggattcaaagactccctgatttgtgattggttaaggaagcaaagctttgtctaaaaacttggggtccgcagaaaggaacattaaggtctggccaggcccctcaggaagaaactgagagcaaagaatggaggtcagagtttagtccctggtgttcccccttatctgacgtctgtgtgaatccatttggtgggggtctgggtttctgaaaagtagctcaggggcacgtgttaaggatgtctctaggtgactctaacttccctggctattgtttgaaactgttatgaccttcttgcttatcagcttgctggtttccttctcggggcgagctgggtgcctggagttttcggtgaaggaaactcaagattctcctttatttctgtgcttgtgggaatccccctggcacaccccaaagaggggtccctgctccgtctcacagggatctttttgtatatttggcttagcatcatacatttgccatgttgtttcatcatctgcctaatttactgtctctactaaaaatacaaaaattgtttagctctgtttttcataatagaaatagaaaaggtaaaattgcttttcttctgaaaagaacaagtattgttcatccaagaagggtttttgtgactgaatcagcagtgcctgccctagtcatagctgtg

SEQ ID NO: 57154 - DNA, 2438 bp, Homo sapiens
  misc_feature (1)...(2438): n = a,t,c or g
agtatgtaataatatcagctataagagtttactgttaattaggaaagccttacaaatttttggaagaaccttcacatctttaacatnacaatatatttaataatggttcttttattgcttctagtatcaagattattgagaagtcaaatgaagttatgctgacgttatgattcaaaaattatcttccaaacatttaacgattataatttaagataaataacacttaaagaaagcaaaccttttataatatgactttcaatatacagccttactttaattcagtctgattccattacatttttgttattttgtattggtcctaaaaatttaaaaagaattgtatttctatatatagaactgcctgcataaatccacttcaaccttcataaaatggttacattagtgtgtgatcttgcaaaactaataattttcaaacttttgaacttagaatgaaatgtaaatttaatacaaatagtctgactatgtacaagagaaggtaaagttttcaattctcgtattatcagaaacatcataaagaaagctagatttataacacacttctattcctatgtgcatctgaagtatgtacaataaaacaccaacacagctttcatgtgtcaataggggaagtgcaagcaagaatgacttgaagtatccaataaagcaatctctatagaccccaaaatcaggctaaaaactgcaaacagctgactgcatccttgccagttctcaaagaaaaatttcatcactaaaaaataggtgtcaaattcactgaaaaactaagttgggttctttcattaaacctgggaataatgtaacatcaagtatttactatttttgcaagagaaataaaattggcagttccatttttacattacttaagaaaaatttaagagtgtttgaagaactgggacaagacattccaaacctacgacctaaaaatgaagcaagggatacatactgtccttcagcacatttccccacctgatacaggggaaatttaccattagaatattagctgtgtgtggccaaggcgggggtgggggggggtgaagggggaatcagacactgtcccagtctgttgacaaggacaaaaaggctctgaataggtcaccatcttcaattctgaataaatttcatatttaagaattctcaaatgcttaaaatggtggtcttttcagctacccatcctaagaagtcaagtacaagcatgcaagtaaattcacaggcacagaggatccatgttaaaaacagttaaggtagctgtgatgcaacaccaacaatttgaatggccctgacacactcaaaatattatcttaattattcaacaaaatcctgaagcaaactcttgctagtcttggtacactgctaaacactaaagtagcatgtttcttccatggttttagcttagctcagggaatttttacactattaagaaaaaaaattaaagtatttcccctttttaaatttacacagacgtttaattagctttatttacagagcagggatttttttttttcagtctccaatggtgcctagataacatcattaggcaagaatgccagtttaaaagaaatctatgcagaatcctaaaaataacagatgttggtgctcctcaagaagaggcaagcttgactatatcagcagctctctatgcctcagttactcagaagcaattctgttgcagtctctacatcccatgattttgaagacaaggccactattactgcattcctatcaaagcccatagcacataggttttctatttttttggtgtattctggactagaaactggtgctccagcatacacatgtgcccaaagtcgagctgtctgtttgaacatttcgggattttgtttgtactgatttgctactacagcatcctgtggatcatctggctctgcagctgccaatagtgcttgcaatgacaataataccgtgcggagagtcattgcagctgcccattgatctttcaggatatccaaacaaatagcccctgtgacggaactaatattaggatgccatattttagtgataaaccggaccttagggggattaaatgggtatgtttctggtatttttatctctagttggtatcttcctccttcatatggtgtgtctggaggtcctgctatttctcctcttaattctgtaaaattctcatctacaagatctactttaatttgatttttgctcgtctcctcgctcttcagcacctccttgaactcccgcttgattcgctgcaccgcgatgttggccatgtctccgcccgcagctgattcgtacccgcctcctccgccaccgctacgaccaccgccaccgccgccacctcttcctccaccgcctcctccctcggcgattcagacctgagcacacgaacactgccactaccaccccggcccgccgcgctcgcctcagtgtggaatcacctccgcgcc

SEQ ID NO: 57155 - DNA, 1448 bp, Homo sapiens
  misc_feature (1)...(1448): n = a,t,c or g
ggcacgaggcggcagcggtggccgtagctccatcgcattttatgtttctggcgagaagggaacggagttttcatcaggtagattggtttttgtgcggccgtcctccaccgtttcctccaggacagcacctagtcgtggccggaggagtctcagagctgtcagaaaggtgagcatttgtacagtgaaacattttgctacacaaaagtgatgtttaggaatactaacaaattattttcaagaataagactgattttatgggaaaattaagcagatgctccagtttgagaaacctggatctgcgatctgtttgtggtctctatgaataaagaaaagcaaatagaatcttatcaggtaccagcatcaagatgatttatggtnnnnnnnnnnnnnnnnnnnnnnnnnnnnnnnnnnnnnnnnnnnnnnnnnnnnnnnnnnnnnnnantttgnnnnnnnnnnnnnnnnnnnnnnnnnnnnnnnnnnnnnnnnnnnnnnnnnnnnnnnnnnnnnnnnnnnnnnnagctgggcatggannnnnnnnnnnnnnnnnnnnnnnnnnnnnnnnnnnnnnnnnnnnnnnnnnnnnnnnnnnnnnnnnnnnnnnnnnnnnnnnnnnnnnnnnnnnnnnnnnnnnnnnnnnnnnnnnnnnnnnnnnnnnnnnnnnnnnnnnnnnnnnnnnnnnnnnnnntttatacgccaaaaaagatattctgagataacctgtagttaccactaactttgtgacaaaattataaaaatccacagccatctatgaatctgtaggcagacctgaagtttgaacgactggtgaagacatctgattttctttatagccaagttaggataacaaaatgcaaacaagtcattaatatttactatatgcaagatacagaaagatgaaggaaggagtaagaagttatccttcgtggaactattcaaagcaaaaatgcaaaataccagggaaagctttgaagaaccaagatttgagcaggttcttagaatatagattggattggatttgatttcaagaaagatgaacgtgtaaagcagaagtgggaagccaaaaacttttttccaaattagaattaagcattctttcaatgaacatttggaaatcaaggtagaaaaatatccctagggcctagctgaggagtctgtatgttgttgggttttgatagtaaccagtccaagattttgttattagacgtgggtttctgaatagacaggcatttctgaacagacatgacaggatcaaaacaatgtttgagcaaactgcccttcatctactgtggatatgttgggggatgatggaatatagtgaaagataatgggtgctcatacagcagtctagacttaaggtgattcaactactatatattaaactagattatcttttattttttaattttgaaatctggatgctcaagctctgcctgcacaaccacatgagg

SEQ ID NO: 57156 - DNA, 450 bp, Homo sapiens
  misc_feature (1)...(450): n = a,t,c or g
ccgctatgacatgattacgaatttaatacgactcactatagggaatttggccctcgaggccaagaattcggcacgaggggacatcctagaggccctacatttgtccttggataggggaccggggggggcttggaatgttgcaaaaaaaaaagttacccaagggatgtcagttttttatccctctgcatgggttggattttccaaaatcataatttgcaaaaggaaggccagcatttacgatgcaatatgtaattatatatagggtggccacactagggcggggtccttcccccctcacagctttggcccctttcagagattaaaaactgggttagaggattgcaaaaaacgagtggggggagggcagggaaaatgcctgtcgggtttttagcncagttcatttcactgggattttgaagcatttctgtctgaacacaaagcctgttctag

SEQ ID NO: 57157 - DNA, 728 bp, Homo sapiens
tcctgatggaattaaatctgcgagctacaagtattctgaagaagccaataatctcattgaagaatgtgaacaagctgaacgacttggagcagtggatgaatctctgagtgaggaaacacagaaggctgttcttcagtggaccaagcatgatgattcttcagataacttctgtgaagctgatgacattcagtcccctgaagctgaatatgtagatttgcttcttaatcctgagcgctacactggttacaagggaccagatgcttggaaaatatggaatgtcatctacgaagaaaactgttttaagccacagacaattaaaagacctttaaatcctttggcttctggtcaagggacaagtgaagagaacactttttacagttggctagaaggtctctgtgtagaaaaaagagcattctacagacttatatctggcctacatgcaagcattaatgtgcatttgaagtgcaagataacttttaccagagacctgggttagaaaagaaatgggggacacaacattacggggatttcaacagcgatttgatggaattttgactgaaggagaaggtccaagaaggcttaagaacttgtattttctctacttaatagaactaagggctttatccaaagtgttaccattcttcgagcgcccagattttcaactctttactggaaataaaattcaggatgaggaaaacaaaatgttactttggaaatacttcatgaaa

SEQ ID NO: 57158 - DNA, 1854 bp, Homo sapiens
catgctactcagaggaaggggcggttggtgcggcctccattgttcgtgttttaaggcgccatgaggggtgacagaggccgtggtcgtggtgggcgctttggttccagaggaggcccaggaggagggttcaggccctttgtaccacatatcccatttgacttctatttgtgtgaaatggcctttccccgggtcaagccagcacctgatgaaacttccttcagtgaggccttgcatgaagaggaatcaggacctgggctcccaattctgcttgaacaggcatctatcctttctctggtgacaaaaattaaacaatgtgatttgataatctgattgtggctccaggggacattttgaagtgcaaattgaagaagttcgacaggtggggatcctattaaaaagggggacaatgactacaggacacaatgtggctgacctggtggtgatactcaagattctgccaacgttggaagctgttgcctgccctgggggaaccaaagtcgtggaaagcctaagagcacaggatccttctgaagttttaaccatgctgaccaacgaaactggctttgaaatcagttcttctgatgctacagtgaagattctcattacaacagtgccacccaatcttcgaaaactggatccagaactccatttggatatcaaagtattgcagagtgccttagcagccatccgacatgcccgctggttcgaggaaaatgcttctcagtccacagttaaagttctcatcagactactgaaggacttgaggattcgttttcctggctttgagcccctcacaccctggatccttgacctactaggccattatgctgtgatgaacaaccccaccagacagcctttggccctaaacgttgcatacaggcgctgcttgcagattctggctgcaggactgttcctgccaggttcagtgggtatcactgacccctgtgagagtggcaactttagagtacacacagtcatgaccctagaacagcaggacatggtctgctatacagctcagactctcgtccgaatcctctcacatggtggctttaggaagatccttggccaggagggtgatgccagctatcttgcttctgaaatatctacctgggatggagtgatagtaacaccttcagaaaaggcttatgagaagccaccagagaagaaggaaggagaggaagaagaggagaatacagaagaaccacctcaaggagaggaagaagaaagcatggaaactcaggagtgacattcccttcactcctttttcctacccaagggggaagactggagcctaagctgcctgctactgggctttacatggtgacagacatttccgtgggatagggaagatagcaggaagaaaagtaaactccatagaagtgtcattccactgggttttgatattggcttagctgccagtctcccatttgtgacctatgccatccatctataatggaggataccaacatttcttcctaatattctataatctccaactcctgaaaacccctctctcaactaatactttgctgttgaaatgttgtgaaatgttaagtgtctggaaatttttttttctaagaaaaactattaaagtacttcctagtagggctcttggtctttctggttggtgttttttgtttgtttgtttttttgcatgtggcaaccttttttgcttttggctttgtgtactcttttgttgaaaatgataattgagtcatttaattataaatactcagatcacaatttgaagctgtctttgaattaaaggacaaactcctggaacctttccatataccagagtaaactagaatatcattttaagtatttattgaataaaatgattctatttttaaa

SEQ ID NO: 57159 - DNA, 1198 bp, Homo sapiens
ttttttttttttttcaataatgtctgacatttattgaaaataaggaaaagactttctccaggtagtgtattagagcagagcagaatgcaggggttactgtgttgaacaaaaggcacacatcagagagacagttgcaaactcagaatactgcgttatgggcaaaactaactggtccacaagagaaaatgagagactcgatttggctgccaggaacacctgggcctaggcaagaacacaagaggtttctgggggtggggaggaaataggtctcgctgaaggtgacagatcccttggggggcggccagctgtctggatcactgtccagggactgtggccagcccagatacctccgaggtgagtccagatcactaggagcagcagtctgtcggtgggatgcgatggatggcgatggctgtggcagcgcaggtctgtgggcagaatgatgtagtcgtctggcagtctggtggggaggagagggcttggcagcggcggcagtgggtggtctgtccagtgtgtaacaggagcccagcttgcagctggagcgcaggacagcgtccaaatgtacatgggaggggctggctggctggaaggagagggcggcggctcgctccagagtgaggcccagggaagggagcaggagcctggagcgctattcctggaacaaaggcaagcactacgcgggagggaacaggagcgcaggggacatcgcggcggctcgagggggagggaggcgcggagggagggcgccggtggcgaccctggcggcggccagtaacacagcggaccctccccagagcacccccgccccaggcccgagggtctcccggcctagaagtcctcgtcctcctccccatccaaagactcgcttcatcttcggccagaaagccccggtaatcattgaggagggggctctccttcttgatgtaggggatcacccactgcagggcgggccctgtgaggcgggtgatgaggaacgtcaccttcagggcgtcgctggagaacgtgttctcgtccacgaacatgtaggagcacgtctgcacgatgaactccgggagtcggtcggtatctccgtcaaacgtctcgggaaagggaatcgggttcctccagcgacgcgtcgcatgccggatcggcaaggccaggagggcctttatcagctgcacccgaccgtccatcgctgctcctcgcttcgcctcgtgcc

SEQ ID NO: 57160 - DNA, 1832 bp, Homo sapiens
cccacgcgtgcgccaaaacaaaggagcggcggccgggagcggacttaccttaccttctctgccttcggcgcgcttctcaggcgggccgccgacccaaaggagccgtccgactatgtctaacatggagaaacacctgttcaacctgaagttcgcggccaaagaactgagtaggagtgccaaaaaatgcgataaggaggaaaaggccgaaaaggccaaaattaaaaaggccattcagaagggcaacatggaagttgcgaggatacacgccgaaaatgccatccgccagaagaaccaggcggtgaatttcttgagaatgagtgcgcgagtcgatgcagtggctgccagggtccagacggcggtgacgatgggcaaggtgaccaagtcgatggctggtgtggttaagtcgatggatgcgacattgaagaccatgaatctggagaagatttctgctttgatggacaaattcgagcaccagtttgagactctggacgtccagacgcagcaaatggaagacacgatgagcagcacgacgacgctcaccactccccagaaccaagtggatatgctgctccaggaaatggcagatgaggcgggcctcgacctcaacatggagctgccgcagggccagaccggctccgtgggcacgagcgtggcttcggcggagcaggatgaactgtctcagagactggcccgccttcgggatcaagtgtgacggcagaacccgctctgaggtttcctggccatagcccaccctttgaaatgctctctgtgtgttagagagatactataccctagaaactctgaacacgccagaatgctgaaatgcccttctacctttgggtttacagccccctccacataaattaagaaattcagtatttctgcactcttagctggattctaaagttctgtatagctcgtaatgatggtatttttatagcagccttttaacagaactagttaatttcgtgtatatgaatctttctcgaagatctggtcaaaactgtattcagtttcctgcccagaatgatcagattgaaggtggttggtttttattattatttagtgtgattgatagtatctagaatggcaggtggtgcataaaagttaaagagaggggaaagattacttagtttggttatacagttataaacaccatgcagtgtattcggtggactgtgctatttctgtttatcctttgggttttggtttttgttttttttttttgccttcacagtgagactgcaaatgattgttctcataacgtatattattaataaatgtggtcctataacatatactgaaattaccttaggatatttttgcataatactctcttactgcttacattctataaatttttcacgtgataattgtctttgcgtaactgggaaaaatgccgaataacttcctttattatctggaaaaattaaatttgttcatttatattttctacttactaaattgagtttttaaaaagacttagtgtgacatttgacagtgtctttcaaacgaacttctctaacaagtttatagttattttcctgtttcaacactattagaagtcttataaattatgctaattagcatggcagtcatgttacacactcttaacattgccaaagaactgttgatttcgtttgagaaaaccctgggactgtgtgtgtgtaggttttgttttgattttaacaaccaaaaatagaaataaaattagaactgcgttttaagttctaatttgcatttattaatttgtccaaaagcaagaactcttggaaatccttgaaaatataagctggaatgttttacttagccatgcaagtcatttatgtatg

SEQ ID NO: 57161 - DNA, 1931 bp, Homo sapiens
  misc_feature (1)...(1931): n = a,t,c or g
tttgagcgtgtaaaatatgttttattgttctttaaaagggttcagggtttggttttaaatcaggctgcacacctttcaaatcaatctgacatctctctatgtcaaactggcttcagctagcaatacttcattaaatcgaaaagaaaaaaattgctttaaggaaaaaaaatccagttttaagaacaattaacattagtctttaaaataaaaggagggctaatgtttcatgttgctttatacatccttctcctcaatacagaaccaggaatgtaattttcctaactccaggcaggcactggatactgatggacactgcgcgtgcacacacacacacacacattacacacacacacacacacacacacacacccccttccccccaaacaacaaaattcagagtatgtcaaaggaaaaaggtttgttattgtattgatcaaaacccagtggaatcaacaccatctatcttagcttagcaggtatgctgttttgatcttgagtctatattaatggaatctattgttgcattctgaaataaagaattttggatataccattatgttttaaagtcctagaaacaatttcgaaaagcattattttgttttgttttctgggatgggagaggagagaatctacagatttgcgtttagttaaaaatcaaaactccagcataggaaataggcagttcacatagccggtcaacatgtgaggtatcatcagtgtgagacaaggtcccggtctgttcctattggccctagctgacgcctaacaaaatgggaggcttaatggcctctgcacagcaaattccagcaggacaagatgactttaagccccgtattcagagccctagaagcaggggcactactgagtatgtaatatttagaggtgaaaatagtgcaagagccccctgatggtgcccctctacctgctttgtcccatgcagcctgatcataactgccttcccacaaaggagcagaaaaacagcttttctagatcagtacactaaacccagccaagaatctgcaaaaatgctactacaccgcttcacaagcaacacagtcccttcactactcattgggttgcacgatgtctctcttctaccctgttatggcctgtggacacatactcactaggcatcattgttggttttaaaccagggatttttttttttttaatctcaaaaaacctagtaataacaaggcaatcagtggttaaactgaactttacatatagggggcagtttggaaaacacataccacaagcatttctcaagtcgaaaatatgtgaatttgctgctgctcctttgacggttcctgaaaattcagagtacaagtcctaaaataaaaattttaagctaccagcattctctgatactagacagaaaatcagagtaacgctacagcccacaattctacagggtgtaaaaaagtacgctcactgcctggacatctttattgatggcctggagtcctcccttttagaagacaagtttctgggataaccacttagcttcattggttagggaagagaagaattcgactctcaggtaagttgagaagagactcctcttaaaatgccatttctccactaaattttatcaaaataaaaacaaaacaaaaggctcttggctactttgcctagtattagatagggttttgaagaaactaacatgaacaccctttcatcagtaaagactaaaaaccacctggaatatatatatcactgctgtttttttggtgttgttttttgtttttttttttttttttatctaaaaggtcccaggtgggcttaaggctgccagactgcacgcacatctacagcaacaagggcttctattccatctacaacttggatcgggggaaaagggagatgtaggagaggaaggaaaaaagaggggaaaaatataccaccaaccctcccccaaaaanaaaggg

SEQ ID NO: 57162 - DNA, 3226 bp, Homo sapiens
ttttttttttttttgcattaacagtaaccccaagaaaggcatcagggttctggagtggttgtttgagtgacacagcacaaggccttgatttcatcatgcttttgctgtggatgtagtgtagcttgctgaacaggtatggaagctgtctttgctgttaagtacttctcccgtttgtttatcaacctgcagctaacaggatgtctgcttttttttacagggtttatttcacagagcagtgtacattcttgtcttccaggggaacttcaacatgggagttacttttgatccctcagttttaattcagtgtctaaaggtttacaagttcaacttactctattttattcagctctttcacttactctgccatcacttcctacttgaatctgagttttagctacttgtagggggttcagacctttcctttttagtactattagccaggtaaaactttggttcttgtgagtggtagggatgagtttttaggacagtattcaaagcctttttaaaggaaccaactactcaaatgctctacaatgccaaaaatacaatactcctgcaggttttcccaagcaaggccaaaacaatcaaaatctgacagaaaaacacagctgttcagctctggaatctgatgataggctactttttaatgtcaggacatccttctaaacttccacttacagtgtcacatgtaagcatgaaggctggctcgttggtgagccattgctttgtttttaggaagacagttatgaatgccatggacaatctcagtacatgttgtttgttatgattttattcacgctaaaggaatgggtattaaaattaagtgcatataatatagaattcagtttcaagtctgaagttagcgtaaatttagattcttcagactaacataaaacatgattttgagaagttaaataggaagatgccttttttagaagtttagcatatttagtttatctcccaaatcttgcttagaaatcaaatgtatataagagaagttagttacagagctagattgattaactacttctttaatgaagatttgctatgaatttgtttactctttcataccaccttcagatagctagtcagttcagcaggagcagagaccaggttagcacgcggatggggtgtaattcagtgtttttgtgttgtacagcctgagaaatgccagtggcctgacagcagcagacattgcacaaacccagggtttccaagagtgtgcccagtttctcttgaacctccagaattgtcatctgaaccatttctataacaatggcatcttaaatgggggtcatcagaatgtatttcctaatcatattagtgtgggaacaaatcgaaagagatgcttggaagactcagaagactttggagtaaagaaagctagaactgaagctcaaagcttggattctgccgtgccactcacgaatggcgacacagaagacgatgctgacaaaatgcacgttgatagggagtttgctgttgtaacaggtgggagtggacagtttcctgttagctgcaacaacaatccaatggttgaagacaccaaacagcaggagagtggttctgttggaccaaaagaaatagaaatatatactgtgtcagcaatgcagaccccctgtcgttgcaggaatcagtatgaaaaacagtagctccgtatcgaatacattgacaaatggatgtgtcatcaatggacatttggacttcccctccacgaccccgctcagtgggatggaaagcaggaatggccagtgcttgacaggaactaacggaattagcagtgggattagccccagggacagccgtttccgagtagccagggttctctctgcattagtgggactgaggagccagagaagaccctgaggagctaaccctgagttgtgcggttctctgcacctgaacgggagtccaagtagctgcatagccagtaggccttcctgggtggaagacattggggataacctgtactatggacactaccacgggtttggggacactgctgaaagcatcccagaactgaacagtgtggtcgagcattccaagtccgtgaaggtgcaggagcggtacgacagtgccgtgctgggcaccatgcacctgcaccacggctcctagagacgctgacctggctctcggaaacgcaggagtccttcctggtagccagctcagaatacccatgtagcagcaacttgaacgaatgtcacaacttgtactttttttatatacttcaactttctgaaaaagtaaacttcgacaagttcccagcaactgcttgtttgtgcatgagtagggcttactaagtgcatagatgtttctacagtgaggtgtcctttttataaggtgcacttttggagtttttctgatgccaatctcaacattgtctttttaatactgtcaccagatattgccatttttctttttgttaaaagattatatgatcaagataaattggggtggtaaatcaggtgcctggtaatttatctctttgcacatgggcatcattttaaaaagcttgcttccactcttttctgtagaatttgacggaacacagctatttccctatgcaaggtacagccttacaaagatttctgcagtgatttgtgtgaagaagagaatgtttgtctttttcaatgaagctttgcagatcaccatgtggttgaaggttttagttgtggacacagtggtccctccttaatgatgaagatcactgccttgggcttcatggaaaacaggcccagcctggggctgcgtttggatttattgtttttattccacacttcctacttggtctctggaagttttaccacatgtaacagattcctttatatgtagtgaaaatcactatttgtagaaactgtcaggtcaaaatatttaactgactgttgacatgtattttcttttttccttgtttttgttttttggggttttctgctttaagatatataccactatgtatatcccagttaactgagagaattttgactctcttaataaaactgcattaagtttttgattttgtagaaattagcttttgtctaggcaactagtggttatactctgcaaatattgtaatgaatttttacttttttgatttttgtaataaaaattggtgcagataaaatgtcaaatgaacaaaccagtgttctaagagtgttactaacattttgttctaaaactgtccttcacaaattgaataaaaaactctcacactcaaaaaaaaaaaaaa

SEQ ID NO: 57163 - DNA, 930 bp, Homo sapiens
acgaatttaatacgactcactatagggaatttggccctcgaggccaagaattcggcacgaggagctgttcctcgcgggccgccgggtgcgtggtcaccggggcaggcaaaggtatagggcgcggcacggtccaggcgctgcacgcgacgggcgcgcgggtggtggctcgtgagccggactcaggcggatcttgacagccttgtccgcgagtgcccggggatagaacccgtgtgcgtggacctggggtgactgggaggccaccgagcagggcgctggggtagcgtgggcccctgtggacctgctggtgaacaacgccgctgtcgccctgcttgcagcccttcctggaggtcaccaaggaggccttttgacagggtctgtccctcggcctctagatcctttgaggtgaacctgcgtgcggtcatccaggtgtcacagattgtggccaggggcttaatagcccggggagtcccaggggccatcgtgaatgtctccagccagtgctcccagcgggcagtaactaaccatagcgtctactgctccaccaagggtgccctggacatgcttgaccaaggtgatggccctagagctcgggccccacaagatccgagtgaatgcagtaaaccccacagtggtgatgacgtccatgggccaggccacctggagtgacccccacaaggccaagactatgctgaaccgaatcccacttggcaagtttgctgaggtagagcacgtggtgaacgccatcctctttctgctgagtgaccgaagtggcatgaccacgggttccactttgccggtggaagggggcttctgggcctgctgagctccctccacacacctcaagccccatgccgtgctcatcctacccccaatccctccaataaacctgattctgctgcccaaaaaaaaaaaaaaaaaaagtcgacgcgg

SEQ ID NO: 57164 - DNA, 3825 bp, Homo sapiens
tagacagtccttgttttatcaggataagttaaaaagccttcatcagttactggaggtactacttgctctgttggacaaagacgtcccagaaaattgtaaaaactgtgctcagtactttttcctgttcaacacttttgtacaaaagcaaggaattagggctggagatcttcttctgaggcattcagctctgcggcacatgatcagcttcctcctaggggccagtcggcaaaacaatcagatacgtcgatggagttcagcacaagcacgagaatttgggaatcttcacaatacagtggccgttacttgttttgcattcagatgtctcatcccaaaggaatgttgctcctggcatatttaagcaacgaccacccattagcattgctccctcaagccctctgttgcccctccatgaggaggtagaagccttgttgttcatgtctgaagggaaaccttacctgttagaggtaatgtttgctttgcgggagctgacaggctcgctcttggcactcattgagatggtagtgtactgctgtttctgtaatgagcatttttccttcacaatgctggcatttcatttaaggaaccaactaggaaacggctccacctcatgagtttaaaggaatacgtttcccaactactttcatggaaatattggttattgaagatcctatacaagcagagcgagtcaaatttgtgtttgagacagaaaatggattactagctttgatgcaccacagtaatcatgtggacagtagtcgctgctaccagtgtgtcaaatttcttgtcactcttgctcaaaagtgtcctgcagctaaggagtacttcaaggagaattcccaccactggagctgggctgtgcagtggctacagaagaagatgtcagaacattactggacaccacagagtaatgtctctaatgaaacatcaactggaaaaacctttcagcgaaccatttcagctcaggacacgttagcgtatgccacagctttgttgaatgaaaaagagcaatcaggaagcagtaatgggtcggagagtagtcctgccaatgagaacggagacaggcatctacagcagggttcagaatctcccatgatgattggtgagttgagaagtgaccttgatgatgttgatccctagaggaacatgcccagcctgagaggagtcaagacacaatactggatgctcagcaccttcttggaatcagaatctcgaaccctttggaagagcctggagattggactgggaaagctgctgtgacttgggcggatcgtgtatttctcaaggaaagcatttttaagccactagaaggtttgggagctgtttggcagtgggagaactccggcatgtggatcagctgtcccgggagcgtggtctatatgtggattcacatttctgtggagattttcggaaatagagccagtggcagacttttttgttacacgaacatacaagagtgagcataaagctgttgctttctctacgatgctacaaaagaaattcctttggtttttatattttaagaaaaagcaagctgcttttagatatgtgggggcaaatttttaatcttgcagtaatattaaacaggaatatccaatttaaaatgatgtaaagatgtaataaaattccttttcattgtaaaatagtaattaagtcaatttacacagacctttgtatttaatatgtctccctatttgtatagaatttcagatgggtctagatgagaaccctatgcataagcttggatcttgatgaaaggttaccaggatcaggatcaaaaattgggaaatactaagctcttgaagatatttttctgatataattagattgaaaagagcaattttgaaaatgctgtgttctccagaagtacagggtgcattatttgacatcaattacttaaagaagttatgagttgttccccaaacagattttaaaaacagcaaaataaaagcactttaagatataattttactgagtttaacttcacagaattatctttttaatgcttggagacatattgaataaactgtagtcttaaatcatgtgatctgcaatcgtttgcttttgcttaaaacataattactgaaacccttggtattggttgtatatgaagttaactatttgagttggtacacactgcttgtgagtttcatagttattgtaatgcagagaaggaatttgagaatttgtttctcctcaacatgactaattaacactgaaaagtcagtcaaggtttaagatttattttcccagaaataaatataaagcaattgaataaccatccatttaggtcgtatttccaaagtatagcaccattcactcatttatacccagctcccttttatgggtgtggggggagagggtttacacccacatatttcatatatattttgtacattttgtattttgaattgctcacattttcgggccctgttttgcctttagttacaggtcctgccttattttcatctcaccatgcacagaactaggggagccttaggaagtgccaggttttcactgtcagatttgccaagtcacagaggcgcacagtccctgaagtgcctgtctggctgctgtggcattgtgtgggcatgtggccaggcagatggcatctcattactgtgctctcgccatggcccagtcttttcattctctggcagtgagggtttctgtgctgtcagacttcattgttattctgtgacttgctggaggttgggcagtggccttttgtcaaacacactgagaagatggaagggccagcacttaagagcagaactgtacccttagagaaacggacagaggcgagtggcaaacttcagacggttccaatggtcttgcagtttgaaatgtgatgttctaccattggttttgagtacgtgaatacttcctgtcctactgtttcccctaccctattctcaccttctctccgcccacatcctcaccaagagattgtgtgggacatgaccttgaaatgctgggcgatgatccacactgggatatcatcgctggcgactgcactctcaggagcccaaaatcaggagtgaaattgccacttctagtccccttatttcctatggaaacaacgccttccgcacccctagcacctgccgtcctcactgtaaaggttcatcaggatcgtccaccgtgtatattatacgcttcagatcatgttgcttatattgttgctgcaatgaccatcgttttcactttgctggtaaccacttgattgctgacagctacagtcaatgaacctgctgatgactttttttaatgtagtacaacagtgacagttatgacaggcttaccttggaagagttgtcatttttactgccaattttttggatgaagatgtttttataaacctttcaaaatggtctgcaaacagagcaggaattgcacaattaactcaataatgctgtgtgttctcaagaagctcccttagtgaggccgatcttaagatggccgattctgcccgttgaaggcatcctgggaaagaaaacaagcatcccagcgggcatctcaccacggacttctcctggagtcctcacacggtcactgacaactacagtcagttttaggaactagagtgccgtatcatcagacttaccctgtcctgccccaccttccctgctaacatcgaggtgtgtgcagttaccttctgagcttggaacaagcagactggaattttcctctgctacctcttgtgtataaaatcttgtttataaaatttcaaaaggaagtagatacactagggaagaaccttaattctaaatttggttcatgtgtggcaaagttcttagcttctaagagtataaaataaatttttca

SEQ ID NO: 57165 - DNA, 1071 bp, Homo sapiens
tttttattttttttttttttagagtttgaaaggctctttaatagcaagcgaatggtaattacatggtcggatgaggtcctcactctcaggggagggaggagggagcagaggtggacatggtgcagtataggatttacacttgtttgaagcatctaacgaagggcaacagtttttggcaacccaattcacagttttgtaatttacaagagatttctttgaaaggaaataggaaggcaaagaaagcacacataccctaccggcaacacttcttgcctaaaaaaaaaaaaaaacaacaaccaaaaaacaaaaacccaacaactattccttgcttttgcttcttgtgtagatgactaaattttgctctcatgctcaaattaagactggatcacggatagtgaagatctgccctagcattgaaagatttacttcctcctcttcagagctgacatttgtactgcgcactactcttatctttatctgcctaggtgtcagaaggggcttagtaaaaaatgaaacttgagaaacaaaacaaaacagaaaaacagggaaaggcagtttacaaagaacagactgtcagctttctgtctggtatcaaacaacttgaatacagctctaagtaaattaaaacatttatttttatgtggcctggcatctacttttaatcgcttgtgcctattcagccttatagtgctttaaatggggtttctaacatgaaatgctcatgggtactatattttcgtaatccagatttaaataaaaatataaaagacaacatattatgttaaataatatgttgtcttttatatttgcccagtgagcagaagctatagatattttaccatggacacccattgccatggacaccacaggctaccagcattctggcaggtttcagaattactctctataaaatctaaaagacttcagcttcttgtgtcatacctgttatcactaaactgggagaagtgactgggtctttatgaaaaaggatcagtttttaattcaaagaaattttaggcttctccgaagactgggtgatcagcaatggcatctctttggagctaacaccca

SEQ ID NO: 57166 - DNA, 334 bp, Homo sapiens
ggcaggcacaaggtgggtaacttttattgaaaaaaatctgtgtataagtggacctggacagttccagcccatgttgttcaaaggcaaactgtattgtggtttttatagaatcttgaaatatgtttatcattatatcaaaatccactagattgagaagcacatactaagcaatatgacacattggtttttttcccctcaatataattgtcttcctttgcaatcatatgtattttatcttatgcattaaaaaatattagactgagaaggaatccacaagcttcattagattgccaaaatggtatagggcacaaaaaaagttaaatccctgggctct

SEQ ID NO: 57167 - DNA, 1322 bp, Homo sapiens
  misc_feature (1)...(1322): n = a,t,c or g
tttttttttttttcaattattaaatgtttggcactttattaaattaattaaataagctccaaaattaattacatacaaatcaaaggaataagaaacaataaatagtttattcagcaaacacctctctgcagcagccggcagctctgaggccgaggctggcgtcctgtggcagagggcctgtggattgccatgctcgctcccaggggtggctcaacagggacacaggtctactccttccacatcgggtttccggaacaacaactgaactctcattcattaccatcccattcattaccatttttttttacatacacgaaacacaccgcaatgtatagactaataagccaagagctttattgatgcagcaggcactttacaatgagcccaagagtgtccaccttctctgggaagacaggatgtctgtacaaactcttgggtttttttccacttcaaaaacacaagctctcccgtttaccacagcccttggatctgcacctgcccaaaccatccctcccccagtgcacacaggtgcatctgaccaacaccagccgccacgctggtagaccgtcaaaatgtcagttctgcagtactcgggagacaaaggcatagactatcagatcctaaacaggatttaggaaacagacgattttcccctccaccttgaaaataaaatacatttcagcagatacatgtcctgaaatagtttacttgggagttcctaggaagatggtccattgtcaatcccttcttcaccagcctgggcatccagaattcttctcaaggtaacatgagtctttttattttttttaaacagtctttcttgctgtaagaactcttataatggagcctagtcctcctactgctaaggccttttcgtgccactggagtaacactgcgctgctattttctgtgggcttctcaaagcctttataaatgtacttcattaacaagtcaacgccgtttctgtccagtgactgcacagcctgctcaatctcactgctcttgaagtttgtgagcactttcagcaccacgccctggggtcgctccttcacagcttgattcttggtgttgacgggagagttccgcaaggctgcatggaatgcccgaagcatgtccccttgccgcaggagcccgtccacctcgctcgggtccgggcctgtccgccgccgccgccgccgcctcctcctgctcgtccacaaatttgttctcgtcaaattcgtcgatgtccacccggcggaagcgcgaggacagcgtgttccggggccatggcgggagctcggcgcccgctcangccgntcgctcgcggcccganccnngctctg

SEQ ID NO: 57168 - DNA, 895 bp, Homo sapiens
tttttcagattgagtcccatttgaacaatctttataaaggtttcttcatgttatttacaattcaaagtaaatttactttataagcagctagggaattctttatttagtaatgtcctaacataaaagttcacataactgcttctgtcaaaccatgatactgagctttgtgacaacccagaaataactaagagaaggcaaacataataccttagagatcaagaaacatttacacagttcaactgtttaaaaatagctcaacattcagccagtgagtagagtgtgaatgccagcatacacagtatacaggtccttcagggaggcaagagacctttcgactggtctgcaggtgcctccaaatgctggtcctgtggaacttctttctgagtctcgttttcttccaacgcagtctgtggtctgacactcaagtgttcggatttccgggaaacgtgactacctccgtgttgagtccttgcttcgcctactcgtcttaaaatgacaccttctgccaataaagccttccctgtttccacaaataacttctcttcatctgtttctccaagtttctgtagctcagtgtacttctccacaaaccgttgacaggtagacttgaagtttggattgaatagatcaaaagctctttgaccagacccatacactgaataaaacttcgctctaatccgatcctcgtggtaccagatgtcttggatgggagctttggctttgccatatcgcactcgaggcctttggaagacgggctccctcagcgggggaaaggcgtcatatacgtcaaaccacaggggcttctccttcagcaccccggcccgaaccaggtcccgagtccgagagaagatgctcaatacggtttccagccgggctgcctgccatgatctgcgcc

SEQ ID NO: 57169 - DNA, 2904 bp, Homo sapiens
  misc_feature (1)...(2904): n = a,t,c or g
ttttttttttttttttgaggagagcttttctactttattacaaagagaagaagcctttatgtggtcagaaaatacaagattgatctttttttctcttcctatgaaacgctgctgttcaaacagccagagtgaattgtctcagttcacttcttttaagtcccatcacattcacttgggtatggatgtccttggctgctgaaaatctggcccttttagtgcacagggcgacaaagtcccctgaccagcagttccagaatgtcccattttcatatattgcatccatgcacacctcctaaaaatgaggtacagcaggggcaaacattttccaaaatagatgtcatatatataatatatacacattcgtacatacatacctttattcatgtgatgtccaaaaatttaaaaaaaatgtacacatttattacaaaatcgtaacaaagactggacagtgttttgctcattctggaaagatgaagctcagtaataacacaaccctggaaaaccatccagagattgtggcaatatctttcttctaaacagtcagatattcttgcattaagcttggcgaaactgcctttcaaaaacagaaggggaagtaaaatgaaggaagcagacctcttgctcatctttccaaatgaaatacgagaaggatcttcacataaaaatgcacaaacatttgttattttattaccaatagtgctacaatgaacaatgcaaaatttgtggtctaattttcttgagtcttttgggggttttcttttttacattttagaaactatggtaaacttctgtcagtgtatttgcttgtctttacagactcaagtctgtctgctggcaaaaaaggaaataaatgaaaaaattcagaccctgctcaaactagagaaaaacaaattacaaatttagttgttgggcagcacataattagtaaggcaggacctcaaatggtgaccttttgcgtaagccaattgccagatcctcaaggaattaaaaccagggtgcctgagccacatcagttctgcagttatgttgagtattgtgctgagacagccataccccaagaaaagggaagnnnnnnnnnnnnnnnnnnnnnnnnnnnagaaggcttgctgagcagggttgtagttgaaggtggatggcaggtgaggccgttcttctaatttgtcatattccagatggaactccttagctactttcctccagttaagacagtcaaagaagtaatatgttcccctctcataggtattggttttcattgttggctccatgcctggtgccctggtaatccatactcgttcttctttgtggtatctccaatcacggttaaaaagctccactgcagctaaaagttgtaatacgtctcctccattcatgtaatagagatagaagagaaggtcttcaccatatcggccaagttttattgcagccagctgaaaaagaaaaataacttatccctaatgtgaatgttcgttaagtactcagatggaacatggaagtctatgtcttgaggtcgacaaggtgaagatgcccagggtgacgcaaatttggggtagagattttcaggagagttcagattgagggcctaatgttgttaagtcacttcctaatgcaagatgtaccattcctgggtctgtctctgctgccctgataaatgttaacaggccaatcattccaaattggtccgtcaccatcccttgaggaatgttagtaacccgaccatcaggtaacacctgggatcccttttttctgctggttattattttgtgttgttgaacttttatctccagggaatttgggtccatctgtacttgaagttgtcttgccagatgtattcaaattagatttactgtcatcattacttgatgttggatctttatagctggagcctggtaatgctggaaaatcttcattgtgtattgagaagtcctgggattgttcatttgctggttttgttaccattccaacataaggagctcttccagccaaggggtttattaatggagttgggttaccacttccttccctcctgtttcggtctgctaatgctgggaaatctgaaaggtccaatcctgtcacattttcacttccgtctgttccattaaaaatgttacttgataaggagttattcattccaaatgcctgattcctgttcattccaaatccagacatactgttcacagtaaaaggctgtcgagaaggctgctgctttggcatacatattatgcttggcgagcttctgttggggctacctaaccctgaactgctcatgcctatttgtcctgctaggaattccaatgccctgaccaacctgggagtggttcatcatattcctaggattcataggcaaaatacccctgcttggagatggaggcgtgtgaaatgaacattgttggtacccctgttgttggcgtgacgtggctcggtaactgagtgccttgtgataagctgcgatttaactgaggggtattgttgctcatccccctcattggaaggcctagtgcactttgttgcccgtataaacttgccccaaactgagacagctgacctgatgtagatggtgatgccagcatatctttttctgaccgatgtggaaacatagaagactggctgtagtacatgttttcgtcatggtagtcactgtcgaccccctctacaaacttctttcttgaagcaccaaacatgctgtttgtcacctggtagtttcttttctcagataatgtatgtccatcagtcctcaccatagagtcgtgtcctttcctcacagtaccggaggcaatcaaatagaactgtcactcaagggtcgtgtcacaggaaggaccgcccaccacgtctccctcgcatgaattttcttgtcccgcggatccaagatggcgacgtatccaccgcggaggctgctgggagcaagac

SEQ ID NO: 57170 - DNA, 1463 bp, Homo sapiens
  misc_feature (1)...(1463): n = a,t,c or g
ggcggcgagcggacggctgcatttacggggtctcccggagggccagagtcgtggcttacagaagagacgaaatgtggtctgagggacgatatgaatatgaaagaattccgagagaacgagcacctcctcgaagtcatcccagtgatgaatctggttatagatggacaagagacgatcattctgcaagcaggcaacctgaatacagggacatgagagatggctttagaagaaaaagtttctactcttcccattatgcgagagagcggtctccttataaaagggacaatacttttttcagagaatcacctgttggccgaaaggattctccacacagcagatctggttccagtgtcagtagcagaagctactctccagaaaggagcaaatcatactctttccatcagtctcaacatagaaagtccgtgcgtcctggtgcctcctacaaacggcagaatgaaggaaatcctgaaagagataaagagaggcctgtccagtctttgaaaacatcaagagatacttcaccctcaagtggttcagcagtttcttcatcaaaggtgttagacaaacccagtaggctaactgaaaaggaacttgctgaggctgcaagcaagtgggctgctgaaaagctagagaaatcagatgaaagtaacttgcctgaaatttctgagtatgaggcgggatccacagcaccattgtttactgaccagccagaggaacctgagtcaaacacaacacatgggatagaattatttgaagatagtcagctaacccactcgctctaaagcaatagcatcaaaaaccaaagagattgaacaggtttaccgacaagactgtgaaactttcgggatggtggtgaaaatgctgattgaaaaagatccttcattagaaaagtctatacagtttgcattgaggcagaatttacatgaaataggtgagcggtgtgttgaagaactcaagcatttcattgcagagtatgatacttccactcaagattttggagagcctttttagatttttctgctcaggctaaaaaaaaaaaaaaacagtttctaaaaattttttttcctggattgtgtaaatccttaatatatggaatttttgtgatgcagagaaatactttatgatagttgacaacatttcagtattaaataaacatctaaaatagtctgtttaaaatgtttgattnnnnnnnnnnnnnnnnnnnnnnnnnnnnnnnnnnnnnnnnnnnnnnnnnnnnnnnnnnnnnnnnnnnnnnnnnnnnnnnnnnnnnnnnnnnnnnnnnnnnnnnnnnnnnnnngaggcgtgagccaccgctccctgcccaacacatataccatctgaaaatgttagaattctgagttgtgattttattgacttgttgcttgctttttcttaggctttgtaacttgtaatatgttaaagtgtactatcctaataaactgaatactttggtatcttagaga

SEQ ID NO: 57171 - DNA, 921 bp, Homo sapiens; identical to SEQ ID NO: 13543

SEQ ID NO: 57172 - DNA, 689 bp, Homo sapiens
  misc_feature (1)...(689): n = a,t,c or g
cgagtatctgggattacaggcatgcgccacgacacccagcagcctggacgagaagcagaagcgagaggaggaggagaagaaagcggagttcgagcggcagcgaaaaattcgacagcaagaaatagaagaaaaactcatcgaggaagaaacagcacgaagagtagaagaattggtagcaaaaagggtggaggaagaactggagaaaaggaaggatgaaattgaacgagaagttctccgaagggtggaggaagccaaacgcatcatggaaaagcagttgctcgaagaactcgagcgacagagacaagctgagcttgccgcacaaaaagctagagaggaggaagaacgtgcaaaacgtgaggagctagagcgaatactggaagagaataaccgaaaaattgcagaagcacaagccaaactggccgaagaacagttgagaattgttgaagaacaaagaaagattcatgaggaaaggatgaaactagaacaagaacgacaacgtcaacaaaaagaagaacaaaaaattatcctgggcaaggggaagtccaggccaaaactgtccttctcattaaaaacccaggattaaattgcaaactctgaactttttacaaagaaaaatggaaaaactttgtatggtagcttcatgttgaagtggttttttgtttttgntttggtttttaatttggaaaaac

SEQ ID NO: 57173 - DNA, 7210 bp, Homo sapiens
tttttttttttttttttaagtttgctatgaaaacaatgtacttttattaattaaaagtcaaaaacaacaaaagggaaatttcacaacctttgtttgcaactatataatctttatatagaaaaactataaagtgacagtctgatctggaaagcagctcaacaataaatctaatccttacattaaaagtaagtaaattatagaatcagttcacccaaaagaaattgtcttgctgtagaatattttagcccaactgatttcaactatattattctcatttctgacaaactgtctttcctgatatttcaaatcaccagagatgtaacagacaagaacccgttgaagtaaaagaataaaacacaaatactccaagcacaatcacatgtgacatgatgagtgcatttaatctacaatctacaaaactatacaaattaccaattatacatataatccatttacattgaagctccatgaggtggtactgaataaacactgaggcatcaaattttcaacaatggaacaaggctcacggaacagcagcacattcccaccttttagtctagcatcacaacacttcccctgggatttgtacttatttatatattatctaagtcctaggaagttggtaacaaaaattttaagtcaaaaggataatgaattaaacactccctaaaatctattctaaaacatgcgtgtgaaatatgaagagatcaagcactttgtaaatgtgagattttacagtcacgtgttccttttaaacttatactagtatcttcactagtatctgcacaattttctgtaattaggcttttcactaaaacttaatagaagaggaaaacaacaaagaaaaaaaccttatttgtaaactgtacagtcttagaaaagtggtactatttatttttaaaaccaactttctctgctaaagaaatcacactgtgtggtcatcagaacagtttaagtcactttggcaatacagagatttatttacccttattttgaataacaataatgatgatgataaactattgtcacggtcatataatttttcagaacttacgccaccatggaggcaaatgtgtacagaatatttctaataaacctaaatttaatcacagttaaaatttctcaaaagtattttcaagtgctcaagaatattaaagtttggggggaaatacctaagtcataaataagcaagtattccctccaagattcactaattgggataaaagtctcagggtaagcccacaagaatggtctgcaataaagaaaaatcaggtctgtgtagagtaatttctgccatctttagcagaaaagccaaaaacattctgagccaaataaaagcaaagatcttttgattcagcgccttttgttgtgttagttttaatttctaacttctcaacatgttatagctcagaaattcccatatgcttactatctgtaataaggaactataacgttaaagaaaaaattcagagacgtgatcattttccatcataggtctgtctctctttggtaagaaacagatcaagacttacttattttctctcacctacagaagagaggggagttaaatgtcattaacctagtaaacaatccctgtgtataaacattaagttggagggtaaagagcctaagtcatgccctttataagaactgtggaaaacaactctggcacgtagctgtggtagaggacagtaagtgtccacagatagaacatgatctttcctgcaactggaagaccatgcttatgaacattctagtcaacctatagaaattttgctctgtaacttgagtgtccttcagacaagaaacatgaataataagctattataaaaatatggtagaatatcttcccccttataagtcaccaatttctgatcccattaaactttcatagaatccattggagtattaagtaggtttactctaggtaatttgtcatgaagtaaaactggaaataacctatctaataataccatttgcaattcaagaaaaaaaaatccaatacaatctaatatgtacattaacaaacttcacagaatatatattctatcaggcctaagaaatcctcacccacccaaccaaaagaaagtcagtttcacccactgtaagataaaccatgacacttgtatctggatccagaaaaaaagaactgctaaactccaatgtagtaggaaaaatattacaaataagcacccaaaactgacctaaaattttctactcaatcccgcaggatgtctttttttgaagagaaataagcatcccttgcaacttgactggaaagattattacctgaccaattatttctaagcctatactagaaaccagtgcaagatggaatgccaaaatcaccaccaactcgacacgaccgttatttttgcaaagaaaggtagttatataaaattccattctcccaggcaatgagcaggggagaaaaacatgttactttttaaatggctacatttgtaggtttttgagtatcagcaccaaatgttcacttttaattattctgaacaaatttttaggaattaatgtttcctaacaaaatggactaacaaaacagtgaataaggaaataactttcaagcaatatttgcatgctgataagaaccattaagtaaaacagtgattggctcatttccaaagctactgtaggtgtgcaccgtttggaaatagtgtatctcactgctcagctaatataggaactctccaaaccatgggtgcacatcttattttgtgactaggcaagattaagtaaaacaagttgaaaagatttttttaaaaagcaagctaaatcaaaataatccattgttagaatagttttctactttctcttttagggaggaaaaaaaaaacccatcaaaccagtgtatgaagtgcctacataaaaaactgaaatcaagattcacaaataatagtgtcagttcaattctacataaccctttattatatttatagcagtattatgaccaacattacacaagttttatttcttcctcataccgtagcaaatttattttcataatagagttcaactctgcaaatggtttaaatcaactttttgcaccttgaatttacaaaccattagatacgaagtttcctgaaaaacattttatttttaaattttacttaaagctataactaaacccaagtctcttgggagtggggggggggaccaactaagctgtttaaacacaaacttataaaaaatattctgatgccagtgtttgaaagatagcctacagaagattataaaaggtcaacaatcatacaagagaattctatggccaaaccttgttagaaaatttgttttacaaataaacttctttcataatagaagaggaaatgaaaagatatttaatttccccctaaaagtaagtagttgctcagaacatgggttggatgtatggaaatcatattgcttctgtgaaaaaaatgttttagccaggcattccactaacaaaacgccatgccatatctacctagtctttgatatctgggtattagtattacccaagagaaacttatcaaaagcaaatggttagcaaaccaccaaataggagtctcaggtcccttaatttggatagtcatcttagtaaatataaaacttaagctacttgaacactggggcttataaagtgcatcaggtataagaagcacaacagtagtgtgaaactcagtaggactttaagggacttaatatcaccggtggggcaaaaaaacaacattatagttttctgttcagattttatttgaaatctaattcaaattgtcaaagctacaaaaggggggaagacatctgtattatttttgctaagtcacaacatcctaaaacaaaatactactactgtcagcagatccattatacacatttctgatgaaatccattagaacaataaaaatttcatcttgagaaatagccacaatgaaagtaatttacacaatataaaacaatgacagatctacagatgcagttgctcatgagtttacacatgcatacacaaacaaacaaaaaaccccaggaatgctctttcatttgattttttgtttttttaaaaaacagaccgttcaggcacaaaacaaatcgcatttccaataagtgacagcatcttaaaaatttacgtcagtgtttgtttttctttgactttttatgagacctgtgtggagatctggactgggatctggacttctttcctgattttttaggagatctagaccgtgatcgcctagaccttttaggtgtccttgaaaccagatggtgatcttttggcttttttgctaacatctctaggagaatctttgtgagatgacctggaccgtgagctctctttatgagatctttctgaacgctctgatcgctccgattttggtgatggggatttcactcgtctaccactgctactgcgagatgggctgggggatgtactgtgtcgcctcttcctttccttccttgtcggagtacactcatctttttccttcttgtctttggagcgagattccaatttttctttatctttcttgtctctttctcgttctctttctaactctttctctttctctcgttgaagaagtttatctctgtagtgttctacttgctcctgaaaactctggcctggttttttaggtcttttcccagattccaattcatcctgaaacttcataactttgagctcaatttcacgaagtttggctcgtttttcctcactcatttcagagtacttagagaacttagactcagtcatttcttctttgattggattagagtacaaatgatgttcttcagatttggaactttgagtatcttcttcatcttcactttcttcttcttgattttgattttcttcttcttctgattcttcatgctggtcaaataattcccatttagaagttgtaacagcctgtgcttccaattcagattcatccacagcttcccattttgatggggcaactttaaatataggctcattcttttttgagtcttcagttgcatccaaaggcactccatcaagatcatcatcaagactttttatagggactccatcaagatcatcgatgggagtagcatcaataggaattccatctacatcttccagaggtgcaccatcaagctcttcctcgatgggggcaccatcaaggtcatctggaacatcctctgtttccttttcttcaataatatttacaagtcctaagaaaatattttgtagtttgatcaaaaatggttctggataaattgcccaatcttcccatgctctgaagcaagtcattacccgttgcttaaagttttcagattgtaaatggccttgaattgtacgataggtggcattgaggtctgaaaatatctgacataactttgtttcaaaaaattttctataatatgaagcattagcaactttggctgaaggagttgtacaaaacatcagaaaccaaatataatctggcaatctttttaggaaggggtgtctttaagatggacaacgactcagtaatgcaatccactatttcttcagcagcttcagcattattaagacagaaaaccattgcatctccaatatcatttttccttggagttaatccccgcaagatttcttccaatttatccctctgttcttccttaagtgctccctttttactaggttcctctacaaaagcttctgtttcttgctcttctgacattccatgcaagtacggatttaatggtggtggcctcccaaaaagatccatttttgaacatacgaaaatcttccgtccgccatttagttggagaatctccctgcagaatagaataaagcttccacctatagtaaacatgggctggtgtctggttttcaaataagaacctgaacataggattgttgatttctctgttcataatcatagcttcaaacattggcccttcacgtacaacaaactctatcattcgatgtatcagggcgagcaaattcctttctgttgggataaccactttgactatggcttgcgacagagtcttctcaaaatcctctttgtttttaggtggcggtaacataggagcattagggttttttaaccgctctctaggctgcgcattaaaaggcagtccggatggaggtgggggaagcgtatgttccatcatagaaggcggaatgtatattggatgtggaggaataggtacagctttaccccaacctaacttcatttcaaaagacataatcatttttccattcaaattttttaaagctctttcagcatctcttctattcataaaggccacaaagccgcaatttctctctctggctctttcttcatcagttctaggccacatgattttcacactggctaacggtccaaatcttccaaattcttggcacagcatttcttcattcatctgtggattaatgtttccaaggtataaattagtagtgcttggatctcctacatcatgtgagccaggtgcgtaatcatcaagaacaccagatgatctatttcttcttgaaggcgcgtccatagaacgacgctgaccatcagaatctgactgaggaggttcaaatcgacttaatctgccttttgttttatgtctctcatcacgttcctcttgaatttgctttaattcttctttgaagagttccaaattgctttttttcttttctttctctccttttttaagtggaggttttttggtttctatcacaagaagagatggtggtctttcattggaagactgatttggaggatttttttgatctgcaaatcttgaagatggcttatagattttacctcttttttcatctgtttcatgttcttctttagctgcattaacaacaccccctcgcacaaatgttttcactttattaccatcacttccttcaaaagcagcaagaaactcctcataaatctcagcagctgccttttcatcctcctttttctttaattcttcctgttcctttttacttaaagttcgcttagctgtactcatttttccaatactgaatgctttaagtttgttttccagaagaggtcttgagagattctgatgaggagaatcacaaaggctttcacgggcactttcattcctataattatgttttcttgggctcttaggtcgtgtccgacttggcatatcactatctgagggtccagatgcatccatatgtgcatctgaagatccagatgaatgaacatctgatgatctcgtctttgaactggccttctgagatccgcctggcgttttgtccgcc

SEQ ID NO: 57174 - DNA, 2009 bp, Homo sapiens
gtggggacaggagctgggtgtgctggggactggccgcggacccctaacctgtgtctccggtctccctccgggagcggctcaacccagcccatcgctctggccccgttctggccctgcagggtggtggttgggacgttgaaatgagcgcgcgagtggtacgtcctctctccgcgctcacgcccccctcctcaccgtgtttcccgccaggaccatcagcacgtgcccatcgacatccagaccagcaagctgctcgattggctggtggacagaaggcactgcagcctgaaatggcagagtctggtgctgacgatccgcgagaagatcaatgctgccatccaggacatgccagagagcgaagagatcgcccagctgctgtctgggtcctacattcactactttcactgcctaagaatcctggaccttctcaaaggcacagaggcctccacgaagaatatttttggccgatactcttcacagcggatgaaggattggcaggagattatagctctgtatgagaaggacaacacctacttagtggaactctctagcctcctggttcggaatgtcaactatgagatcccctcactgaagaagcagattgccaagtgccagcagctgcagcaagaatacagccgcaaggaggaggagtgccaggcaggggctgccgagatgcgggagcagttctaccactcctgcaagcagtatggcatcacgggcgaaaatgtccgaggagaactgctggccctggtgaaggacctgccgagtcagctggctgagattggggcagcggctcagcagtccctgggggaagccattgacgtgtaccaggcgtctgtggggtttgtgtgtgagagccccacagagcaggtgttgccaatgctgcggttcgtgcagaagcggggaaactcaacggtgtacgagtggaggacagggacagagccctctgtggtggaacgaccccacctcgaggagcttcctgagcaggtggcagaagatgcgattgactggggcgactttggggtagaggcagtgtctgaggggactgactctggcatctctgccgaggctgctggaatcgactggggcatcttcccggaatcagattcaaaggatcctggaggtgatgggatagactggggagacgatgctgttgctttgcagatcacagtgctggaagcagggaacccaggctccagaaggtgttgccaggggcccagatgccctgacactgcttgaatacactgagacccggaatcagttccttgatgagctcatggagcttgagatcttcttagcccagagagcagtggagttgagtgaggaggcagatgtcctgtctgtgagccagttccagctggctccagccatcctgcagggccagaccaaagagaagatggttaccatggtgtcagtgctggaggatctgattggcaagcttaccagtcttcagctgcaacacctgtttatgatcctggcctcaccaaggtatgtggaccgagtgactgaattcctccagcaaaagctgaagcagtcccagctgctggctttgaagaaagagctgatggtgcagaagcagcaggaggcacttgaggagcaggcggctctggagcctaagctggacctgctactggagaagaccaaggagctgcagaagctgattgaagctgacatctccaagaggtacagcgggcgccctgtgaacctgatgggaacctctctgtgacaccctccgtgttcttgcctgcccatcttctccgcttttgggatgaagatgatagccagggctgttgttttggggcccttcaaggcaaaagaccaggctgactggaagatggaaagccacaggaaggaagcggcacctgatggtgatcttggcactctccatgttctctacaagaagctgtggtgattggccctgtggtctaccaggcgaaaaccacagattctccttctagttagtatagcggacttaataaaagaggaaaaaactcttgcttcaaaaaaaaaaa

SEQ ID NO: 57175 - DNA, 1375 bp, Homo sapiens
gattggccttcaggagcacagtcggcctgaggagttgacggttactcaccgccgtgagcccaagtaactcgccctccttcggctagaaaccctccgcctgggcccgcgcgacaggagcgcggtctctgaggggagcggcgaccccgccagccccggtctctttccctggcggcggcggcttcttccgtgggacaatatgttcaagagaatggccgaatttgggcctgactccggcgggagagtaaagggtgttactatcgttaaaccaatagtttacggtaatgttgctcggtattttggaaagaaaagagaagaagatgggcacactcatcagtggacagtatatgtgaaaccatatagaaatggaggatatgtcagcatatgtgaagaaaatccagtttaaattacatgaaagctattggcaatcctttaagagttgttactaaacctccatatgaaattactgaaacaggatggggtgaattcgaaataatcatcaaaatatttttcattgaccctaatgaaagacctgtaaccctgtatcatttgctaaagctgtttcaatcagacaccaatgcaatgctggggaaaaagacagtggtttcagagttctatgatgaaatgatatttcaagacccaacagcaatgatgcaacaattattgacaacatctcgtcagctaacattaggagcctataagcatgaaacagaatttgcagagcttgaagtgaaaaccagagaaaaattagaagctgctaagaaaaaaacaagctttgagattgcagagcttaaggagagattaaaagcaagtcgtgaaactataaattgtttaaaaaatgaaatcagaaaacttgaagaagatgaccaagcaaaagacatataaacagttctcatgagaacttggtagtaagctaaactgaaaataaggtgggcttcactggagaaatggacttactgcaaatgctgtgatgtttcttagaggaacttcatatacagctgttgaccatgaatttcttagcaataggaatttgtactatttaagcaatctttaatggaaaatatgtgtgtaagaatggatgctatataggtattttaccaacccattttaagaaaattctatgatattaagcacagtttttaaaaatgtttattgtagtatatgtatagcttattacccttttgacaggcatcaaaatttcattataaagtattacttgtacaaattttgtacttctttagtggctagaattagtgaagaaacttaatgtgtatatttaatttcttcaagttcttacctgcccccatccttttttgtatatgatgtgtccagtaagtattcaataaatgtagtttacagatcctaaaaaaaaaaaaaa

SEQ ID NO: 57176 - DNA, 3867 bp, Homo sapiens
aggtagcaagatggccgccgctgaggaaggctgtagtgtcggggccgaagcggacagggaattggaggagcttctggaaagtgctcttgatgatttcgataaagccaaaccctccccagcacccccttctaccaccacggcccctgatgcttcggggccccagaagagatcgccaggagacactgccaaagatgccctcttcgcttcccaagagaagtttttccaggaactattcgacagtgaactggcttcccaagccactgcggagttcgagaaggcaatgaaggagttggctgaggaagaacccccacctggtggagcagttccaaaagctctcagaggctgcagggagagtgggcagtgatatgacctcccaacaagaattcacttcttgcctaaaggaaacactaagtggattagccaaaaatgccactgaccttcagaactccagcatgtcggaagaagagctgaccaaggccatggaggggctaggcatggacgaaggggatggggaagggaacatcctccccatcatgcagagtattatgcagaacctactctccaaggatgtgctgtacccatcactgaaggagatcacagaaaagtatccagaatggttgcagagtcatcgggaatctctacctccagagcagtttgaaaaatatcaggagcagcacagcgtcatgtgcaaaatatgtgagcagtttgaggcagagacccccacagacagtgaaaccactcaaaaggctcgttttgagatggtgctggatcttatgcagcagctacaagatttaggccatcctccaaaagagctggctggagagatgcctcctggcctcaactttgacctggatgccctcaatctttcgggcccaccaggtgccagtggtgaacagtgtctgatcatgtgaaacacaacacgttttcctctctgagtcccagctatggggaacatctggagtcagcagaaccattgggacctgaggcaggagtgtcacctgcgggagaagtctgcccgctgccctctgtcatcccattcaagattgtgccataccagctgaggtttttcctctgtctctctaggaatagggtctgtttcacaggccatttctgtgaaccctactccattgtggtttctgccactatcaaagttccagctacctgcaaggtgaaggaaggcatcccttttggggcatgcactttctttcctttctcaaaataatgttatatgtggccacactgatgttcacctttacgtccagggtctttgtgccttgtctctactccctctcttggatctggggaggaggggcagagacctgggactctgtatttctatagttctcctggcagagcctttgagaatggggagaaacagcctgggctgggggctacaggtctgtcactatgctctcttgccttcagacagaccattctgaattctctaaagggaaagggcttttgcatctaatcacaatagagttgaaagagaggccttaggattctcctctctctaggtgctgagccctcacctccctgttccaggctgagaactcaaatggttaccctgcttcttcctacaatgctgtgtgatatgggtgaacccagcccctgaccttcctctatcccctgcccatcctcccttttacctcctctcttttttaaacacctgtttatcccaacctttttgagctcaagctgtgataaagaagggcccatcctatttcccctcatctagtccatttacgattctcactgactccccgtcttcctggcagacacaaataaacccagtgtcaggtctaggaaattaatggctattcttccccagatacattctggcttatttgagatacatgattctcttagaatcctgtcccttggttcaggaaagtagcttggaaaaggagtaggggtatagcttgggtcccttttcctgcaaggccccatggggcagaatataataaatattctgagtgaggagtgtggtctttttctgatcttcctcagcttccgtaagttgcagagtgaggtatattaggagactagttctacacaatattgtaatgctgggttccatcaacacccaccttccacaactcagtctgcacctcagttggcaaaggagactggatggccatctttcctcatgttcccttgagtatttcaatgtagaaagcccttcaagtggtattatattttaaccttttacattattgttattaatgttagtaatatattgttatgttttctaaattatttttctttaagctgacgtggctttttttctgtggctcccagtgggtctacggaccttggctgacatatgttggtaggtactctggtcagctcagctggctgtcctggttcactcagaagataagtctctccaaagcaaattcacatgcattatgagtcgctttgagcttctgacatgtcacttgccccgaggttaaaacttttcaccccttgaagaccttacatgttttatggtattggtgaggaaggaaatgttctcaaggtctcaggctatttgggaaattccaactcctataccttaccagagcatggaagagcccagatctgaatgtaaaacgtctctgttctgccagagatggaaaaaatacaggtatacttgtgatatagtcatggggcttcagtgtcactattttctccttaaagctccagccaaaaactggacaaggatagagaggaggagggaagaacaaaagagcccttctctatgaaccttgtgccttctgtcctaccagttttcttttacagattctcacttctgctagcctagccagggcttactccaggaatctaaatagatgccctagtccactttatctttgttcccaaggcactcatttttattttgattttgattgaatgtgagcaggttgacctcaggtcacactttgttccaaaaacttttggaattattccaggacttgtggtggagttatggtactctagggcagtctttctcaaactatgtatggtaaaggaccaggttttttgttttccagtccttcacttatcaatatgcattcctattgcccatgacaggtatggagttcacactgtgtgctggccgacccggcaagtttgacagcaccccaaactggccagactgttctgtaggttaagtccattgatcatgtacttggatatcacagcaacattgaaatgctaaaaagtttttaaacactctcaatttctaattcaccatgtcacagactggtgaaaaaaaaaaaaaggtgttcactgaccagcacaagtctgcagatcatctttgagtagcactgttttggggccctcggtctctctgaagaccctagcagaactgatacctacctgtatctcttgttctctcctatttgagtttcacttccagagaacttgttcttcagcaagaatgtgtcactagtaaggacatctctagcatttctctagccttccttttctgctgctcaaaaataatcgttacaaagcttaggtttaagctgtatatgaaatatttatgcgactctcaaactttaaaggagttgctcctttgttccaaaattaaatgtgttagataaatttgtgattgtatgggtggcttcatgaattaagaattgaattaatacagactttttgataattgggacattttcctgtgactctggaaggtcttgtcaaagccccatgaggcagttataatatgatgttaagatggctttggggagctaggagaaaacattggcccatattgaatgacatggagacggcagaccatacaaaaaaggaccaaaagacttagaggaaatgggtatgcaagaatgaatgttatataacactggtaaacccaccagctga

SEQ ID NO: 57177 - DNA, 825 bp, Homo sapiens
aatttaatacgactcactatagggaatttggccctcgaggccaagaattcggcacgagggccgctgcgtcctcatcggattccgacgcctgcggagctgagagcaatgaggccaattcgaagtggttggatgcgcactacgacccaatggccaatatccacaccttttctgcctgcctagcgctggcagatttacatggggatggggaatacaagctggtggtaggggaccttggccctggtgggcagcagccccgcctgaaggtgctcaaaggaccactggtgatgaccgaaagcccgctacctgctctgccagctgctgctgccaccttcctcatggagcaacatgagccccggaccccagctctggcacttgctttcaggcccttgtgtctatgtgtataagaatctcagaccctacttcaagttcagcctgccccaattgcctccaaatcctctggaacaagacctttggaaccaggccaaagaggaccgaatcgaccccttaaccctgaaggagatgctggagagcatccgggagacggcagaggagcctttgtccatccagtcactcaggtttctgcagctggagctaagtgaaatggaggcatttgtaaaccaacacaagtccaactccatcaagcggcagacaagtcatcaccaccatgaccaccttgaagaagaacctggcctgacgaggatgctgtgtcttgcctggtgctgggaccgaagaaacaaggagctcctggtgcttgaccccgaggccttcaccattttagccaaggcttgaagttgcagtgggtacaatctcagcttacttgcaacc

SEQ ID NO: 57178 - DNA, 1762 bp, Homo sapiens
  misc_feature (1)...(1762): n = a,t,c or g
ggcttctgataatcatggcgcccctcggaacaactgtattgctgtggagcctcttgaggagttctccgggcgtggaacggggtctgtttccgggctcgaatccagccctggcacggtggcctgctccaaccgctaccttgctctttcgagatggggctgccacgccgccggttcagctccgaggccgcagaatctggtagcccagagaccaagaaacctacatttatggcatgaggaaggttcaaagcatactcacggaaaatgacaggctttgaacttgcagaaggcttttaaggcagctatacaagaactgaagccaccaacctattaagctaatgactcaggcacagttggaagaggctacaagacaggcagttgaggcagctaaagtacgattaaaaatgccaccagttctggaagagcgagtaccaataaatgatgtgttagctgaagataagattttggaaggaacagaaacaaccaaatatgtgtttactggatatatcatatagcataccacaccgggagcgttttattgtcgtcagagaaccaagtggcacactacgcaaagcctcttgggaagaacgggaccgaatgatacaagtttatttcccaaaagaaggtcgtaaaattttgacaccaataattttcaaggaagaaaatcttaggactatgtatagccaggacaggcatgttgatgtcctcaatctctgctttgcccagtttgagccagattccacagagtatatcaaggttcatcacaagacctatgaagatatagataaacgtggaaaatatgaccttttacgttcaacaagatactttggtggaatggtgtggtattttgtaaataataaaaagattgatggtttgctgattgaccagattcagagagatttaatcgatgatgcaaccaacttggtccagctgtatcacgtgctccatccagatggccagtcggctcaaggggccaaggatcaggctgctgagggaataaatttaatcaaggtctttgcaaaaacagaagcacagaagggagcctatatagaactaacactgcagacttatcaagaagcactcagtcgccattctgcagcttcctaaaaatattttaaaaatacatttattttactaaatactgactacatttctctgttaatattgagctaaatgttaaaaaatggctagattaaaagatatcaatttgtagttctccctacaaagcaaaaattattaccctactcacttttcgtaggctacaaggatatttgagtgcctggttatgaatttctcaaatcatgttagatgagcgtacggttaaaaagtctggtgtgtttttgtgttaccaaatagggcaaacgttaacttagacagacccccagcttaatgaggtcagaggaacagaggtttcacatcctgactccagaaatgggtagctgctagacaaaatcggggcaagacctgtggaatgatgccatgaggtcaagaaaaagggtttagagaattacagcctggatattcagctctaagaaaaatgtgattgacaacatttgaaaatgcagatttagttatacaaagaaaagacagtggggctgatccctaggcaaggtgtagtttcggctcagcttctaaaactagaagcctattttcatattgagaaagggaacagtaccttcataattccaaagttttatgagataggtcaatagtatgaaaaaatcaaagccagtctgttttagtaccaagaanacacgtgatttaa

SEQ ID NO: 57179 - DNA, 1080 bp, Homo sapiens
tgcagcaggggcagcgcgtgcggacccggggccggcgcgcatgcgccagcgcgacgcccttggaggggtgcgtggacctcagctacccccgcacccacgcggccctgctgaaagtggcgcaaatggtcaccctgctgattgccttcatctgtgtgcggctccctgtggaccaactacagcgcctacagctactttgaagtggtcaccatttgcgacttgataatgatcctcgccttttacctggtccacctcttccgcttctaccgcgtgctcacctgtatcagctggcccctgtcggaacttctgcactatttaatcggtaccctgctcctcctcatcgcctccattgtggcagcttccaagagttacaaccagagcggactggtaggccggagcgatctttggtttcatggccaccttcctctgcatggcaagcatatggctgtcctataagatctcgtgtgtaacccagtccacagatgcagccgtctgatgaggccacaacccctaggcccctcaggagctttgcagagaggaggacgtgtactccagggcgaggcctctggacctgtgttcctgtgccaaagtcctgtcaggctggtgggcaccaggaaaggcctgcaccctcttcctgctctcccaggaagccagctccctgagctcctgagccagccggaaactcttcctccagccttccggggagaacatccctcccattctgggaaaggaaagcagcctccagggaaatgttttctgccttcctgcttctagaaccacctcaggtactgatgaaccccacttagcacagctgaaggggtttgtgaatactcccgcctaaatcccttctacttcactcctcaggggagtgaagtgccttaagaaacaaagccctgtcctaatttatctagcttgtcagtccggtcttagagataccctctttcctgaagtgaggcgtgcctgtagaaacactatgtggtcagcctgtccccaaggagatcttgtgtctcctctccatctctgcctttgttaccagtgtgcatgtgtttgtgtgttttttaataaaatattgactcggaaaaa

SEQ ID NO: 57180 - DNA, 1504 bp, Homo sapiens
cctcgaggccaagaattcggcacgagggaggtgggtgtctctgttgacttgtctgttctgttaccatgctgctacccaactgtgcaaagtagtttagggtggccagaacccagggaccattggatttcaaagcttgctttttctgttggttcttctctctccttctctctctgtctctcccattctcctgcccatgcatgaaaggatcctccaccttcttcccacccagagctccctccaggcctttctctatatatttatttatctgacatacagaacacgactttagtgagcagagtgctgacagtcatgggtccccttctttgggtctgtcttttgagagaggttgagttcagggcaagacagcctggccacacatccaagggtaccgaccagtgggaccctggcctgagtctgttctccgaggggcctccagcagcttctgttcctccctgcagctgtgtctttcttgtcctgggtttaggatgcaggtgggccaggcaggtgttgttaggggaggcacccacttcaaaaggagggccacagtggggacacagagtccagcacctgagccctccaccctccccattctggttggttccatcagccacacttagaatctcccaggatcccttggactccgtcccccaacttgtcacagcagcctgagcctacccaccccaggagacaagagctggcaggaacatctgcctatatggggggtggcgttggccccaaagaggcttcaccagcaaaggaactgtgtgtattttaatgccaggggacggaggatgtgtgagctgttcagcaaggtctgcccaaggcctaaaactcaatttccttattcttttgcttctgctcgtccttaacaactaacagctcaacccacacctctagacaacagtagtcgtgctttctgctaacggtgacattttcagctcttaaaaagaagcaaggagattttcaaatgctagagtatctctatcagaaggcataggacattgtgtccaaagtctcaagaacaaacaacactttccttctgacctggtccaaaagtcagcaaacagcaagcaggcagaggccctcataaggacttttctgtcctcctttgaccaaactgtttaaccgagcctaggggtgacggggagcgacccaagctggcatctttctctacggagacagattttagaaaatacttttcttgcccatgaatttcttttctggttgatttttatcattttccctttacttacaagaaaataagattgcaaccactcctgctaatgatttagtagttccttttcatttcagtttttgtaaattaggagataattctaagagttactaaaggatgatttatttaagagaactacgtcaaatagcgaatgagttatgggtaacattagacgaaaataacctttcccgtgggaaaggtttctcgaatggcatggatgcaaatataaaatattaaaaaaaatctaaataaagcttattttaaaatccg

SEQ ID NO: 57181 - DNA, 577 bp, Homo sapiens
accagctatgacatgattacgaatttaatatcgactcactatagggaatttggccctcgaggccaagaattcggcacgagatcttctcttcctccccactctgaagattgtgtctgtctttgcttttaaatctatctcacccaccttcaaccttgggctccctgaagggtttgttgggagaatggaaaagagtttctcccggctttcctgtctttacaacatcaaacgagtacatagcccttttcctctcaagagttttgctgccagcctgaaggaggccccgtggcaaggcagggctgggaaactgacggaaacatggggaggtggaagaaccttcccaggttcttaagcctggcctcatgtctggcccgcagctcctgactgcttttctctgtgggtacctaaatcccagtgggttctcttctccacttcttctgtccagggcagcgttctccccgacttcagggtggccccacctgttccttcagcttcagggcccttattttcctggttccaaggggcgcaggcaggttggatccaagcagatgggagctagtattcatccaggtgccccacg

SEQ ID NO: 57182 - DNA, 1697 bp, Homo sapiens
atccaggcagggcttctcttttctttccacaagggacaagagcttggcttatttaggctacagccctgctgctgctcccttccttcttctgtcctgtttccagccttgcaagaaggctattcacaattaggcctggctgcttctctcatttttttcctcccagtttccaaacaagccctcagtgaacatcattgaagcgtgactgcctgtctgcagggagaaggattccatttttcttctcagctggtccccaggcccacgggcacagggagagggacaactgcagcagtggggaggaggcacagctagctgcacagttctctcttctccttgtcctagtcagatgaaggaggctgcactacaaacccaaattctgcaaaaaaataaaaataagccacaaaactaaaaggcctgggccccattctgggaaaagggcaaagctgccatgagacacagccttctgcctcctcgcctctcctggactggcttcctctttgagaaaatgcacaaagccctgggagatgacaagcacaaggactgactcaagctgtgtctttcagaccaaggaacatcagagaagctgtggggctgcctgccaggcaggatcatggctgccatcaagccttttctggatccagccatcaaggacatgtttgtggtgtgatgcacacttttgcaagcgtgtaagatgttacctggtttgtctcttttggaaaacaaaaatcagaaggctgcattctagagggcagagaaattcccccgaagactgagctggttgcctgcatcctctatcttctttgacccttatgactgaaagatcatcagtttggaaggtactggtccaatttatttaggaagtatctcttggagtttcagaaatgctagcttggacaactgaaaagtcacatcacagctggcattctgggggctaccaaaacaccccttctggagtagaagctgctggaaggcaggcctgagccattcaccacggacaggaagagcagctctggctatcaccactggcctctggggtcttcatatcttgccatctcatccagggttccatgaaagttacccagggtcctcatgtccttccttagagcctgagtggtgtgaggtgacaggtctctctctccactgcccctttctggtttaaaaaaatggtgcttgatgagggaaggtagactcttccctaggactgacgagttacggctgccagatgcctgcatgggaagaggtggacatctgcatcttccattggtggtcaaggatgggtgtgggagaaccacacctagtgcaagcctggtactcagtaaatatttgttgaaatgaatgataagagcattggtccccaagccagagagccagaagccatcacccaatgaccgccccttccttccggtctacaagagctctcaaggctgggtctgccaccactctgctttgcccaagtgtgacagcactggggaggagagacaggataaagggcagatgtcagcaatactaagggcttcctcatgggagggcatgaggctccactcattgtcttgtgacttccatccctgctgaatggggctgcaaggccaaggctccttaggggagaggtccttacctctgatccacttagagcaataaccactttttaaatgtaaaataaaaagacaaatgaaaaggcaaaaaaaaaaaaaaagtcgacg

SEQ ID NO: 57183 - DNA, 1094 bp, Homo sapiens
tttcacagtaataatagctaacatttattgagtgcttacattttgctggaacctcaccatactgctaactcatgttaagcttgaagtcaacgaatctattgctctctctggtcgcccctgaccatctaccttgggctataaaagagttgtttgtccagaagccccagaggagtccaagtaactggctgcccaggctagctacaattcagagggttcatacagggccagtctgtcctgaggctctatctaaagtccttgcaccctcagattcagtgtaggatcaaggccaagagtactagaatgtacatgtgctggtgctgaaggcaaggcacctggaaatattcatctcattcatcatctgccaaaggaagattccagagtcttgcacatatttgcaaggtcattttttcaattcttggagaatgggttaaaaaaatgacccaagaacttgatgtagttcttctgaattctgaagtcttgttcaattcatgtggcttttatgaaggaaaagtactcacttttctcatccttctcatctcctttgcatataactgcctcactcaagggctgagatatcaaacagttaagatcaaaagaggacacttcttttttaaaaaataaccatgtcctgacacaagattagcaatcaaataaattccacagtcctcttattcactaatttgcccagcatcactctcagacagggtatgctaaacttggtgaggcaatctatgataatcaggtcaagacttatgacacaagccatgtgtcctgcttctagaaacatcagagggtattagggaagcttccattgaggaggtgatatccgatcaggttggggaatactctgaaatccaatctccgaaagattcccagtcagggcaagatgagtttgtggaaatcctggtatttcagagtcttggaagccttttgctttttgccatttataagcttcattaaagacacccacaaagaagtaaccagttgaatgagcttcagtcaagaaaaaccagctgtaaactcgacctacaaatttacatcccacagcgtcctgtggggaaggtacactttacaaactaccattatatatacac

SEQ ID NO: 57184 - DNA, 398 bp, Homo sapiens; identical to SEQ ID NO: 13561
  misc_feature (1)...(398): n = a,t,c or g

SEQ ID NO: 57185 - DNA, 1383 bp, Homo sapiens
  misc_feature (1)...(1383): n = a,t,c or g
agaactggatttttgaaaattgatgaatacatgcgtaacttttcagacctcagaaacgggatggacaggagtggttcaactgcagtgggagttatgatttcacctaagcatatctactttatcaactgtggtgattcacgtgctgttctgtataggaatggacaagtctgcttttctacccaggatcacaaaccttgcaatccaagggaaaaggagcgaatccaaaatgcaggaggcagcgtgatgatacaacgtgttaatggttcattagcagtatctccgtgctctgggggactatgattacaagtgtgttgatggcaagggcccaacagaacaacttgtttctccagagcctgaggtttatgaaattttaagagcagaagaggatgaatttatcatcttggcttgtgatgggatctgggatgttatgagtaatgaggagctctgtgaatatgttaaatctaggcttgaggtatctgatgacctggaaaatgtgtgcaattgggtagtggacacttgtttacacaagggaagtcgagataacatgagtattgtactagtttgcttttcaaatgctcccaaggtctcagatgaagcggtgaaaaaagattcagagttggataagcacttggaatcacgggttgaagagattatggagaagtctggcgaggaaggaatgcctgatcttgcccatgtcatgcgcatcttgtctgctgaaaatatcccaaatttgcctcctgggggaggtcttgctggcaagcgtaatgttattgaagctgtttatagtagactgaatccacatagagaaagtgatgggggtgctggagatctagaagacccatggtagccttaaaaaccttctaaaatgcttttgattctgaaaattgggggaaaaaacttttaatcacaattttcttcaatacaaggggaaaatattcttgcggattcccaacgttttgtgatatgagcagaaaatcattagcatttcccatcatttgttcatatttgtgttttctgacagttgccacttgtagcattgcctgtactacagtattttttgccaacctcaggcatactcgttacatctgtattgaactttcggccctagaaaccagtggagttatttcaccacaaatcaacaatgtgcctgaggtgcatgggaaatatagttagctatactctgaaaatacattatgttttttttctttaaacaaaacacacaacatgtaagcatgttaagagtaaagaattgtatgatatgttccttttttcagttcaccaagttggaagccntttgcagctctggggcttggnatttcatttgagcaatttctataggatatgtatttatnattgattgttatttaattttcgggccaattt

SEQ ID NO: 57186 - DNA, 1316 bp, Homo sapiens
ttttttttttttttaatatcttgtcagttatttattatgtgtcattctaaagactagcacatttacagcatacatggctttgaatgacctaagaatatataaaacagtaactgtatgtttatatatatatagtaatactgcccaaaacaaataaataaaggtatcataatgcactaagcttggcaaatacaattgtgtagggacaaaactgtattatacaatatttttacatctttaaaggaaactaaaggcaactgtgctctgtaggagctctgacagaatccacattacattcccagttttccatagatctcttttctttttaaatggggaggcatcataaggaacactggacggaacctctgttttacggtaacctgtaaaactgccttccctgcacctctgaaaacccaaagctcctacagaagagaggagctgcttgcctctgtgccacacaccctcaccctggcaggcactggaagcgtgtgatgctgccggaagcccaggaatgatgccttcagagagaatactgaaacctgaaccttttctatagcatttgcccaagtcttacagttttatggtgacccattacatagagcaaaaattgggaaaataattcatataaaggtgtcacatgcaaaactgctgacagatgatcaacatttgctatattccctttgatgagtgcagatatttaatgctctccagacaaaaaagatctgaaaactatgtgggtaatatttatttttaaaaagcaaggagattttttaaaagttaaaatgagaaaagacagaactaaaaatttacaaattaaatgagatggtggagaggtgaaagggtaaatcagccatattgaaaacaaactgtctgtgaacagaaattgacacttaaaaaggagaatctgataccagcagcagccacctgtgcagtgggtttggcgggcaggagcttctctgcttcctgcctgccacagtgaactcagctttgagggagcagcagagagcttcgtccttcattaaagtgtccttcacagacattttcctccctgcaggcatcgggagacagcaggcgctgcttgcatgctgacttctgagtaggagggggtctggaaggtcatccagttccaccctacctgatgcccaccccctctgtgttcctgccaataagcagtcctccccatgcctcagcacccctggcccaagtttgttacatgtttctaaaggaaccagaagaatctctaggcttttagacaaaagaatttctaagaggttcacaaatcattaggatcagcatcattaatatgtgccatatgtatt

SEQ ID NO: 57187 - DNA, 482 bp, Homo sapiens
cgaatttaatacgactcactatagggaatttggccctcgaggccaagaattcggcacgagtgcagggtcctttttggaagctcgttgccgtcatcgcgtgacttgggcaatggggccggtggggtttgggggcggaagagaccctcggggttgagaagtatgtggtggcctttcgtcccctgtaaaacattggcacacggtgtggggcggcagcgctggatctttgcaaggctattttggcattctgctggatatatgttcgtaaataccaaagtcggcgggaaagtgaagttgtctccaccataacagcaattttttctctagcaattgcacttatcacatcagcacttctaccagtggatatatttttggtttcttacatgaaaaatcaaaatggtacatttaaggactgggctaatgctaatgtcagcagacagattgaggacactgtattatacggttactatactttatattctggt

SEQ ID NO: 57188 - DNA, 1002 bp, Homo sapiens
catttgactatccacatgattacgaatttaatacgactcactatagggaatttggccctcgaggccaagaattcggcacgagagagacctggctgctgtgtcccgcggcttgcgctccgtagtggactccgcgggccttcggcagatgcaggcctggggtagtctcctttctggactgagaagagaagaatggagaagcccctcttcccattagtgcctttgcattggtttggctttggctacacagcactggttgtttctggtgggatcgttggctatgtaaaaacaggcagcgtgccgtctctggctgcagggctgctcttcggcagtctagccggcctgggtgcttaccagctgtatcaggatccaaggaacgtttggggtttcctagccgctacatctgttacttttgttggtgttatgggaatgagatcctactactatggaaaattcatgcctgtaggtttaattgcaggtgccggtttgctgatggccgccaaagttggagttcgtatgttgatgacatctgattagcagaagtcatgttccagcttagactcatgaaggattaaaaatctgcatcttccactattttcaatgtattaagagaaataagtgcagcatttttgcatctgacattttacctaaaaaaaaaaagacaccaaatttggcggaggggtggaaaatcagttgttaccattataaccctacagaggtggtgagcatgtaacatgagcttattgagaccatcatagagatcgattcttgtatattgattttatctctttctgtatctataggtaaatctcaagggtaaaatgttaggtgttgacattgagaaccctgaaaccccattccctgctcagaggaacagtgtgaaaaaaaatctcttgagagatttagaatatcttttcttttgctcatcttagaccacagactgactttgaaattatgttaagtgaaatatcaatgaaaataaagtttactataaataataaaaaa

SEQ ID NO: 57189 - DNA, 2641 bp, Homo sapiens
gatcacgcaccccagctccggaagatggggaactgcctcaaatcccccacctcggatgacatctccctgcttcacgagtctcagtccgaccgggctagctttggcgaggggacggagccggatcaggagccgccgccgccatatcaggaacaagttccagttccagtctaccacccaacacctagccagactcggctagcaactcagctgactgaagaggaacaaattaggatagctcaaagaataggtcttatacaacatctgcctaaaggagtttatgaccctggaagagatggatcagaaaaaaagatccgggagtgtgtgatctgtatgatggactttgtttatggggacccaattcgatttctgccgtgcatgcacatctatcacctggactgtatagatgactggttgatgagatccttcacgtgcccctcctgcatggagccagttgatgcagcactgctttcatcctatgagactaattgagccagggtctcttatctgacttcaagtgaaccaccattttggtggttttgatcttttgtcactgagcccaaagagccagggattaggaattaagatcgtgcacaaaagtttccttaaaattcctggatggctgcagatgttgggggaaaaagtacgtgatattttagaaacttagtgggaaaagtaggatggtatttttatgtaaagccttgacccaatgtttaaaaatataattgtatttagatcttgttattgctccagtacataggaattgtgtaaagtgttaacagcagctgtatttgtttaaattgtgtgtattgaagattaggaaaaagatagtagttatttttcctaaatgaaataactttcttctcttccccttccccaccccgaattcttttctgaagttgctggcatttgggtcaaggttttattaaaagctacattttataacactggcacacacaaaaaagtagttttaagcttgttttgcacagttctttttttccattggaaatggaattcattgccttaggtctttttaaatagtgtattattatcgttggggctggctctatgcttgaaaaccagtttatttataacctgttataagtgctatattctgtttgcagttagggaaatgcaggaattcaaagtgatctcctaggcttgtaaggcaaactgaggatgcactatcccttttctattaaaaaataggttaatgtgtccaggaacccactctattaagggtgggggttttaattattaccctttcctatgtgttttatctaattattttggttgttaatatggtgataatgggaaagtcaagttaaattttaaatattaagaattctgatttattgagattgaattatgccaccacgtttatgtaaaaatgaaggtggcaccgtggtgagacctaatgaggaaatagttactcagttgtaaaaaattttggatttattctctttcttctgacctccttgcctcttgtcttgaaccataggcaaaaggatactgcatctctcattactgtaggtgctgagggttattgaaggtatacaaaacacatctcagtctctgtttcttggaaaggtatctattacatcctgctagctgactgacaaaactaagcagggagaataaagataattgtattttatgttttgcacacaaacgcagaatttgtataaccatatgacttcatagttgtgatctcaaaaaagaaggaatttctcctttgtttcttgcagttaatgtaagaatactttaaatctctaagcttctgaagtgttagaggtagagatggtctagtaaagatgtagtagtaatgttttatccatttagcatgtgtttattttttcatatgtactcaaaggtgacttattggttcacctcagtgatattacagctaaaaaaatcattcattagcaaaaggaaaagtggtctcaacctaacatcagaagtgtttcttattattattttatattgagttgaatattgaactctaacagttttctacatacaaaacacagtgtcatgaaggttattcataattgcattatagaggaatgtagtatgtcataagtactttgtaaagatttgacattcaactgtagtatccatatgttgcttaaatttccttatgagccccatgatggaaagacttaaagatgaatttgagaaaaattgaaagaaattagattatcaggttctgttaaattgttacatgtatcttgcttaaatttctgtttattaatttatatccacccaagtacataaagcaaatttggaggaaacaactgaagttgtgcaatattttctgataattgctttttttattcttgtgttttctacttaaacataatgtctgtgtcatcaagtattatagtcagacttttctttttttctagattgttaaaattggcaaatgaacttttttaaaaatcatcttccatgttgcagttagtctttcttttcattacaagtctttcacagaagtttggtggtaatattgaaagaactagcattgggcagaatgtgtcttttttaggcactttatattctcaacatacaatgttaagaaccatcaattttgacttttactaagttgttaaataaagttataatacagctgtgaaaaaaaaaa

SEQ ID NO: 57190 - DNA, 1629 bp, Homo sapiens
gcaagatgttggtccattttgagcgctggagtcatcgttatgatgagtggatttactgggatagcaatagattgcgaccccttgagagaccagcactaagaaaagaagggctaaaagatgaggaagatttctttgattttaaagctggagaagaagttctggctcgttggacagactgtcgctattaccctgccaagattgaagcaattaacaaagaaggaacatttacagttcagttttatgatggagtaattcgttgtttaaaaagaatgcacattaaagccatgcccgaggatgctaaggggcagtttctgttccaggtgaaatcccagcatccactaagctggtgttgtcctatcgacccagctggatcgtgtaaccagtctatgggaagtgaggattggatagctttagtcaaagcagctgctgcagctgcagccaagaacaaaacagggagtaaacctcgaaccagcgctaacagcaataaagataaggataaagatgagagaaagtggtttaaagtaccttcaaagaaggaggaaacttcaacttgtatagccacaccagacgtagagaagaaggaagatctgcctacatctagtgaaacatttgtaggacttcatgtagagaacgttccaaagatggtctttccacagccagagagcacattatcaaacaagaggaaaaataatcaaggcaactcgtttcaggcaaagagagctcgacttaacaagattactggtttgttggcatccaaagctgttggggttgatggtgctgaaaaaaaggaagactacaatgaaacagctccaatgctggagcaggcgatttcacctaaacctcaaagtcagaaaaaaaatgaagctgacattagcagttctgccaacactcagaaacctgcactgttatcctcaactttgtcttcagggaaggctcgcagcaagaaatgcaaacatgaatctggagattcttctgggtgtataaaaccccctaaatcaccactttccccagaattaatacaagtcgaggatttgacgcttgtatctcagctttcttcttcagtgataaataaaactagtcctccacagcctgtgaatccccctagacctttcaagcatagtgagcggagaagaagatctcagcgtttagccaccttacccatgcctgatgattctgtagaaaaggtttcttctccctctccagccactgatgggaaagtattctccatcagttctcaaaatcagcaagaatcttcagtaccagaggtgcctgatgttgcacatttgccacttgagaagctgggaccctgtctccctcttgacttaagtcgtggttcagaagttacagcaccggtagcctcagattcctcttaccgtaatgaatgtcccagggcagaaaaagaggatacacagatgcttccaaatccttcttccaaagcaatagctgatggaagaggagctccagcagcagcaggaatatcgaaaacagaaaaaaaagtgaaattggaagacaaaagctcaacagcatttggtaagagaaaagaaaaagataaggaaagaagagagaagagagacaaagatcactacagaccaaaacagaagaagaaaaaaaaaaaaaaaaagtcgacgc

SEQ ID NO: 57191 - DNA, 2928 bp, Homo sapiens
cctgaggcgagtctgggctcagcctagagctctccggcggcggcgcagcttcagggcagcgcgggctgcagcggcggcggcggttagggctgtgtagggcgaggcctcccccttcctcctcgccatcctactcctccctcctcgtcatcctcccccttcgtcctcctcgccttcctcctcctcgtcaggctcgacccagctgtgagcggcaagatggcggcgcccaggccgccgcctgccaggctgtcgggcgtcatggtgccggcgcccatccaagacctggaggcccctgcgcgcgctcacggcgtcattcaaagagcagcggaaccgagaaacagcacccaggactatcttccaaagagttctggatatcctaaagaaatcttctcatgctgttgagcttgcctgcagagatccatcccaagtggaaaacctggcttccagtctgcagttaataacagaatgcttcaggtgtcttcgcaatgcttgcatagagtgttctgtgaaccagaattcaatcaggaacttggatacgattggtgttgctgttgatttgattcttctgtttcgtgaactgcgagtggaacaggaatctctgttgacagcttttcgctgtggcctgcagtttttagggcaacattgcctcacggaatgaagattcccagtctattgtttgggtgcatgctttcccagaactgtttttgtcttgcttaaatcatccggacaaaaaaattgttgcctactcttcaatgattttgtttacatcccttaatcatgaaagaatgaaagaactgggaggagaacctcaatattgcaattgatgtcatagatgcttaccaaaaacatcctgaatcagaatggccgttcttgattattacagacctctttctgaaaagcccggaattggtacaagccatgtttcccaaactgaacaatcaagaaagagttacactgttagaccttatgatagccaagataacgagtgatgagccactcaccaaggatgacatccctgtgtttttgcggcatgctgagttgattgcaagcacctttgtggatcagtgcaagactgtgctcaagctggcctctgaggagcctcctgatgatgaggaggcactggctacaattaggcttctcgacgtcctgtgcgaaatgactgtgaatactgagctgctcggctatctgcaggttttccctggcttgctggaaagagtgattgatcttttgcgggtgattcatgtagctggaaaagaaaccacaaacatcttcagtaattgtggttgcgtgagagcagaaggtgacatctccaatgtggccaatgggtttaagtctcatctcattcgtctgattggaaatctgtgttacaagaataaagataaccaagacaaggtaaatgagctggatggtatcccgttgatcctggacaactgcaacatcagtgacagtaacccctttctgacccagtgggtgatatatgccatccgaaaccttaccgaagacaacagccaaaaccaagatttgattgcaaagatggaggaacaggggctggcagatgcatccctacttaaaaaagtgggttttgaagttgaaaagaaaggcgaaaagctgatcctgaaatctactagagacacccctaagccatgaatgaactacatccaaatacctgaatttttggaatctgtttcatggatttttcatcttctaccgtatgtgaaattgcaagtgtttgaagatttataagtacaaatttgggaacatacaaatcttttaggtagtagagtttaacgtgtataagctaaaagtgaaagtaactgagtgttctcttgtttctttgcattaatgtaactgtgtggtttgcctttgtccccctggatagaacgtgcatttaaagaatatattgtacttactgtgacagcagataataaaccagtctcttggagggcacaacccttatttgacaaaacttgggatgttgggcttgactgtgtttgtcccttcagatgggcaagtcaggcatcattctttatattcctcttcttcattggggttttctggaactctgggcagggcggttgaagtagtttctcactgtgattaattctagcaatctcttttcacccctctgcctttccaaaacattgacaagactcatttccagttaattaattcgagaaccctccctcttcattttgggtactgggctgtcttgtcactgagccctatccctttggaatgtggcagggagtgaggttggtgagagaacatgtgggcacttaactcttcatgttccagttcatcccagaagtagacatcccaggacccattctgtgtcaaggtgaatgcctgtgtcctccccagcttcatgcctctgtcatgggggaaggaatagcttatgttctgctctggtgcagtgccgtagattaaaggtacatttctatcttctttgatttaaaaagcaccagtctcataaaggtgccactcagttttagccatgtcttcactgaaattgcaaaagtacttttagggagcaggagtttatttgacatctagttatctgtctgtctgttcatctatctatctgtctgctgtatgagaggtaggactggattaaatgaccactgaactcactgaatccagatcattcatatcatcaacaaaagctctagggggaggtcacgttgtgaatgcttaaaacatattattttcttcaacaaccatatcgctaaactaatatatccagagattttgcacaattcgtgttgaaccttccaaaacaaaaataaagacctgtccaaaagttttgacaaaaatactgattgctcccaaataaagtgcttctaagctttgtgtagacatagtttaactgatttgtaaaaatagcttaagcatgttgagaatgaagtaaaagttttcccatgtgcaaaaaaa

SEQ ID NO: 57192 - DNA, 891 bp, Homo sapiens
tttttttttttttttttggaggactcataaagtgctctttattggcatctgaaaaagaagtgcctcagccttcaaggctgggacagaagttggggaggagctgctctgccccaggctcaataccaatagaccttcttgtatttccgggtctccttgatccccatggcctccatcacctcctcctgcagtgtctttagacagggcacataggttctttctaaagcatcttccactgatgtgtctttggggccatcaatccacgtttcagggacgatgccatcagctctgggaaattcgggtttagggataattctccctgatcgtgtggagactcgtacccgctctcctgcttcagtaaatctccactcgatctcagtgggtttcctgtccataggatccacaagtttgacctggcggtggagcaagggggcttcactagggatcatggttccccggtaatccatggtcttgccaatgtagcggtaatgtgtgttcagccctcccacgaccacccagtttcgctgccggataacttgaaccactttgccctgcttcccggcatccttgccttctaggatctccaccgtgtccccacagaacagataccagtcttcatcagagatgggttccacaaccactgggcgccgcctgatccatggggggttcttcctcttgtctgcaacagagcctggggggctcatcccatagcggtaatgggggggcagagtgaccttggatgccaaggccagcagggcagaaagacgcatgcctggaggttgtaagaaatccctttgccagcaaaacgctcgaaaccttccttgtcagctctgcctctcggacgggcacctctagggcgggcggccctcacctccactttccgcggcacttcgg

SEQ ID NO: 57193 - DNA, 1479 bp, Homo sapiens
aattcacaatagatttattttacataaaagaaaaagcttgctgttaatgaaaaatccagtagaaaacagttctgctttaagttgaggctcaaaagtagaagctgcttattagtgaaacctcaataaaaagagaattttgtaagaaaacattcttggcatgaaagctctaacataaattctgtaatgaaatatttaccatgcaactttattggcagaaaggccagtttctgatggctggtattttcagtctcttaacacattaacatggaagatacttaacctgctttatttagagttaattgtatataaatacaaagtcatgatgggcaacctttccatagtccacctacttaattgagcagttctaagtaggtaattggcaccttgcccttctggtttcccctttcccccattagccagtctgaatccattccaacaacactgaacacagtgatcacctcatctgccagaagtgataattcagtactgtttgctgcatcataatcatagagaaccctggcctttctgctgccactacactccttaaggtcactgaggttggaaggagaggtgattactaggccacttgttgaagccatggcagaagaaccaatcgcatttggtaaaactgatggtacaggtgtcacagaagtctgattgttgttactaagataattggatggaaaacttcccagttgtttctggaggtccaacatatactggtaacactgtgcatagtaagtcatctgggcttctacaaagtcattcagacagcgaaggtgatgggcatgtgtactgctgattccctctagcagaagtctggtaatctctgcttgacgatcaaattcactttgagttattcttaattcctgttcagatgaatttctagtttctgcagcttttgcccttttttagtctcgtttttgcagcatccaaatccagtctcttattttgcaatagtttcctttctttagcaattgttttgtaatcctgccttcctaataaagtttcttaaaggagtaagaaaatttaaggctgacgtttgaatcagttctctgtctgctgttccaattcttttttgggtttctccacatttaataagggcattaccataagctgttcctgggccaaactcagtccctgcatcaatcatatattgtcccaaaagttctgggttgtttatacgacttggagcttttctatccagtttctcataaacaaattcttctatcctggcatttggatttggctgcaataacacttcagtttgtttcattattttttctgtccatattttggtacattcagctttgctaaggaggttctctaagtgagcatccaattctgtcttctcagcctggccaagcttttcttctgtgaactgcacggcgcgactgaggaaggtgcctgcgtcggccgccagcttcttcacgttgaagtccatgatattcatcctaggcggcagccgggcggagccgg

SEQ ID NO: 57194 - DNA, 2273 bp, Homo sapiens
ccagctcagagcctagacctccagccgagcggtttgcagccgcgggcggcggcggcggcggcggcgttgagtgtctggcccgccggtccggtcggggtgtgcagtcggacggacgagcagcgcgtcgctgtcctccggcagctggagatgtccgagcccaaggcaattgatcccaagttgtcgacgaccgacagggtggtgaaagctgttccatttcctccaagtcaccggcttacagcaaaagaagtgtttgataatgatggaaaacctcgtgtggatatcttaaaggcgcatcttatgaaggagggaaggctggaagagagtgttgcattgagaataataacagagggtgcatcaattcttcgacaggaaaaaaatttgctggatattgatgcgccagtcactgtttgtggggacattcatggacaattctttgatttgatgaagctctttgaagtcgggggatctcctgccaacactcgctacctcttcttaggggactatgttgacagagggtacttcagtattgaatgtgtgctgtatttgtgggccttgaaaattctctaccccaaaacactgtttttacttcgtggaaatcatgaatgtagacatctaacagagtatttcacatttaaacaagaatgtaaaataaagtattcagaacgagtatatgatgcctgtatggatgcctttgactgccttcccctggctgccctgatgaaccaacagttcctgtgtgtgcatggtggtttgtctccagagattaacactttagatgatatcagaaaattagaccgattcaaagaaccacctgcatatggacctatgtgtgatatcctgtggtcagaccccctggaagattttggaaatgagaagactcaggaacatttcactcacaacacagtcagggggtgttcatacttctacagttacccggctgtatgtgaattcttacagcacaataacttgttatctatactccgagcccacgaagcccaagatgcagggtaccgcatgtacaggaaaagccaaacaacaggcttcccttctctaattacaattttttcagcaccaaattacttagatgtatacaataacaaagctgcagtattgaagtatgagaacaatgttatgaatatcaggcaattcaactgttctcctcatccatactggcttccaaatttcatggatgtttttacttggtcccttccatttgttggggaaaaagtgactgagatgctggtaaatgtcctcaacatctgctcagatgatgaactagggtcagaagaagatggatttgatggtgcaacagctgcagcccggaaagaggtgataaggaacaagatccgagcaataggcaaaatggccagagtgttctcagtgctcagagaagagagtgagagtgtgctgacgctgaaaggcttgaccccaactggcatgctccccagcggagtactttctggagggaagcaaaccctgcaaagcgctactgttgaggctattgaggctgatgaagctatcaaaggattttcaccacaacataagatcactagcttcgaggaagccaagggcttagaccgaattaatgagaggatgccgcctcgcagagatgccatgccctctgacgccaaccttaactccatcaacaaggctctcacctcagagactaacggcacggacagcaatggcagtaatagcagcaatattcagtgaccacttcctgttcacttttctttttcctgtgttttttctctttttgagctgcggggcatgatggggattgctgcatatcagcagttggatgttcttgcctctgacagtagcttatttgctctgggggccaggaattggattcagtttacactatcattaaaaaagagggagagagataataaactatattttggtggggatggtgattaaacacctcttttgggtatgccttttaaaaatgcttatagagaaaaaaaattttaaaaagaaagctaatgctagtatatactgcaatgttaggggaatgaacatgttttcctactgcattggggacttctagataggttaatgaaaggccttttattctgttactggacatgaaaactttgtctaatttcttactctattgtacgtttacagtcgcagcactaaaaatggatgacatcaaacatttttaacaaaatgatgtacaaactaaggactatttattgataatgttttgctactcttgtcagacaatggctataaactgaattaggcagtcttaaaaaaaaaaaaaa

SEQ ID NO: 57195 - DNA, 1181 bp, Homo sapiens
cccatagttgcttttatttttccctaaaaaaaagagtccattttcttatacagacattcatttatgtaagacccacatcaggctttttctaaagtgccaaaacccgtgcaatccccataacttcaggtgagaattataatgggcagaagaatgtatcaactaaaatactcaaggccatctcaaatcctgaagagtccctggtttctgtgacaagggggaattttgctagcaaataagtaaaatccaggtaaatatgctctaaatcttcatcttcaggttcttaattctttaacatattgtatcagattttgtattcaaatctaattatattttgtaaaaaatgttttaaaaattcctagataaatttcattcattaattttctattttattctctatacccttctttgttttgtctgtcttcttttctttccacaaattcccaaggacaatccctaaaaaaactattagtcccagtgttcggttggagataaatttattccaacaatcctcaggtctggggatgtctagagtgtaaatctggtgagtcagatgggctcctacagcacccagggcagcgtagtagggagcagtctgtccactgttcacacccactaggctcagtgcccccagcattgcaacactgaagccactgagccacggcttggtattttctccgaaccgcagagccgttgacttaagaccaatcaaaacatcatctcttttgtcctgatgggcataaatagtgtcatatattagtgtccacataactccagaaaaataaagaggccaggcaaacagatggatcacaggaacccttgatagcagaccatccaagtaacgctccccaattaaatgtcaagcccaaggctagttgaggccagtatgaaattcttttcattagtgggtaggtgatgacaagaagtaaggatcctgctcccagagctatactgtagtaatttagacacagaagaacacccagtgccagggttagctgtcccccaagaaaaacaaaggactgaaaagttgaaatgtctccagcggctattggacgattggctgttcttgtaacctttttatcatagtcctggtcccacatgtcattaatagtacagcctctccacgcatcagaatagctccagtgccaaagagggagagcatgtaccaatctggaaaacaaccc

SEQ ID NO: 57196 - DNA, 1217 bp, Homo sapiens
  misc_feature (1)...(1217): n = a,t,c or g
ggggcttgtgggtcctcctccccctcccactgacaactgccccaactgctcttcccncctcggtcacagtgaaaatgtagacggggtcgttgtccgtacgactgtgcgccagggctcggggaggggcgccctccgcgtgagcccccctgggaatattgaacataatcacctctcattccagactatgttaggtcttaatggtgggaggacgcccgagtgctcggcccgtttcaccccgaggaggaaggacactgggtcatgacgccatcagagggcgccagagcagggaccggacgcgagttggagatgttggactcgctgttggccttgggcggcctggtgctgcttcgggattccgtggagtgggaggggcgcagtctcttgaaggcgcttgtcaagaaatctgcactgtgtggggagcaagtgcatatcctgggctgtgaagtgagcgaggaagagtttcgtgaaggttttgactctgatatcaacaatcggctggtttaccatgacttcttcagagaccctctcaactggtcaaaaactgaggaggcctttcctggggggccgctgggagccttgagagccatgtgcaagaggacagatcctgttcctgtcaccattgctctcgattcactcagctggctgctacttcgccttccctgcaccacactctgccaggtcctgcatgctgtgagccatcaggactcttgtcctggtgacagctcctcagtggggaaagtgagtgtgctgggcttgctacatgaagagcttcatggaccaggccctgtgggagctctcagcagccttgctcagactgaggtgaccctgggcggtaccatgggccaggccttcggcccacatcctgtgtcggaggccccgacagcgcccaactgaccagactcagtggttctccatccttccggacttcagcctggatctccaagaggggccctctgtagagtcccagccctactccgatcctcatatacccccggtggatcccacaactcatttgacctttaaccatctttctattgtttgtgttagccttaccctgtccctgccccaccttggttccccttgtctatggagccccgccttgtgagccaggaagcagcgtctcatcaggacagaaggtaggatgaagacatggggtaatgtgagagagtagaacacccccgtacctaataaaaatctttatttttttattnaaaaag

SEQ ID NO: 57197 - DNA, 1995 bp, Homo sapiens
ttttttttttttttcaaatgacttagatttaatcatcggaagcaaactaaatggaaaccttacaatagagaagaattacatgtcagtgtcttttggaaaactgagctgggacagaaagggactgggggctgccccccaacctgatcccttctgaacaaagacgtccacagtgttcctggcactctggctcaggaaaaggggagactctgctggttctgtgcattgaagtagccttgcctagcactcactcctggccagcatcaggagccccgccttgccggctctggtcatcgcctttctttttgtggcctgaaacgatgtcatcaattcgcagtagcagaactgccgtctccactgctgtcttataagtctgcagcttcacagccaatggctcccatatgcccagttccttcatgtccaccaaagtacccgtctcaccatttacaccccaggtctcacagttctcctgggtgtgcttggcccgaagggaggtaagtagacggatggtgctggccccacagttctggatcagggtacgaggaatgacctctagggcctgggcaacagccctgtatggccattgttccacaccagtcatggccttggatttttctgtcaaggcatgggccacagcccatctcggaggccccaccccctggcaccagctgagggtccaggagaacattgcgacacacttgcatggcatcctggaggttgcgttctacttccgagagaatctctttgctagccccccggaggagaatggtgcaggccttggggtctttgcagtcagtgatgaaagtaaagtattcatctccaattttcttgatttccaacaggcctgctcctgttccaacatcatcttctctcagttcctctggtcggctgactatccgggccccacaggctctagcaatgcgattattgtctgtcttccggactctgcggatggctgtgatattggcccgcataaggtagtgctgagctaaatctgagatgcccttttcagtgatgaccacatcgggcttcagttggataatgtcctcacagagctgctggatgtactcttcctccatctggagaattcgggtgaagtcctcctctcgtgtaatctcaatgtcagtctggctttctcctttcttgtattccagagaagaatccagcagcacaatgcgagggttcttgatatagcgccgcatacgtggatgggtcacatccttgttaatcatgactccacgcaagacacaggagtcttcaatgatgcctccaggtatcttttccactcttgcatatttttttatgtcaatctctttccgaccattctcctcaaactgtaccatcttgacagcatccagggcaatgttgcaagccaaagatgaccaccgactgatggctttggtagtaatagagctgttgatgatgttcagcatcatatcactgtcactgatgtcgactgggatacttattttctttagggtgctgatcatatcatccaatgccttgcggtaagcactgatcaccactgttgggtgcatctgctgctccaggaagtgctcagctacagacagcatttcccctgcaagaataattactgatgtggtcccatctccaacctcttcatcctgggtccggctaatttcgatcatggacttggccgctggatgcttggacttgaatctctcgaagaatggcattgcccatcattggtcatcacaatgccctcccattgggtccaaaagcatcttcatcatggacttgggtcccaaacatgttcggatgatatctgcaatagtcttggcagcattgatgtttccagattgaacttttcttccggattcacgctttgtgttctggctgagcacgagcactggacgatggcccatcatggcgacgcgatgcagagccgggtaccccagagctgggggaaccggcagaaccttctggagagagagaaccagacagaagcccagaaaacgctgcctcctcagggcttac

SEQ ID NO: 57198 - DNA, 1295 bp, Homo sapiens
tgtgcattaggttggcagcagaggaggtatgcagggagaggggttctgtgctcctgagattagttcagatggtctaaccattgttctatatgtgcattttagttaatattgtgtattaaaggataagtcttaatgctcaaagtatgttaaaaatagatgtagtaaatcagtccctttgtgaatgtccttttgttagtttttaggaaggcctgtccctctggggagtgacctttattagtccaccccttggagctagacatcctgtacttagtcacggggatggtggaagacgggagaagaggaagggtgaacgggaagggctctttgctacgtatctccaataatcctagaccgaatggttttagatgataaccacaggtctacaagagccgtttttaagtaaagtgcctgtgttccattgtgggacaaagttattatttttgccaacctcttaagcttttacggatgggggtgacaacttatggataaaaactagagctagtggaattagcctatttggtaaaatacctttttataagtgatagaaaagatgcatcttgggacatgggaattggttaagccaccctctggagcagtgtatggtcaggacttgttcattaggttggcagcagaggggcagaaggaattatacaggtagagatgtatgcagatgtgtccatatatggtccataatttccattttgatgatagccattgatgtatgcatctcttttggctgtactataggaatacattaagtaattcaatggaaatacactttgctaatattttaatggtatagatctgctaatgaattctcttaaaaacatactgtattctgttgctgtgtgtttcattttaaattgagcattaagggaatgcagccatttaaatcagaactctgccaatgcttttatctagaggcatgttgccatttttgtcttatatgaaatttctgtcccaagaaaggcaggattacatcttttttttttttttttagcagtttgagttggtgtagtgtattcttggttatcagaatactcatatagctttgggattttgaattggtaaatattcatgatgtgtgaaaaatcatgatacatactgtacagtctcagtcccataaaaattggatgttgtgcctacacacaggatctagaagaatatgtcaaactataaactgcttgtgattgtgaatgactttgttctttgcttgtgtttttcaatttcctataatgcacatactaacttttaaaaaataaaggttattttaaaagcctgtaaaaaaaaaaaaa

SEQ ID NO: 57199 - DNA, 1451 bp, Homo sapiens
tatgaaggtaaagatgacctgtttacatgataatattttaagataccagtgactgcaagcatgtagttattaagtccattacagtgcacatttattgactctgtgtatcttcacagtgtgatcttcaccacagcttgcaaagtgtaaccactcagcaccttctgcttccttctgttcagtttttccactgcaattcttccagcataattttctgatagccagtgtatgactttggctttgacttgtttctacacagtgggtccagtcatttatttctggaacttgatcagtctttttccaggtatataagcaaatctttccacactccaatcctactgcaaccacgtatcgttgagaagggtggagcactgggcagacgctgacagctgtcacagccccacccacgtccaggactgaggagcaggggccaatgttgtgctcaatacagtcatcagtggagtcacactcaccccagacaaccacctttttgtctcgactcccagtgaagaaatacttgctgtcaggactccaatcacaagaccaaataattctactgtgcacagaagtaattttgttggtgaaggcaaaaagactaaaaactggctcgaactcaggtgagattgtatcctgctttttccacaatgaccaggttcgatctctggaaacagctagtaagaacttctcattaggtgagaaggccatctgcgtgactgtcaaactgtggaaaactaaattctgcacctgtttccaagatgtagtgttccaaagaatgatagctgcatgctctttcttagctgccttacaagctgaggcaagcagagtctttgaactgttacaagtaacacaaaatatttcataaccgtgcccatatagtttttgaacttcaggccacaaagtattctgcagaagatgatcctcagtgggaggctcagtaagtatggagggctgaaaggccacctgctgatactcaaaaccagtactagttaacagctcctcttcatcagaaggctgagaagctatatctccctgaaagacagctttatttgataatcccaatgcagggacagtggctccttctggaagatcactatcttgattacagagcacatgattcagtgattgtcctgtaatggcacaaaaattttccacaaaattccgaggtgcagaaaaaacccgaagaactttttcatctgctccagatacaaactgaaaccgattaatcattgccaaacatttcaggtcatacccatgtatctgaggccttgcaatttcatgccaagtcacctgtgattggtcttttctcttccatggagcaaaaagtctagttgtctgatcagtaccaacagtgataataaattctccttctggatcccagactaggtcttggacaccatcaaagtgtcctgaaatgacaatctctggagtccactctcttgggttaactgtattct

SEQ ID NO: 57200 - DNA, 2358 bp, Homo sapiens
tttttttaggtgtcatttttactttatttaaggaaaaaagggtagggggacaacagtaattttcataatacacagtagacaagttagcactgcaaaaaaaagggctgtgtacttgccaccagtctgctttgcagctttttataattagtaaatttaatgcagtttgtcatttgtattactatttagcaaattaataattggcaaaattagggtaagtgtgctacaactaagacgaaaacctaaataacccataaaaagtcacttaaaataaaccataaatatgtggtgcgcattagtgtaacaaaaccatttttgtaaacattttctccaacgtaacatgtgcatgagaaaagagtaaaaaacactgcactcaatacagaaagggttactctgattttaatacagaaaggttattacttgtgaaagctctgactaaacctagagacatttttgttttgtttggaagagcactcctctaacagttcaatgttccttatgtaatggtgtcattgcaatactgttttcttgtgtaattttgccatattggcacttctgtggagaagttactaccctgtaaaaggggggaaaataattcctttcctaaaagaatctaaacatttcgacgactcccaatctttaacggagaaacttcactgggtccctgcatcaagctatagcaactcaatctggttgacaagggggtgaggctaagacgggaaggaaaaaagccaagtaaagcacagaccaggaagcccccgccgagaaggacaaagggtgttccaatttcagtaacttaagcccaacaatggattcaattcagttcaccacaaacaccaccagagtgcccaccgggtgcctggagctgcacaagcaagccaagcacaactcggtgtgagctcagacccctttacccacctatgggaaagccagcaagttctaagcacttggtaattccaatgaaacaccatttgcatttttttttgtgtaacatttgacttacagacatggagcttcaagtctttggataatgttaagaccattatgccacatcctttgttctctgccttctcccacttagcatcagacattgagcatttcttcaaagacatctgcccaccttttactgttctccacctgtgcctttccttcttctcttgatatgtacacgagtgtgttcactgtggcatgtttcatcttatgaaaagcctaaacatggatataaattacaagcaggaatttaattctaactaaagtcctgtggcgatggaatccagcctacctcaaatccctttaaaggtaggattaatttttcaaccttctctaggttaactacaaaccagtaggcggctttggccttcagcactgctccaaactcatacaaatgaaacatcccatttcccatcttcctttactttccccaaaaagtaagcttctcagcttgtctttacaggtatacacaaaaccaccagctgctgtgtctgcattcatgagtggatgtacttgtcttaccagatgtttgtagctcaaaggagggcctttttcaaaaagatggaaccaggaacaggaaactgacaagaggtcagagtgggtgccaagtgggatgggaagcaaacaggtacaaatggctgctgtgtttaggtgggtgggagcagagggaaaatcccccattttcacaatatacaggaaaattaaccacaaaggaaaaagatcaagcctaaaaaacagcaagtttcttttgatgactgaggttaaagcagccataatgcagttatttccactcagaactcgacaagaggaaagtaagatggcaggactgtgacatggagtcctgatcctttcctgagacggtaatatccttacgggagcttgagtgatgaccatgaagccatgaaacaaattctttctcaagacatttattacaaatgtcatgaatatattcataaagtaaaattggtttaaaaaaacagagaacaagagagcaagtgagaaaacgagaaaagccaggacttcgatattacacctaaaacacagaagatgcccactttatgaataagcagaattaactacattcttaaaatagttttagtgcattgcatttttagaaaagggaaactcccccacccccaagaaaaggttcctgcaacactgaacagtttgtgtgactattctaatgtaaccacctgtctgctaccaacccctctacatcgagaacaatgagatcttgtgtcatgggctgcagttgccccatcaacctctaatggtgaatctggtaaaaacaaagcattctggtttctaaacttgtaagtaaactgcatcagccttaaggctatttcccatcttcatggacagttcttgtgc

SEQ ID NO: 57201 - DNA, 1985 bp, Homo sapiens
ttttttatctgtacagaaatatttactttagatgacaaaagaactcaagatcacagtacacagcagttatttatttaaatacttgaaaaggctgatgatggaaaaaataggtttatcatgagagtttatattcattagatttattttatcatttaaaaaattactgcctctaggttatcctagcctgatatagaacacttggtgacacatgcagttactgtaatatactataacagacacagccattatagaatgatttacacttgggatgaaattcaacagtagtaagggtgactctttatttaaactaaaaacattggtaatatacaaattttttttttatttcattgaaagggctataaaattcaacatactgacaaggaagcaacataatcacatagataacgcctctgctaattgcttttacctaacttcacccttaaaggtgagctgcacactcagctacacaagtttctagactgtgcgatggcttcaaggctggcctaccacaactgactgaaaaaatgtcatgttggtaagctgacactgacttgtatgtttttaaaaatggagagacaatggcaaattgtaccttatgtccttatagaacccaaaggatcattctgagtaaatgtgaaataaataaagtgatccatgagtaaatacaatctctgggctaacttaaacctagaagagtgagccaagtgagcactaacaataccacttagaaatgtctagaaacatcatttctagaactcagcttgggagaccatatcttgcctgaatatgtacatatatttacaaaatattcccttttggcctctggaatttagccattttagtttggctgttagctgttttctttccatatgctagccaatactgcagttataactatcattaaaatactcttatgcatgaattacaaatattaataaagtaactctgcatgtataaatatctcaataattctagcagaacttaaagcattcagaatgtacataaaagtatttgtttttggtagggacagtatttctttttatatcatcgctgtttcaataatgctttgtacatagcaaagccccaaaactgcaaaaacagtagcaccaaaacttgctcgaagccaaaacgtggagctcttgaggtcagcttgtgtcacgtgcggatacatggccattgttgtcaatttaacaaagatatccttactgggggcatcagcagtattgcaagtgaaggcttgtggtggaggcattttgtgtttcctgcagaaatcagtaggtgaaatactgtattcttgtttaacttcatgcaggtctgactttgcagctacgattaagcaaggtattctgctgtccataaagtgttgcttaaaaatcctggcacagtattcaaaggatttgggattgctgacatcatataccaggcatacaacatcacaaatgatctcagcttcagttagaaattccgattctgagatatcatgcaacaacaagtatttctcttgtccatatacataaacagtgttaatcgcatagtaggatttatgatcttcacgaattttcttctgcctcattaagtttcttccaagaagagcctgaagaactccacttttcccacagtttttcactccaattacattacatctgaacacatttctttgagtttgttttttctgcaggtctatctttttatctcttgtcactgtaacagctgaagcttgagactcttgctcagtcaatattgaatagcctagatagcccaaatattccaggcaccgctgtacatctaaataagtcgtgagcgtccactgggaaaggaatccctggtaggttatccagcctctttcattggtacaaactgtgttattcacatctggcccccaaggtatgtaagggaaaactttaaataaatctttaagctcatcaggtgacaaagcacagtctctatccaaatcatgcttgtcaaaggtgctttgcccacgcgta

SEQ ID NO: 57202 - DNA, 530 bp, Homo sapiens
  misc_feature (1)...(530): n = a,t,c or g
tnnnccaangnaancnctttggatatnccatgattacgaatttaatacgactcactatagggaatttggccctcgaggccaagaattcggcacgagagaacttataaacacattgaaccctagatctcaggcttcctgacctaccgccagtggccccttgctggccaccctatagggtcctccttccctggcagccccccatgtgggagaaatacctgattctcccaatctgcagtgggagagctttgctgaattccatcccaaagtcaaacatgggcaagaggtgaggatttcacttttaccctcaagtccgatttgtctgtgattttaaactaactgtgtatgtattgatgtttggaagattgtttgaattttaaagtgataatagtacttaatgttatccagtattgttcattaaatggtgttatcctaaagctgcacttgggatttttacctaacgctttactgattctctcaagcacatggcaaagtttgatttgcactccgttcatttctgacacgttttgctg

SEQ ID NO: 57203 - DNA, 646 bp, Homo sapiens
gcagtgctctgggaataaacagctgccctagccccagagggatccctgcacccaggaggcctcctgacaccagccaaaatcctgacagcagggtctgccctcttgagtgtggggagcccctagtcctttaaggttggctgctaaggcctgtgctccaaagcaacgggctggggcagcctgcagctgcccacccaacctggtcttcacaccagattgcacaggatactgggtcttgtctatcttgatggagaagaggggttcctgcccaggatcttacaacacagcaagtagcatagagctctttccttcctcttttttggggaggttggggtcaggggttgtttctttgagatttaagttttcatttttgaggggtaatcaccttcaagtaaaacagtaatagcaagagtgaaggtactttggaaccactaacacctctgcacagggcagttagccagctcaagttctttttcagagaaagggacttggccagtggtttaagtacctgccccttcacctctcagacgaggcagctgacgaggcagctggcccagtcttgggagtctgctcaggacagtggtggagctgggtcttgaaccccagtctgcacctaaaaaactaaaggaaatggatttttttttttttt

SEQ ID NO: 57204 - DNA, 1962 bp, Homo sapiens
gggaagaaaagaaagaagacaaggtggaaaagttgcagtttgaagaggaggactttccttccttgaatccagaagctggcaaacagcatcagccatgcagacctattgggacaccttctggagtatgggaaaacccgcctagtgccaagcaaccctccaagatgctagttatcaaaaaagtttccaaagaggatcctgctgctgccttctctgctgcattcacctcaccaggatctcaccatgcaaatgggaacaaattgtcatccgtggttccaagtgtctataaggaacctggttcctaagcctgtaccacctccttccaagcctaatgcatgggaaagctaacaggatggagcacaagtcaggatccctttcctctagccgggagtctgcttttaccagtccaatctctgttaccaaaccagtggtactgggctagtggtgcagctctgagttctcccaaagagagtccctccagcaccacccctccaattgagatcagctcctctcgtctgaccaagttgacccgccgaaccaccgacagggaaggagtgagttcctgaaaactctgaaggatgaccggaatggagacttctcagagaatagagactgtgacaagctggaagatttggaggacaacagcacacctgaaccaaaggaaaatggggaggaaggctgtcatcaaaatggtcttgccctccctgtagtggaagaaggggaggttctctcacactctctagaagcagagcacaggttattgaaagctatgggttggcaggaatatcctgaaaatgatgagaattgccttcccctcacagaggatgagctcaaagagttccacatgaagacagagcagctgagaagaaatggctttgggaaagaatggcttcttgcagagccgcagttccagcctgttctccccttggagaagcacttgcaaagcagagtttgaggactcagacaccgaaaccagtagcagtgaaacatccagatgacgatgcctggaagtaggcatataaatgctcacagttaaatctgacccagtaaactctgtgtgtttagggagtatacaaaagaaatcgttcttttccttttcttatgttgttgaatacttcattcacaagggaaataatcatatcccaaagagagagcaattggcttgttttgcttttgttattgttcttccctgttatctgctttatagagagaagtttgtgtggtgggacagattttttaaacacactcatacacacacacacatacacacccagtatatatggggcgatgcacaggtaggagctggcagtgcagggaagaggagacactggtctgcagcaacagcttctactaccagcccttggggcactcacccctgtgatcaagcaatcattgtcaatgacaaagtgactattgaagttataattgtattaaattaatgctaataatttggatattttattttatttttggctgctcgggtaactttagcccttaaccaagcatatgtgggtttttttggttgtttttttttgttttttttttctttttcctttttgggtacagctgtaaaatatttggatataggaaatgttgtgttattcttgcagccttgatattcagggtggattgtaaaatataaatttttgtgagatttcaaagattaagattattttgataacattatttacagatttaaaagatgtggttatcacaagtctcgagggggaaactactgcataaaataactaacttggaataaatattttgcatcagtttggattgtcttgtgtaagaagtatattttctttaaaattagatgagtggattcttttttaggggaaatatttttagaagttggggggaaatgtgaattcagacacaactgtttctctattttagcagatacttttttgatgcagaaaaacctgtgcaataaattaccagtaataaagtcagaaacca

SEQ ID NO: 57205 - DNA, 650 bp, Homo sapiens
ctttccaaaatggcagcctccagtcgcgcacaagtgttatctctgtaccgggcgatgctgagagagagcaagcgtttcagcgcctacaattacagaacatatgctgtcaggaggataagagatgccttcagagaaaataaaaatgtaaaggatcctgtagaaattcaaaccctagtgaataaagcccaagagagaccttggagtaattcgtcgacaggtccacattggccaactgtattcaactgacaagctgatcattgagaatcgagacatgcccaggacctagcaagccggggaccagccaccagtggcggccagggaccaccttcagcatccactctctgtttgagatgggggctcccaaaaccagcttacaatagccttttgcgctgcctgtcctgtgggagctgataaaccaagtcacatttgcattctgttgcaggcttagtgaaaaaggactgctgtctttccttggttcaagtgttagaatggagagctggagttcgttcagaatagtgctgtgtgttaccacgtctcccctgcaccccattcctaccttgtagctcatgaccattgtgtatagcatttctacactttgtttcttggtccttggcaataaaaagaatgatctccctgagcctttgacccca

SEQ ID NO: 57206 - DNA, 1768 bp, Homo sapiens
  misc_feature (1)...(1768): n = a,t,c or g
gcgggcccgccgcgccattcaccgccgcgcgctctgacgccggcataagggccatgtgttctgaaattattttgaggcaagaagttttgaaagatggtttccacagagaccttttaatcaaagtgaagtttggggaaagcattgaggacttgcacacctgccgtctcttaattaaacaggacattcctgcaggactttatgtggatccgtatgagttggcttcattacgagagagaaacataacagaggcagtgatggtttcagaaaattttgatatagaggcccctaactatttgtccaaggagtctgaagttctcatttatgccagacgagattcacagtgcattgactgttttcaagcctttttgcctgtgcactgccgctatcatcggccgcacagtgaagatggagaagcctcgattgtggtcaataacccagatttgttgatgttttgtgaccaagagttcccgattttgaaatgctgggctcactcagaagtggcagccccttgtgctttggagaatgaggatatctgccaatggaacaagatgaagtataaatcagtatataagaatgtgattctacaagttccagtgggactgactgtacatacctctctagtatgttctgtgactctgctcattacaatcctgtgctctacattgatccttgtagcagttttcaaatatggccatttttccctataagttttatgtagttaaatgcttcctagaaacctaaataagatctattaatttctgacgagaggtgttcttctagaattaattacttttatcttttgtcttcatttgtggccaaaattatgtttactagaggaaatttgggatcattctcagctaattccaaaatgtagtgctctattgcatggatccttggtaatcctcaagcatcagatgccataaggggaaacttaattctgctaaattaatgtttattttgtgagaagtgactttatcttcatttggggtagaaaaattatttctttatgtagtagagacaaattattctcattttgcaagtactttcaatttaagctacaaattgagaaaaccgttataaataagaataaaannnnnnnnnnnnnnnnnnnnnnnnnnnnnnnnnnnnnnnnnnnnnnnnnnnnnnnnnnnnnnnnnnnnnnnnnnnnnnnnnnnnnnnnnnnnnnnnnnnnnnnnnnnnnnnnnnnnnnnnnnnnnnnnnnnnnnnnnnnnnnnnnnnnnnnnnnnnnnnnnnnnnnnnnnnnnnnnnnnnnnnnnnnnnnnnnnnnnnnnnnnnnnnnnnnnnnnnnnnnnnnnnnnnnnnnnnnnnnnnnnnnnnnnnnnnnnnnnnnnnnnnnnnnnnnnnnnnnnnnnnnnnnnnnnnnnnnnnnnttaaaataatttggatgaaaatcatgtttatttaaatagtaatgtcatgagactattaaagatgtgccagagtttcaatgaaaatcattaaagtaggacagctaagaaattaatattaatatcaaaattattgataatcttaaattattgattattccttaacgcactccattctccttttacattttatcatgtttcttttgaatatatgaattggcaaaggacttgatgaaactgagtactaagatttggtacagagtatgtcaggaagacaactcagattgccattttaaataaagttgtacatgaacaataattggaatcatcaggtaatttttttaaacaaaggttcttcatttactgttatgattggaaaa

SEQ ID NO: 57207 - DNA, 1425 bp, Homo sapiens
gaccacgaatttaatacgactcactatagggaatttggccctcgaggccaagaattcggcacgaggcagaatggcatctttttgctgctgccccatggcatggagggcatgggtccagaacattcctccgcccgcccatagcggttcttgcagatgtgcaacgatgacccagatgtcctgccagaccttaaagaagccaacttcgacatcaatcagctatatgactgcaattgggttgttgtcaactgctccactcctggcaacttcttccacgtgctacgacgccagatcctgctgcccttccgcaagccgctgattatcttcacacctaaatctctgctgaggcacccagaggccaagtccagctttgaccaaatggtatccgggaccagcttccagcgggtgattcctgaagatggggccgcagcacgggcccctgagcaggtgcagcggctcatcttctgcacgggaaaggtgtactatgacctggtgaaggagcggagcagccaggacctgggaggagaaagtggccatcacgcgcctggagcagatctctccattccccttcgacctgatcaagcaggaggcagagcaagtacccaggtgcggagctggcctggtgtcaggaggagcacaagaacatgggctactatgactacatcagcccacgcttcatgaccatcctgaggcgcgcacggcccatatggtatgttggccgggacccagcggctgcaccagccacaggaaacaggaacactcacctggtgtcactgaagaagtttctggatactgccttcaatctccaggcctttgagggcaagacattttagagctgggcaaaacctgtgtaggtctcgctgtgggtttgctggggaccaagggggtgatgaaaaggggaggggcggagctcctgcccaagagaggggctgtggggccccaggataaaacagacacagtgacagggccaagagccagcactgctggccttggtgtcatgccagaatctaccaggactgagggagccagaggagtcctataggcaggctactgtgctggagcatcccccagctgctcccatcttgctggaatttcttgggcggcttctccacctgtatctcaagacagacacccgggggcctgtgtctgtggccgctcccatcccgcgagccctggctgctgctcgccccaccctcgcttatctgtagattcaaagcgatgttctcttctgtgctcttagaagtagggagttcagcagtaacagccaggtgaagcgaacctgctgggtgatttgtttgcgctctgttttatggggcattcctgcgagatgtgtcagcttctgtgtgaaatgcagccacagctcatgtgtaccaaagtagaaaaccaaatcacagagaaataaaaacatgcttcagagagaaaaaaaaa

SEQ ID NO: 57208 - DNA, 2432 bp, Homo sapiens
ggactccctccccagctcggtcattagtgccatcagtggacagctgcagtcctacagcgatgcctgtgaagtgctgtctgtcgtacaagtcactctggggtttctgagcacagctggtggggatccaaacatgcagctgaatgtgtatactcaagacatcctgcaaatgggtgatcagacgattcacgtgttaaaggccttaaacagatgccagttaaaacacaccattgccctctggcagttcctgtctgctcataagtctgaacagctgctgcggctgcacaaagagccatttggggaaatcagttcaaggtacaaagcggatctgagcccggaaaatgctaagctcctcagcacattcctaaatcagactggcctagacgccttcctgctagagctgcacgaaatgataatcttgaaactaaagaacccccaaacccaaaccgaggagcgcttccgccctcagtggagcctgagagacactctcgtaagttacatgcaaactaaagaaagtgaaattcttcctgaaatggcatctcagttcccagaagagatactgctcgccagctgtgtctcagtgtggaaaacagctgctgtgctgaaatggaatcgagaaatgagatagaattatttcctcagctatctttggatgactttggagagaagactcctctctcctcgtctgcggcgtggacttgatcatggactggtgcctttgcattcagaaggagagctgtcagcgtagcaccgaattcaagaccaaggcgtgctacctgagctgacagctttttgaaagccgagctgtttctgaaccatgtacatacatgttctgaaactttctcatcattttatgagtactgttcattgagagatgacaatgaagattagatgaaattggaaataaaccaacattgtttacattccaggagacttgtagctcagccacacacgcagtaatgacctgtgcccgttcgcctctggcactgcccacccctctttttttttttcttctaattctgtactcacaaaagagaatctcattttcttctttcttccattcccttaaattctgagtactgtacatatatttctgggttcccacgatgatgtgaaaaactaccagactgttttttgtcttctcacaaagacaagaaaaatcagggcattttgtgagtgccttaagatcaaactaacaagatctgaccctctcccctcacagtgagccactgccccacttcagagggtaagagccaaaagcctcattgtgaaaggcactggacttggaccagggacaccatcagggccttggttttctcacgcataaaatggagagtggattaatcgccaaagattcttctgatctgacattttgaaattgtgagagaaactagatgactgtaaacttggtcacaggcctggttctggcagttctttgcggacttttttctagcattatgccaaataaacatgcagtctcagtgtgctctcgcatgtatgaatatctagtcctttctgtggttctcagccaagacataaaaactaggactcagagcacatacaaaaccagttatgtttcggaaagagggaaaagagtccccgagcccggatcttgtgctgcttttctcactgacgtgttgccttttttctttacaaaatctgctttgatacttaggacctctctggactaatttctcttcctagacagctcagcacagctattgatatgttagaggcagtatccttaatattcattctaaatgagttaacgacttaacttgaaattgggcctaaggagtgagaactacaaaaatacaaaatgcttgtccaggactcagccatgcacaccttgagcagcgccggcaggaggcacggaaggaactgtgctccgttctcctcactgtcatggtgccacccagtgtctgatgaagggcagagtgacccagactgcaggcagtaactgacttcacacagtccctggcatttagtcatctgtgattgttttatcactctggactgtgcagagccacctgccaccgagatctgcattccgactgcctatgaacgggtgtgggggccgggggctggcttgctgaagtcttcaacttgcactcggagctcctttgatacctcagagctggctgtcaggtggcagctcacacccagactcactggccacacctcagcagggggggagtcgagtgtcagtctctttctgtgaaggctttttttttcctttggcctgggaatttttcccatttttatgaaggggttttaaattgtttcattttgtgtgctgtgcttcaaagccttaactgtcaaatcttgcattatcttgtttgtacagaaatatactggcctagcagaggcaaaaaaaaaaaaaaatgaattttattttacttgtcacacctgtcttaataaactggagttttgct

SEQ ID NO: 57209 - DNA, 25307 bp, Homo sapiens
  misc_feature (1)...(25307): n = a,t,c or g
gttttttttttggagtctttttttttttttaattaagtcaaatgcagagcaatttcccacactatatgcaggtgtcagaatgaggtatataaaacatgtatatagagaaatgcctttatagaaaagtagaaaccagtaatattctcttctccagcatcactaacaccaagagaccacctgaggtctaggtccccaaagcagatggctccatagaaagccccactaacccctgtctccacattgggcagtggaagggttctggaaaggaagctctatggctaggagctgccaaggcctcttgagtgtgacatcacaggttagaggccctgctgagctgctagcacagtgcagtggagaaatgttgcgctccgtcaggaagctgggctcttgccatgccagtagcttgcttacgaccttgggcaagtcactttttcctctctggggtcctgtgtccaaaaggcttaatgagccctttctaatggttctttgattgctttatgagttaggggctgtgaccctagccccagtgccctacaggaaggtgctgacctggacgcccgcaggaccacctgctaaatcaggcccacttggggagcaagccctgaagtgctttattaccttgcctctgagcttagtttccaggttagcctcttagaagcagctcaggaaggccccacagtataattcccataggttagctaactactctcttacctgtgcaaaatgaagacaggtcactatccatccctgaagagaaactggggcatcccaggtctgcctctgctcctgtggccaaaggcggagcagatccttctctatcctcttcctaagtggaatgctcagtgcaattcttcctttccttatgaaacaggaagagtccctgggcccaggcctggcccacggttgtcaaggcacatcattgccagcaagctgaagcataccagcagccacaacctagatctcattcccaacccaaagttctgacttctgtacaaactcgtttccagttctcagaggtcagtagggagttccatcccaaatattttaaaaactaaatatattttttcaatgccatcccttgacctgctttaccttaaccatgaataacagtgtatgccactcaagcccacagtggagactgaggccatcttagtaaagcacagaggagcctgggggagctccccgtctatccctggttcagttccaggggtgcaggcaatgtttggaagcccttagcagcagcatcactgtgggagctgccactgtctccatccacagacaaaatctgctccaagggatggacaaggagcactgttaggaccctacccagccttaccctcagcccacagggccacctgcttctgtcactcttactaggattcgccaaaaaagcgggggagtggtagggttttaaccagaacacaaagtggtagttcctcctagctgtaggagggtgggctgtcctgcaccagtgtctgcatgggctcctgcccactgggggggctcaggccccaggagtcccggcctggcccataaggggggtggtgccctcctgagggtcaactggagtctggctggtgtggaccacgacagtcttctcatccacaatctcacaggtggggttggtgaaggcagacaagggcagagtgattcgctgcatctccctctcacatactttctgatcatgctgttctttcaaatccttccccctggcaggaaaaaaacaaacaaacattcaggctatgcctcctgcatagctttgctcattagatagcatccctgaggctcagcaagagcagcagcttgccattgtcacaacaaatcagtggctgagccaggacccaaactcaggtccaggattctaggatatccattctgcaagacggcgttaaactcaacaagaagctcctgcacctctggtcttaggttctccatctgtaaaatagggtgacagcagtatggacttcatacagcttcaccggggctcaatgaaaataaagtaaaggacagagacnnnnnnnnnnnnnnnnnnnnnnnnnnnnnnnnnnnnnnnnnnnnnnnnnnnnnnnnnnnnnnnnnnnnnnnnnnnnnnnnnnnnnnnnnnnnnnnnnnnnnnnnnnnnnnnnnnnnnnnnnnnnnnnnnnnngatagagactcttaaagcaagacacagttttgttctttcagccccagagacccagagaactatctgaacttcggacctaacccataaagttgtccagaaaactgacctgatcatcctgctgtgagacagcctcccagagatgcttattacttttaataagcatctactaaatgtcagctacaggcnnnnnnnnnnnnnnnnnnnnnnnnnnnnnnnnnnnnnnnnnnnnnnnnnnnnnnnnnnnnnnnnnnnnnnnnnnnnnnnnnnnnnnnnnnnnnnnnnnnnnnnnnnnnnnnnnnnnnnnnnnnnnnnnnnnnnnnnnnnnnnnnnnnnnnnnnnnnnnnnnnnnnnnnnnnnnnnnnnnnnnnnnnnnnnnnnnnnnnnnnnnnnnnnnnnnnnnnnnnnnnnnnnnnnnnnnnnnnnnnnnnnnnnnnnnnnnnnnnnnnnnnnnnnnnnnnnnnnnnnnnnnnnnnnnnnnnaatccctgttttatagatgaagaaactgaggcttttgagtttaacttccgcgccttgctttcctcagcaacctcctttacctgtggccagctgagctgctgctaatggccaggctgcatcatatacaagtctttaggggaaaaaaatcaatttgtattaatgaggcagagcagggctggaagagcagtcaagggtaaagaaagcagatgctggcactagtctggattagtctcatccatttggaagcctggaagcacactcaatcccatgtgcctgctgttaatggtgcctgtgagtcctagagatgcagtggctgctcccagctcccttgggtgacctttgagaggccactaggcctgctacactgaccatcaggcagcctagccccttctcactgcttgggggtagggggtggttagcctgggtgttgtgtggcagccaagaaagaacaaaaggcttgttcactgacttagttcctctcctaagggagtggagtggtgttgacttacagtttttccctcccctttttatcagaaaataagacctccctctgaagctagtgcagacagtacacttagctcctcagtcacagactggccatttgaacctcgtggcctagactaccaggacaaagacccggccaggctgagctcccacccacccccatttacagccctccctccctaagaggaagcctggtgcctgcccacccatcccagccagggaaaagctccatcccattaggcaagcctcatggcctttggcagagctcaaggcttacagtacctaccctgactgcttgctccaaggccagggtgggactgggagctgagctggccagagagagcaggtgtagaggaagctgctgcctacctccaacttcctctcccagagtatggaagcaccacagacctcattcagactacacaggtcgtcttcaattattactctgagccgctgctattttcccagtcagaggcagtgctgtgccacactgctgctcaggaaaagttcccaaggcagctacaggtaataatcacaagagcagccaacatttatttcctgctttcttaataagtaaggccctactgtatgctgcctccaacttcctctcccaggctatagaacaccaattgtatgcctaaactatactgtccaatttcatcctcacaacctatgtggtatctattttgatctgtttcatagataggaaggcagatgcagagaagttacactatttgttcaagcaaatggcagagctgggatttgaacccagtcttagcaccggcaatattgtctttttaggaaatagagttgggagtatcaccatatctaacccccttacagtacagatgaagaaattgaggtccagagaaggtaaataacttgtccagtgtcacatccagaataggtgaaagttccagaactagatcttgtttcttctgactttaaacccagcctttttttaaatttctatttttcctactttcctttgcaattcaaagcaaatttacatgaggctacttggcctcactggacttgctggagatactaatactcctcagacatacattactagctgtgtagcctggccattgtacttaactctgctaggtctcagctcctcactgtaaaatctaacagtgctcctagtgtggttgtgaggcttagtcaaggtaatcaggnnnnnnnnnnnnnnnnnnnnnnnnnnnnnnnnnnnnnnnnnnnnnnnnnnnnnnnnnnnnnnnnnnnnnnnnnnnnnnnnnnnnnnnnnnnnnnnnnnnnnnnnnnnnnnnnnnnnnnnnnnnnnnnnnnnnnnnnnnnnnnnnnnnnnnnnnnnnnnnnnnnnnnnnnnnnnnnnnnnnnnnnnnnnnnnnnnnnnnnnnnnnnnnnnnnnnnnnnnnnnnnnnnnnnnnnnnnnnnnnnnnnnnnnnnnnnnnnnnnnnnnnnnttaagaaaaaaagataatcagggaagagcatacagtagggccttacttattaagaaagcatgaaataaatgttggctgctattgtgattattacctgattggtgtgctattgtttctgtttacatttaatacttataatcttagatgggtagatgtggagggaggatatatccccatttaacagacaagataccaaggctcagagggcacctgaacccacactcaacctacagctcttttcaggacactctgctctctgactttaggaagagatgaaggctgcaagcttgtttttaagcccacatgcggtttcctgttgtacagtctgttctcagagcagttctgctgaagaaaggggtgatctggtcgttagtgacggggagtctgatgactgggtgccttgccctgagtttacaggaaaataaattttaggcctcagggcagtctcgtgacagcctagaggaacaaatctagaagaaaaaagacttccactggacaccagaactgagctcagaattaagaatgtttagtcagttcaagcacctggaaggcctggaaactgtcacaggattgcaggacagccaaatgctgttgggtggctgaggaaaaaggagatagttcaaggactaaactcagccaatgtggcttaggtctgcttatgaattgtaaggccagggccactatgtcattaactctgaaatgaacaagcaggtgtccctggacctgcatgtcaagcatcccattgtgggaaacaacctcagactgggcgtcaggatgtcctctcaagtcaatactttccctctctggacctctgcttcctgcatcataagaaatcagagagtactagtccattacccannnnnnnnnnnnnnnnnnnnnnnnnnnnnnnnnnnnnnnnnnnnnnnnnnnnnnnnnnnnnnnnnnnnnnnnnnnnnnnnnnnnnnnnnnnnnnnnnnnnnnnnnnnnnnnnnnnnnnnnnnnnnnnnnnnnnnnnnnnnnnnnnnnnnnnnnnnnnnnnnnnnnnnnnnnnnnnnnnnnnnnnnnnnnnnnnnnnnnnnnnnnnnnnnnnnnnnnnnnnnnnnnnnnnnnnnnnnnnnnnnnnnnnnnnnnnnnnnnnnnnnnnnnnnnnnnnnnnnnnnnnnnnnnnnnnnnnnnnnnnnnnncattacctacnnnnnnnnnnnnnnnnnnnnnnnnnnnnnnnnnnnnnnnnnnnnnnnnnnnnnnnnnnnnnnnnnnnnnnnnnnnnnnnnnnnnnnnnnnnnnnnnnnnnnnnnnnnnnnnnnnnnnnnnnnnnnnnnnnnnnnnnnnnnnnnnnnnnnnnnnnnnnnnnnnnnnnnnnnnnnnnnnnnnnnnnnnnnnnnnnnnnnnnnnnnnnnnnnnnnnnnnnnnnnnnnnnnnnnnnnnnnnnnnnnnnnnnnnnnnnnnnnnnnnnnnnnnnnnnnnnnnnnnnnnnnnnnnnnnnnnnnnnnnnnnncattttatagaaaagaaaaacagccatcatttactgaccacctactatgtgccacaccctgagctaagtagtcaaaagccatagctccacaccatgatgtggagtaggaaattgaagcaatttgcccagggtcacagagatagctagttaaaggacttctctccaccaaatgctaggtgtgtaacctcaggtaacgtatataatcccctcttgcctcagtttcctcatctgtaaattggagatgacagcatttacctcataagggtgattatgagttaaagcatgtgcttcaagcagtgtctggcatacggtacatgtttgctactgctgttattattatacccaaacttcccctttttcatctgtaatgaggaggttgactacaaggcctttaaagatgccctgctgggtgatccactgaggctgtgggctcagacatggccctcatcactggaaaatgcaggctgcatgccaggcatggtggttcatgccnnnnnnnnnnnnnnnnnnnnnnnnnnnnnnnnnnnnnnnnnnnnnnnnnnnnnnnnnnnnnnnnnnnnnnnnnnnnnnnnnnnnnnnnnnnnnnnnnnnnnnnnnnnnnnnnnnnnnnnnnnnnnnnnnnnnnnnnnnnnnnnnnnnngggggtgggtgggggtaattacttgcgcnnnnnnnnnnnnnnnnnnnnnnnnnnnnnnnnnnnnnnnnnnnnnnnnnnnnnnnnnnnnnnnnnnnnnnnnnnnnnnnnnnnnntcnnnnnnnnnnnnnnnnnnnnnnnnnnnnnnnnnnnnnnnnnnnnnnnnnnnnnnnnnnnnnnnaaatgcaggctactgtgtcactttcctcacaggaagttttctcagaccacagaggagaatattacagacacccagggctagaagtcaaatcccccgattttgcccaagaatggcaaataattttccacaatcagccagtgctgtaaagatgaatgccagtctggcttaccatcatgcaccagtcactgacggacatctcgtgggacctttcaaaataagcattcttctcctgctgtcccagccacaggtcatgtccttgagtttcacaagtagcctctttggctttctcacacgtggtgaagagtggcaaacagactttctgttctccaactcacttttttcttccctagcagaggagatcccactgcttatagctcaggaaatttaagcctcaactgcaacagtggctggaaaccttttctagtagcagaattttataactcacagaaagaatttggtcttaaggtccctgcaatcagtgtcaagcctgatttctgcagtgccactcacttcaatgccaggcatgtgggatcagacagcagggaatttgctatcaaaagagctgggtctgaatccaggttctgccactcctaggctatgtgactttgagcaagtctctgacagaggcttcttcatttgtaaaatgcggaacaagaacatccctcacaaggcttttaagtgaggtgtaaaggcaccaaaggaaagggtttgtccaaggtcagcagataaagactaggaccaagtctctacatcttgagctgattttcaacatcttgcttccttttgggtaagaaagccacaaagtttgactttgtgtaccttcctcccctcctcctaagagggcccagaagagaagctactgacctcttgtaggagtagcccaagatgatgccagctccgatggcaatgatgatcaccatcatggtaatgcccagcacgtagcctgccaaggataggacacaaggtcccattagccacaccctagacaatcagcaaatgacatctcttgatgaatcccaacgagggcaggggtgggggaccgtcatacccagagttcccaggtcctttttctccttggagttcatccgcacccgctggctgatcccaatcactggctgcacagctgccgcctcactccgagcgggcagggcgttggcaggagcgaacacctgcacctcatctgcacctggcccttcagacgcttcctggatttctgtcgtgaaggctggcagggcctgggaggtggtctctggagatgaggtgggaaacagctctcatcagggactgccctgagtgaattccacagctgaacctggcctgagtgttagggtagatgaaggtgggtcacctaagaatttccccccacacacaacccaaagtcaaattctgccccagaggtaagatcaggcctgagagggctgaaccatctcagggacaaggcaaatgagagaggaaggccgtagggaagggcttctctcctacctcccacgtctttatctgtccaaatccttgctatttcccaaggcccctctcggttgcgttcttctgcaggggattccccccacttctacttcaggaaacaacccatgcttcctttgagcagctcacatctaagcgtacgctctgtgccagtccttaggtaaaatgttttactttnnnnnnnnnnnnnnnnnnnnnnnnnnnnnnnnnnnnnnnnnnnnnnnnnnnnnnnnnnnnnnnnnnnnnnnnnnnnnnnnnnnnnnnnnnnnnnnnnnnnnnnnnnnnnnnnnnnnnnnnnnnnnnnnnnnnnnnnnnnnnnnnnnnnnnnnnnnnnnnnnnnnnnnnnnnnnnnnnnnnnnnnnnnnnnnnnnnnnnnnnnnnnnnnnnnnnnnnnnnnnnnnnnnnnnnnnnnnnnnnnnnnnnnnnnnnnnnnnnnnnnnnnnnnnnnnnnnnnnnnnnnnnnnnnnnnnnnnnnnnnnnnnntgctttattttgattatcccatttaaacctagaaaactctcttgctgctttgggagcaaaaagcctgcgctctggaatctaagaaacgtgaattcaaatctgtcccctgccattgcctttggtaaatcgcttaacttctctgaagctcagatgcctcaaacgacttcttcccgcggtgtgtgtcaggggaggttggggagctggggttgtgagcagtgtgggtctagcacactgcagacgctccgcaaacggtcaataaacgctgaggggccaaaagccactcctcaggacgcgcggcggagagacctagcctcaccccagcctcgccccgcgcagttgtttacaagcgctcgcggcggatgagctcatacgagtggcggcggcggccaataggctttgagccccgcggcctggagacagccctggccaatcggacggcgcggaggcggagcggggccggccggcatcgcgcggccgcacgtgcgccacgagtgtctcagccgcttcctgtcagcgccaggagcggggattcccggggtcccgggcaggtacctggacagcgcaggtcctcgcaaggccgtttctcagggacgccggcctcgccactgacgtagcaccagggcccgcgcgggtcctcgtccgggtttcggcagtaactgtgattgccggcccctaagagaggagagaaggaaatgtgtgccggggctggcaccgggaacgcggccgccgcccgccagccccggggccgtcccccggaggacacttacccgacacgggggccgaggccagcccgctctgcgcgtccagccagttgaggcagcggaggcccggcgcgggggaggtctggtcctcccggtacaggtggccgttgtcccagaaacagcctgtgaggaaaagaagcccccggacacagaatagcgggcagcgaacggaagacgcccagcgtggcggacaggggagccgggaccacccgggctgaacctcagcctggttaggggaccccgggccctgctgggcctccctctcctctcgtggcaacacccccacgccccacgcaccccccccccccaactccacgcacacctcagggtgtgaagcccccagcctgtgcctgtcccccagtcaacgctcagagactgttaggttttatttatttttgaaacctggaaagcgctgcagaagtgcaaagcgttgttactcttgaacttgtgaccactttggaggaggagatggagaggaggaggcctggcttagggtccctttgaggagctgggagttttgggacggggggcgcccagacgtgacatttgtccctgtgttgtaatggccacgttacataaactccggtgtttcctccttcacggatacggccaccttctgcccgtttaaaaggcaaatactccctcccaggagaattctccaggagccttgactccgtcaggcaaaagattcaagacagcctcaaacggaggaaaccggcctcatcgctgactggatgagactccaagctcccactcccctctgcaggagaaccacagaaggaggctggggaaggaggaccacaccatgcaaagggcttagaaagaacaggacttggggagtaggggagatgaacccccaagctccatccactcatgagcaaggaaaggcagagagaaagtggcttcttgcctttgttcttaatggcaaagatggagctgcaagcccctgacaaggaaaggaggggtggaaaagctttcacgggacaacagaaaccggctaaacgcttcgtttcctgtcatcctggccctgtttgggaaatagggggctttaccccttctgtttcatgaagttgctgcggaaaggaaagattgtaatctcacctccagatccataggcttctgctaggagcatgttgctgacgaggaatgcttgtacccaggccaacagcatccttgcctccttcgtcttgcaggtgattgaacgaccagtgtttaaccgaggcccccttggcggcggctctgcctcccagtcccagccttgcagtcagacctgcccttgttatgctgttctggtaaacagcctctctttagaactgggagcttcccagctagcttgctgcagcgcgagctgtttttcagctgaaaggcgccccctgggtcctaagcctcctaggtcatgcaaaatctaactgagccaagaaaggaactcagccaagagatatgcaggttgtgcttagcagccgatcagtttgagacctgcgaggccgcatccccagggtttttcatctcttctgtttccatttgtgtgagtacagaaaaaataattctatcaaggggcatcatgggatgtgggaaattataagcactaaaacacagaacaacttagggagctatgcacccaggaggaattcatgaccacataggggggaaaaaataagagtttctggtggggagtggagtaatagnnnnnnnnnnnnnnnnnnnnnnnnnnnnnnnnnnnnnnnnnnnnnnnnnnnnnnnnnnnnnnnnnnnnnnnnnnnnnnnnnnnnnnnnnnnnnnnnnnnnngggttctcgcaattctgcctcagtctccggagtagctggattttttttttccctcactctataggaaatccatttgctgtaatttatatccatcattaaatctcaccatatccatttgacttaggccttttggagttaggcagaagggcccttcttcctgtttggctgacagctcccaggcagcctcagtaaactgagagagagagcagagtgattcgtcaagactaccttgtgnnnnnnnnnnnnnnnnnnnnnnnnnnnnnnnnnnnnnnnnnnnnnnnnnnnnnnnnnnnnnnnnnnnnnnnnnnnnnnnnnnnnnnnnnnnnnnnnnnnnnnnnnnnnnnnnnnnnnnnnnnnnnnnnnnnnnnnnnnnnnnnnnnnnnnnnnnnnnnnnnnnagtaacactttatacccatccttgaaaaagaaaaagggcctttatgaacactgacannnnnnnnnnnnnnnnnnnnnnnnnnnnnnnnnnnnnngtgtaacttggccagggtcaaatctgtcacattgctttttcttacatttgaggttttttggggtgttgtatatagtaggactatagaaggagtatctttagttgaaaacacatgttatgcaaacatggaaaaatttgctcagctacattgtaatagtctaccctttctgccagccctaaattgtatagaggaatttaagtaaaatgtttgcttttttttttttccctcaccctataggaaatccatttgctgtaatttatatccatcattaaatctcaccatatccatttgactgaggccttttggagtaggcagaagggcccttcttcctgtttggctgacagctcaagttcccaggcagcctcagtaaactgagagatagagcagagtgattcgtcaagactaccttgtgactcagtcagatcccaaaatagaaatggggaaactctgtttcaatcttgcaggctgtaatttaaggaggaaaacaactaatttttttttgggtgggggggacagagnnnnnnnnnnnnnnnnnnnnnnnnnnnnnnnnnnnnnnnnnnnnnnnnnnnnnnnnnnnnnnnnnnnnnnnnnnnnnnnnnnnnnnnnnnnnnnnnnnnnnnnnnnnnnnnnnnnnnnnnnnnnnnnnnnnnnnnnnnnnnnnnnnnnnnnnnnnnnnnnnnnnnnnnnnnnnnnnnnnnnnnnnnnnnnnnnnnnnnnnnnnnnnnnnnnnnnnnnnnnnnnnnnnnnnnnnnnnnnnnnnnnnnnnnnnnnnnnnnnnnnnnnnnnnnnnnnnnnntttactaaataaattttaaaagctttatcagggaagaaaactagtgtcaattcaactaatctgaggtgaatctgaattcactacactcatagaaaggatagagagatacatttaattcactctttaaaatagtttactgataatgtttgatccctttcgtccatttaataagatagattgctttgtttttgcaatcactctcctatctccccacccaagcttctgatcctctgactcttgacttggtctaccctgtgaattacaccctagagtctgtaaatttattcacacatattcatacacagatacggtagcattttaaaatttggccaggtatagtggctcacacttgtaaatcccagcacttgggaggccaaggtgggaggannnnnnnnnnnnnnnnnnnnnnnnnnnnnnnnnnnnnnnnnnnnnnnnnnnnnnnnnnnnnnnnnnnnnnggtaggtgtggtggcactcatctgtagtcccacctnnnnnnnnnnnnnnnnnnnnnnnnnnnnnnnnnnnnnnnnnnnnnnnnnnnnnnnnnnnnnnnnnnnnnnnnnnnnnnnnnnnnnnnnnnnnnnnnnnnnnnnnnnnnnnnnnnnnnnnnnnnnnnnnnnnnnnnnnnnnnnnnnnnnnnnnnnnnnnnnnnnnnnnnnnnnnnnnnnnnnnnnnnnnnnnnnnnnnnnnnnnnnnnnnnnnnnnnnnnnnnnnnnnnnnnnnnnnnnnnnnnnnnnnnnnnnnnnnnnnnnnnnnnnnnnnnnnnnnnnnnnnnnnnnnnnnnnnnnnnnnnnnnnnnnnnnnnnnnnnnnnnnnnnnnnnnnnnnnnnnnnnnnnnnnnnnnnnnnnnnnnnnnnnnnnnnnnnnnnnnnnnnnnnnnnnnnnnnnnnnnnnnnnaatttttttttaatttaacaattccaatataatagggatttttaaattttattaattttacaaatatttttgagaatctgctacatgctaaatatagttgtagatactgggaatacatctgtgaacaaaatatttgaaatctctgccctcatgaagcttatattctaattgggagagacatgataaacatgtaaaatattaggtaatcttaagcgttatgcgaaaaaaagtgaagcagagtaagggagagagtaacagggtgatattccacttgccaaagaaagcatatactattttcagggaagtagtaggatatttctatagcaaaaagctgaaggggaagggctctttgcacaatttttggtgggaggggtcctatgtttactcttacagtgcagcaggagacatatgatgtgcattttgtttcattacataaaatacaggcttgaggaaatgagagtagttttaaatttcagaacagcagaaggttctttgaagttggtcactcagcacgtaatgtattgcctttgtatgcagcgagggttcatttattgatatctgatgaaatgctcctccttagattttgaagggctacttttgctggattgtaatacttttccctctgattacggtagagacaggctataacaggccagcacttgtactagtttcagattatctaccatgcctatgtagggatgctagtatttctacctcagaagcccaaggcttctttacctgttgctgttgtcatctaattttcctatttaaaaaatactattttccctaacttaccttgatactcagcaaaaccatattttgtgtcatgtgtcttatcaggaacagcactgcctagaaaagatacaaagccagaagatttttttcagcttagtcatgtctattttttctcccctgtaactaagacatttatcagcatgattgattggatttttttagggggcgagggaatgaaggacttgattctcagtccttcagagatgtactctaacaggttcagtaccttccttcctcaaggcaatcagatttggtttagaaatgtgcctcttgtctttttctgatgatccagatttgaactttgctccatttattggggcaagatggccatattttatggcctgtagttagcgcagacttcagatttcttctgaaaatatcacggcaataataatgtgatacagtgctactcaaatacttaaattttgagttgtttatatccttgaagacaacattgtgaaacataatactcatatcctcagtttcgtattagatgattactaatccagagacaaagctgtgcgatgaaatcaggaaatattctccagagtgtttcccaagaaggatgggcacttcattttgttaacaggatatgttagtgagtgaactctaataaggaagttataaagctgttaaaaggcttaagaatccttttttgtcagcaaaagagggccaaagtgttggtaaaaatctttggaataagacctaatgagttggctccagcaattcactttatatgatgtgctgtagaagtagctactgaaattgtgctcaatattttggtgtataattacaaactgagcaggaatggttttatgcagcttgttagggaaataatattctagtcaaaatatgtaaacaccaaggctgtttctttgaagtgtagccttcaaagagttaggttatatccattttgtgtatgcttggtacatagtttagttttaataaatgcttgaaataaaggggaaaagcagagtaccatgtaaggaaaagcagtctaatgagccgacagagagaacagattttttttagggtaaactacagaatagccaagaaggcttgtcaatcacaggttgctttcagaaataagacattccacactggaaactaaggagccacaaaggcagagaacttgggaacatgtcactggtgttgagaaataaaaggaagaataaattctgaatgagagtggattttgatttagcttagataacatggttttcacattgatgaaaacagtcttcagtgtcacaggaagaatgcagaaactacaaacttaattggttcataaggctagactgtcaatataaaaggtgaattcacccagtaagctacaattatgcctctcttggaaggggatctgatattctccaatttcagtaaactggatttgcagttttaaaatgtattaacacccagtatgagcttagtactgacttttaaagtaggagaagcagtataccaaataatttatgagcgtaggctttggggnnnnnnnnnnnnnnnnnnnnnnnnnnnnnnnnnnnnnnnnnnnnnnnnnnnnnnnnnnnnnnnnnnnnnnnnnnnnnnnnnnnnnnnnnnnnnnnnnnnnnnnnnnnnnnnnnnnnnnnnnnnnnnnnnnnnnnnnnnnnnnnnnnnnnnnnnnnnnnnnnnnnnnnnnnnnnnnnnnnnnnnnnnnnnnnnnnnnnnnnnnnnnnnnnnnnnnnnnnnnnnnnnnnnnnnnnnnnnnnnnnnnnnnnnnnnnnnnnnnnnnnnnnnnnnnnnnnnnnnnnnnnnnnnnnnnnnnnnnnnnnnnnnnnnnagcgtagcctttgaaaatacttgggttctagtcttagcactgcactatgatcttagttccttgcctactaacaaaggaaaaaaaaaactttttaaatgtttaaaaagatcttaggtaagttacttagcatctataattttaagctttcttagcctgttatcatagtggttaagaatgcaggcaccaacatgaggattcaaatcccagctctgttgcttcctagctatgtcatcttaggcaagctactaaactatggctcagtttcctcatatggagggaggcagagagagagagaaaaattaccaaaatcattggattgttgacattcattgatccctgaataaatgttagctgttatcaggaatttttgtgagtacctcctaacttgtaagtactaggtatannnnnnnnnnnnnnnnnnnnnnnnnnnnnnnnnnnnnnnnnnnnnnnnnnnnnnnnnnnnnnnnnnnnnnnnnnnnnnnnnnnnnnnnnnnnnnnnnnnnnnnnnnnnnnnnnnnnnnnnnnnnnnnnnnnnnnnnnnnnnnnnnnnnnnnnnnnnnnnnnnnnnnnnnnnnnnnnnnnnnnnnnnnnnnnnnnnnnnnnnnnnnnnnnnnnnnnnnnnnnnnnnnnnnnnnnnnnnnnnnnnnnnnnnnnnnnnnnnnnnnnnnnnnnnnnnnnnnnnnnnnnnnnnnnnnnnnnnnnnnnnnnnnnnnnnnnnnnnnnnnnnnnnnnnnnnnnnnnnnngcatgatcatggcttactgtagcctcaggctctggagctcaagccgtcccacctcagctnnnnnnnnnnnnnnnnnnnnnnnnnnnnnnnnnnnnnnnnnnnnnnnnnnnnnnnnnnnnnnnnnnnnnnnnnnnnnnnnnnnnnnnnnnnnnnnnnnnnnnnnnnnnnnnnnnnnnnnnnnnnnnnnnnnnnnnnnnnnnnnnnnnnnnnnnnnnnnnnnnnnnnnnnnnnnnnnnnnnagagtaaataaatttataaaagaagtactgggtataattgctatctttcaagaaactgacattctggttataaagatcaggctaacacatatgaaaataaaatcaatatagggcattatataagtaagtgttaaagagtgtgatatagacaataaagttttattcattaaatgaatattgcctaccgtgcaccaggtaggcagcagtgagtactgaggatacaacagtgaatcctacacagttcccattctcaggaagctcacaatcttgtgataaagcagatattaatattagtagatgggtagtagaatcatataacacagtgaaataaatgctacagtgagaattagaactgggagctgtgggagctcacaggagaggcatataccctggtcttaggaaatcagaaaaggcttatcagaagtcgtcgaatgtgaaggtgggaaagagtgttcttggcacatcaaacagtgcagaaacctggaagtataggctatcattgtgctagtggagcttttagggtcgtggttaaaatggggccaaaaaccaaaaacatgaagccaaagaagtatacactttctggctaggttatggaggtccctgaatgtcatattgagtgtagactttattctgaaggcaataaagagccagtaaagattttcatgcaaaagagtagcaagagtcagacttctgttttaacaaagatcactgtggctacagggaagccatccatgatggaaggctggaaaccaaggaggctgttgcagagatttcagtgagataggatagtgacctggatccagaattgagtcaggccacctgggtttgaatcctgctctgccacttagtagttatgtgactttatgcaagttatttaaccactctttgcctctgttacctaatctgaaaattggagataataaaatttaccttatgggcttattgtgaggataaatcacttagaacacacctgcctagcacatatttaagtgctttaaaaatgtaggcagtgnnnnnnnnnnnnnnnnnnnnnnnnnnnnnnnnnnnnnnnnnnnnnnnnnnnnnnnnnnnnnnnnnnnnnnnnnnnnnnnnnnnnnnnnnnnnnnnnnnnnnnnnnnnnnnnnnnnnnnnnnnnnnnnnnnnnnnnnnnnnnnnnnnnnnnnnnnnnnnnnnnnnnnnnnnnnnnnnnnnnnnnnnnnnnnnnnnnnnnnnnnnnnnnnnnnnnnnnnnnnnnnnnnnnnnnnnnnnnnnnnnnnnnnnnnnnnnnnnnnnnnnnnnnnnnnnnnnnnnnnnnnnnnnnnnnnnnnnnnnnnnnaggcagtgaagagaagcaaactaagaataagcaggattccatgactgaaggaaggttagaagcaaataagaagaataaggaattcggtttctggtttaggagcttaggggatggtggtgactttcactgagataagaaacctgaggaaaagcaggtttgggggaggctgagaaggcaccaccagaggtgactggattgcaaccagaagagtataatgtcagagaagctaaggagagtgtttcagggaggagggaatggtcagcattgttaaatgttaccaaggatgatcaagtgaaataaaagctaaaaagaattaattggttttagcaacaagaaggccattggtgaccttgtcaggaggaatttttatgataaggaaggagggctaaaaatgtatggattatggaaggaataagagatgaagaagggagactgtgagaacagacaattcctccaagtttagctgggtagaaggattatggacagggctgacattggacccagtacactgatttggcctattgcctgtggcattctgagtggttggacattcattctaattggtcagtaaccataccagggaggtgagaaaggggagctgatgtgggaacacacattggatttgctcttggtagttttgaatttgacgtaaggacaagcaagctatgtatatagaaatgtccagcaagcaatttgataggggactagtggtgggaagactggacagaaaattagagtaaaaactcaagtgagtgaggataggctagaaggtaccaaaacaaaggcaggctggcaggaaggcacaaagaagctttaggtctagccataaaattcatgaacattttgagattgtgtgaactcggggtgggaaatgagttgcaaagttgaagtaagaaaccagacctcaaatccagatttcatagcttataaagaacatttttagtaaacagaggagttcaaggatggagtccagtagctctaagctgttagggagaggaaataggaaaggaaagtccccggtttggagccggagcagtgaactttggcatggcatgataggctctgtgggttaactttaggaatgcagcactttagccccagttgttggttgctgtgtcttcagcatgtaaaaacactcatttgtgtatttcaagtgcaccaaaccctgattgcaatgtttggcattaattacttcactttnnnnnnnnnnnnnnnnnnnnnnnnnnnnnnnnnnnnnnnnnnnnaggggacttgannnnnnnnnnnnnnnnnnnnnnnnnnnnnnnnntgggactatagatatgcaccactgtgcctagcgtattactttaaatgtatcatatatggttgtagtttgtatttgtatgtatgtaaacaatacataaattagatgttaatctattaacgattcaaaaaccgcaattacttttgcaccaacctaaatatatcctgggtggggtaacaacaaagtagatgggaaaatatctttgttccctctttataatcctggtatttcattctcttattagtgtttattctttcagtcagcaaatagctgttgagtaccttctgtgtcagggactgcttttccttttattatctcacttttctcctggccatctttcccattctgctctgtggagtcttctccttgaaactttcttcacccatttttttttctgacagttggctccatctcatctcttcttaagaggtgtcctttagataattcatctattaggaaacacagtgaatgttacacattcttcatatatattcctcatacagattgagagcttctgctattattccattacagtcagcaaaatggagagagaaaggaaaaagaatctcagacaagatcatagagtgattgtggctggaaggaagtccaaggacaacagaaatcaacattttattacaatgaggcccaattatatgatctgattgctgcccttctcaccctctgtgaagcccagttaacagaaatgagcagtgctgtgggaggtgtcataagtggactcaaattggccccagaatggcaaactctgagttcaataatagattaagtaccagcttcaaacactcagtgtgttctctgagttcccaaagatatttctacctggagctttcttctacacttaccttaatggctcagttggaagtcagccatcactgctaagtgttcttagttctatgcagcattggcaggagcttccctattatcctgatgttagtaatagaaagtctgcccagttgtagccaggctgttccccctaaagcaatagtggagcatttccactttctaggatcttgtcctttccaacactgagtggactaacctcttgtcactttcaccagtcattagatttatgagaaaatctccccattcctagagtggatctgctatcaggcagcaatctgctttttgctctgaatttctgatctcttggatacagtaggagaatctgctccgatgaacattaaattaatatatgtaaagcatttagaagaatgcctcacacatattaagagtttctgctattatcattaatactatcgttgttattgccaccatctaggatcagaagctagagcttagctgaacatctaattcttgctcttgttattctgagtggtttagcaaatccaatttatctggaaatggggctgaatatgtttggtttccgctcaattttgtggccattgccacttcaaagagttttcaaaaggtcaaaatgttatcattttagtgtttttacttcttagggcttcaacatcccctctctggattcttaagagactctgatcctgaatcagtgaaatggataatcgagcaatctctgcatgaaagatgtacattttatccagtcatccagtgtttaacaaacaccagctcaatgtgggacagtaataaatgtcatcgctaacatttattgagcacctagtatgtgccagatactgttctaagtgctttatatatactatctcatttattcttcataaaaaccctatatataggcactgttattatcttccttttacaaatgaagaaacaatcataaagaggttaagtaatttgcgtaaagccacaaagataagtgaaagagctgggatatgtacccaggcagtcatatctcatagcttttgctagttaccacctcactgtactgacagggagaaccctggatttaagaggcagaagttnnnnnnnnnnnnnnnnnnnnnnnnnnnnnnnnnnnnnnnnnnnnnnnnnnnnnnnnnnnnnnnnnnnnnnnnnnnnnnnnnnnnnnnnnnnnnnnnnnnnnnnnnnnnnnnnnnnnnnnnnnnnnnnnnnnnnnnnnnnnnnnnnnnnnnnnnnnnnnnnnnnnnnnnnnnnnnnnnnnnnnnnnnnnnnnnnnnnnnnnnnnnnnnnnnnnnnnnnnnnnnnnnnnnnnnnnnnnnnnnnnnnnnnnnnnnnnnnnnnnnnnnnnnnnnnnnnnnnnnnnnnnnnggcagaagtccaatctggtctcaactcctccattccatcatttaacaagttgaatgaccttaggtatacctttcttgaaactcaagtttctttatctgtaaaatggatagggtaatacgtacttcacaggatggttgtgaagactgttatgtgccctggacttcttaggcattcagtaaatgttagcttctctcactacccgattctaagcactacactggtgctcaagattgactaagaaagttgtaccnnnnnnnnnnnnnnnnnnnnnnnnnnnnnnnnnnnnnnnnnnnnnnnnnnnnnnnnnnnnnnnnnnnnnnnnnnnnnnnnnnnnnnnnnnnnnnnnnnnnnnnnnnnnnnnnnnnnnnnnnnnnnnnnnnnnnnnnnnnnnnnnnnnnnnnnnnnnnnnnnnnnnnnnnnnnnnnnnnnnnnnnnnnnnnnnnnnnnnnnnnnnnnnnnnnnnnnnnnnnnnnnnnnnnnnnnnnnnnnnnnnnnnnnnnnnnnnnnnnnnnnnnnnnnnnnnnnnnnnnnnnnnnnnnnnnnnnnnnnnnnnnngttctacctccttgtggtcccagtctgggatgaagagggaagaagaggacaaatatgggaccaggtcattatggtatagtataagaaataccactttagaggaatatacagagagaagaatacagaaagttacattttctgagatggggcaaggaggagttgaagtttcagggtaccagtgacatttgtgttgggcattgaaaaacaggcttggatgggatggacagaaggcacaaaagtttctgagcagaagaaacagcatgtgtgcaggcgctaaagtatggcagagctcagagtatgtgttctagtaatggctagaggtttggtatgcagttgggtattggaggtgagatggtaactgagtagtaacaaatgagtttgcaaagagaggcattcaaggcttcagatgtcagttatgtcccagcaccacgaagacagtaaaacatagacatcttttaaaagaaaatttaccgaaagtaaataaatttagcaacaaaaactttataaatgctcttttctattgagatacaattcacatatcatgaaattcatcattttacagcatacagttcagtagttgttagtacctgnnnnnnnnnnnnnnnnnnnnnnnnnnnnnnnnnnnnnnnnnnnnnnnnnnnnnnnnnnnnnnnnnnnnnnnnnnnnnnnnnnnnnnnnnnnnnnnnnnnnnnnnnnnnnnnnnnnnnnnnnnnnnnnnnnnnnnnnnnnnnnnnnnnnnnnnnnnnnnnnnnnnnnnnnnnnnnnnnnnnnnnnnnnnnnnnnnnnnnnnnnnnnnnnnnnnnnnnnnnnnnnnnnnnnnnnnnnnnnnnnnnnnnnnnnnagcggggatccccaaaccccagggctgtggccagttaggaacccagtannnnnnnnnnnnnnnnnnnnnnnnnnnnnnnnnnnnnnnnnnnnnnnnnnnnnnnnnnnnnnnnnnnnnnnnnnnnnnnnnnnnnnnnnnnnnnnnnnnnnnnnnnnnnnnnnnnnnnnnnnnnnnnnnnnnnnnnnnnnnnnnnnnnnnnnnnnnnnnnnnnnnnnnnnnnnnnnnnnnnnnnnnnnnnnnnnnnnnnnnnnnnnnccatcannnnnnnnnnnnnnnnnnnnnnnnnnnnnnnnnnnnnnnnnnnnnnnnnnnnnnnnnnnnnnnnnnnnntgttataggaccactgtcatatatgcggtctgttgactgaaacatcattatgtggctcatgtctnnnnnnnnnnnnnnnnnnnnnnnnnnnnnnnnnnnnnnnnnnnnnnnnncttcatcaccccaaaaagaaacgctggtacctgtctacagccataccaccctgaacatgtgcaatcttgtctgatctcagaagctaagcagggttgagtctggttagtactcagatgggagaaacctagtacctgttggcagccactcttcattttcctttctcctcaccctctggcaacctctgatctccttcttttttaaataataataataannnnnnnnnnnnnnnnnnnnnnnnnnnnnnnnnnnnnnnnnnnnnnnnnnnnnnnnnnnnnnnnnnnnnnnnnnnnnnnnnnnnnnnnnnnnnnnnnnnnnnnnnnnnnnnnnnnnnnnnnnnnnnnnnnnnnnnnnnnnnnnnnnnnnnnnnnnnnnnnnnnnnnnnnnnnnnnnnnnnnnnnnnnnnnnnnnnnnnnnnnnnnnnnnnnnnnnnnnnnnnnnnnnnnnnnnnnnnnnnnnnnnnnnnnnnnnnnnnnnnnnnnnnnnnnnnnnnnnnnnnnnnnnnnnnnnnnnnnnnnnnnnnnnnnactcttttttaaaatttttattattttatttgttattgtcccaagtgttccaagtaaatactgatctctttgtattnnnnnnnnnnnnnnnnnnnnnnnnnnnnnnnnnnnnnnnnnnnnnnnnnnnnnnnnnnnnnnnnnnnnnnnnnnnnnnnnnnnnnnnnnnnnnnnnnnnnnnnnnnnnnnnnnnnnnnnnnnnnngnnnnnnnnnnnnnnnnnnnnnnnnnnnnnnnnnnnnnnnnnnnnnnnnnnnnnnnnnnnnnnnnnnnnnnnnnnnnnnnnnnnnnnnnnnnnnnnnnnnnnnnnnnnnnnnnnnnnnnnnnnnnnnnnnnnnnnnnnnnnnnnnnnnnnnnataccnnnnnnnnnnnnnnnnnnnnnnnnnnnnnnnnnnnnnnnnnnnnnttattctgtgtttaacttttcgaggaaccatcaaactnnnnnnnnnnnnnnnnnnnnnnnnnnnnnnnnnnnnnnnnnnnnnnnnnnnnnnnnnnnnnnnnnnnnnnnnnnnnnnnnnnnnnnnnnnnnnnnnnnnnnnnnnnnnnnnnnnnnnnnnnnnnnnnnnnnnnnnnnnnnnnnnnnnnnnnnnnnnnnnnnnnnnnnnnnnnnnnnnnnnnctactaaaaatacaaaaannnnnnnnnnnnnnnnnnnnnnnnnnnnnnnnnnnnnnnnnnnnnnnnnnnnnnnnnnnnnnnnnnnnnnnnnnnnnnnnnnnnnnnnnnnnnnnnnnnnnnnnnnnnnnnnnnnnnnnnnnnnnnnnntgatcaaactactttccgtatcagtttttccacatcaaagtttagacaagattggacatgttcgtggtggtatggctgtagtcaggtactggtggctgtaccagtttacatcccaccagcaatgtatgaggattctaatttttccacatccttgccaacaaggatgttgttgatttttttccttttttattatggccatatttgtgagtgcgaagtaggatc

SEQ ID NO: 57210 - DNA, 477 bp, Homo sapiens
  misc_feature (1)...(477): n = a,t,c or g
gagcaatggagcttaccatctttatcctgagactggccatttacatcctgacatttcccttgtacctgctgaactttctgggcttgtggagctggatatgcaaaaaatggttcccctacttcttggtgaggttcactgtgatatacaacgaacagatggcaagcaagaagcgggagctcttcagtaacctgcaggagtttgcggggcccctccgggaaactctccctgctggaagtgggctgtggcacgggggccaacttcaagttctacccacctgggtgcagggtgacctgtattgaccccaaccccaactttgagaagtttttgatcaagagcattgcagagaaccgacacctgcagtttgagcgctttgtggtagctgccggggagaacatgcaccaggtggctgatggctctgtgggatgtggtggtctgcanctgggctngttgctctntgaagaaccaggggccgntttt

SEQ ID NO: 57211 - DNA, 2970 bp, Homo sapiens
ctaaactgaagctgcagtaactaaaggaatctgaaaagaacaaccctgaagcagaggctttattgtcttggttgccagtagtaccttgttttgccatgtagcagacaacacacaaaataatgcagttgtggtgtgccatgctatgtgcacagccccttggattactttgttttaaaaagcatcagagttgggggtactttagggaaacctttgcttaccttgttttgccagtgataagagcagtgggttggagggcacttggccagttttctgttcagcttttcagtgaatgtacccctttaaggttcagacttaaacttccttaaaaagtggcgttgttcatagaatcgttggactcattaatgaatcgttcaactccactcactgaagcccagacctccgtgcccaggcccaatctcgtcaggctgccagagaaagttggtgctgctcatactggtctcacagtctaagtaagtgtctgtgatgctcccaagcaaaggaaatgcaagctctggaaattcgttaatgtatttgatgtcttagtgttttagtgactagggagaccattaactagtttatcattaaccacttatcagtgtattgatgttaaagcatttccctgttagctaaaagaggcctgttcatacaagccaactggtatatacgtgtggttcatccatcatctgctgcacatagcagactagaattctgggaaccctgtgcaattcagtctgctctcccttgtggaccctggtaaagaaaagcctcagctcatagtgaacacagcagacctagaaatgtagcagcagcctactgagtagctttcatttactgatcatctgctgtgactgtggccctgtctggaggttcctaggttttgagatttagagcaatgcattctggagacagaaccagcagaacagccatttttcaatttttctttaaatcagtattccatcaggcagataactgctgtattcatgaatcttgagagtgttcctgaagacagaattaatggtcatttgggaaaactatcgccatggcttcccatctgtggttttcctctaaaagccttggagattagcccttccttgccagtgagaacggtgaccgcctcctgctctgcacggtctgcggcagttgccgcttctggttaggtgtgtcaggttggcttattttgggttcaggcctggcgtagcacccacaagtggcagacatatcacaagagtccccagactctgcctagaaacagtgtttgccctttggccagtgacgtggttcatcccggcccatgttgagccatgagtggagtttccagcagagggaggaatgtgtgccttgttcaaggagggcacgacccttaggcctttttcaaccagatttagctgaagggcttgacacctttgaattacagcagttgactcagagtgcaagaagtcttgggccatttttggggaaagcaaggtttcctttcagccctgtctactgaccaataccccgactcaccttgtgtggcgcacttcagaatcagatatacctagagtatacctgtggtttggttttataattaatcagctcgttacttcagcccatgaaaatggcatccagggctgccaggagattcagagctcaaaacaaggcgagcttgagttctgcactccagatatgtgccaaaactagtaaaacttaacggacttacaaccttgtcagtttttttaatgaggcagggatactctgtttttcacactaaacatatgaatgcagcactgctgcctcagctcagcttcgtgcctgggttccccactggtctgggaagactgttgtgctccatagagcagtgcacatctgacccagagggtgggtgttcataactgctacttgctctgctctaccatgtttaaagaaatatttggatgttaaattaactcactatggtttttcacctgggaagggaaacaaattacgtactagagggcattgactggttaaaaacttgtgtatcccgggaaggacctgcggtacaggagtcagccatgtctgtgctgtgtggaaccacctgatgacatggttaacgaggaagacgatgtgttgaccggctgccgtttgaggactttgggtcacccagactagacaccttctgtgctcatgtttggaaagctgaaagggaaggacagctgtgccctcctgggagctcatgtgtccctgggcgctgtgctagctttcctttacagctgtttacagacaaggcagggcctgaggcagatggccactgctcttgtgatgtttgctcagaggaatatgaacattttatttttgaaaagggatgatgtggttttttgccaggtgtttataattaatcctttaatattatggttattaacctcttaaacatgaatgaattcttgattgttttaacacagtacctaagactaatgctttctgtggacaccactgagctctgcctcaactccaccctctgcgaccggaggactatgcccctagtaactgctgtcggtgtggacgctgtgctggttctgttttctaaaggagcagaaggacaggtctctgagacaggatcgttgtccctacaggaggaacagtggccttgcttcttagacggtcttcactgtgtgttttaaaacaacaacaacaacaaccaacaacaacataaaactcttttgacctgtaacttaaagatcataaacttcaggcaataatattttctgtgtaagcttttaaaattatttttggggatcatagcttgttttattttgtgctataaaattaacagtattaaatgacttatattcttagaatacatcgagtgtcttttcttaacagattagtgcctttttatttttgtattccgttttacgttactggtcccagcatcaaaacccttgtttccatggcctgtttgtatattgtctcaataaaacttgcatcagccggtggtggcggcagaaaaaa

SEQ ID NO: 57212 - DNA, 1853 bp, Homo sapiens
aatacaacaatttccagatgcacttggatagacaacaatttttgaacgacctcagaaatgatattgaaaagaaaataggctttgatgctattatgagggttcgtaccagcacaggtttcagagccactgatttctttggtggaatcttgatgaacaacaccaccgatgtagaaatggctgccatcgattgtaacaaggcagtgaccgtggagttcaagcacgatgacaaactcagtgaagacagtggagccttaatccagtgtgctgtgctttacacgacaatcagtggtcaaagaagacttcggattcacaatcttggcttaaactgcagctctcagctaggctgatctttataagagctgtgagacagatgctcttattcaacttctttggccaagtcagctttttaaagcagttctccaccagcctttgaaggtcatccggggaaattctagtttattcaggactgcccatatgttggcatgttaccggaaggaattgtgcaagtccttctgcagcaagccagcttattctaccagattccatgaaagtattgccagtgtacatgaattgcttgttgaaaaactgtgtactactcagcagaccagagatctcaactgatgaacgagcataccagagacagctggtcatgaccatgggtgtggctgactctcagcttttcttctacccacaacttctgcccatacacacgttagatgtcaagagtacaatgttacctgctgccgttcgttgctctgagtcccgtctttcagaagaaggaatattcttactggctaatggtctacacatgttcctgtggttgggagtaagcagcccaccagaactgatccaaggaatatttaatgtgccatcttttgcacatatcaacacagatatgacattgctgcctgaagtgggaaacccatactctcaacaactcagaatgataatgggtattatccaacaaaagaggccatattcaattgaagctcacaattgtaaagcagccgagaacaaccaagaaatggttttccgacagttcctggtagaagacaaaggactttacggaggctcttcttatgtggatttcctttgttgtgttcacaaggagatctgtcagctgcttaattaattgaaacttcctctgtcattgatgttggcatttcccaaggagataatctccttcttggtgccctaattttcctagatgataataggctagttttgatttcttgcctcattttcagaataactttcccaggaagagatggcatttagaacttcagctttggtgctcaggtataaagccaattaaggtacaattgtaccataaagggaacaatctgtttctgattgcacagtttctaatttttaaaactgatgtggtttgcatttcataaaaggcaaagtttacagaaccataaacattctcaattttctttatgctagacatataaattatttttcaaactgtatagatttggggtaaaaagttgtctcagttcctctcccaattgcaatgagaaaaaaaagcttaatttttacattatacttaattttctaaaaccatgtaactccattgaacacatttttcaacttaaggtctgcatagcagacttttaataaccttgggatttatctggtagaacaatatgtgttctacatttttttcataattatatattgtgtatgttaaaactattttccagttgttttgtctgtaaaactgtctttatcaatatgcttaatggttctttgtacaattttgaaagtttctacctgtatataatggatgttaaccagtatcaataaatcacttcgtataatcttaaaaaaaagtcgacgcggccggc

SEQ ID NO: 57213 - DNA, 1956 bp, Homo sapiens
tttttttttttcaagttgaataaagcttttaataaaacagtcttgttctttatcaatacctgtaaattctcttaaaagcagtagcaaaggcgactgtagcaagagctcaaaaggcaaggcaatatcggaaagtgtatttaacagaagattaaaaatataaatgtagaagatctgtttgtttatatatttttctttcagaaataaatcccccctcccctgccaggtgaaaggaaatattgcactttctgttctcatgactaaggggacaggagttccagaagaacctttcaagatgatcaggaacaccaggacgagggccgtctcacctcactcggaccacatggagacctcccttcaaaatgggagccatgtcctgccccaccaagccctgtctgaagtggagcttccccgcctgtgctccctccacagtcccggaaagcccagcggcaaaaggcagctttgtcccagctctgccaccctcctgctcacagtggtcagggccctcaggggcaaggacggcagggattggaacgagggctctggaaggactgttcagccctatgcctaagacccctatgctggggacactacaggcacacacaggaatagcagggccaccctcagagctcacacatccacgaacaaatgaaggctgaggaggtttctaaacctaaagtccatgagtgtgcacttcaatccaggaaggtcgggacttccttcagtttcaaaaaataaattctccccttccggtttggactgttgcaggctcgaggccattcaggagttgtcccaccacctggtggggcagtgtgacagaggggccattggggaaggtggctagcttatcccgccccttcaagaagaaggtcagcagctcccccttccccttcacaaagatggggcctcgccctcacaaagcggaagccgtactctcggaggatgacttgggtttccttcctaaccacctgaaatgttgccccatgaacccccgtggactcccatcctgctggctacattgactgtattgccccagatgtcgtagtgtggtttccgggctccgatgaccccagccagaaccccgcctttgttcatgcctatgcgcagcatgaagttattgaaggactggttgttgatgttggtgagcgtatccttcatggccagcgcgaagtcggccaggtcagccaggtgctgccagcgctctctctcggacttgtcttcctgtgccaggggaccgtggagaaagtgtcaggggccgctcactgcagcagcctgctctgctgccttccctggcagtgttctgggggtggattccctacacctagatgttcaaggccttacttttcctcccacaaaggagtcgcagccacgctagctctgacttgccactgtgacaaagttcacgtagcaggtctaggcaaagactgggcaattgagcagaggagacggacctgtgagtctgaccgtgaggcgggccctttcaccttggctgggcctggtcctggtccttaggttttgtcaggttgtccttgtttggatccctcaactaggtgataagcactggagggggatgacccgccttggacgtgtttctttaacctcatccatataatagggccgtgggatggttgtagaggtaaagcaggatgatggtgttttaagaccagagcttgggaccagggctcctacacctaattttctctcctggtagctgaacaaaggtctaaattagcttaacaaaagaacaggctgccgtcagccagagttctgaaggccatgctttcagtttcccttgttgacaattgctctccagttcctatgaaagcacagagccttagggggcctggccacagaacacaaccatcttaggcctgagctgtgaacagcagggggttgtgtgtctgttctgtttctctgcttgccgaactttctcaataaaccctatttcttatttaaaaa

SEQ ID NO: 57214 - DNA, 1695 bp, Homo sapiens
ttcgctcggccgcggtcgctatggaggagccggagatgcagctcaaggggaagaaagtcacggacaagttcactgagagcgtctacgtcctggccaacgagccatccgtggccctgtaccggctgcaggagcatgtgcgtcgctccctccccgagctggcccagcacaaggcagacatgcagcgttgggaggagcagagccagggagccatctacactgtggagtacgcctgcagcgccgtgaagaacctggtggacagcagcgtctacttccgcagcgtggagggtctgctcaaacaggccatcagcatccgggaccatatgaatgccagtgcccaggggccacagcccggaggaaccacccccgccctcctcagcctgatcctggaagagactcgggggccccccagcctccgccaacccagacaaagatcattccactcagcctgggacgatggggaggaaaaaaatccagatctcccgcatcctggaccaaaggaatcggcaggtgacgttcaccaagcggaagttcgggctgatgaagaaggcctatgagctgagcgtgctctgtgactgtgagatagccctcatcatcttcaacagcgccaaccgcctcttccagtatgccagcacggacatggaccgtgtgctgctgaagtacacagagtacagcgagccccacgagagccgcaccaacactgacatcctcgagacgctgaagcggaggggcattggcctcgatgggccagagctggagccggatgaagggcctgaggagccaggagagaagtttcggaggctggcaggcgaagggggtgatccggccttgccccgaccccggctgtatcctgcagctcctgctatgcccagcccagatgtggtatacggggccttaccgccaccaggcgtgtgaccccagtgggcttggggaagcactgcccgcccagagccgcccatctcccttccgaccagcagcccccaaagccgggcccccaggcctggtgcaccctctcttctcaccaagccacctcaccagcaagacaccacccccactgtacctgccgacggaagggcggaggtcagacctgcctggtggcctggctgggccccgagggggactaaacacctccagaagcctctacagtggcctgcagaacccctgctccactgcaactcccggacccccactggggagcttccccttcctccccggaggccccccagtgggggccgaagcctgggcgaggagggtcccccaacccgcggcgcctccccgccgacccccccagtcagcatcaagtctgagcgcctctctccggcccccgggggccccggcgactttcctaagaccttcccctatcccttgctcctcgcccggtccctggcagagcctctgcggcctgggcccgccctgcgccggctgcccttggccgacggctggccccggtaggagatcacccggtggcaccagcccagagcgctcgccaggtacggcgagggcacgtggggaccccacctccctccaggcctcttcagagaagacccaacagtgacgcccccctccgcggtgggggcttggaggtgggcggctggactcaatccaccctggggggctcctttccttcttcctatttgtgtgtatatccacaaataaaacgcgcgtggcgtccgtggaccagaaaaaaaaaaaaaaaaa

SEQ ID NO: 57215 - DNA, 811 bp, Homo sapiens
cggacgcgtgggcggacgcgtggggccatggtgcggttcaagcacaggtacctgctctgcgaactggtgtctgacgacccccgctgccgcctaagcctcgatgaccgagttctgagcagcctcgtacgggacacgatcgccagggtgcacggaactttcggcgcagccgcctgctccatcggcttcgcggttcgatatctcaatgcctatactggaatagtgctacttcgatgcagaaaagaattctatcagcttgtgtggtcagctcttcccttcatcacatacttggagaacaaaggacaccgttacccatgctttttcaacacattacatgtgggaggtacaataagaacatgtcagaagttcctaattcagtacaacaggagacagctgttgatcttgttgcagaactgcactgatgaaggagagcgggaagctatccagaagtctgtgacaagaagctgcttactagaggaggaggaggagtcaggtgaggaggctgcagaagcaatggagtgaacctctgctccccacacagctggctacactgctcaggcttcaggcccacttgttgaacagaacaatctgggtagcaacagcatcttccacagttttccaaactggatagctgccaaccagcagacattacccacttgaaatggagtactcagttaaactgaagttgcctttacctagcattccctggtgaagtgttgcaggttgtgaactctgtagacatctttattgcttggctaagagtagatttaataaatgtatctggtttccgtggcatttagcatacttatattac

SEQ ID NO: 57216 - DNA, 936 bp, Homo sapiens
ggacgtacagactataaactctacaagaataggaatcttcgtatttttttcctctgctgaattcctagtgcccagattagtgcttggcacatgattataagcgccatggctatgcgctagtgttaaattgcttgccggtgttttaagaaagccagatgcctggattggactctggggtgttctccgagggacaccttcatcatacaaactctgtacttcctggaatcgatacttgtatttttctagtaccaagttacgtgcaccaaattataaaacacttttttataatattttctcactgagactcccagggcttttactatctccagaatgtatttttcctttttccgtaagactcaaaagtaatataaggtctacaaaatctactaaaaagtctctgcaaaaagtagatgaagaggactctgatgaagaaagccatcatgatgagatgagtgagcaggaagaggagcttgaggatgatcctactgtagtcaaaaactataaagacctggaaaaagcagttcagtcttttcggtatgatgttgtcctgaagacggggctagatattgggagaaacaaagtggaagatgctttctacaaaggtgaactcaggctgaatgaggaaaaattatggaagaaaagcagaacggtgaaagtgggagatacattggatcttctcattggagaggataaagaagcaggaacagagacagttatgcggattctcttgaaaaaagtgtttgaagagaagactgaaagtgaaaaatacagagtggtgttacggcggtggaaaagtttaaagttgcctaagaagagaatgtctaaataaatggattgctttttagcaatagagctgctttctagtggtaaaggaaggggtcacctgaaaaataggacatttttattaaaataaagttctcttagcgtttgtggaaa

SEQ ID NO: 57217 - DNA, 428 bp, Homo sapiens
  misc_feature (1)...(428): n = a,t,c or g
tttgnnaccgctatnacatgantacgaatttaatacgactcactatagggaatttggccctcgaggccaagaattcggcacgagcccagtttgaagctcaaaagatctggtatgagcataggctcatcgacgacatggtggcccaagctatgaaatcagagggaggcttcatctgggcctgtaaaaactatgatggtgacgtgcagtcggactctgtggcccaagggtatggctctctcggcatgatgaccagcgtgctggtttgtccagatggcaagacagtagaagcagaggctgcccacgggactgtaacccgtcactaccgcatgtaccagaaaggacaggagacgtccaccaatcccattgcttccatttttgcctggaccagagggttagcccacagagcaaagcttgataacaataaagac

SEQ ID NO: 57218 - DNA, 6558 bp, Homo sapiens
aattgttctacactgaaagagctcatgttcgaacactgaaggttcttgatcaagtgttctatcagcgagtatccagagaaggaattctgtcaccctcagagctacggaaaattttttcaaacttggaagatattcttcaacttcatattggattgaatgaacaaatgaaggctgttcgaaagagaaatgagacctctgttatcgatcagattggggaagatttgctgacatggttcagcggaccaggagaggagaaattgaaacatgctgctgctaccttttgcagtaaccaacctttcgccctggaaatgatcaaatctcgtcagaaaaaggattctcgatttcagacttttgtgcaagatgctgaaagtaatccactgtgtcgtcgtcttcaactgaaggatattattcccactcaaatgcaaaggcttactaagtacccacttctgttggataatattgccaaatacacagaatggccaacagaaagggagaaggtgaagaaagctgcagatcactgtcgtcagatcttaaattttgtaaatcaggctgtcaaggaggcagaaaacaagcagcgcctagaagattatcagcgtcgccttgatacctccagcctgaagttgtcagagtacccaaatgttgaagagctcaggaatttggatttaacaaaaaggaagatgattcatgaagggccattggtttggaaggtgaatagagataaaactattgatttatacacgttgctgctggaagacattcttgtattgttacaaaagcaggatgatagactggttttaaggtgtcatagtaagattctggcatctacagctgatagcaaacacacgtttagccctgtcattaagttgagtacagtgttggttcgacaagtggcaacagataacaaagctttattcgtcatttccatgtcagacaatggcgctcagatttatgaactggtggcacagacagtttctgaaaagactgtctggcaggacctaatctgtcggatggctgcatcagtgaaggagcaatccacaaagccaattccattaccacagtcaacacctggcgaaggagataatgatgaagaagatccttcaaaattaaaagaggagcagcatggcatttcagtcactggtttgcagagtccagacagagatttgggattagaatctaccttaatatcgtcaaaacctcagtctcattcactgagtacctctgggaaatcagaggtacgtgatctgtttgtggctgagagacagtttgcaaaggaacaacatacagatgggacactaaaggaagttggagaagattatcaaatcgcaatcccagattcacacctgcctgtctcagaagaacggtgggcattggatgcactaagaaatttgggtttgttgaagcagttgctggtgcaacagctaggtttgactgagaagagcgttcaggaagactggcaacatttcccaagatacagaacagcctctcaggggccgcagacagacagtgtcatccagaactctgaaaatattaaggcctatcattctggtgaaggacatatgccctttagaactggaactggtgacattgcaacttgttacagtccacggacttcaactgaatcttttgctccacgggattcagtgggactggcaccccaggatagccaggcaagtaacattttagtaatggaccacatgattatgaccccagagatgcctaccatggagccagaagggggtcttgatgacagtggagagcacttttttgatgcccgtgaagcacatagtgatgagaatccatcagaaggtgatggagcagttaacaaggaagagaaggatgttaatttacgcatctcaggaaactatttgatccttgatggctatgacccagtgcaggagagttccacagatgaggaggttgcttcctcacttaccctgcagcccatgacaggcatccctgctgtggaatccacccaccagcagcaacattctcctcagaatactcactccgatggggcaatttcaccattcacccccgaatttctggtccagcagcgctggggagctatggagtattcctgttttgagatccagagtccctcctcttgtgcagattcacagagccagatcatggagtacattcataagatagaggctgaccttgaacacttaaagaaggtggaggaaagttacaccattctttgccaaaggctggctggatcagccctcacagacaagcactcagataaaagttagagccgcatgtcctggaggtgactgcaggttgttggatttggagtatcggccgtgtctcaccacatcctggctccagtgtggatgcagagagagtgtgacagaggatctgcctgtgaaccacctgggattagtcaagtcccaaggtgcccagagtgggactagttcttcacagtgtggcagctgcactaatctgtttgtgagggaatatccattccctcactctactctcctcactatcggaaattcattttgattcagaataaaaaccaaatgtatagagctttgggtgtaggatatgaaattgtacttagatttaagaaaaagagaaaatcagatgtatttatttgacttcattccgtatttgaaagcacattttaatttttatttgccttgttttgttttaattgagtagtgagagttttagacctttgtctttagtacacccaaggatcaactgctcctgaagcaaagaggtcaggatggagtatgcagaagttgggtagagaggttaagaagaggaggaagtgagacggggaagggaggagcaccttgcttcactatacagtattccaagctctctgctgtccagtaggctgcttctctgagggtcacctcaaaggtatgctatgccgtgtggctcttatgtgcccaggtggtgtggtcagagagtggatgggcttcctcccgccctgaggcaagcacctcttctctgtagctgggatcaaccacaattaataggaatcctcaacatactaaatagcaggcacttgaaaatgggtgtgttttcttccattgtcgtcttttctattgagggttgggatttgggtgggagaggaaagcaaattttattttcttgactataaatttgttattcttggtatcatttcatttttataattatacattagacattggcacttgtgtaaaactgtccctgcagattgagcaggaagtaaaaacaaatggaaatgcttcggatagtggcaggggtgggggttgctaaggaaagggtgggatgggagtgggtaaagagtttgggaaggttatctaactgaatcactactgagttgaatcatggctatcattagccacaggtactgctgattataaggccagtaaaattttagtacctggaggtttgactctaatttttgcactgatggtgccaaagggccctgagtcaaaaggatagccaagggtggagtggaaaaagatatggtgaaggcagaactgctcacaccagctccagaagcacgtcctctgacttcactgccgcagctctttccacacggggccgtgattgaccctaaaaattgcagaccagcacatacactggacactgcaggcaaggtgttggtaactgcctgctctaggatgaatagtagcgttagcaacaccctacagagggtaagtttcagaattgtaatttgagaactccttcaattatattgactttccttggttttccttgtgcattaggtatatattttttgaagtatttttgccaactaaaatgaagtctgtaaattctgttaataaacaaggagttcatccgttgctcacatctttcattggtgccctctgaactctgtgggttgctaggatgtaattttaatgcttccctgcagtccaaagatgattttttcaccacaaatggtaagggatgcccacctacttttataaacaccactgcaacttaacaagtttatttatctatgtccagatttctgtttctgtcctaaattgatctgtgtttttaggtggatcaacttggatctttagacctcatctataaattgaaattatatttttaagtcataagccaagtacaatctaactcagaatgggattaaaaattttagaagcagaagctaatatataaatgaagtttgggatttggaactttctgtatctcttaggaggaacaagtaaaaaccaaatggttacattgtgctgctagaaataatgtcattctcaattaaaagggttacacctgtagccacttgacactaacaccatcgagggcaattaatcaggagaaaagtaaatataaaaactttgctcttaacgtcacacactacagggtaattatgtaattctctaggcactcaattaaggaaggcttgtagggttaggcaaaatttcagtttctctagttcagccagtgtcttgtccttaggtaattatttgctttccctgcagttcaatttctccttgggaactctaacagggactaactgggaggaatactttggaccataggctctaggtactttcccaaattaaattccatattctaggattttttcaaacaaagccccaagatgaagtctaattctgaaaatatctcacaatttttgaatgttctttttatcttaccgacctaacttctcttttccctcccaacttggcctcccacacgttccatttcattttggccattatagtcacatccgtttgactttggttgtgacatcttcctttcaggatgatggaattagatgcagtctgtctttgagtgagactggtcaccatcagaggagttttttctaagtgacgtgactagaagttgaaatctacttccctgctaaagggcacaggggtggtgtacaaagaaagctaccttcccagagcaagcaggctgcattttagctatggaagtgacctgctgtgacactgtgctctcttctgtgggcttaatggttcctttgctatgaagtggcaaattacatgtagagtgtctccttccttttcagagaacagttaatcaaggcaaatcagcaagcccccaaagtgctgtaatttaacatcatgattaccaccttcgaagctatatattttgcatactttaaaatcacctaacttggactgcttgaattacattggcttttagaaccgaaattgtaactatgtattgtatttcatgggaggtatattttatgagctttttggctttcttttttcccacagcaactgccaatgaaggatgaatcccctttttaaaaagttgttgttgttgttgtttatttgattttgagttaggagggataatagagaagtccatttaaaaattatttttagaagctaaagaaagtaattatgcttcctgtgaattgtcttttactggcatctttgttttcctctttgatgttagtaaatttggtgtaatacgtggggcttccatatttcaaagtggaagctttcttctctgaagtcgatatatggttttgaattactagagctttggtcagtatttccttccctatatgtcacagagggcaccactgagaactgcgtgcataggacctcaaaatacaaaattagcagggcctcacagtcagcttcctcatggctagtttttcccccttatattacaatttttgttttataagtcatttttttcctgatatttccaccacttttcagagtcatctacaaaatttttctttcctcaagaaaagagttccttttgccttattccttatgccttccccactggtattgagggttttgataataaattggtaggaaaaaaaagtacctcctagaaggaagccttccccaccatttccaggtgccaactgctaagcagatatattccaaaaatggtaactgtcatgtgcacactgttggttatttttaataagcctcttcctactagaacattttattttccttgttcaccatacaatcatgtactctttaacagaaattgcttttaaaaaatatctggaactatctttaaaaaaactttattaataatcatgtatttttactgatcacattttgaaatgcctaaaagactttattgttctaattatccagatgtacctttgtaaaatagctcttttatgaattagctgataaggctgtatgtttctggaacaaaatattggtcatctaaaaactttctgttttctggggtctgggaaaatagaaaataagatttcaaatattaaataagcttaaaggaaccaagcatgtgactttttatttgtattctggttgatttgtcttgtccaagttatattagaaaagttgaggagtcgaggagcctgtaattaattttcctgtcagtgactgtcagacatcttcctgcttattagagcatccctagcaacaagggctaaacctttcatgacagtgctgggcaggtggggcttgccctaggcatgtggggcaggtttgttgtttttttaatagctttattgaggatatttcacatatcatataattcatccatttaaagtgtataatcagatgggttttggtatattattgatttttaattgtggtgaaatat

SEQ ID NO: 57219 - DNA, 3276 bp, Homo sapiens
tttttttttttttttttaaaatttgaaatataattttactttttatttttacaatacagtgtacagtatgacatctcaaaataacagagtgcagatacaggaaaagagtacaaagggggattaacaacagatgtcagaaggttacctttattaaggctaaatccctgctttatattttccacacattcacaaaattacattcaaatcattccttattgatccttatttcttaggccatgagaaaaggaagataatccagacattagattttcatagaaagcaaatctggattagtctaaataatattctccttccatttgttctgacaacgaaaatttgagaaacaaagttatgcacccaccctaaaacttccttatttggattttccaagtacatagcattagttattgatatcatttctatattaaatggtaagacctcccccacactggggtctccagtcagaaccacagagggacaggaaatggaattgggccagagtggctgtacaactaggtgtacagcaaggcttttttccatattcttttgtggaggtcagcaacaactcagttttcactttaaggactatgttgaatatcagcacatcctcatcactaggatttagaaaagtttaggacatttctatctaccattgctgatgaggaaggggagaatgattgatagacttcactgaccttgaaatatttatcatctcagacttcctaaaagtatggcatggcatcacctctgccttgatacaagatctgcttgttaaagccatgttcctgaatcttgacagcacatggcccctagtgcaggccctaatgtctacagcgggcacaagagccactcactgacactacctacaccctcactctaacttaacatgaactgcccaatagtttagctcttggagttgaaaacagttgtcagttacaataagcaggatcacaaaactccattgtcaaccatagactacacttcattcctgagacgtaaactggaaaactgaaaagattaagtaagtgctaagtatattccttagtttttaatgctaaaaatcggtgtgacctgtgaaatttcctggctctaaactggagtatttcagatctgaagagacagtagtgtatggcattccttccctcaacccaagaatgttattttcttcctaaggaacattatcttgaaaatatttccacataaaacactctccagccaacttaataggccatgcaaatttgaacagaaaaaggcgacatataaactgtctacatttgttcaaataaaattatgtagaagaaaaaaaatcaatcaaatatgtacatgacacaaattactccttaaacataattgcttatgttaaattaaatgatgtcagtattattccagtgtttagctctgggtataggaaatgctgtagcctaaagtcaccataaaaataaaatcaaggcattcacatttgaggttgtttggttacacatcacactatcctaaaggcttgaaaagactgcaaattaagtttccatgccaattatatacgttgaattttaaagctacagctatagagacagtacgaaaatcctattagcttaaatgtttcttttatgatttaccaagctgttgcattctcgtcataagaggcagaccttgttaggttaaaaacctatttctatatatttaatacctttttctctccaatattcttttcctaaaatgttcaaatgactttcaggtcttcccttccttttgatcttaaagtcaactgtcataatatttcccaaggacatatataattttattctaatgctaaacaagtgttttcaatgaccatttgttgatctattaaatattaatatacagtacagcagctatattcatcaacagaattccagtttattacctatatatacgtagcacagtcataggatactgtgctcatacataaaaatgcaaaaactgtcaaatgtgctatcctcccatgtatacaaaaaactattagcatcatgaggaagaaactttttaagtcaatacagattataatgaacacctgccattcataaaaatgtaacatacattctattatactatgctgatgagggaagggaagctaagtgagtaaatcagttgagacgacttaagaaaaaaattcaggaaatcataatttaaaaaagatcagcatattttgtatacctttaagtagattagagtgtgttgagtgtagagtctgatccacaaagtctgagcaaaaaaactggtgcttctaatggaatgttttttgtttttttaagaatcaaaagacatataaatgaattcaagcctaacaaagtagcttcaacccaaagtggcaccattttgttttttatttttcctttttaggaaagtatctctgatgactaaattagtttcctaagcaaatactgccttgcccagtgcatagaagcacagtccctctgctcaatattcccaatgaagtcatttaagtgttaatgatttaacacttaagaataatcacatcaatatttgtgtgagacatggacgcttgtgtatacaagtttttcacagagatacaactaagcagaaagggtttaggtgaaaacaaaaggttttaacaggacaaaatggaatgctctgttgaaagcttccatttagaatcccaaaatgaggcaagaaccgctaaagccatgtatagagaataaaggatgccatgcacaaactgcctaagggaactgtcgtctcactaattcaagagatctaagaacagatctacagcttatactgctgccttccatcttatcctcaatcttgctgcagtgtcgggcagtcctcctattggcagtttttgccagatcaagtcccaacatgccacagaatggatgtttctttcacctcagccaagtggatggtacccactgaggttcagtatcaagtttgttaattaacctaagcaattccctgataggctttatcaagatcggaattcacaattgccgtatcaaagtagtggccattgttctgctccatctctcttgtcttctcaatgatttctctcaactcttcaggctttggattcttgccttctttggccaataatgcccgaagtctttcttgtgaagggggtgcaatgaagataatatatggtttcaaatctgaattccggagagtcttcaatgactgtgtacgaagacttaaaagacatattttgccagagttgatcacttgccgtacagaatctatgctagttccatacaaattcttctcaaattcaccatgctcaat

SEQ ID NO: 57220 - DNA, 1223 bp, Homo sapiens
gaactagtctcgagttttttttttttttttttacgtataaaaaaggctgacattttatttccaggttggcacgtgtataaggcacaggggcaaatggctttggggtcctggaactggaaatggagacaggtgtgtctcaggtgtccctgcctccaccaccccctaagtgcacttgagacaggaccagtggtggtggttccagcccagggtcctgaagggtcccactggctctaggggagagccatggggacagctccccaggcgggaccctctactctccagctacccaggagggaccctctcctcctagggggcgaggccagctccaaagtgcttggtggctccccaggcttaagggaccagcctgccagggagggctggggtcagagagagaatagtaagatgagaacgaggagaagcacccccactagcacggcgatggcacaccactgtcggcggtcactcgtcatgtgggatactttggccaacttcctgaggaccccgtccatgcgggactgggtgtggtccatctcttgggcgaaggcatccagcatgatgccctgctcgtccagctcttctccaacgcggccggacatgtgcttcagaacctggatgctcccagacaccatctccagctgttgatcctgttcatccatgatcagctgctgtgtggcctgctgctcctcgatgtagcgagatgtggccgagactgcgctggcatccagcaggtcgctgggtgacttctgggcagctggcttgcctgcgagtatctctctgttattcctctccaaaaatgctacggctgttgggctgaccatatggtccttcatttcctggactgcctctcgcatccgctccacgaacacctttttctcctgcaggtccccggctgggagcttgaacttgcctgggttggcttccactataccgatggtctcttccaggtcctcgaggtcccactcgatgctgcgcaggccattccgcagctcattggtcgtccagtccagctcctcgcgtccgaccgccgcgctttcctgcaggagctcgcaccagcgctggtacagcccgcgggccgtgttcaccgccttctgcacctcgcctcggactacaaaaaaaggggtcttcgagagacatgtcagtcccttcccccccaggccgaacccccctcccggcctgggttcgcgggctggttccctcccaaccgaggagaacgcgccgccacc

SEQ ID NO: 57221 - DNA, 1842 bp, Homo sapiens
tttttgttttttttttttttctctgaaaaaaaggtttattgcatatggaaatcaatagatatcttttacaaaaaaaggttagaataaagatctcacatttgtaaaggcacatatgaaacattttatagcaagcacaagggcagtgagaacatcaacaaggtccaatatctaaataagactttataaaaacagataggaaacagtgcaaaaaatactgtcaaagtcagttctatacacctcataactgtgtatacaactggcaagcataagcttatttactgatataaaatagcacatagaatagcatgcatagttttattttaggcttttcatattattaaattgatagggagtctataccaaagtacagttgacatgaatagtgataaaaatcactccccagcttagggaatgtcctataaacatctcacccctccctctgcttacaactacagtttggtagtaaggagactgggcttccatcttgcaaggtggcaagcggccaccacagggggcgaatgtgctctcaggatcccaagtcccaacctggaatgcatttcttacggcaacaacataagagatggtgattaaatgtctgggtcagcccacaaaagccaaccagatctggctatcacagccctccatttgggctgtggtggaggtcagtgggcttctatgggctgacgcaagaaccttaagaacaaaccggtttctaagttggggacttgtctgtacatcgtttcaaaatgaaaccctaataaatgtcatttgttttgaatgataccaaaattcacaacattttgtgaaaacaaagatcaaggaaagcatcaaaatactgaagtagggagcacaagccctagtccagtgaaacaaactagattagcttgttacttgatgtaacacaagttacataaggttacacatttattagtaatttgcatatttaaacctttttttccactgaagtatcctcaagcacattaattagctattgaaggaacaaaggacatacataggaactcatctctgatgaagagtagctttatgtcagaaaggagaaggctaatgaatttttaagattccaaacagtggcaagaaagttcaaaggaaattgcagtaaaattgtacaatgttcaagttgaaaaaaaaaatggctctgaattacagcattcagttctatgctcaaggtatgtattagctaacactgcagttgtcagaggtgggaggcccctgagaaatgctgagaatgccaggcaccccagttctgagagccaccctagctaaactcaaagcagcattcttgagattttagcaaaaggctccgccccaagccacaaaaagatcccaatccaatcttttcagctttatcctctaaaaccttttgtcagatgagatagcatttgtgtttcccaggaggagaaggttggggaagaaaatgaagatagcttacatacagattttggatgacccgctaatccttccccttcctaggtaagtgaaaacagataaaatgtttctgggcagcccaaaggtttaccacctgtttcactagaatggccagtctgtgtaaagaggctataatgacgaaagcattttccctgcaggggagaagctagaaacaaatgggtcttcctatacatcagtctgccaaatgcagcctctctcaatctatataagttcacctcgaaatacatattaagtactgctgtcatcattgttttaaacagagcgtctttcattttttctaatagtgactgattctatcggcaagggaacaaaagggtgagaaagggagcttcctgcttgctgagttttctagctattttcattctggttattttc

SEQ ID NO: 57222 - DNA, 6754 bp, Homo sapiens
  misc_feature (1)...(6754): n = a,t,c or g
aacaaaccaagccgcggcggtgtccgcggccctgccgagccctcggcgttgcctcagaatcccccagtcgcctgggcccctcggctctgacaggccgcggccttctgtcccccggccccagacccagagccgaggggcctgctcgcgtccttgtccgcccggacccctccctgcctcctagagttcggggccgcggcgggcgggcgcccgggacgccggcggttgtgtcggcttagcggtgccgaatgggcggttggtaaccgctgccgaggactaggcggcggcggaagatggtgccgggggtcgctggctctgctgctgccgccggcgaaggaggaggcgttgccggttttctgagtttaaccagtaatgccattcagttgccaatctcaagcaaagcaaacataagccagttttaatctactttttaagaaaagtggtagtccttttcacagtgcctgacgtaactgtatcagagggtgaggtataagctcacagaattcagataaatcatcatgaagttatatgtatttctggttaacactggaactactctaacatttgacactgaacttacagtgcaaactgtggcagaccttaagcatgccattcaaagcaaatacaagattgctattcaacaccaggtgctggtggtcaatggaggagaatgcatggctgcagatcgaagagtgtgtacctacagtgctgggacggatacaaatccaatttttctttttaacaaagaaatgatcttatgtgatcgtccacctgctattcctaaaactaccttttcgacagaaaatgacatggaaataaaagttgaagaatctcttatgatgcctgcagtttttcatactgttgcttcaaggacacagcttgcattggaaatgtatgaagttgccaagaaactttgttctttttgtgaaggtcttgtacatgatgaacatcttcaacaccaaggctgggctgcaatcatggccaacctggaggactgttcaaattcataccaaaagctacttttcaagtttgaaagtatttattcaaattatctgcagtccatagaagacatcaagttaaaacttactcatttaggaactgcagtttcagtaatggccaagattccactgttggagtgcctaaccagacatagttacagagaatgtttgggaagactggattctttacctgaacatgaagactcagaaaaagctgagacgaaaagatccactgaactggtgctctctcctgatatgcctagaacaactaacgaatctttgttaacctcatttcccaagtcagtggaacatgtgtccccagataccgcagatgctgaaagtggcaaagaaattagggaatcttgtcaaagtactgttcatcagcaagatgaaactacgattgacactaaagatggtgatctgcccttttttaatgtctctttgttagactggataaatgttcaagatagacctaatgatgtggaatctttggtcaggaagtgctttgattctatgagcaggcttgatccaaggattattcgaccatttatagcagaatgccgtcaaactattgccaaacttgataatcagaatatgaaagccattaaaggacttgaagatcggctctacgccctggaccagatgattgctagctgtggccgactggtgaatgaacagaaagagcttgctcagggatttttagctaatcagaagagagctgaaaacttaaaggatgcatctgtattacctgatttatgcctgagtcacgcaaatcagttgatgattatgttgcaaaatcatagaaaactgttagatattaagcagaagtgtaccactgccaaacaagaactagcaaataacctacatgtcagactgaagtggtgttgctttgtaatgcttcatgctgatcaagatggagagaagttacaagctttgctccgcctcgtaatagagctgttagaaagagtcaaaattgttgaagctcttagtacagttcctcagatgtactgcttagctgttgttgaggttgtaagaagaaaaatgttcataaaacactacagggagtgggctggtgctttagtcaaagatggaaagagattatatgaagcagaaaaatcaaaaagggaatcctttgggaaattatttaggaagtcttttttaagaaatcgtctgtttaggggactggactcctggcccccttccttttgtactcaaaagcctcgaaagtttgactgtgaacttccagatatttcattaaaagatttacagtttctgcaatcattttgtccttcggaagttcagccattcctcagggttcccttactttgtgactttgaacctctacaccagcatgtacttgctctacataatttggtaaaagcagcacaaagtttggatgaaatgtcacagaccattacagatctactgagtgaacaaaaggcatctgtgagtcagacatccccacagtctgcttcttcaccaaggatggaaagtacagcaggaattacaactactacctcaccgaggaactcctccaccactgactgttcaggatcccttatgtcctgcagtttgtcccttagaagaattatctccagatagtattgatgcacatacgtttgattttgaaactattccccatccaaacatagaacagactattcaccaagtttctttagacttggattcattagcagaaagtcctgaatcagattttatgtctgctgtgaatgagtttgtaatagaagaaaatttgtcgtctcctaatcctataagtgatccacaaagcccagaaatgatggtggaatcactttattcatcagttatcaatgcgatagacagtagacgaatgcaggatacaaatgtatgtggtaaggaggattttggagatcatacttctctgaatgtccagttggaaagatgtagagttgttgcccaagactctcacttcagtatacaaaccattaaggaagacctttgccactttagaacatttgtacaaaaagaacagtgtgacttctcaaattcattaaaatgtacagcagtagaaataagaaacattattgaaaaagtaaaatgttctctggaaataacactaaaagaaaaacatcaaaaagaactactgtcctttaaaaaatgaatatgaaggtaaacttgacggactaataaaggaaactgaagagaatgaaaacaaaattaaaaaattgaagggagagttagtatgccttgaggaggttttacaaaataaagataatgaatttgctttggttaaacatgaaaaagaagctgtaatctgccctgcagaatgaaaaggatcagaagttgttagagatggaaaatataatgcactctcaaaattgtgaaattaaagaactgaagcagtcacgagaaatagtgttagaagacttaaaaaagctccatgttgaaaatgatgagaagttacagttattgagggcagaacttcagtccttggagcaaagtcatctaaaggaattagaggacacacttcaggttaggcacatacaagagtttgagaaggttatgacagaccacagagtttctttggaggaattaaaaaaggaaaaccaacaaataattaatcaaatacaagaatctcatgctgaaattatccaggaaaaagaaaaacagttacaggaattaaaactcaaggtttctgatttgtcagacacgggatgcaagttagaggttgaacttgcgttgaaggaagcagaaactgatgaaataaaaattttgctggaagaaagcagagcccagcagaaggagaccttgaaatctcttcttgaacaagagacagaaaatttgagaacagaaattagtaaactcaaccaaaagattcaggataataatgaaaattatcaggtgggcttagcagagctaagaactttaatgacaattgaaaaagatcagtgtatttccgagttaattagtagacatgaagaagaatctaatatacttaaagctgaattaaacaaagtaacatctttgcataaccaagcatttgaaatagaaaaaaacctaaaagaacaaataattgaactgcagagtaaattggattcagaattgagtgctcttgaaagacaaaaagatgaaaaaattacccaacaagaagagaaatacgaagctattatccagaaccttgagaaagacagacaaaaattggtcagcagccaggagcaagacagagaacagttaattcagaagcttaattgtgaaaaagatgaagctattcagactgccctaaaagaatttaaattggagagagaagttgttgagaaagagttattagaaaaagttaaacatcttgagaatcaaatagcaaaaagtcctgccattgactctaccagaggagattcttcaagcttagttgctgaacttcaagaaaagcttcaggaagaaaaagctaagtttctagaacaacttgaagagcaagaaaaaagaaagaatgaagaaatgcaaaatgttcgaacatctttgattgcggaacaacagaccaattttaacactgttttaacaagagagaaaatgagaaaagaaaacataataaatgatcttagtgataagttgaaaagtacaatgcagcaacaagaacgggataaagatttgatagagtcactttctgaagatcgagctcgtttgcttgaggaaaagaaaaagcttgaagaagaagtcagtaagttgcgtagtagcagttttgttccttcaccatatgtagctacagccccagaactttatggagcttgtgcacctgaactcccaggtgaatcagatagatccgctgtggaaacagcagatgaaggaagagtggattcagcaatggagacaagcatgatgtctgtacaagaaaatattcatatgttgtctgaagaaaaacagcggataatgctgttagaacgaacattgcaattgaaagaagaagaaaataaacggttaaatcaaagactgatgtctcagagcatgtcttcagtatcttcaaggcattctgaaaagatagctattagagattttcaggtggggagatttggtactcatcatcctagacgaacgccatgacaattatgtgttatttactgttagtcctactttatattttctacattcagagtctctacctgccctggatctcaaaccaggtgagggtgcttcaggtgcatctagaagaccctggggtacttggaaaagtaatggaaaaagaatactgtcaagccaaaaaggcacaaaacagatttaaagttcctttggggacaaagttttacagagtgaaagccgtatcatggaataagaaagtataacttatggacaaaattaatacattctatgacatttttttctgatttgtcctgcagtgctcattcatcactccaaaaacagcaggccatctttttatgcaaaagtcagcgtgacaatatacttcactggtgtacatcgtttactttttaactggcttcattttaggaataataaattcatcagaatccttggctgaattaaaatggtttttgttttttggttttttttttttacccagacaactctagaaatgcggaccaaactacttcattttctcaaagggcataccttgtgcattgtggcttatgatgagccatattaattgcctgttaaatatacactagcttgaacttagatgttaaatgttattattaccagcatttgtccttttgtgaaatcagtatcagaatacttgcactctttaacacattctttataaaatgtataaattattcagaactatttaaaataaagaggagtgttattgcatgctgataatcattttgagtttgcctcagtagatactaaagcaaattgtttcagtttttttaaatgccctttgatgtttcaaaaaaaaaaaaggaactgtaatttgattgactgattttaagatcagccataagtaatcagcaatcttcaaaagcactttcagtggattggtcatctgggttctaaagggaagagtctgtgctactaaccatttcaaatgcagactcaaaccttcccaacatctttatgactctagaataatcatattgatgaaatcgtaattcatggttgagtttcagaacaaaagatattcattgcacattaaccatttagaggtcatttaaataacaaaatattgtattgtaaaagaactgtacaattttaaaacaataaagatttgaacctgtaaatgtgtgtgccttttaaagaaggatacatttttaatatatttgagtgattgctgggaagtgtgaaaatattgttatgtatcatatcaaagagaaacatgtttattacaaaaatgttctttaactatatactatgtaacagggtaaacagtgttatgtagaatagaattgtgtaaactagatctttagagaagttgccattgagcaaagttatttaaatgagttagttgagttggatgagaattgtttgaggtttgttgctagagaacaataataaaataattctttttcagaaaatatttaatttcttcataaaaataagttaaatatttttttaaatatgtatatctaatagtacaaaatggaataaacatcatagtgtatagaaaactgaatttgacaagttaatgaataaatgaacaaatgatttcacatgtttctatttaatctttccatgacatctttatgcaaagactgttaaagcaataactttatatagagggtgattttgttaagcagatctggttaggtgtaaatatgcnattccaggtaggt

SEQ ID NO: 57223 - DNA, 843 bp, Homo sapiens
ggcgtacgcgggcaagatggaggcgactacggctggtgtgggccggctagaggaagaggcgttgcggcgaaaggaacggctgaaggccctacgggagaaaaccgggcgcaaggacaaggaagatggggagccaaagaccaagcatctcagagaagaggaggaagaaggcgagaagcacagggaacttaggctgcggaactatgtcccggaggatgaggacctgaagaagaggagggtgccccaggccaaaccggttgcagtggaggagaaggtgaaggagcagctggaggccgccaagcccgagcccgtcatcgaggaggtggacctggccaacctcgctcctcggaagcctgactgggacctcaagagagatgtggccaagaagctggagaaactaaaaaagcggactcagagggccattgccgagctgatccgtgaaaggctgaaaggccaggaagacagcctagcctctgcagtggatgctgccaccgaacaaaagacctgtgactccgactgaaggcatgccctgccccaccactcgcccatcaggcctgtcctgcaggggatggtcttgggcagggatgggggctaggcttgccatcacctccagtttggcttctgagcagagactccctgcccatcaagtctgaaacccccatggatgaggtcagctccttgtctgctgggtggcccctgccattctgaatggaggcagaaccagcaacaactctgggcgtgcctgtgtctgcacatgtggatgtacatatgtctgtatatatgtatatattttgaactttctaaaaaaaaatctggaaatagaaacaagtaaacccctgtgtgtgg

SEQ ID NO: 57224 - DNA, 1265 bp, Homo sapiens
  misc_feature (1)...(1265): n = a,t,c or g
gtttctgggcccgtacaaaggaagatccacagaactcatcccacggttaaaaggagtcctcactaatccaaattgtgaatttgaagccaactacgttgctatccacacccttgccacctggtacaaatcaaacatgaatggagtgagaaaagatgtagtgatgactgacagtgaagatagtactgtgtccatccagataaaattagaaaatgaaggcagtgatgaagatattgaaactgatgtactctatagtccacagatggctctaaagctagcattaacagaatggttgcaagagtttggtgtgcctcatcaatacagcagtaggcaagttgcacacagtggagctaaagcaagtgtagttgatgggactcctttagttgcagcaccctctttaaatgccacaaccgtagtaacaacagtttatcaggagcccattatgagccagggagcagccttgagtggtgagcctactactctgaccaaggaagaagaaaagaaacagcctgatgaagaacccatggacatggtggtggaaaaacaagaagaaacggaccacaagaatgacaatcaaatactgagtgaaattgttgaagcgaaaatggcagaggaattgaaaccaatggacactgataaagagagcatagctgaatcaaaatccccagagatgtccatgcaagaagattgtattagtgacattgcccccatgcaaactgatgaacagacaaacaaggagcagtttgtgccaggtccaantgaaaagcctttgtacactgcggncccngtgaccctggngggatttgnaggtacttggtgatcttattttttnttttttttntnnnntnnntnnnnnnnnnntnntnnnnnttnnnnnttntnnnnttcctttcnntcntttccttcntntnctncttnccncntcctccncntncnncnntcccnnnctnnnncncntnnnncnccnnnncctnnnnnnnnncnncncnnncnnnncntntncctnnnnnntnnnnnnnnnntnnnncnttntcnnncnnnctctnttnttnttcnnnnnnnntntntntntcntntnnnncnnnctcntntnttnncntnnnctctnttcttnctnnntnncntnntntttntntnnntccntcnctccncnntnnctccccccttnttnccncntcttcncntctctntnnctctnccntntccctccnnnccnctcnctncncncncttntncccccttcccttcnctnntcnccnccctcncct

SEQ ID NO: 57225 - DNA, 2349 bp, Homo sapiens
catgagttgatagtgataagctcctaaggatttttaacttgtacttttgtgaacgaagagaatgcataaataatgttggtgaggataaagtacagatatttcatgtagaattaattgctagttatgatgcttgtggatagttaactgttttttttttagtcaaaatgatcatgctacgaaaagatgcttctgagagaatgtaatgagtaactgatttttcttcctgagtcgcccttgccaaatatgttactgtattaattaatctaatattgagtgattatttgtaaaattatgaatatgggaaatccatctatctacagcctaagttacacataagtttcagaaagtctgattagactaaagagatatttcttctgggacagccttcttcttggtaattttgaagttctttttacaagttccttcctcagtttcagttctttccagtgttttgtagctcactgtcactcactgaatagagaaacgtgtgccctatacttcctgtgacaatcattttgctgacagaatgatggatgtttaaaatattgcacaaagtactttaaagaaaggtctgttaggaccagaagcagagacaccacttttcaaaggacttcttggtttcagcataacctaagacagggaattgggagccatcatatgtcacagtgttcagaattcaagcatatttaagggcattttctttgattctcaaagttcagcattcattttgaattgagaagcctatacatttagctgacaaagtgcttatagaatttcttaacaactgaaccattcaaaaggatttttttatgtttaaaactggatttcaatgtaagcaaatgaagaaaaaaatatagatttcatttccatagcttcttatccctgtattgaggtaataaattgttttactgacaatttttcctttttctacactaaaacaatatgtgatatatttcccctcttgaagaggcaattcattaaactctcaaattttctatagaatcaagatagaacctttagatactccaactcaccaaaatgtaaaaaaactaacaaaaatatttggtcttcaataatgctaaatatctacatttttagaatttatcaacatttaactagataattgggcatgtcttaattatgcatgtacttatccatactaataaaattgacaatgctagtgcatacttattggtttagtcctattatcaggatataatcatctgtgaggaggatattttaaatactgtaaatgataacagttaatgatatacacatttagactgagttgcacactggcagggagaccaaaaacattacttccatacttgtgtcatgattcttttttttttgagagagtctcactctgtcgccaggctggagtacaggggcatgatctcggctcactgcaacctctgcctcccgggttcaagcaattctcctgcctcagccacccaagtagctgggactacaggtgcgtgccaccacgcccagctaaattttgaatttttaggggaaacggggtttcaccatgttggccaggatggtctcaatctcctgaccctgcgatctgcccacctaagcctcccaaagggctgggattacaggcgtaagccaccgggcctggcctgttttatgattcttaatagttacttggtttaaatcacatttgatactatccttctgaaaagtctgagacagatctacaaactacagtcaaaattatagattaagaggaatgaatgcacctatttggctttaagttgaagatgaattatttctcatgctcattttcttgcggcagttatcttagaaagacccccaaaggctttgtgattgtaagcactgtcatgatcacagaatgcaagcttctggtaccatgatcctcaacttagagaggaagaaaccaagacagagagcttaactcacttctctcagggaaaattaggagttgagcacaggacaggaaatgggctttggccccccttttagctccaggcttttctaaccagacttgatttcctcatgttctagaaagatcactaatggtcaagtggaacaagcactacacgacctaacccctattggggtttttaacttaagggaggctaatttttaatttaaactgctcgagatatgagttctgcaaaaggtggtccgcatccttggccctctggacattatcactaaattgcttgtgcctgttaacaagaatactgaccagaatgctcttcatgtagcttatacagttggttcacttcatgcggttcttgacatgtttatttctacccttaatgcaatgaaatgtttcattaataaaaaaccactttatatagaaaaaaaaaaaaa

SEQ ID NO: 57226 - DNA, 2017 bp, Homo sapiens
ttttttttttttttttttgaagaaaaaatgcttttattaatcacaacatgaaattaacatgacatcgtattagaattaaaccaggataaatactgctgttataaaatttacatttctcacatccattccagaggaaaatcttacatattagggctcatcttaatgttatggactgatttcagtaaaacttttttaaatagtaaatagcaattaacgtattctcaaactgtgctaagtagttagaaaggcaactataaaatctataatgataacacgtggcaggattagaactgttctgttaaacattaagaaccacatctctgttttagatgttacctcagtgcacctttttcactggtaaggcaactgcttgctgtgggtgccacaatgattaccaagtttcttcttaagtaaaagacacttgtttgatcaagactcaagtgagttttctttcccaattttgttcttttgaagcagaaggaaataccttggtctttgatatatataaggaggcaaatatgaaatacagctgttataatcttctaaatcacaagggcaatgaattattcattttctttgaaaatattcagtctttgaaatatttcatttttaaaataacaaggcttctgaataatttctcaaaactagctttccattttagtacacgatttgataaacatagcacattagataggtatttagcaatttcttctaccaactacactttgccctcactaagggttagagtatgatttgaaacaatttctacatataaagcatctttaaataagttttgtgttcactgaactgagacttctttcacttatgtacctatggaagttaatctgagcatacacatatatacatacttgcatacatatgtgtacatatgttttttaagtaagttacttttaccattagaataaacctagacactacagggacaactctggggaacagggcggtctgcccttaaacaaacccttctcctaggttgaggaaggcaggtaatagttccactgaaaggatgtgatgaggctgtagtaagtcttctcatcatctgttaatcctgcgttgcccctggtctcacccaccacagctaacgtgcaacatcctgcttccctcaagccagcactggccctcctcgaagtaacatctgtcagaaacaaaatgttgttggttgagcacccaatgctgtctgcaatctttcggtaactttcactctctactttgtgtccaatcttggtatcaaagtgaccatcaacaagctcaagaatatctccctccgtagaatgcccgaataacagtttctgtgcctccacactccctgaggaatagatgtacaccttcattccggcctctctccacttcctgactgctggaactacatctgcaaagaactctgctttcatgcgcccagctgtgaatgccgccctccacatgtggccctgcagctgtttgagtgcagtggtctttcgatccagggacatctgccagcacacattatctaccacggcctggatcatctgttgcagatcatccactccattcccagatgctgcagggataggaacagccccatccaggtgggcgtcctcttcagcctgtttcctcaaaagactgacatcctgctggcactcctcttcttcccaatgtgtctgcagatactctttaacatttttctttcgatgtaaggaaataaaatgctcctttcacgaaagcaatcggggttgtggtaccttcggatatctaacaggatcacggtgacttcggcggggaccgaaagcacgaccatttccctaccggatgctacgggactcggcctgctgttggggagggctggagggcggcgccggctgcggctgcggcccccggtaccgtcttgggcttccggcggccccgcgcgatctcggagccagcgaccaagtgcagcccccgcgcgtggggagaggacacctctgcacacctggaactggaaaaagcggccgcccaggagccctgaactcgtgagcaggga

SEQ ID NO: 57227 - DNA, 2913 bp, Homo sapiens
cgctaccttgaaagaagaaaaggttcgtgttcagagcagggcatttagtcccaagccaggctagtcccacaagcaagagaccaaagccattctctctgattcccaacccctaccttctctcctaattcccacttttaatagaaaagttggttataactttttaagaaaagtttccaccacgagggaaagtcctaacctcgctctcgcggcctacctttacccgcccgcctgctcggcgaccagaacaccttccaccatgaccacctcagcaagttcccacttaaataaaggcatcaagcaggtgtacatgtccctgcctcagggtgagaaagtccaggccatgtatatctggatcgatggtactggagaaggactgcgctgcaagacccggaccctggacagtgagcccaagtgtgtggaagagttgcctgagtggaatttcgatggctccagtactttacagtctgagggttccaacagtgacatgtatctcgtgcctgctgccatgtttcgggaccccttccgtaaggaccctaacaagctggtgttatgtgaagttttcaagtacaatcgaaggcctgcagagaccaatttgaggcacacctgtaaacggataatggacatggtgagcaaccagcacccctggtttggcatggagcaggagtataccctcatggggacagatgggcacccctttggttggccttccaacggcttcccagggccccagggtccatattactgtggtgtgggagcagacagagcctatggcagggacatcgtggaggcccattaccgggcctgcttgtatgctggagtcaagattgcggggactaatgccgaggtcatgcctgcccagtgggaatttcagattggaccttgtgaaggaatcagcatgggagatcatctctgggtggcccgtttcatcttgcatcgtgtgtgtgaagactttggagtgatagcaacctttgatcctaagcccattcctgggaactggaatggtgccaggctgccataccaacttcagcaccaaggccatgcgggaggagaatggtctgaagtacatcgaggaggccattgagaaactaagcaagcggcaccagtaccacatccgtgcctatgatcccaagggaggcctggacaatgcccgacgtctaactggattccatgaaacctccaacatcaacgacttttctgctggtgtagccaatcgtagcgccagcatacgcattccccggactgttggccaggagaagaagggttactttgaagatcgtcgcccctctgccaactgcgaccccttttcggtgacagaagccctcatccgcacgtgtcttctcaatgaaaccggcgatgagcccttccagtacaaaaattaagtggactagacctccagctgttgagcccctcctagttcttcatcccactccaactcttccccctctcccagttgtcccgattgtaactcaaagggtggaatatcaaggtcgtttttttcattccatgtgcccagttaatcttgctttctttgtttggctgggatagaggggtcaagttattaatttcttcacacctaccctcctttttttccctatcactgaagctttttagtgcattagtggggaggagggtggggagaccataaccactgcttccatttaatggggtgcacctgtccaataggcgtagcctatccggacagagcacgtttgcagaagggggactcttcttccaggtagctgaaaggggaagacctgacgtactctggttaggttaggacttgccctcgtggtggaaacttttcttaaaaagttataaccaacttttctattaaaagtgggaattaggagagaaggtaggggttgggaatcagagagaatggctttggtctcttgcttgtgggactagcctggcttgggactaaatgccctgctctgaacacgaagcttagtataaactgatggatatccctaccttgaaagaagaaaaggttcttactgcttggtccttgatttatcacacaaagcagaatagtatttttatatttaaatgtaaagacaaaaaactatatgtatggttttgtggattatgtgtgttttgctaaaggaaaaaaccatccaggtcacggggcaccaaatttgagacaaatagtcggattagaaataaagcatctcattttgagtagagagcaagggaagtggttcttagatggtgatctgggattaggccctcaagacccttttgggtttctgccctgcccaccctctggagaaggtgggcactggattagttaacagacaacacgttactagcagtcacttgatctccgtggctttggtttaaaagacacacttgtccacataggtttagagataagagttggctggtcaacttgagcatgttactgacagagggggtattggggttattttctggtaggaatagcatgtcactaaagccaggccttttgatattaaattttttaaaaagcaaaattatagaagtttagattttaatcaaatttgtagggtttctaggtaattttttacagaattgcttgtttgcttcaactgtctcctacctctgctcttggaggagatggggacagggctggagtcaaaacacttgtaattttgtatcttgatgtctttgttaagactgctgaagaattattttttttcttttataataaggaataaaccccacctttattccttcatttcatctaccattttctggttcttgtgttggctgtggcaggccagctgtggttttcttttgccatgacaacttctaattgccatgtacagtatgttcaaagtcaaataactcctcattgtaaacaaactgtgtaactgcccaaagcagcacttataaatcagcctaacataagatcaaaaaaaaaaaaaaaaa

SEQ ID NO: 57228 - DNA, 3458 bp, Homo sapiens
  misc_feature (1)...(3458): n = a,t,c or g
ttttttttttttttttttcagaaattgaaaaagatgtattaaaatattcacaaaaatacaactgaagatcaaaaaataataatgagcttgatggtttttccctagctgatatatttccattgaaaaactagagatagtttgaaatttcaatctctaagtaatgccttttgagtgctcccatacagaattagcgcataattttaagacgaccctgtttgccaggacgaagacatggagagggcagatctgccctttaggcaaccttagttcgttatctgcaaccaggaaaggagtgctgaggcacagggaaaaggggagccaaaagggctgcaggggtgggtgtgcagggcttgggaagaggtcctgccctgagaggctcatctcagtgtgagcagcttccttcagggaaacctgtcctggcagagcaccatgctggcagctgcccttgcctggggggaaggttggtgagaactggtgaggattctctgccagaatgccagggcactgacagagtttgaggtgtctggttgggcaggaggccaagaagtcgggctggggaagggagtggtaagggaggaacaggcctccaggtgtcattcgagtgagtggcccccacagcaccagcttcaccaacacatggtcccggcaccgcaagaagaagtgaaggctcttgctctcagggagctccgaaatgtttcatttattcacaggaactgttgagaaagcagtgaaaaaacaatgccccttttctctgtaaaaaacgactgtaaggaaacatgacacaggcctgtctacaatgtgtgtcctctgtacctcaagcacagccctggtcagctatgtggttttcatggtggcaaaggctcaccaggagtctcagcttgaaggatggtgacaatctcaacacccttcccctccaaacataagaggccttccaaaggctcctatagttttcaaaatagatgcccaaaaagttttaggatgcaaggcagagttgaccactttgtggaaatgtctcagggccagcactgtgtgtcactctcttgggctgggcctatgaacatggaaggcagcagggcaggcgtttttttctccattccacacagaacacagagcagacgctgcccagcttcagacatgtgtggtgaccaaacctgatccctgttgactcacacagacgtggcatgtaaggtggagcgttacaagaataacaaaaatagctccctcaaaaaacaaaaggcttcatgtatggcaacagcattagttttgaagctcatatgccctttatcttaccaccttgtgcacacctcaaaatctcaatcctgttttattccctttgtgaattctgttggaactcagcccttcaaacatcccccagaagatgacaagatgagaagaaaaagcagcagcctcataatggactcccaaactacagggagaaaaagtaacattgcccctcactccccactcaccccaaacacgttctgcagaccatctagacagtaattcctttcccataactgtgggctttcgaacaattttaaaaggggggaaatttaaaaaaaaattcagaaaatgggagaaatgacaacataagtgttgaatgatcttcaccacactttccattcccagtaaaaagtaaaaactcatagattttaagtgcggtggggagtagtgaataggagaaaacaagttttagggaaggacagccaaactgtctaatctaggctctcattaacctcaacagtctttgaggcaccatgaagctgttataaagccatgactgatgctgcctcttgctggaagcatgactgacgctttataaagaaggtgattcttgccagctgcagtggtgcaactatagttcnnnnnnnnnnnnnnnnnnnnnnnnnnnnnnnnnnnnnnnnnnnnnnnnnnnnnnnnnnnnnnnnnnnnnnnnnnnnnnnnnnnnnnnnnnnnnnnnnnnnnnnnnngcgaaagaaggtgattctctagagagcgagctctgggagattggagagcggcaacataatgataccatttctgcctacttagaaggaaagaaactcctctcctttagctgtatggtgactgttatttcaagcagaaaggacatcagcaaagaataaaaccgatactttttactctccacgttacaaaagttcctcaagcaaagcttggattttctacttaatcagtattgatccaactgtgtccagaatgaagtgaccttcggcatttatcctttgctaatcttgctattatgaatccagaaattgatatgacacatttcaagggtgcaaacttaaagtaagtctacacaacatgtaaggctaacaattgccccatattttagtgagaaaaacttcaaaaaaacttctcaaattgttttcaagttgcatagccaatgggtattttttaaaagcggcagacaaataaatggtactgatactgtgctaaaggccaccctggggtatgcttccatcatagcatctccatcctccaactacagtaaatgctaagactaatcagtcttaagcccttagattaaaaggccatgtctactggaaatactacaggatctgctattgtctccattaaggcaaaccatttctaaatgatggtgaaaggaatgtttctgaaatctcccaattgtaaatgacctgaaaagaaagtacaaaaacagcaagacaatgggtacatatgtagaatcataccatcttttcatcatgcaacactggctcctcatatcaggatgactaaatagaatatttatacatatcctttgtacacatctttctctccctctgtgagtacacgtgtacttgtccttgcctgggtctccaaggctacatgtggtaatgggctacattttctgcacgagagtccagtttggttttgtttcttgctgaggatatgttctaggtattctcttaattctttcggatatccgcatacaccacagactctgacttgttaatcttgtcactgtgatgtccgccggagtggtctaactgtgcatatatgactgggccctggtgagatccagaaggcagactctttacaagaccctcagtgtcggagggggacttccgaggagcctgcttaactggtgacaaactctctgatgtactgcagccagtgtaatcccgtttagagtttttccttctatagaggacagccagaatcatgctgatgagcagagtgagacctaggaccacagcagtaactatgcccaccactacccaaactggaaacacaggcaaattctctagagagaaagaacaaaatagttttaaggtacattgctacagagagaaaacatggaattttattaaattaacgagcaagtatcttcatttagcagttaccgtaccctcttttctcgtgccgaattcttggcctcgagggccaaattccctatagtgagtcgtattaaattcgtaatcatgtcatagctg

SEQ ID NO: 57229 - DNA, 449 bp, Homo sapiens
  misc_feature (1)...(449): n = a,t,c or g
gtgnnttgnnnttttganancnntatgacatgattacgaatttaatacgactcactatagggaatttggccctcgaggccaagaattcggcacgaggaaatatgatgggcgttttaaagacatctttcaggagatatatgacaagcagtacaagtcccagtttgaagctcaaaagatctggtatgagcataggctcatcgacgacatggtggcccaagctatgaaatcagagggaggcttcatctgggcctgtaaaaactatgatggtgacgtgcagtcggactctgtggcccaagggtatggctctctcggcatgatgaccagcgtgctggtttgtccaaatggcaagacagtataagcagaggctgcccacgggactgtaacccgcactaccgcatgtaccataaaggacaggaaacggtcaccaatccattggttccttttttggc

SEQ ID NO: 57230 - DNA, 817 bp, Homo sapiens; identical to SEQ ID NO: 13630

SEQ ID NO: 57231 - DNA, 1280 bp, Homo sapiens
acatgtagacgattaagtgtatattataagctatatgctgaaaatggcttccatagccatgagaacatcttaaaactatgtgtaaatatattaaggaaagtatagctttgtaatttaaattggagcttttagcttgtttcatggaactatacaacttgtgggtaactcacatgaccaaacaaaccaaagtgcctgtgacggggcgggtggcgtctacccaccctcccttctagcagattcttattttgtttgaatttataaacaaggctggtggctgtctacccaccctcccttctagcagattttgattttgtttcaatttataacttacactttgaaccatgggtttacttataatggagtctgtagcttcacagcatatttcatgtaatcataaagaccagtatattccctcctgctgaatgacatgcgactgtaaagcctctttataaaccatttccaatgttagtatataggattatttgggaagcgtatcaatacctttatagacaaatacgaacatgtatgcacacaaaacatttaactatggtatttatggaagacaggtaacaacattaaatctagttgctttcccttagtattagatttgttgagggttttttaaaaatcaggtctgttgaaagtcttctgtcataatctataaagcagcagcactcatggaaattgtagcatgccagtaatttttaccaacatcccatacatctgagttctgcagtccagtgtgtaatccgctccatgtgtattttgcttaatggaatgctttatttaagcacttaggcagagtagacacaattaaaggtacaaagcccagaggaagtggtagagcagcaccgtgcctgccctgaggcagtggagtcagtagcgctgtccccagggccttgagtgcctggaggtgcttggcctccagtagctgcctccattctcttttaaaaaaagggggtgattctgaggcactgaagtgcctcccagatgtggaggagtgaagccaccatcgaggccacactcagcactccaggatcccagcgatgtcagacactcttgagttgtcaaaacgttaattttcagttttaaataatcagtttatctaagaaaagggaattttaacttttctaccttgagccaagccaattgaagggaaaattaattaacttagtaaatttgaagtgcagctctgttagctcgtacatgtgggttcttatcctgatcctgtgccttaaagtaggaaggtgtttccaagttcagattaaaatagaagcagc

SEQ ID NO: 57232 - DNA, 837 bp, Homo sapiens
tttttttttttttttttagtataagtatttatatttttattccactctaacacctcagagtaaagaactgatgggcaggcatcggcttctgctgacaattgccaaccggcatgagattgctgagctgaggtggactctccagacactggaactggaactccaggcccaatggcctctggtaagaatgctgcaacgtgagacccttgagagagactgacttgttgaagatgaagagaaaaccaagagcctccagtccagttgttgaagagcaaccacgagccaacaccaaggagacaaggaagaagaagtccttctctcaaccgatgtccgcaagcacaaagaagagtcccaagatggcgaagaaaggaaaataactcaagggagagccaggaagaaaaatgctccacaaaaatccatggctttaagaatacttgaggaagggagcaggccaacaccctctggccacagtgaccagctgaatgaggaactctaacagaatgagctgcagttggagcaacagaggggacatagctggaacaacagagcgaggggacacagccggagcaacagagtgggaggatgccaaccatttcaactctctccctgagcagcgagtaatttcagggcaagcccagagactaggatccatctgagaagtcttcagaggtctgacccagagaactcaacaacaggatacgtcccatggtgatgaaaataaaatgaatcttgtgttcaccgttgtattcctcacgacttaagttaaaaacctgatgaaaagtggttaatctccataatgggtgttagctccaatcgttttccaacgttagagataaccga

SEQ ID NO: 57233 - DNA, 5409 bp, Homo sapiens
  misc_feature (1)...(5409): n = a,t,c or g
tttctgggtcgtgatgtaaaaagttatttttattatgacttgcagtcaaaaaagtttgaaatacattggtcaatagagaccaccaaaaataataaacatggagtttccacgaaaaataataaacatggagattcctggtgttaacgtcaataaggatgagtactgaatgtaaaccagtcttctgctctggaatccaaggtaagctacagagttctcagtttaccatcaacactaaggttttacttgtttttcctcttaccctacactttcaggcaggggcatgggcaacagaaggaaggaggaaaacccctagtggcaatgatttacttggagtggtatcatgttcttttgagaaaaggcattttttaaaagagtaattcccaggtggctaattaaaaggctttccttctcccctataaagtcatactggtagcataaaagtgaacagaaatttgtcattacagttttgacattataaatggtctaaaccacggcagtctgcgattttgtttctggttttgcaaaatatgcagccacagacacagatagaatgtgtgatcttgtcctaatctactttatccacctgtaaaaggaagacgattggaattatccgaaggagactgactctgtcctctccatctgtaaagatgctaaacaatcattttctccaaatcaaccacctaaacacatgacaagacaatgtttagcttctggctttcagaaacccaatggtaagggtcagtttagttctggcacaaagactgctgtgtgccaccctaaacgtacctcatcttggaagtttcttgggtaagccggggttagcactgatttggcagatggccataaaagaaagtatccagggccagacattaaacacctgggttctgactttggcacaggcctcagaaagcctctgagatgacacagcttcctatttcttcaggtgtaagagggaggttaaaataagttatttatagggccccttcctgaaataactaatttgaatgcagttctaagatttttatccagcttgctctgcaactctgtctattaattcctttaataacagcttgaactcttttagtaactatttctggccagtttccctttacaacccacccctccaaacatcccaaggttccattaagctcactcagcccagatactttaaaaacataaagtaaaataaagctaataaggaacaaaatttaaggctttttctttttatttcagccaaggaatgatgcatgctacagattaatctttactttttcccacttggtttttcaaagaacaccaccacttcaacccccaatgaacatggcacttgtttgtttcttccccttctaatttattccagattttcaagtgttttcttcagtaacgctgctttctcctgcagttcaggtctgctgtctggctccatagtagctaaagactcaattaggagcactctgcattcagatgtcaaacattcccactgtttagattcttcaagttttttaagcagcaattctatcacagataaagcttctgttctcacagatgagtaggtcttattttctaaagaatatgtgattgatttacaagtttcaagcagaatttcagccaaagcctcaggatcggcatgttcttcttccaaaagcattaacccctgaaaaaaggcattcattgattgcaggactcctagctgcactttccacgtgctgagttttagccgttcacacatcagtttgcacagctcctgacgataacaacgttgggtctccgcgtttcgcgggccaggctttgcccaggctttcaaaggcacccagcagatattccagctggagctccttttccttttcattctcctcttcatttttggttgtccggaccccactgctttcaagtgagttcttcttgatgagaggtatgacaatgttagagaactcctggaatctgtcctctttggtggccttcaagatatcagctgcacagctgattgctacaatcttgtatttgacattctctttgctacattccttcagaacagcttgaagaatttcatttgtgctgggttgattgggcacagacttttccagctctgcactgcaagctgtcaccacacaggcaatggctttcaatagctcctcctttcctgcccacgttcttccagccaggccttgcagcaatgcggtcagtatcattccgagatatggaggtactagagagctagtctgttttgcaattgatgccatggcaattgcaccctgggctttcattttccaggactgagactgcaaagccttctgggtaatagtaattaactcctgcaggtataatcgaatgccaccaaaggatccaggtacgttttcctgccacacttcggtccataaattacattcttctttttcggatttctcctcatcagcaatttcatgcatgcctaaaaatgccagaggcaggacttcttttgcatgattctttaatacatcagggctgtatcgtccaatagcatgaatagtcaaagcacaagaggtcttgtagataggttcttctttctccatataccacccattgagcttctgcaggagtttttcagtgctgctatcccgtgaggtccgaactaaatggcccatagcaaatgcacaagatttctgaatcacactgttccgatctgtcaggccactcagcaaagcactcataagtttacctgagtaaggtgttaggtcctgaggacactgagtagttaatgacacaatgacactggcacagccacccttagttccaagacctacaccacttctgatcagttcacacaacctaggaactagctcgcccagcactgacacatcaaggtattgcaggcacatgttgattgtttccatcattggagaagatttggcagcactaagccgagcactatccatcgcagccttttcttgctctgtcgcccggaggctcaaataattgagaacttggggctccaatacacttaaggactctagcagagctggaatgagttttggtgcatgcggtttcaacatggctcctgcacttttgctgatcttcacaagggtgttaatgctgagggctcgaacttccgtcacggtgctcatcattcctttgtccagaaggcaaggcagaagggcagcgatggttctctggccagctgctcctttggcagggtcacacattttcacacagaccttgctcagagttttcagagctagttctgccgcttttcgtacagattccttgatatcatcttgtactctaaaaagcgtttcccaaatttctggaagtttatcaatgatgtcatctaagggtcttcctctcaataaatcattcaaagctaaacagctggattctcgaactcgccacatattgcttgtaaggttcttaaccaaatcttgaagaatttctttcaaatatttatccaccatggatttgtcagtgaccaacgcattccaaatacttgtcatggcctgtcgaatgccaaggttgggatcaaactggtaacgataaagtcgaggaactagctgaggcagaaaaggagccagctgctctccagctctggtagcaattacattaaaaccaaaagcagcacccttcctagagttccacattgcatgatggttggctaaattcataaatttatacaccagatctggctggctaagatcacttgccagagaacaaagttccttgtaagtagaaaggccctgaccatctggtgttttgccaagagctcccccttgaaataccactgtctctccagaaacttcatgtttaactcttttgccagtcataagtgtttccacaagtgtagaaaccaattcctgttgatcttgttcattgcctagttcataaaccaacccaaggccctttgatgcaacatcttggctaagttcatcattttctgatagaactgaaacaaatgcactttgaatttctttaagatgagacttcacttctttgtgggtacttagcttcctgacaagggaaaggagccagatgcaggctgcttgcctcacgtgtgggttggggctgatgatatgtttatttaaaatcacatccaacacccatggaaccacatcattcactttggctccagcaggtggagtatattcctcttcagtcatttgccaggcatctcgggcagccacagaactagttcctattgcagcactggtaatggcttcgccaatagtgaactgaagttctatctgcttggcctccacagaatccatcagaccttgcaagaggagtttctggtgaggaaaatctccatccccaactggaaaatatcccagtgtttggattgctcgttctttcatcttatttgtttctttactggaaggtattctacttagtaagctttctacaagatgcaatttggtaaagccagatccctcactggggattggaagtggaccatttctgccaatttcacccagggctgtgcaggcagcaattgccaggaggggtgatgtactgtccaaaaatgagcctattgtttctgtagcactctgaatgagttcctcttgatcagggagggtgtcagcatttctctccaggtcttgttgctctgacattctcattttctttttagccaaataccttcccaccgtgaatcccaatgcaagcaaggatccatgctgtatctccgggctgtgattgtcttttgtagtctttataagctgttctatcattgatttcaactcattccccgacactgttgataccactacagaataaaacaacgctgccagttcgcgcatttcttctttactgttattcatcagactctttatccattctgttttgtctacaaatttggtagccagcttttctggatacactgacacagcttccaatagacagtacataaccggcaaacctccaacacctgctaacagctgctgaagcaggccaatgtagatctggacagggttagtctccccactcttgttagatgatgagggtgccatctgccccgcttgacattaaagtccgtatgtagcgcccaatgggctggggcatgatcctgcatatcagccaaactctgagaggtgggcaccacccccgcactgtgcgcaaggcacatgcgcaagtacagaacgatctctccaaaggctgctgggttaaatggaaggacagtggtcccggtcatgtacttgactggagttttcattcgatgagaagccttttcttggatgtaataaaccatttctgggaaggaaggcatctgctcagactctttatccattctgttttgtctacaaatttggtagccagcttttctggatacactgacacagcttccaatagacagtacataaccggcaaacctccaacacctgctaaacangtntgaagcaggccaatgtagatctggacagggttagtctccccactcttgtc

SEQ ID NO: 57234 - DNA, 1248 bp, Homo sapiens
gagagagagtcagcggccctgatgttagcgatgcagactccaggagaagggggcatgctcgcagtttagaggaagtgagcccctcttccacgttccactcccaccatcctcctgggaccccagcctgcatgccccccaaaagatgcttttgcactgattcaacaaagcctaaagatgcaaaggcctaattgaagacctgtgaatggcatgtacggtcctcagttcccagctgaggggccactcgggctccccatattcccctcagcctctccatcttccaacaggggtgtggagtgcatccatggccatgagtattgatctgtcccagcctgtgcattgctccgaggcagttctgagtggatgatgtacagatgggattcctcagctcatttgcgtggttgacgttatggctgctggttttactgccacaactcccaggcccaacctggcttaatgtctaagttttaagccaaaaaagatggggagcagagctttgtggcagggctgggggttggggtccactttagttttgtggcaggatgaaggctgcagtggttttattaatcatgattggcctggccgtagctccaggctgagagggacaggtttgtcaagtggtggtcccccagatgtccctgtgcccaaaccctggcctgtctgccctcaggcccagcaagaggcgctaccacaaggctctgactggcgtccctactccctgtaccccagatggacagaaccttcgggtctacagtcggaatatatcattctccccattttaacctgagctgcctgacacacggagggtgtgctgggtaaggggcctagggagccagggttgaatcatggatcctggggaaaggttgcagacacaggaagggttgtcacctctctgtggagccctgctgcttaccacacagcaccttctgcagagactagctctgagggtggcaggggaccccacatgccatggccactccctctctgcacctgtccgtgcctgctgtggaagcctggactgggggaggagattgctaccctgtgagcctgagggagccacgtccagctgtgacctctacctggggctttacagagagttgtttatgggtaacagacaccttgtttcagagggaatgggcatgagctggcaagtgaagcacccccacagcttatcaggaactttttctcatttttaaaccatcatgtcttcatttcacattggaataaagtgaggttttggaaaaaaacaaa

SEQ ID NO: 57235 - DNA, 2698 bp, Homo sapiens
  misc_feature (1)...(2698): n = a,t,c or g
gttttgccttaaaacatcaatatgctggattgtggcgtgaggtatttttattccctttgttagtactggaaaccgtctggtacatcttgtaaggcaaatgattaacacacggcaggctcttcgtccgtttgcaagttgctgtttgtttccaggtacaccagtcagagctccacagagagggtgcgttcctggttctcaggtgggcaggtgctatggtgcggggcgctggaaagaatggggttgaattggccctcgcctccgcttgtttgagactctcgttagaaagggcttaggaaaaccaagggaatggcagccaccccatcaccatcgagaacaggcagacgtttcccgagtaggggccaaagccactggaaaccgtgttccctgtgcagtccgactgacactaccccatgcctggggggaatgagtataaaaaggtaaatgtttttgaagacaggcacgatatatactactagagaatgcgcagtttcaaaccacagttgcaggaggatataggaataacgacaggtgccggggactacgtaccatgatttcatagtgctctgcagccagcaggctcactaaacgctcatcacggaacataccacaaatggtgctgatcaatgacacacgggttttcatgcttgtgacacagacagacagcaaaacaccacggcttattatcttccccattgtgtacaccactcacaggacggtgacagtccaggtattgcactggatctcggctttgccttaacagaaaacaaccctgcctacggttggaaagagttaccacttaaaacgatttggtcaacttgcaccaagaagtaggttgggaacaggtgttttcaggtgagcgtgaaaccccgccagtggaacgctgtgtgctgcaaattgcttattaatcagagaagtgagtcctactaacttcctattattacaaaagtagaaagactgaaaaaaaaaataaaatgaaatctgaaaatgatctcatttgcttaaggctgcactgagtgtattgcaaacaaacaaacaaacaccgggaagtccacttcgtaaaatgcagcagcccaataggtgaaaataataaaagaaagaactttttttaggaagaaaaacacttgccctgtcttgtgttgaacggatgtgtgtgtactgtttttcaggggcagggtggagggaagatgtcatttggcactctcgtaatgacaatgttttaatactggcactagctaaagaacaagcgcccccagcggatgcccaggactggaggtgggagcgctgttcattcagacgctgagaggtcggggttaaaaaacgcggctgtggagacaggagagctgctgggaagccatgtttttgattttcagacaggtgttaattttaccaggcttcattaatacagaagaaaggaaacgtcttccaggaaagcagccactgcggaaacgagtgtgtccggccatcaatacacaagagactctttgtggctcaacacgtggggtcgcgaggcagagctggtggcactgcggatcacttccatccacctttcgaacgtgtactcgctttccgccctgaagtagtagacgtgggacttgaagtgcagcttgaacacgtagtctttctggatgttctcggactcagaggggatggtgagcgagtagccgagcagaggcaggctggcaaggggatgattgtcctggtgtgatttgtagaagaacaggcagaagtttgtgaacaccacccacagcttctgccacccgttgctgtttttgaatttcctcagcaggtttccagacaactgattctccactgcgatgctgaagtccaccatggaaaacgctggtgttgcggtgccagcacacgtgctaccattgtgtatgcccggtgcggggcctggcgctccagcgnatgatgcgaggcgctcaggtcatcctctgactcctggtcagccgcggtggcttcatcaggggacttgttgtcaggggggctgctggccaggaactcaggggcggggctgctgctcttctccgccaggtcaatggccatctggatgtcctcaacccacttctccatctcggaccgagaactggcggccacgatgatggactccgctggcccggagggtcaggcagtggggcaccccccactcgtcttcgctctcctcaatcgtcatgccatagagcgggagctgcccgtggactttaaactgattggaggccgtcagcccccggctcgtgtatagcaggacgtcgttgaacaggaagaacatgcgctgctggagccccttccccgagagcttgctgaggctgcccagacggatgaactcccttcccggaaccacaagattgtcaatgccaatcaaatctttcttgagttcgtgcaagcttctggaaattctccatcttgaatcatcgtaccgtggagctgtgcccaccatctccgtgatctcctgccaaagcggctcggcagtccctgaagtcggcgtggctcggcgggtggtgtttgcacagccgctccaggacctgcttgtagtgcatgagccggtgcagtggccgcaggaggaaggtgttgagcggtaggtaacacaccttctgcagctcaaagtctctgcagaagttctccagtcgccgggagctcttgattccattctccaaggcctccaaggcctngctgtgcttccacaggtgagncgccaggt

SEQ ID NO: 57236 - DNA, 444 bp, Homo sapiens
  misc_feature (1)...(444): n = a,t,c or g
accctttgagnanccgntatgacatgattacgaatttaatacgactcactatagggaatttggccctcgaggccaagaaattcggcacgagaaacattccccagggcaatgtcacgacttggtcttcccgaggagccagtcagaaacagtttgctagatgatgctaaggcccgcttaagaaagtatgatattggaggcaaatattctcacttgccatataacaaatactccgtccttttgccattggtggctaaagaaggaaaactccatttgttgttcaccgtccggtcagagaagacagatacattgataactccatttgtgggtttaatagaccacaacttccaggcccagccgaatcctgctgaagttaaggatgtattcctggtgcctctggcctatttcctgcatccacaggtccatgaccagcattacgtcacacgt

SEQ ID NO: 57237 - DNA, 1163 bp, Homo sapiens
ctttcttctcgtcggtgttcccggctgctatagagccgggtgagagagcgagcgcccgtcggcgggtgtcgagggcgggttgcctcgcgctgacccttcccgccctccttctcgtcacacaccaggtccccgcggaagccgcggtgtcgcgcgccatggcggagctgagcggctcttgagagtctcatcgagatgggcttccccaggggacgcgcggagaaggctctggccctcacagggaaccagggcatcgaggctgcgatggactggctgatggagcacgaagacgaccccgatgtggacgagcctttagagactccccttggacatatcctgggacgggagcccacttcctcagagcaaggcggccttgaaggatctggttctgctgccggagaaggcaaacccgctttgagtgaagaggaaagacaggaacaaactaagaggatgttggagctggtggcccagaagcagcgggagcgtgaagaaagagaggaacgggaggcattggaacgggaacggcagcgcaggagacaagggcaagagttgtcagcagcacgacagcggctacaggaagatgagatgcgccgggctgctgaggagaggcggagggaaaaggccgaggagttagcagccagacaaagagttagagaaaagatcgagagggacaaagcagagagagccaagaagtatggtggcagtgtgggctctcagccacccccagtggcaccagagccaggtcctgttccctcttctcccagccaggagcctcccaccaagcgggagtatgaccagtgtcgcatacaggtcaggctgccagatgggacctcactgacccagacgttccgggcccgggaacagctggcagctgtgaggctctatgtggagctccaccgtggggaggaactaggtgggggccaggaccctgtgcaattgctcagtggcttccccagacgggccttctcagaagctgacatggagcggcctctgcaggagctgggactcgtgccttctgctgttctcattgtggccaagaaatgtcccagctgagggcctttgtcccattgtccctctgtgaccccttcatctttgataaagcactgacatctccttcctaataaatagaccctgagttctgtaaaaaaaaaaaaaaaaaaagtttt

SEQ ID NO: 57238 - DNA, 1172 bp, Homo sapiens
gctcgacgctgcttccggcgccgtaactgctgccatcttctccgcgctatggctgcgttcggccgtcaggtccttgattggcaccgcctgatccccctcacctgggcctgtatggctaggcagactcctcatcttggagaacagagaaggacgacagcttctttgttgcgcaaactgactacagcctccaatggaggggtcattgaggagttatcttgtgttagatccaataactatgtgcaggaaccagagtgcaggaggaatcttgttcagtgcctccttgagaagcaggggactcctgtggtacaagggtccttggagctagagagggtcatgagttccctcctggacatgggtttcagcaatgcccatattaatgaattgctcagtgtacggcgaggtgccagtcttcaacagttgctggacatcatttcagaatttattctcttgggtctgaatccagagcctgtgtgtgtggtcttgaagaaaagtccccagttattgaaactgcctattatgcaaatgaggaagcgctccagttacctgcaaaagcttgggcttggagaagggaaattaaagagggtgctttactgttgccctgaaattttcaccatgcgccagcaggacattaacgacactgtcaggcttctcaaggagaagtgccttttcacggtacagcaagtcaccaagatttgcacagttgcccctctgttcttcgagaggacctgggtcaactggaatacaagtttcagcagcctcgtcttacagcgtgactgcaaagaaaaagacttttgttttgcaaaagaaaagcagctcggtgactccgtccacatcgccacagttgagtcagatggcagtggcagtcctttgccagtggaaggagttcctgctaaggggaggtgcaggaggactaatttattattgtgcaactgccagtcctgcgcattccagctacgctaagcgccctgcccaggcacgtaacaaaacatagacctgttttgaagtggcttgttacccaagggtgcctcactcatctgcgccaccaggaagatgaactgtgagggctcctataaggggcaggaagagcaaagctgtcctaggccaaccagagattcatctttcatgcagtgacatgttgataaaaaatgatggtcagtatgaaactggaaaaa

SEQ ID NO: 57239 - DNA, 1402 bp, Homo sapiens
cttcctgctctggaagcttccatctgctcgggcgaagatccgcatcacctccagccccatttttatcaccttctacatcctggtgtttgtggtggcgctggtgggcattgcccgggccgtggtatccatgacggtgagcacctcgaacgctgcaactgttgctgataagatcctgtgggagatcacccgcttcttcctgctggccatcgagctgagtgtgatcatcctggggcctgggctttggccacctgggagagtaagtccagcatcaagcgggtgctggccatcaccacagtgctgtccctggcctactctgtcacccaggggaccctggagatcctgtaccctgatgcccatctctcagctgaggactttaatatctatggccatgggggcgccagttctggctggtcagctcctgcttcttcttcctggtctactctctggtggtcatccttcccaagaccccgctgaaggagcgcatctccctgccttctcggaggagcttctacgtgtatgcgggcatcctggcactgctcaacctactgcaggggctggggagtgtgctgctgtgcttcgacatcatcgaggggctctgctgtgtagatgccacaaccttcctgtacttcagcttcttcgctccgctcatctacgtggctttcctccggggcttcttcggctcggagcccaagatcctcttctcctacaaatgccaagtggacgagacagaggagccagatgtacacctaccccagccctacgctgtggcccggcgggagggcctggaggctgcaggggctgctggggcctcagctgccagctactcgagcacgcagttcgactctgcccggcggggtggcctacctggatgacatcgcttccatgccctgccacactggcagcatcaacagcacagacagcgagcgctggaaggccatcaatgcctgagggcagctgccagggcctgtggaggacaggccagagaggaggccagcaggcccagagtccccaggggaggaggaccaggtcaagggacgttctgtgggcagtagccctgtgtggccctgttcccaccatgagtctggaggccccacctccctggggctcccaatcccctttgccatctctgctctcactggggaccctcctccccttcccacctgctctcatactgctcagtgacatggcccaggctttccttccagggccatgcttggcaaggttggctgagggcaccctccttctctgcacccttggcacgagggcagggctggctctcccaatgcctccatcccatccccatggtgctttggcctcctcaaagcatccaccatggtggatggactgaagtgtgtatattttcttgatctattttttaataaaaaggaaaaggagcaaaaaa

SEQ ID NO: 57240 - DNA, 661 bp, Homo sapiens
gcgccatcgccaagaagaaacttgcagaggccaagtataaggagcgagggacggtcttggctgaggaccagctagcccagatgtcaaagcagttggacatgttcaagaccaacctggaggaatttgccagcaaacacaagcaggagatccggaagaatcctgagttccgtgtgcagttccaggacatgtgtgcaaccattggcgtggatccgctggcctctggaaaaggattttggtctgagatgctgggcgtgggggacttctattacgaactaggtgtccaaattatcgaagtgtgcctggcgctgaagcatcggaatggaggtctgataactttggaggaactacatcaacaggtgttgaagggaaggggcaagttcgcccaggatgtcagtcaagatgacctgatcagagccatcaagaaactaaaggcacttggcactggcttcggcatcatccctgtgggcggcacttacctcattcagtctgttccagctgagctcaatatggatcacaccgtggtgctgcagctggcagagaagaatggctacgtgactgtcagtgagatcaaagccagtcttaaatgggagaccgagcgagcgcggcaagtgctggaacacctgctgaaggaagggttggcgtggctggacttacaggcccc

SEQ ID NO: 57241 - DNA, 1169 bp, Homo sapiens
cagcagagcaggtaacagctcttgcacctgtttctcttgcacctgacgtgcagctgctcctacccacctctcctggctgagccttgcctgatacagcagcccggaggcaccacttgcttcccgagtctcaccctcccaggcagctcctacactcaactgcttctctaggaaaggtctcacctccagcctggagcagtcgggattacagcagaaagccccatccttggcttagggagcgccatgacgactgaaattggttggtggaagctgactttcctccggaaaaagaaatccactcccaaagtgctgtatgagatccctgacacctatgcccaaacagagggccagcagggaggtgggcatggcagggaatggagagagtgagccagacagacttcacctccttactggacacagggtcaagggcgagtttcaattgctgctccctttactttctctacctgtgactactccctggaccaatcctgaggagggcacattttccagaagccacgtgataggggctggtttctgtggagccagaggcagagacactgaacttgagctcacctcctaacaccggcagtaaacttcctggaactttgccctcaggtgcggaggggacagaggaccctggcactctgttagggtgctgtagaagactagattgatggtagtttggcctgttagttcctgttttggccatgacttttgcagatggcaagtcacacaccctcaaagggaagctacacgggccaaatcgggggagtgggtggggaattttctcctctccctttcctactataatagtatttaagacatatcagctccagagatgagtcctggagccttgaattttgtttaacaaaataattgtaggtttctctctgtaataacaacgctggaaaggcagagaacctcttttatgctcatgtcttgcatttattgagatgactgtttctcatgcctttatgttccttcatgtaagtaaagtggacctttgtgctcaaactgttcctttcaagcttcaggaaggggttcccaaggtgtgacaatgtaggaacctgggtcactaatttttaccatcaaacctagccttagtatggggatggggcaagcagaaggagctagttacacctcagtggtcagttctctccagtcaacagaga

SEQ ID NO: 57242 - DNA, 1502 bp, Homo sapiens
tttttttttttttaagaagtcatttaagtttttattaaatatactctcttggcacaaatctttaaaatatataaacattagatataaacagtgtcttcatggcatcaaaatataactccagaccaagaccagtgaccagcagggaggcgagtgaccgcagagcctgagggcctggctgtgtgcaggggtgggggacagcactgtccccaactcctgcccggggtcccactcagctaaggaagcatctccggggaaacacactgggggtaagaagggactgggggaccctcccacctaccccttgtctctcctgcctaggcctgtggccccaaatccactcatttggtctcaccccacctggggcagacccccaattcctactgctgttgcattgcttgtgggagttgggtgccctcccatctccctgtgagggttgccctgcctctcctgccaagtttaagtgctgggtaagggattacccacacagtgggacagcccctcacagccatcacaggctgcctgggcctctggggacaagatcagggatggctggtggcccacatgcaaggaaggcagagagagcgggtctgcacacctgcaggtccaaggcaagaacaggaggaggacagaaggaagggaaatgaagtcacgactggagatgaacaagctcagatcccttcacacagcgtgtgctgagccagctgtcgaaagcaacactcacggtcacgctcacccctggcaccaggcagaccagtcaggggttcgatgtgaatagatcatagacccggggtcagccaagttgaaaaccaaaacaaaacaaacaaaaaaaagaaatcaagaaactcaccatgtcattaggaaatgggtgtttctgagtccctgtgatagctggcgggccctgggggactcctctgagagaccagttagctgggggttcccctgggtacctcagattttcctcacctcccacccccaagctatactctatcatgaggctcccacttcgggggattgaggctagcaggcaccccatgctccatttcatagaaactgaacaacccctgtgggctttaaattgctccatatcccagccaagtgcctgctcaagtggggacccaaggacctgctggataccacagctgggcagagggttggggcactgagatgctaggcctggggggcttctgggccaaaggaggtggtttgtgtgctcacatttcagcagatgccccaggatgcaggtctgacccaaacctgaggcagttccgtgtcatgccctggccctcgaagccctgctgtgcagagcaagcatgaatctcctgggaaggttacaaagcaggtgggcatgggcaggcaactctagggggagatgcactcttggggacccagctgcttgcagggtctaggatagacatgaggctctgggggacactgttcccagcaggaggctctagtgactgaggagtcgtggccatgtgggaaatactggagaaggcagggcc

SEQ ID NO: 57243 - DNA, 530 bp, Homo sapiens
  misc_feature (1)...(530): n = a,t,c or g
tggtagtggtgggagggaaaccatgtcttgctaaacctgtttctggtgcctcccatccccagacccaccagacaccacacagcagacaatacacacccactcgcacaagcttccatccacatgtgttgtactttcagctctaggcatgcagacaaccccacacggccacaccaccacatgcccaagtgtacacacacagagccacaccgtccctctgggcctgctggctcctcccttggctttcccttggcccacttccagggcccaggtgctgcaactaaatgtgaaagctcagtggccgctccttctttcagcccatcaaccagcattggtcccatagggaagcacaggggactcaccctctttcatatcccttgccctgccctgaaatggacaatcactttttgggataggttgaaatttttaaagagcctgcatcatttggttccctcaaagggaagccttgccagtgggggtttgaaagagaatttttggaccaacattcaaattctgctcaaccggngggaaac

SEQ ID NO: 57244 - DNA, 928 bp, Homo sapiens
gcttaagtccttactcaaaatcagacagctgatccagggagctatttccttactataggagtgaggaagaatgcaaacctccacttgtttcagtaggaggcagagttgggagcagacaacttgagttgtcttcagttaactctgatgggttttaattttagtaggaccatcatgactgaaacgtgccttgggtcttgttatatcaccaatacttctgaccctttatgtgttaactcttgagttatcactgagactctgtaaagtaggtggaactcagtccctctaaagtgtactaactcttctcggtattcctttctcgtagctatgggtttggccgcattggaggtcatgcaagccgtgcagcgtacatggaccaactcgaaagttcgaatgaatgggaagacacggttgatgcagtggagagacatgtttgacattgcagttaaatggagaaggattgctgacccagaccagcccgtgctgtggttagatcaaatgccagcacgaagtcttagcagaggttttaacaaccacattaatttaatcaggggtcaggtgatcaacatgagatacctagaatattttgagaaaatacttcattttattaaagacagaattcttgtttatcatggagctaataatcctaaaggattgctggaagttcgggaagccctggaaaaggtacacaaagtagaagaccttcttccgattatgaaggtaactttagcatcagaatggcagtccatgtttttagaggaaaagaaaaccaacagcacttttttaaaaagaactcagaattattaaatgctatttgaaatcactcgtatgaacacattctgaataataaccaaaataaaagaacctacaggcatcagactcaaacagaaaaaacaacttgtgaggaagcagttaatatagaaaaaaaaaa

SEQ ID NO: 57245 - DNA, 1728 bp, Homo sapiens
agccatcttcctggccgatggaagtgtcttcaccactgggttcagccgcatgagcgagcggcagtggctctgctggaatccgaaaaatatgcaggaaccaattgctcttcatgagatggacactagcaatggggtgttgctgcctttctatgaccctgacaccagcatcatttacttatgtggaaagggtgacagcagtattcgctattttgagatcacggatgaatccccgtacgtccactacctcaacacattcagcagcaaggagcctcagagagggatgggttacatgcccaagaggggacttgatgttaacaaatgtgagattgccagattcttcaaacttcatgagagaaagtgtgaacctattattatgactgttcccaggaagtctgaccttttccaagatgacctgtatcctgacacagcggggccagaggccgcgctggaggcagaagagtggttcgaaggcaagaatgcagacccaatcctcatctccttgaagcacgggtacattccaggcaaaaacagggatctcaaggtggtcaagaagaacattctggatagcaagcccactgcaaacaagaagtgcgacctgatcagcatccccaagaaaaccacagacacggccagtgtgcaaaatgaagccaagttggatgagattttaaaagagatcaaatctataaaagacacaatctgcaatcaagatgagcgtatttccaagttagaacagcagatggcaaagatagcagcctgaaggtcccacccccacccctacagaaaaaatgggagcaagaacttgtgcttgggagctggttattggtgtggtcctagggagggcggaaagggaggcactgccatttggagacattccatttcagatttgtcaaccagcgataggccacattccagtaagaactcaatttgtctcccaaatttgcagaaacaaaacgtgatttaaaagctgagctttttatcagaaagcttttttgatgttttaagtgttatgtgacttgttgaactttttaaaaagtgctacttttaaaatcccagatactctgaattttagaaaacaaactaattctgattgtgtcgtgcccaagtacccttttttttttaatgaatagggaccaatgccacattgctttttatatttctttcttttttaatgttgccaaaaccaaaagtagctttgttttcctttgtattttgctactttgcagtatttgtgtgtgtggttttttttccttaatttgaaagggacagcactgtgtatgtttataaactaaatgaagataagatattattttgtataaacattcatctgagaacaatcaaagcagtagccacatggtgctggctcctttgcagcacaaacctggtcattttgatgactgtacaacaggaagacttgaaaaatcacgtggattcatattaccaccgctctcatttcatggagtcttctgatcaaaaaagctcacgtcgtatttcttcttttcctttctcttttctagaaattgggtgtttgtaccagaatggaattttgcttctcggttatcctgtgcttcagatgattataatctaacccaaactagcatgtgtttctgcagtttgttacacacctaggatcatattgcattcatcactttaaacatcatgtttcagggttttgggtcaatacttgacaaggggtgcccaggaccagggaagacgtggactgctgagtgg

SEQ ID NO: 57246 - DNA, 520 bp, Homo sapiens
  misc_feature (1)...(520): n = a,t,c or g
nnnnnnnnnnnnnnnnnnnnnnnntnnnnntttgaaaaatntgaaatccctttagcagctctgacatgattacgaatttaatacgactcactatagggaatttggccctcgaggccaagaattcggcacgaggacatatggacctgccccggacctggtgatcatcaactcctgcctctgggatctctccagatatggtcgctgctcaatggagagctaccgggagaacctggagcgggtgtttgtgcgcatggaccaagtattgccagactcctgcctgctggtgtggaacatggcgatgcccctcggggaacagtatcactgggggtttcctcctgccagagctccagcccctggcaggctccctgcggcgggatgtggttgaagggaacttctacagtgctacgctggccggggaccactgctttgatgtcctagacctccactttcacttccggcatgcagtacagcaccgtcatcgggatggtgtccactgggaccagcatgcacaccgccacct

SEQ ID NO: 57247 - DNA, 800 bp, Homo sapiens
tttttttttttttattttatagaaaaataagctttatttcaaagcaatctgaaaacagcagtcagggggaccacatttacaaactgataggaaggagcacacagttacatgtccatttagcaaggtatcaagtcaggaatctcaccaattcctgcccaacacctactgagtttcctcttcaggttgaaactaaaaagtagacttgaacatcccagtgatgtctttgttatccaaacatgctccaagttcaggaaagaggacacctgggctcaacttattgagggatttgcttaattatttaaaaaatatttacatgagaatacagctaagttagtagctttcttcacattttcacgtttcgaaagagccacagaggtttcattcatgttttaaccagttgagttggtaaagaccctgtctccattttgtaagagatggattacattcaattactcctcacgacagccaaatggaagattattctattgcttttgaaagattattccattgcttttgaagtgctggttggactggcatctgcaatggtagccaaataaatgagatttctatgtaacacatgctggtactgcacgcactcgttcccgcggcccttgttctgatactccacaatacagcggatcagctggtcattctcctcaaggagccgctggatagtctcttgattgacttccgccttgcccctcagccagtccggtacgaaggccaccctcgtgccgaattcttggcctcgagggccaaattccctatagtgagtcgtattaaattcgtaatcagtcata

SEQ ID NO: 57248 - DNA, 685 bp, Homo sapiens
cagagtcttggtctaatgcatctgtgttgaattgaggcttcccctgtgttcacctttctgctctttttcttttagcccaaggctatgaaggcctcattcggtgctgggcatggtcactcctagcattcctcactctgttgctaacagcaacagcaataataataagggttacaacttactccataccttactgtctgccaggcattaagctaagtgctttacatatattaagtcatttaatcctcataatgaccctatgaaagagataccatctcaacccaattgacagctggtttgcaagattaggagggatgaaggacccaggggacaatgcgagggaaaactctgaccccggggccccaggctggatgttctttatgcctgtgaaccacagcttatcacatgtctggagttagggaccccacttaaagtgagattttggctggaggtggtggatcatacctataatcccagcactttgggagaccaaggcggaaggactgcttgaggccaggagttcaaaaccagtgtaggtaacagctagaccctatctctacaagaaatttaaaaattagctgggtgtggtggtatgtgcctcaagttccagctactcatgaggctgaggtgggaggatcacttgagcacaggagtttgaagttacagtgagctatgatggcaccactgc

SEQ ID NO: 57249 - DNA, 564 bp, Homo sapiens
tcactatagggaatttggccctcgaggccaagaattcggcacgagctcagctcccctggagccagctgatcctgtaacgctgctggaggtcagtctgagctaccaagactgtccctagacaaaggtggagtcccccacactgcccaagaccaaatccctcactcaacctgctgaggtgtggatggggaaacagaggcaaaactgaggcacctgatgcattcagcctgctgtgcagcagtgccattgactgccctgatgttcagagagaaacgcacacaaggtttgcccatgagaattggggagcagatggccaagcagataggttatgtctgttttctgagtgatgaagtcaggaagccctgtggctctggaggccacttgtggttcattcttttcccatatccttggcttttagaaatggttaccttcaggacaagtgcagctgcatttatcagagcactattgctaagttttcttttctggcttgtgtttttctgggacagtttagaattgggaggcctattctcatagaacaccaaaaatgatgttcaagtgattcattta

SEQ ID NO: 57250 - DNA, 1084 bp, Homo sapiens
ttttttttttttttcatcttccattattttattattttttatacatatatatatatgcgcagatctgttttatgtacaacaattggttctatcaaatattcagaccaaggcattctactggtaatttccccccaaatcaattcaggtaaaattagatacttatgcacttcacgggctatcaaaacttgcaacttcattatcaatttcagttctgaggtcatacacacaattcaaaatatacattaactaggttaaggcgataaaagtgggctgaaagaaaccacaggattcagaacaatgaaactgtgtattttgcttgcatgagagtcataacgtgaacagcaagtattgtgcgtatctcatagctcttcagtggagaggaagcgggcttctgaacatctaaggtgactgcacagcaggtggggaaacagctggtgtggcctgctggaggcttcgccgagggagggctcatttcttctctgcctctccttttttgggttcttgtttcaatttgtaatcagccagggcggccttgattgcatcttcagccagcatggagcagtgcagtttcacgggaggaaggcagagctccttggcgatatctgtgtttttgatagtcaaggcttcctccaccgtctttcctttcacccattcagtggcttaatgagctggaggcaattgcggaaccacagccaaatgttttaaaccatagcatccacaatcttccccttttcatccacttgaatctgtaatttcattacgtcaccacatgctggagcccccaccagtccagttccaacatttttagatgtcttgtcaagggaccccacgtttctaggattttcataatgatcaacaacctaaaatgagagggttaagataaatcatgttcactctctattggtactggtctctggtttgatggtaagctcctcggtcagcatcttgaacctggcaggcaatcactaaataccaaatttcacctgagtagaaaggtctacactcatgtcaatgagaaccatttgtgacccccaattccttttgtgtctcctctacaatacttcacagatttgagatacctaga

SEQ ID NO: 57251 - DNA, 444 bp, Homo sapiens; identical to SEQ ID NO: 13660
  misc_feature (1)...(444): n = a,t,c or g

SEQ ID NO: 57252 - DNA, 1081 bp, Homo sapiens
ttttttttttttttttcattttgaaaaatgtttatttaccttaccttttcttggccaagtcaattgctttggtcatctgcacaaagattctaaacactggctttcagcatttctttttccaagcaaatgaaatttatcataacaagacagagctctgattttagtctctgtggagtctgggctctgatgacctaggctagtcatcatctaagcctggaatgactgtttgggacccccatggccagcttgaagctttccttcctcagccactctgggcccctgaagaggtcacatgcatctgtggcagagactgtattataacaaagttgtttaccccaaagtcagcaaacacatgtacctagaactcatcccaattgtagggttgctcaccagacaagttacacggatgtgcaccagttaacatgccataggaaaattacattccaagaaaaagcaaaatgctataaaaacaaaaaaaacaaaacacccaaaacagctctccctcctttgatctgatggtctgcagaggtcctcaaatccacacactgccactcttcaagaccaaccgtccactgggccttcttaatctcatccaaagtcgcattcacaactttgacaggagcttgggttcttcatgtggcagctgcaaccatgtagtgtcttctcacttgcagaactctaacctcaagtctctcatgagtccccaaattccaggaagcataaaaaaatagcaaagccacacgagtatacttccaaactttgaaaatacaataagatcacaggaacaaatatgaccacgcagcagcgtacgtactgtataggccatattcctttacgtgggacattaatgaaaagctgtcttttccaaactgaatgcgcctattaataaaaaaatacacctgaccatctaatgctgaagtcatccgccaggatggtactggaaattgagtggctaatgtggagaaaacgcaggcagaaaaacaggggagacaaaacgaaaggctctcttggtttgagcctgtccaagcagccacgactccttatcaggtgaacacagttcgtcagttggccacccagcgcc

SEQ ID NO: 57253 - DNA, 1429 bp, Homo sapiens
atcctgtccgcatccactgcaacatcacggagtcataccctgctgtgccccccatctggtcggtggagtctgatgaccctaacttggctgctgtcttggagaggctggtggacataaagaaagggaatactctgctattgcagcatctgaagaggatcatctccgacctgtgtaaactctataacctccctcagcatccagatgtggagatgctggatcaacccttgccagcagagcagtgcacacaggaagacgtgtcttcagaagatgaagatgaggagatgcctgaggacacagaagacttagatcactatgaaatgaaagaggaagagccagctgagggcaagaaatctgaagatgatggcattggaaaagaaaacttggccatcctagagaaaattaaaaagaaccagaggcaagattacttaaatggtgcagtgtctggctcggtgcaggccactgaccggctgatgaaggagctcagggatatataccgatcacagagtttcaaaggcggaaactatgcagtcgaactcgtgaatgacagtctgtatgattggaatgtcaaactcctcaaagttgaccaggacagcgctttgcacaacgatctccagatcctcaaagagaaagaaggagccgacttcattctacttaacttttcctttaaagataactttccctttgacccaccatttgtcagggttgtgtctccagtcctctctggaggggtatgttctgggcggaggggccatctgcatggaacttctcaccaaacagggctggagcagtgcctactccatagagtcagtgatcatgcagatcagtgccacactggtgaaggggaaagcacgagtgcagtttggagccaacaaatctcaatacagtctgacaagagcacagcagtcctacaagtccttggtgcagatccacgaaaaaaacggctggtacacacccccaaaagaagacggctaaccctggagtatcacccttcctccctccccaggcaccactggaccaattacctttgaatgctgtatttggatctcacgctgcctctgtggttccctccctcatttttcctggacgtgatagctctgcctattgcaggacaatgatggctattctaaacgctaaggaaaaaaaacaaacacagaactgtttcaagtactcaagactgacttacagaccaaccaaccaccttgctggaacccttgctagcaggcattcttataaaagaaactttcgagcctccttatattgctggaaactcagctgtgctccagactagagcctccttacctatgctatggatttttaatttattttctcttatttcatgtacactgctttttttggttacagtgtatgatggatgtgtatgaaaaaaatgtatctttgggaaaacaattacagtttgttaatttgaaaa

SEQ ID NO: 57254 - DNA, 1420 bp, Homo sapiens
ggcacgagtcatttttaacctaagttccaactttgttgactccttaaaataagcacccatgaaagccagccagcccttcctccttccctcaccaccctccgtctcttcgtccctcaccaccctccgtctcttcggctgcctgctctttagtgtagattagtggaagccattcacagaatgtagactcatgtataggtcaccgtttctttcccccactagaaatcacattcactaagcagtggattgaatttaagagtgctgcccctgcccggcgcagtagggccgtggctctagttccagctacttcgggagtctgaggcagaggatggcatgtgccagggagtttgaggctgcagtgcacttatgcttgcacctgtgaatagccaatgcactccatcttgggcaacacagtgagacccccatctattaaaaaggagagcacttgcctggaacctcggtggcactgggaagctctgggccttgaggagtttaaacacccatgctgaatggtacagtgtgcattctctccagctgaaaactttcttcaactttcctaaattcttactaaattcagaggaataggataaagatcacttagagaaagggtgcttatggacatagcctgagtttcctttaacctctctccaatgggtgcttttaactagcttctacatggcaagctgtttcagtttgcaaaatcactgcccagcatgtttgaggtcagttggcaccttaaaacacctgttctccagcccttggacagtggagagaatctgtaaaagtgtgaccccctctaagatttcgttttaaatgatcagattcggttccagttttattcttgttgagtttttccctatgaaggctccttttgaatgtgtcttgagacccaaattgagcatgttgctgttattcctgccctgcacctgtggagcagaggtggccagggctggctgtgctgggttccagctcgctcctgccgagggactagcttggcctttgcgctttgattccagatagtaagatgagtggaagtgtttatcgagcatgcaaaagaaaccctcacggctaacggctctgggagttgtgtctgtgtgacctgagagtgatccatctcctgcctgtgtgaggtagcagtgggcactttttcattgagacaaactccagggtgtccagagggggttctgccccttgtgaaggcccattcctggcacttagagacagaaagaactcagcaatctttcgttctagttatattcggtctttgaaactgacaatctttgaaatgtgaatactgtaacaatatgttttcttggattgttgtctttaaaaaggatttttgtgaagcaattgatttatcaaagcaaaaaaattaaaaatagaaacttgctttatggatgttttattttataaagctcatgtc

SEQ ID NO: 57255 - DNA, 2184 bp, Homo sapiens
  misc_feature (1)...(2184): n = a,t,c or g
tttttttttttttttttttaccaaaagaaatctttattcttcagcaggtagacaacatctgccagccctggtcctcagggccacactcatatgcactcacccctcagcagcatatcgccccttttctgacatataaatgcaagagacccaggaccctagatctttcttcaaacgcaagtgtctcacacacacttattttacaaatccactagaaatatggactcttatgttctttgtacagccatgcaacagaggcctagcatttgtgctgtgtctgtgggaaaggcagtcagagaccagtggtttccctgctttggggaagatggctcaacagttagtaatcccaggttagattgtcagaacagtctaggccaggactgagggctcagctgccagggctccccaacagaaaccactcccctctggctgacactgcttccttgcgcaccagtctcttcttgtcatccaggggtttggctaaggcccgaatcacctgtggtttgtacggcagcagcacaggggtgggcaggcgagtgagagcatgcatgcactgcagtgcggcgatccggacagccatggaagggctagagctgaggttcagaaacttggtgacgagggtgtccacgtgaagactcatgacttggggtgcttccagtagaagaggctgaaggcagctgagggtggagagctgcaccacacagtcagggcaggacagggcctccagcagcaaggaaagaagcgtgggcagctctggcaagagtacaggcttgggcagcctgttaagtacatgagaaagacccttcaagtagtttggcttcacatcttggggagcagcatggaagccctggaccaaagccaggcacattatctgtgaagaaccgctggcggaacatgatcccgcacttcggcatggcccagcacgagtcagcacatcagtgcagtcagacatgagcagagagaagccatcagctgctgctggacctaattctgggtcactcaggaggcccatgagccgggctgtaaggcaggagctgagaggatggtatctgagcactagggcctttgttacccagagaagaagagtgaaggcctgactacgaccaggcccagagcccaggcccagcctccactttgtcccaaacctaactgtaggaaattcatcccagctgctgccctgcagggtgcttgttgaggaatccctgcaaagcacttggcagcagcggtggaagaaaaggggcagctgtggcagcagctcagttccaaaagctcccgcatgagttggttcagctgagggatttccacatttcgaggcagggagcagacaaaggccataagcagtgcaatcagccgcctctgccctgaggagccatcctggaatggctggaatctgctcgggaagctgttttcaggcagaaaggacacgttgccatccaagaagaggggcacaatgtgtgtcacactctgggcagctaactcagggctcaggtgggttgtagcagtgccaatgacagacaccatggcagccaacacctcatcctccaaatagtacttttctcagaactgagggctccttctctggcatagaggcctgcacagccaaggcaagcaggcaaggtatagctgtctggtggaaataccagcaactctcagggtcctgctgacatttttctgccatctgtctgaggctctgacagacagcaataacgtcactggattgtgcaaaccatattccctctgttcacttgccagagatgctgcagcagcagaggcagtgtctccttgacgatgctgggatgtgttgatacagctgacaaggcttgcagacagcacagatgccgggagcattgggtgggctcatctccgttagtcaaatttgactcccctacacgcagctcctcagcgagcttgggtacgaggtggctgctgaaggccacagggtagagagcagccagggttcctgatgcttccagtgctgccaccctgcaactctgggaatcctccttcaggaagctcagtctgtacaggtgacccactgccagctccaagtcctcataagataggagatctggctgggcacccaagactgtcagtgtacggatgccctcgtgccgaattcttggcctcgagggccaaattccctatagtgagtcgtattaaattagggatcanaaatagggnttcaaa

SEQ ID NO: 57256 - DNA, 4539 bp, Homo sapiens
  misc_feature (1)...(4539): n = a,t,c or g
ggggaggcactattacccgtggctggagaggccagttctgtcgttggcagcttaaccatggaatgtatcagcaccggacagtcatcgctgaccaaatgaggacactaagatccagagaggtttagtaacatgcgcaaggtcacaagttcacagtgtgcctgcgtcgggaagggcagactgtgtaccagcaagtcctgtccctggagcgcccaagtgtcctccgcagctggaactggggcctgtgtgggtactttgctttctaccatgccctctatccccgagcctggactgtctatcagcttcctggccagaatgtcaccctcacctgccgtcagatcacacccatcttgccccatgactaccaggacagcagcctgcctgtaggagtctttgtgtgggatgtggaaaatgaaggggacgaagctctagatgtgtccatcatgttctccatgcggaatggactgggtggtggagacgatgccccagggggtttgtggaatgagcccttctgtctggagcgtaggggtgnaaactgtccgggggctgctcctgcatcatccaacccttccaaacccctacacgatgggctgtggctgcacgagtcacggcagctaccacggtaacccacatcacagcctttgaccctgacagcacggggcagcaggtgtggcaggatctacttcaggatggacagctggactctcccactggccaaagcacccctacgcagaaaggagtaggcattgctggagctgtgtgtgtttccagcaagttgcgacctcgaggccagtgccgcctggagttttcactggcttgggacatgcccaggatcatgtttggagctaaaggccaagtccactacaggcggtatacaaggttctttggccaggatggagatgcagcacctgccctcagccactatgcactgtgccgatacgcagagtgggaagagaggatctcagcttggcagagccccggtattggatgacagatcactgcctgcctggtacaaatctgcgctgttcaatgaactatacttcctggctgatggaggcacagtgtggctggaagttcttgaggactccctaccagaggagctgggcagaaacatgtgtcacctccgccccaccctacgggactacggtcgatttggctaccttgagggccaggagtaccgcatgtacaacacatatgatgtccacttttatgcttcctttgccctcatcatgctctggcccaaacttgagctcagcctacagtatgacatggctctggccactctcagggaggacctgacacggcgacggtacctgatgagtggggtgatggcacctgtgaaaaggaggaacgtcatcccccatgatattgggggacccagatgatgaaccatggctccgcgtcaatgcatatttaatccatgatactgctgattggaaggacctgaacctgaagtttgtgctgcaggtttatcgggactattacctcacgggtgatcaaaacttcctgaaggacatgtggcctgtgtgtctagctgtgatggaatctgaaatgaagtttgacaaggaccatgatggactcattgaaaatggaggctatgcagaccagacctatgatggatgggtgaccacaggccccagtgcttactgtggagggctgtggctggcagctgtggctgtgatggtccagatggctgctctgtgtggggcacaggacatccaggataagttttcttctatcctcagccggggccaagaagcctatgagagactgctgtggaatggccgctattacaactatgacagcagctctcggcctcagtctcgtagtgttatgtctgaccagtgtgctggacagtggttcctgaaggcctgtggcctaggagaaggagacactgaggtgtttcctacccaacatgtggtccgtgctctccaaactatctttgagctgaacgtccaggcctttgcaggaggggccatgggggctgtgaatgggatgcagccccatggtgtccctgataaatccagtgtgcagtctgatgaagtctgggtgggtgtggtctacgggctggcagctaccatgatccaagaggtaatgcactccttttcccatctctccaccatctgtatcctggcccagaaaacttcctcaaccaccaaatttcttcaaggcataacccaatgccatcttgtccgtctataaagcctcccatttttccctggtatgcattccagctcctgccttcaggcttctgtctgtggggtcatagttatctcctccacttgctggggagctccttgaaggcaaagactctactgcctccatctattccagtgggaagtgggctctttcagaggggttgccaagttagtatgtatgactgtcatctctcccaacagggcctgacttgggagggcttccagacagctgaaggctcctaccgtaccgtgtgggagcgcctggggtctggccttccagaccccaggagggcatactgccagcagcgagtgttccgctcactggcctacatgcggccactgagcatatgggccatgcagctagccctgcaacagcagcagcacaaaaaggcctcctggccaaaaagtcaaacagggcacaggactaaggacagggcctatgtttggaccaaaggaagccatggcaaacctgagcccagagtgagccgtctgaactgtgggagggaagtgctaacagcccagcctccagcctggcctttcctccttcccctctgaacctcctgcaaccctgagccatcaggacaatcataccccttcccttctctccacccaattgtgccagtaaatgggggttgagggtgacctaggcagcattagaatcacttatttatttctttcctcacctgttccctgactgcgtgaaatgttcagggaggtcagttgatttccccaggtacattcatggtgtgacagacacatgggtacaaataaaagacccagaaagccattaagtgtggtgtgtttgagccctcagtcgtcctgacagggcacaggagctgcggccagcccttgcccaccgctttttatttggacacagatggggagccccccaggctcctgctgagaccccccacatatcctcatatctagcctgagtatctgtcctgcaaaatgacagaggggctaccagtaggaagccatcctcccttccttgtgagatttgcctgcagggggaggatgggacctcggcagagaggctctgagaagaggtcagggaatggccactccaggggaggctctgcactgggagcctgaggcatgtaatgcagcaggcaggaagtgttgccaggggcctggagtacacagtctgagccgtccaaccactggtgtgtgctgtctttcggcacttctgactgcagggcaggcagctccagctggtaagggtcctcactggggagggcacgaagctggcgggacaacactccatgctcagctggcaggctcccccttgtgtcagaggagtacatagcaggtacaaggaggaggcagaaggagactagtaggaccaagatgcaggtgctgctgctgctggttttgtttgatatctcaatcaccatggcctggagtttcctcagttgatctagaagggacaaattctgttcctccagaagctgtactttgttctgaagctccatattctgggctgtgtatttcaagaccctgctctctaaacccccaacatacaccttctttttcctgcggctctcttgagcagatcttttatttcgaatcttcctccgcacacgtttcagaatttgttcctctgtcttagtgagaggaagtgtctcaggcagaataagcccctccttctccaatagactcttctcctcatctgtcagtactagcctagcaatctcctgctctgccagctcctccatatgctgtggagtcatctgggtcccctcttttctacagctctcactctctagatccatagagacagtttcccgtgggagggagtaggtgtggtcatggtggaacaaggcaggggttggaggagctgagaatgttcaacgacgctgggggactcagcagggagcacagcaaatcatctacttcccagtcgctcggtacctcagaaagcggcagcgcccagtccagtggggccctcacggcctcatcgggtgccgtccccaaatctccactttcctctagcaggaaggccagcaggtcttggtcaccagcatccaattccagctccatttgggacaactacggaaagggtgggccaccgggccccaacgtccgaagcccagacacgagccccaggccagctgtaggcctcgggcacctatccactgtccctctacggccgggattccccgccggcggctttccatagccctctccggacccgcctcccaggctcaattctcctcagcctccaacgcagcgaaagtgacgcaccccaccccgtggcactgtgggacttggagttccctccaactgagaagaggcttgggtgcagcgccacgtcccaggggctatgcaaatgtaggggacg

SEQ ID NO: 57257 - DNA, 464 bp, Homo sapiens
  misc_feature (1)...(464): n = a,t,c or g
ngtgnntaccgtttgacatgattacgaatttattacgactcactatagggaatttggccctcgangccaagaattcggcacgaggagtggtctggagttccacggtgtagtggaccagaggccacctctcctgggcttctcagtgtctcgccggcggggttcggcctgagctggattgacatagcccttggcggatttaaacaacctaaacattaagcagtacagctgcctcaaacctttgggattttcagaatgactgacactgccgaagctgttccaaagtttgaagagatgtttgctagtagattcacagaaaatgacaaggagtatcaggaatacctgaaacgccctcctgagtctcctccaattgttgaggaatggaatagcagagctggtgggaaccaaagaaacagaggcaatcggttgcaagacaacagacagttcagaggcagggacaacagatg

SEQ ID NO: 57258 - DNA, 1559 bp, Homo sapiens
agccactgtgcctggccaaaaaacattttaaatcccttgtctgggggtcagtcctctaaacatccctcagatttcagatagtactttcaaccctgtcctaacatagcaggtttgcagtaatcttttagaatatagcttgtcaaattagagaatggttttaccccacatgttctcataggagacattattatttagaaccctaaggtagacatgtttaaaatcaaagtcctaagaaacagaactttggaaaaatggaggaaatgtttttaaagtctgtaagtttgcacaatactgtatagtaactaaatgcatgctactccgttgtatcctagttattttagaaacagaggtggcctaatttggtggccaaagtaactggtttactttgagtgtaccagcttatggtgccattgatgaggaattaaagtaggtcaaaatttaattggagttggtattacttcgtaaagctagttttcaagaggaagaaaaccacacttactaatgttttctgtatctaatcaaatactcttcatatataattaagcctcatgttatcttttttttaaatcaaccttttgaacttcaactacagtctaaaagtcttgatggtaactatagtgtaattatctttttgtctcactggattttatagttagtggaaaatgcctttacaaaatgtatttaaaatagctgtcatctcatttgtaaattttgtcgtgtattgtgatatagtgaaccttattgtccttatgaaatggtagctttgtgaaatacattcaccaaaaatcaaaatttgaacatctttatgattccttaccagctgaagccagatagacaggtattaattgagctgatgccccacttgagtttatagactgtttgataactgcctgtcctccaaattgtgtatgtatatgttacgatggtttaattcttgagtcagggccagcacgcatttatattttctaccaattaccttgatagaaatatcttagaaattgctgacctgggaacggttgtgagaagactcctgggcttctttcttgcctcacttaacaaatattttaaggtcaaagcaatatctgtgcacggctttccttttgctcctccagacaagtgaggctgttggtatagtcctcttcaccctctgcatgtagcttcaccctagatcagacttttgtctcttgggtcccagatggcacaggagcactgcatgcttgttttctagagcccagccagtcatgggtgctagcctagtctccacacaccagcaagtagaacccaagtgtattgtataaatatttcctgagtaccagtaagagaatgcattcttttctcatctaggccaggaatgttgaaaatgctcagccttacatagaaactcctagattttcactaacgcatttcacaaaagtaaataagtatttcatataattcagaggatgtttaaattgtcagcattttaataaatacttgcattataattttgtctcttttttaaagaaagtcatacttgaatataatttattaaacgttcaatggagtatatagtctatttg

SEQ ID NO: 57259 - DNA, 1797 bp, Homo sapiens
ttttttttttgaaaaagacagaagcagcttttactatatttacatccaacaaaacttcgcagggaacaatccttattgcacaggtcaggacctgggtgggtgaggcattccccaaggcggggcaggcaagaaaaattaggactggagggggcaccagttcttcctaaggggagcttgagactcctctagctcccagtgcctgactttgaaggaactacaaaccaccggaccatggtgccctatttcccttccctttctcactctccataagaacctcataagcaagggggctgtggctccagaataaataatttaaaataaaatacaaacacttaggtagaaaggcatggagagccttgggctccttcagcaacgtcagggaagagggaccattattggtggagaatgacatccctacctcccattcagggcaaaggctcagtagctctgcatctttccagttgttttttaaaacaaaaacttctaaaatgaccagggcaatgcagatctgtgggtaccctggaggggagttcccggtataggaccaggggaagaacagagctgtaccaactccccccagatctcccccaacatcagcacgaacaaactgggtaggttggtgatgggggaatcaggacttttggtaacagtggatccctcttcctgttgtcctcgcttggagcctttgactgggcatccttcccagcctgttcccaactccatgaaggcaacagggaagcagtttaactctagaatcccttcttcctcacttccccaccctaggctggagagggaagcttaaggtctctagcattctggaggtgctccaaaacattttcggcagtcaatggccttgggagtgggcatctgcgcccgccggtgcctcagctcctccttgcccatgctgctggccagcttgttaaaggcagacttgtacttcttatcgaaggccactatgtccacgtggtccttgcccagagcagccattgtcaggaataatatctcacggtagattcccctctgcaggtgcaggccagtgggtgggggccctagagtttccagcaggagccccacagccttgtgcacttcattgagtccaacatggcgcagcactgactccaacagtgccaaactaagggatgcaggtacagggcctggccataccacccgctgggggatctggctgtggaccctccagagcacatagagaggtgggcagctattggggtcaggggtcagtacatcccacagcagccgtacctgaacagaggctggatcaggggttagccaaggagatggggcctgggagtgcgaaggcccatcacaggaggccagcaccaggcctggtagaatactgggcagccgtagccgttggaaataccacaaaaggttccagaagatgatggggtgggcagagggcagttcaggcaacgccagcacctcactgccctcgttctctaccagcgactccagctccttacgcagcaccagggggctcaggtatgcccatgccccactctcaaacccgccgggaggctccccccatgtgcccgttgcagagctggggctcatccagagcaaggcagagccttcggtcactgagcacagggccaggaccaccagggacaggagcatctttgctgccactggcaccagcagatttggggctggggacactgggccgggaatcaagggtctggacactgagcaggggcacaaaggggcaggcgcagaaggggcaggttgtgttgaggttagagtcatcaggtgcccagccagccatgatttcctcatcat

SEQ ID NO: 57260 - DNA, 2447 bp, Homo sapiens
  misc_feature (1)...(2447): n = a,t,c or g
ttttttttttatttatttttttcacatacagtctttgttttaatgtttattggtagaaacagatcttcaatgcatactttgtgtttatataaactctacattctcttaaaggttttcgttttgttttcactggagatttttagcctccaagtgaacttaacatattgcctatgcatctgattctttatagacttttagattttaaaactaaatttgagaaaccatgcatactgtataccttatttaataatccaaagaattgtttgcactttcaaaaaagttacaaaaaggctgaacacaagttaaataacctatatgatgtaaattttccatttctgaatactttttcagtattatatattgcttgctgtctaataagttagattgtcagagacgcttcagtaaattatctctactttaaaattatatctgaatcccctttctctgagatgaacttgccaatattaaacattgtgccatatgcagtattagcccaaaagcttaaataagaaccaaacttgtagactgaatattttaaccttaaaattatatacctatatatacacctatggtatgctgcatattaaatttaacatttcaagtaacatatatatagcaaacattcagccaaatactctttcatgaaaagatactgtccttaaaataaaaagttaatgaaaagcttatttagacacaaatgtctagatataagtactaagcctatgaaacttgaagctaaagtctgctgtactattaagaaaaagaagattgattcttaacctactgaattgtgcagatacaaaagtgcttagcatgacaaaattaccaaaataaaaacattttagaggttatttggttctagcaatgttaattattttgtgtttctggataatttaatgtttgtattttaaatgttatgtaaatttcctctttataacaagttttaaaaagcacacgaaaaatagttcaaactatatataatctgttatttttcatcctggttagctaatcacaaataactcagcaaaacaatgcttgaacattcagttctactaaaaaacagtatttgagtagatcccatcaccttacccattgtttgctatgttagaccctaaaacaggctgccgacagatcggacaagtgcaattctctgagagccatcggtcaatacaatgaatgtgaaattcatgcatgcaaggtaattgcctgagcttgtttccagttacatagtcactaatgcaaacactacagattttacctagttcactatcaatactgttatgctcatagtgcctggtggaaagattgtcaatctgctctttggttaaaccacgtattcgatcatcatcatcactttcatttagtaaaaaaaagtgagcaaggcgaagaatgggtagtgttccagtttcaactaaattgtttggatttcgcaactgcctgccacccctactgtcactgtttcgagtatgaggctgggtggtctcgttttcaccatgcatttcagtgctgtctccttgggcctgcctgtcttgagaggaaccttccctgtgctggctcctgttgttatctgtacctaagttactcagttctgagtgcatgtctggtaaatgctggccatttctttgaagttctgactcagaatcggcctccattagagaactcagttctccaaacccagtcatgatctgccttaaaattgaccgaagagccactgatgatggctcaacaagctcattctcagaaatcctacgaagaggaactgttatggtactaacataggttcgaatacctgaccgctctaaacgagaaatggttcggcgaaagcccccactattgctttcaatagtgactgtattttctgctagccctactctggatcgagttctatttgcaatactatcccgatctctattttctccagggcggatccttctcacttgaaggtccagtgtgattgttggatgtcgtcgtacagcagttgaggatctgctggattcttctccttcttctactgttattcttgacacaagccttgaattagagaatggggtatatgcagtacctctgcgttctcgttctctatcttgctctaaaaagactcgagttctacctctcctcctaacagatcttctagtggtttgctgtactggtctactttccctttgggaattatgataaacagtgccactctgtctctgaattggtgaacggcttcgactattggaagtagatcgtaatcttattggctctaatctttggtttgtattcctcactgtaacattacttctagccccattttcccaaacatgtgctgctccaaaccgttgcccctccctttgcctgagttcactaccacctgattggtttgtgtgactactgaaattagtgcgtgaagcgttagctcgaggaatgccagctgctccccnaattccatttcttaaccttcc

SEQ ID NO: 57261 - DNA, 1694 bp, Homo sapiens; identical to SEQ ID NO: 13673

SEQ ID NO: 57262 - DNA, 755 bp, Homo sapiens
  misc_feature (1)...(755): n = a,t,c or g
atagaagatagtcanatatttgtttatgctaagacctgtttttaattttcagctttgatgtaaattgctagcttagttgtctttagttcaagcatgttaggaaatcctctttattcttaaatatagatacatgtctgcatatatgattgaattttagagccagaaagcatgtagagcagttgtgattagtagaaaatacactgacaagaagatatttgcatttatttcccaaagctgccagtaactagattttgtgacttaagtcatttaacctctccttgattagagcttcctgagccatgcacactgggcactgcaaatcacagacaggcctagatacagatcccctcaccccttgctacatccaaaggtggcctgggtggctggagcctctgggccagaaccacctttgtccattttcctcagtgtgcctacagcatcgctttccatgtgtgccataacttgggaatagttgggatgtgttgcttaactcctttacaccattagttatctgtgagaccatctattccacactcttcattttttaaaaagagacaataattatttttaactcactgaagtttaaaactacctagcatttctgattaaaaaaaatttagaaggaaaattttaatgcatttatttcagatggcgttttaaatagatacaaccctttggaaacacaatatggtactacatagcaagggctgtaaaaatgaccatatcctttgcccataaattctacttctatactt

SEQ ID NO: 57263 - DNA, 530 bp, Homo sapiens
  misc_feature (1)...(530): n = a,t,c or g
ttaaaaccntttgacatgattacgaatttaatacgactcctatagggaatttggccctcgaggccaagaattcggcacgagaagaaaaaagagtacttaaatgaagatgtgaatggattcatggaatacctaagacagaattcacagatggttcacaatgggcaaattatagcaacagacagtgaggaagtaagggaagaaattgcagttgctttaaagaaagacagtcgacgggaaggaagaagattaaaaagacaagcggcaaagaaaaatgcaatggtgtgtttccattgtagaaaacctggtcatggaattgcagattgccccgccgcccttgaaaatcaagacatgggcactgggatatgttacaggtgtgggtccacagagcacgaaataaccaagtgtaaggctaaagtagacccggctcttggcgaatttccttttgcaaaatgttttgtttgtggagaaatggggcacctgtctagatcttgcctgataatcccaaaggactctatgctgatggtggcggt

SEQ ID NO: 57264 - DNA, 762 bp, Homo sapiens
tcgcgagcgtctgggcgggtggtaggtgagtgggtattgcgggctagtatccgagctaaagatggtggcgcaggccgagttaagagctttaatcctgtgaagacatcttagtgaagagtttagagtgctgagagttgaaagcttgcacgtgggaaacgtgcggccggactgccacatgtactgaggttgagtcgtgacggccacaggctccgaattttggcgtgaggaaccgctgatcggccacgggcgccgaacttgctggcctccggcatgtgcctgagcggcggcggaaaaaccaccttaattggggcggagggttagttttaagagcaaagggcctttactaaaatggcgaaggccttccgtcggcgttgttttaaaatgggaagcctcgaccctgtattgaaactgagctgttcgaaggcggcgttgtgtgcaattcggattaatgaaggggaagggttttgtgtggaaaaacgccttggagtgtgacatttctgcgagaatgcttaaataccgatttcccgcaggaacaatggcgctgtcttcagtggcacagtggagcagctctgaagatgcaaagtgagggtcgctgtctgcccattgatagaggccagattgtcttggaagttccaaagttgcaacgatttctggctagtgccacgaggtttacttgactgttgtgtgaaaagctgataagaaaaccatccagaaaaaagctcttcgttttacaaacatgaaaataaaacatgtaattttgga

SEQ ID NO: 57265 - DNA, 712 bp, Homo sapiens
cgaaagatggcggcggcagtactgggacagttgggtgcgttatggatacataacctgaggagccgggggaagctggccttgggtgttttacctcaatcatatatccacacaagtgcttctcttgacatttctcgaaaatgggagaagaagaataaaattgtttatcctccacaactgcctggagaacctcggagaccagcagaaatctaccactgtcgaagacaaataaaatatagcaaagacaagatgtggtatttggcaaaattgatacgaggaatgtctattgaccaggctttggctcagttggaattcaatgacaaaaaaggggccaaaataattaaagaggttctcttagaagcacaagatatggcagtgagagaccataacgtggaattcaggtccaatttatatatagctgagtccacctcaggacgaggccagtgcctgaaacgcatccgctaccatggcagaggtcgctttgggatcatggagaaggtttattgccattattttgtgaagttggtggaagggcccccacctccacctgagccaccaaagacggcagttgcccatgccaaagagtatattcagcagcttcgcagccggaccatcgttcacactctatgatgaggagattcagactccacagtgtatatattttgccatttattttctaaaaataaacaaaaattgaaggcaaaaaaaaaaaaaa

SEQ ID NO: 57266 - DNA, 6538 bp, Homo sapiens
aaaatataaaaatgaagcaagaggttgaggattctgtaacaaagatgggagatgcacataaggagttggaacaatcacatataaactatgtgaaagaaattgaaaatttgaaaaatgagttgatggcagtacgttccaaatacagtgaagacaaagctaacttacaaaagcagctggaagaagcaatgaatacgcaattagaactttcagaacaacttaaatttcagaacaactctgaagataatgttaaaaaactacaagaagagattgagaaaattaggccaggctttgaggagcaaattttatatctgcaaaagcaattagacgctaccactgatgaaaagaaggaaacagttactcaactccaaaatatcattgaggctaattctcagcattaccaaaaaaatattaatagtttgcaggaagagcttttacagttgaaagctatacaccaagaagaggtgaaagagttgatgtgccagattgaagcatcagctaaggaacatgaagcagagataaataagttgaacgagctaaaagagaacttagtaaaacaatgtgaggcaagtgaaaagaacatccagaagaaatatgaatgtgagttagaaaatttaaggaaagccacctcaaatgcaaaccaagacaatcagatatgttctattctcttgcaagaaaatacatttgtagaacaagtagtaaatgaaaaagtcaaacacttagaagataccttaaaagaacttgaatctcaacacagtatcttaaaagatgaggtaacttatatgaataatcttaagttaaaacttgaaatggatgctcaacatataaaggatgagttttttcatgaacgggaagacttagagtttaaaattaatgaattattactagctaaagaagaacagggctgtgtaattgaaaaattaaaatctgagctagcaggtttaaataaacagttttgctatactgtagaacagcataacagagaagtacagagtcttaaggaacaacatcaaaaagaaatatcagaactaaatgagacatttttgtcagattcagaaaaagaaaaattaacattaatgtttgaaatacagggtcttaaggaacagtgtgaaaacctacagcaagaaaagcaagaagcaattttaaattatgagagtttacgagagattatggaaattttacaaacagaactgggggaatctgctggaaaaataagtcaagagttcgaatcaatgaagcaacagcaagcatctgatgttcatgaactgcagcagaagctcagaactgcttttactgaaaaagatgcccttctcgaaactgtgaatcgcctccagggagaaaatgaaaagttactatctcaacaagaattggtaccagaacttgaaaataccataaagaaccttcaagaaaagaatggagtatacttacttagtctcagtcaaagagataccatgttaaaagaattagaaggaaagataaattctcttactgaggaaaaagatgattttataaataaactgaaaaattcccatgaagaaatggataatttccataagaaatgtgaaagggaagaaagattgattcttgaacttgggaagaaagtagagcaaacaatccagtacaacagtgaactagaacaaaaggtaaatgaattaacaggaggactagaggagactttaaaagaaaaggatcaaaatgaccaaaaactagaaaaacttatcggttcaaatgaaagttctctctgaaagacaaagaagtattgtcagctgaagtgaagtctcctttatgaggaaaacaataaactcagttcagaaaaaaaacagttgagtagggatttggaggtttttttgtctcaaaaagaagatgttatccttaaagaacatattactcaattagaaaagaaacttcagttaatggttgaagagcaagataatttaaataaactgcttgaaaatgagcaagttcagaagttatttgttaaaactcagttgtatggttttcttaaagaaatgggatcagaagtttcagaagacagtgaagagaaagatgttgttaatgtcctacaggcagtcggtgaatccttggcaaaaataaatgaggaaaaatgcaacctggcttttcagcgtgatgaaaaagtattagagttagaaaaagagattaagtgccttcaagaagagagtgtagttcagtgtgaagaacttaagtctttattgagagactatgagcaagagaaagttctcttaaggaaagagttagaagaaatacagtcagaaaaagaggccctgcagtctgatcttctagaaatgaagaatgctaatgaaaaaacaaggcttgaaaatcagaatcttttaattcaagttgaagaagtatctcaaacatgtagcaaaagtgaaatccataatgaaaaagaaaaatgttttataaaggaacatgaaaacctaaagccactactagaacaaaaagaattacgagataggagagcagagttgatactattaaaggattccttagcaaaatcaccttctgtaaaaaatgatcctctgtcttcagtaaaagagttggaagaaaaaatagaaaatctggaaaaagaatgcaaagaaaaggaggagaaaataaataagataaaattagttgccgtaaaggcaaagaaagaactagattccagcagaaaagagacccagactgtgaaggaagaacttgaatctcttcgatcagaaaaggaccagttatctgcttccatgagagatctcattcaaggagcagaaagctataagaatcttttattagaatatgaaaagcagtcagagcaactggatgtggaaaaagaacgtgctaataattttgagcatcgtattgaagaccttacaagacaattaagaaattcgactttgcagtgtgaaacaataaattctgataatgaagatctcctggctcgtattgagacattacagtctaatgccaaattattagaagtacagattttagaagtccagagagccaaagcaatggtagacaaagaattagaagctgaaaaacttcagaaagaacagaagataaaggaacatgccactactgtaaatgaacttgaagaacttcaggtacaacttcaaaaggaaaagaaacagcttcagaaaaccatgcaagaattagagctggttaaaaaggatgcccaacaaaccacattgatgaatatggaaatagctgattatgaacgtttgatgaaagaactaaatcaaaagttaactaataaaaacaacaagatagaagatttggagcaagaaataaaaattcaaaaacagaaacaagaaaccctacaagaagaaataacttcattacagtcttcagtacaacaatatgaagaaaaaaacaccaaaatcaagcaattgcttgtgaaaaccaaaaaggaactggcagattcaaagcaagcagaaactgatcacttaatacttcaagcatctttaaaaggtgagctggaggcaagccagcagcaagtagaagtctataaaatacagctggctgaaataacatcagagaagcacaaaatccacgagcacctgaaaacctctgcggaacagcaccagcgtacgctaagtgcataccagcagagagtgacagcactacaggaagagtgccgtgctgccaaggcagaacaagctactgtaacctctgaattcgagagctacaaagtccgagttcataatgttctaaaacaacagaaaaataaatctatgtctcaggctgaaactgagggcgctaaacaagaaagggaacatctggaaatgctgattgaccagctaaaaatcaaattacaagatagccaaaataacttacagattaatgtatctgaacttcaaacattgcagtctgaacatgatacactgctagaaaggcacaacaagatgctgcaggaaactgtgtccaaagaggcggaactccgggaaaaattgtgttcaatacagtcagagaacatgatgatgaaatctgaacatacacagactgtgagtcagctaacatcccagaacgaggtccttcgaaatagcttccgagatcaagtgcgacatttgcaggaagaacacagaaagacagtggagacattacagcagcagctctccaagatggaagcacagctcttccagcttaagaatgaaccgaccacaagaagcccagtttcctctcaacaatctttgaagaaccttcgagaaaggagaaacacagacctcccgcttctagacatgcacactgtaacccgggaagagggagaaggcatggagacaactgatacggagtctgtgtcttccgccagcacatacacacagtctttagagcagctgcttaactctcccgaaactaaacttgagcctccattatggcatgctgaatttaccaaagaagaattggttcagaagctccgttccaccacaaaaagtgcagatcacttaaacggcctgcttcgggaaatagaggcaaccaatgcagtccttatggagcaaattaagcttctcaaaagtgaaataagaagattggaaaggaatcaagagcgagagaagtctgcagctaacctggaatacttgaagaacgtcttgctgcagttcattttcttgaagccaggtagtgaaagagagagacttcttcctgttataaatacgatgttgcagctcagccctgaagaaaagggaaaacttgctgcggttgctcaagatgaggaagaaaatgcttcccgttcttctggatgagcatcctatcttcgtagttggtttggacttcgataggttgatggaaggaatacttctattaactaaatagaatctgtttacaaaaatggttcgtgtgtgttaccattattcttttgtcaaaaagtgtgtatatatgtttgcatttacatatatttgtacatctgtatgacagatgtattttaaaagtttcaacttgaagtaaaagtacaacagcttgaagtgttgataccagggccacagccctctaactcatgtgatttcccatggcatgctgccagaataaaaccaccaggaatgaattcactccccacttctctggaacctcaggacccgcccatttctcggcagtactgtgaattttgaagttaaactaaattttggtaccataccaactggaatttaggctttaaaaataatgtttcaaggccaggtgtggtgattcatgcctgaaatcccactacttggggaggctgcggctggagaattgcttgaggctagtgagctgtgattgtaccactgcactccagctcggggaacagagcgagaccttgtctctaaaaataataatagtaataaaaataacgttttatgactatttattgcaaggtcagatttacagattgttataaattgttgagaaatttttgtgattagaatatgaaggaaaaagctttgttggtaaaagtgacatgttaaggggctatgaagtaaatatgctgcagttaattgtgctaagttaaaatacagtttagttatttgctttaaaataaactcttctttttttctttaaagtatactatctcaaaactcattatgttgtcagagccctagagctggctagtgtaacactgactatgagtaggtgggcccacccacttgagttgaggtgatttcatggtgtctttccaggctcttgatagggtgtcactgcatgcaagccatgaatctgttttgagaatcctctccattttcccaaataaaaacctatcccaacagtgactatatcactcagcattggatctaaatataaaagtggtgctttcagtgtttttggcagatagtgttccataagctttccatcagaagggattttagacaccttagaggtccgtgctacatcttcacagttcctccgaataaccttaggtggtagtgttacttgcctttgacacctgtgcatatgttttaatgactagatccaaactgtgttgttcttaaatcaaaaattggataatttttaatatttatgtattaatcacacagtatgctctctgaagttctcttaagccttcagtttatactcttaatttaattttctttctgagctggagaactggctttgcactttggttacacagaacattggtttccaattcagtttaactgaaatttgctgctgatatgttgagtttgttctttaaaaaatagctcatatatctcatctttcctcctgtcttagaagaacagacctaactagtgaatgtattaatgaaaatgcatctatttcagagctgacatgaagagtttagtttttttactttataaactgtgaatatgagtatgccagctgcatacgatgtaactaatcatatttaaatatatttcactttctctttgactttagaccttttgaagtctgtataaacttgttttgaaatatagtctctgcttacgaatgtcataacaaaataattttttgcatgataaaaaattactttgattacaaaaggcatattctttcatggtttctgcaatgagaggaagtgtaatgattattttaatatttctattaaatatgtttaactgta

SEQ ID NO: 57267 - DNA, 2410 bp, Homo sapiens
agtttgccttctcctatgttttccagaaatgacttcagtatctggagcatcctcagaaaatgtattggaatggaactatccaagatcacgatgccagttatatttaatgagcctctgagcttcctacagcgcctaactgaatacatggagcatacttacctcatccacaaggccagttcactctctgatcctgtggaaaggatgcagtgtgtagctgcgtttgctgtatctgctgttgcttctcagtgggaacggactggaaaacctttcaaccccactgctgggagagacttatgaattagtgcgagatgaccttggatttagactcatctccgaacaggtcagccatcacccaccaatcagtgcatttcatgctgaaggattaaacaatgacttcatctttcatggctctatctatcccaaactgaaattctgggggaagagtgtagaagcagaacccaaaggaaccatcaccttggagctccttgaacacaatgaggcatatacatggacaaatcccacctgctgtgtgcataatatcattgtgggtaaactgtggatcgaacagtatggcaatgtggaaattataaaccacaagactggggacaaatgtgtgttgaattttaagccatgtggcctttttggtaaggaattacacaaagttgaaggctacattcaagataaaagcaaaaagaagctctgtgccctctatgggaagtggactgaatgtttatacagtgttgaccctgccacgtttgacgcttacaaaaaaaatgataagaaaaatacagaagagaagaagaacagcaaacagatgagcacctctgaggagttggatgaaatgccagtgccggattctgaaagtgtattcattatccctggaagcgttcttctatggcgaatagccccacggcctccaaattctgcccagatgtataattttactagttttgcaatggttttgaatgaagtagacaaagacatggagagtgtgattcccaagacagactgcaggttacggcctgacatcagagccatggaaaatggagagatagatcaagctagtgaagaaaaaaaacgacttgaggaaaaacaaagagcagcccgcaaaaacaggtccaagtcagaagaggactggaagacgaggtggttccatcaaggtcctaatccctacaatggagcacaggactggatttactctggcagctactgggacagaaattacttcaatttgcctgacatttattaaaatgcatacaagtcagggtgtttggctaatctacaaataagtcttaaacctatgtttttaaatttttttcccttggtttctacttatcttttaaaaaaaaaaatgaaaaaacactcatgagataactgcatttcacccaacaaaagcagggtataaggcgatattggtgatgaaagtcttaggaaaaatgcataattttgctataaaatgtacttatttggaatactattttatatagaggtaagagaacactgctggggaatatgctttttatggttgctgttgccatatttactgaaggtttatacctaaatgtaactttaggctttatgggaactatataggtaatccccaaatcaagttattttggaatatttttatggctgtcatgcttggaatgttttagatgtaacctttgacatatttagaactctcctcctatacaatgtttattctcagatatagaggttatgtcattttataaagacttcattgataagatggcttttattcatactaatcctcccaatgttaccccttccatcttccaagaagaaaaaaaatgcctgaatattcagaatagatatttctgatttgaaaattctaaagaattaaactggaaaagtatttcatttacttagtgctctgaatttacttttacagttttctgcagtcagtatcattaaaatggttaagtttacatttgaactgaaaatatgtataaaatctagcaattcacaaaaatgccctagaaatatagattttaatcaccattacataatgacaaaccttgttaaatgcttcccacttccagtggcaaatgccactagggaaagtaagttgcactcatgtaagtatcaaactatataaaaggaggccttgtgcatttcaagtttgcaaagtacctgtgtacttaaaatatgtgtggagacctactgtacagtagttttgcccctttaattggggcacattcatcttaaatcttatagtatttatccacccaaaccccagactgagatactgctcccagggggcctagggtaggctgccagtccgtgattttaattgctgtgcttgaagttaacaagtgttataatgaaataatctacctgatgctaaataaaggctttagaatgttccccaaaaaaaaaaaaaaaaaaa

SEQ ID NO: 57268 - DNA, 1297 bp, Homo sapiens
aacagctatgacatgattacgaatttaatacgactcactatagggaatttggccctcgaggccaagaattcggcacgagaagtggaagcaaacagcctgcgagcagagcctcctgaggtgtatttcgggtcttgctggggctgagagagaccacagccctttggggggtacaaacaagagttcagttgctgtgaattctgccactgtgcccagctctgaagcctcagctcttgccaaacagaccctgagacccatgtcagccccactggatgccgccctccacgcccttcaggaggagcaggccagactcaagatgaggctgtgggacctgcagcagctgagaaaggagctcgggggactcccccaaatgacaaggtcccattttcagtgcccaagatccccctggtattccgaggacacacccagcaggacccggaagtgcctaagtcttttaattttccaatttgcggatccactgccctctgctttgcgggctctgctctgatcacctttgattgaccccaaagtggctgagcaggtgctgcaacaaaaggagcacacgatcaacatggaggagtgccggctgcgggtgcaggtccagcccttggagctgcccatggtcaccaccatccaggtgatggtgtccagccagttgagtggccggagggtgttggtcactggatttcctgccagcctcaggctgagtgaggaggagctgctggacaagctagagatcttctttggcaagactaggaacggaggtggcgatgtggacgttcgggagctactgccagggagtgtcatgctggggtttgctagggatggagtggctcagcgtctgtgccaaatcggccagttcacagtgccactgggtgggcagcaagtccctctgagagtctctccgtatgtgaatggggagatccagaaggctgagatcaggtcgcagccagttccccgctcggtactggtgctcaacattcctgatatcttggatggcccggagctgcatgacgtcctggagatccacttccagaagcccacccgcgggggcggggaggtagaggccctgacagtcgtaccccaaggacagcagggcctagcagtcttcacctctgagtcaggctaggggcctccccttctcatcctccccacccccccgccaaggttctcacactggcctgggcttgggtgcccatataggaggtctgtatgttcaccaacagtgcggaggggtcacacattgcaaaacactgcccagaacagtaaaaagagcctgcatgccaaaaaaaaaaaaaaa

SEQ ID NO: 57269 - DNA, 406 bp, Homo sapiens; identical to SEQ ID NO: 13686

SEQ ID NO: 57270 - DNA, 528 bp, Homo sapiens; identical to SEQ ID NO: 13687
  misc_feature (1)...(528): n = a,t,c or g

SEQ ID NO: 57271 - DNA, 1179 bp, Homo sapiens
ggcggttgcgagcgctgtagggagcctgtgctgtgccgcgcagttaggcagcagcagccgcggagcagtagccgccgtgggagggagccatgaagcattacgaggtggagattctggacgcaaagacaagggagaagctgtgtttcttggacaagagctgacgtccctgcgcctgtgcttcccccaggtggagccccacgccaccattgcggagatcaagaacctcttcactaagacccatccgcagtggtaccccgcccgccagtccctccgcctggaccccaagggcaagtccctgaaggatgaggatgttctgcagaagctgcccgtgggcaccacggccacactgtacttccgggacctgggggcccagatcagctgggtgacggtcttcctaacagagtacgcggggcccccttttcatctacctgctcttctacttccgagtgcccttcatctatggccacaaatatgactttacgtccagtcggcatacagtggttgcacctcgcctgcatctgtcactcattccactacatcaagcgcctgctggagacgctcttcgtgcaccgcttctcccatggcactatgcctttgcgcaacatcttcaagaactgcacctactactggggcttcgccgcgtggatggcctattacatcaatcaccctctctacactccccctacctacggagctcagcaggtgaaactggcgctcgccatctttgtgatctgccagctcggcaacttctccatccacatgggccctgcgggacctgcggcccgctgggtccaagacgcggaagatcccataccccaccaagaaccccttcacgtggctcttcctgctggtgtcctgccccaactacacctacgaggtggggtcctggatcggtttcgccatcatgacgcagtgtctcccagtggccctgttctccctggtgggtttcacccagatgaccatctgggccaagggcaagcaccgcagctacctgaaggagttccgggactacccgcccctgcgcatgcccatcatccccttcctgctctgagcgctcacccctgctgaggctcagcccctcaacccggtggcattctgggggaggagtggggcccacagctctccagcacccggaataaagcccgcctgccccagtcggaaaaaaaaaaaaaaaaaaga

SEQ ID NO: 57272 - DNA, 462 bp, Homo sapiens
  misc_feature (1)...(462): n = a,t,c or g
anaacnttatgacatgattacgaatttaatacgactcactatagggaatttggccctcgaggccaagaattcggcacgaggcctcccggactcctgggccatgaacatgtacagagggggtcctgcgagtcctggtggccttcagggcttagaaacccgcaggctgagtttaccttccagcaaagcaaaagcaaaaagtttaagtgaggcttttgaaaacctaggcaaaagatctctggaagcaggtaggtgcctgcccaagagcgattcatcttcatcacttccaaagaccaaccccacacacagcgcaactcgcccgcagcagacatctgaccttcacgttcagggaaatagttctggaatatttagaaagtcagtgtcacccagcaaaactctttcagtcccagataaagaagtgccaggccacggaaggaatcgttacgatgaaattaaagaagaatt

SEQ ID NO: 57273 - DNA, 2945 bp, Homo sapiens
ttttttttttttttgatattttaaaagtttatttctattttaactagcccacagaccccattctttgagggctgatctgatttctgacaaatggtctatagaccctcctctcggaaacttactatccccttccaaaaaagtctgcaccttccatcatgatgcacattttaagttaaaattgccaatacaacccttaaaatgcaagtttattgaataaagctgagaagagcagtaaacagacaaaaaatgcatccacctaaataaaaaaattcacatatttacatagttcagtaactgttaaaagttttcacatgcagaggttaatgcacaggaaaatgttggtaatagcgtctggatgtcttgaaatgcggaaagcaatgtatagacacacaaacacattaaggtttagctataggtcaattaacaaacctatgcagtccccacagagtcacacattctagttccaattcctccttttaggcacaagcaagttgccacattctttgtaatggttcacactgaccattaatggtgttgaacaacagtagcaagtttaaatatcccttcatttacagaaccatccatcccaccagggtagtatgcaacatgcttcaaagaataagaagagaaatttaaaagcccagattctactcataaaaatatgaatggagaaaagcaagtagtgtctgtgcaacacagtgcagtatattgtacagaatatttttaaggccatggcagtctataaattaaaactgatattcattaaaagaacttactgttgactacactctgagtgctcaacacatttggaaatgcagtctacataagtgctgcttaacaaaagaaacaaaatcacacacagtgtgaggcaacacataagcaggtgtaccatagagttttatctactacagtggtctatatgaataataatttacaaatgaaccagtattaatatgtccctttatgtatacggaagtcgctaaactacaaaacatgtccatttgaagtttttagacatctctggtatcataggaaggcaaacaaacaggcatcagttcctcagttctctgtgtgactggattattaaaccacctgtagacattgagcatgattacattagataaagcaggcaggtctagagttgtcacaataatcaagatgtctaatggcaccagtcaaaagagtgccaaagcttacatcagtaagagagaaaaataaaaattttttatttgtttataagtatcttttgtgctgaaagtcaactttatgactggatataaaaagtcaggagttaagagtgtcatgcagcagcactgatttaatgactggagatagaacaaacagatgtttgaacaaagactgacattcttaacaggttttattatattgggtggaatgctctaaattcatgaacgcttttggaaaatcttcaattctcaaccccttaaaaaagtatcctgaaccaggaagaaaaaacaagagacagaaataatgatctggacagatacaaaacaggatgctttagttcctcccatatcccaactgccatctggtgatagagttctcagaaagcaggatatctttaatattcatcaggcagaatctcaccagtgcaaagaaccaacattgatctggtgcctccgctcactctctgcagaccattttggattcctaagatgtaattatacatttcacatgcatttgtgagataaaataaacattatgtttacatatatcccacatgagtcattcacgcctaaaggttttctaaatactgtgtgtggcactagaaacttcatgctgtatcaagtcagtgtcagtattaagctactggactctataatgaaatattatagatagacatttactgaaaaccaatataaaaatctggcccagaaagaccagaatggaaatatgcaattttcttgatttaagatggtcataagtatatggggttttttttctgtttttaaagctctacacatggtttaagacaggtatgtgtaagaagcctttttgtgtgtgctgactttatcatgacaactctagctgattctttatgaaggattagggatattcatcttcagcagtgcacatgagaaataaactctgaaaaaggcaatttctggggtttaggaaggaccgtattctgggaattacttcagaggaacggacaataattctaggattatagccaagaaggactggaagacttcaggagatgcttcagcttcttctagattttgaatgctgaataagccactgaagtgtgatatctatattatccttttctttgcaagaaattgaatagcagcaaatttctctatcctgaatagcagacagattcatttttttcaattagctgtttctcatccaaggcattaggaagatctttattgtttccaagcactagcactggaattccttgtaactgtggtttatctagaagattatgtagctcatttcgggaagcttctatcttttcacgatctgcagcatctatcatgtaaacaatagcattgactcctctgcaataccgctcccaacatgcttcgaaatcggggttgtcctcctatgtcccagatctttattgtgacgttacctttagttaccttcctcatgttgaagcccactgtgggtatcatatcttcactgaattgacctgacgcgatgacattgacgaaggtggtcttgcccgagtactgcagccccacgagcgtcagctccatctcttccttccagaagagcgaacggaaccagtccagcaggcgggagatgagcgccagcatgatggcggccgggagcgagaacggacgggaggacggacgagcggcggcgtcgacgacttccacacgagcgggcctccgcccggaccctccaacggctccttggtgccccgggcgcgacacgggcggacaccgggcgggcggcagcaagccagaccc

SEQ ID NO: 57274 - DNA, 504 bp, Homo sapiens
ggaactggaaccctggccgagtccgaaaaaagccagatctggaaggtggctgcggaacggttttaagcggaagatggaggagccggaggaaccggcggacagtgggcagtcgctggtcccggtttatatctatagtcccgagtatgtcagtatgtgtgactccctggccaagatccccaaacgggccagtatggtgcattctttgattgaagcatatgcactgcataagcagatgaggatagttaagcctaaagtggcctccatggaggagatggccaccttccacactgatgcttatctgcagcatctccagaaggtcagccaagagggcgatgatgatcatccggacttccttagaatatggggttaggtttattaacttcccagccactgaagggatatttgagctatgcagcagctataggaggggctacgatcacagctgcccaatgcctgattgacggaatgtgcaaagtagcaattaactggtctggagggtggcat

SEQ ID NO: 57275 - DNA, 362 bp, Homo sapiens; identical to SEQ ID NO: 23045

SEQ ID NO: 57276 - DNA, 951 bp, Homo sapiens
gaagaatgacctgggcattcagagctacagcagatggcaagtttataaaggagcagagtgacgtgtcctgcacagaaacacatgactgtcgagaccgttatttaagtctaacgggcatttgcgttgcacagtgagttggagataactcgggggatttacaagtccagttgcttgaaagagtcaaattgattgtggccttttctttcgctgctcataaactattaccacccagttagctttatttatttgtggtgttaagaatcttgatgtgaccgaagaagtctgtggcatggtgccaaggcaggcccaacactgggaaaggactaattttttttgtatattgagagaaaagtttcacatagactggccagagttccgaagcacaactacagacagcgtcattgacagggggacttggcaggacaccttgatccaaggcgacagcattttggcaaggacacggaagttgggtcgttgcatccatcatcaggagttgacttgttctgagcaactgaacagaacacaccgcgatgctctcgacacttccgctcctgggacttcagtcacgagtgagttgatggtgacttgacctgagagatttcacagaagctctgtgacttggttgtggaagaaatctgaactgttcaagttaaccaacttggttcattttaaatcagggcaaaagccacagtgggttcccctgagaaggttagtcaaagacttctggtcaaggttatgaccgttctgaacactgaatatttctccgcaaggatgtccacaaacagctacttgaatgtatgatggtgtatgcttggtcctggggaatccaccggcaaggaaaaaaaacctttactctttcctgtgctgcagtcggctttcagaaatgaaagaggtggcccggactgtattcacctacgtcctggggttgaagaccaaattcccccaaaggct

SEQ ID NO: 57277 - DNA, 1405 bp, Homo sapiens
  misc_feature (1)...(1405): n = a,t,c or g
gtttatttttgttggttttttcttttttttttttgcttacgtgggcatccttcagcttttaataatctgaaaaattctatttacccattgtcaatgtgtataaattaatctcagtcaattttatacaataaaaggtgaacttttatccatcaaacaataatttaacaaaaaatgtaccggaagaagaatgttcattacaaatataggaaacataaatattaccaaatattggcaagcactaaaatgttcagaaatataagtctattacagttatagctctctcaagcaaaaaaacagcagagaaaaacttagttttcctgaggggctatttatttacttagggatttgttaaaaggtcaaatggggtcacacagaatactaagaagagctgttcacccaggcctcactaagaactcttcttcatgcagtagctatatagtaacatgacaactgctcctacgacccaaagaggaactacagcaactactctttagcatctgttgctcccaactctgctttgcaattatatgactcaagcattctggctccgttaactattactgctgttactcccaagtaaattccctctaaaaaataaaaatttttaaagctgtaatttaagctctctgctgcctcatgacttcaattccatcagagttacgcattgtttcctctgtacatctttgctctgcttccattgctaattccctagtaaagtgttgtatattcaaagttccaaagaaacagaatatccaagacatcaccaatcatccaaaacacagtgtaggaggccacagttaagagaagcaagaccattagctctttttataggctcgagaacaacaggatgctttggtcctgtatcaggcagggacggtttttggggtagatcctactgccaccctactatcgggtagatcctactgtcaccctagctatgggcacatgtcagagtcccatgtaataaaggagacaaaaggaaaccaccacgagtataaactaagaaaagtactccaaggtttctaagaatggagctgtataactcactttgccccatttgttacttctccacggtacttaccaccacctattacatatattttgtttatagtcagtcttccctcattacaatgaaagttccgtgaggataggaatatacagtcagccctcagtatccatggaggactagtttcaggatctcctgaggataacaaaggatactcaagtccctgatataaaatgacatagtatttgcacatcacctttgcccatcctcccatatacttcatatcaactctagatcacctcgtgccgaattcttggcctcgagggccaaattcccnanagtgagtcggntaaattcgtangcagtnaaagggttttcanatggnttcaattatnacac

SEQ ID NO: 57278 - DNA, 2393 bp, Homo sapiens
tctagatgtaaatgtcagtggaaaggagagctaccatcactaagacgtatattatatgagaagctcattggagaagacaaagccttattgaaatatctgtctgttttggaaggtttatattctgcaagatcctgaagatactttccttcttttctggctgaaaacacagttaaatcactttcaaagttaaaagactattaagaacacaagatggggactcctgcttctggaaggaaaagaacacctgtgaaagaccgattttctgcagaagatgaagctttgagtaacattgccagagaggcagaggcaaggctggcagcaaaacgggctgcccgggcagaagcaagagatatacgcatgagagaactggaacgacaacaaaaagagttggatgaaaaatctgacaaacagtatgctgaaaattatacaagaccttcatctcgaaattctgcctcagcaacaacccctctaagtggaaactcatccagacgaggaagtggggacaccagcagcttaatagatccagacacttcattaagtgaattgcgggatatctatgaccttaaggaccagatacaggatgtagaagggagatacatgcaggggcttaaagaactaaaggaatctttgtctgaagtggaagaaaaatacaagaaagccatggtttccaatgcacagttagacaatgagaagaacaatttgatctaccaagtagacacactcaaggatgttattgaagagcaggaggaacagatggcagaattttatagagaaaatgaagaaaaatcaaaggagttagaaaggcagaaacatatgtgtagtgtgctgcagcataagatggaagaacttaaagaaggcctgcggcaaagagatgagcttattgagaaacatggcttagttataatccccgatggcactcccaatggtgatgtcagtcatgaaccagtggctggagccatcactgttgtgtctcaggaagctgctcaggtcttggagtcagcaggagaagggccattagatgtaaggctacgaaaacttgctggagagaaggaagaactactgtcacagattagaaaactgaagcttcagttagaggaggaacgacagaaatgctccaggaatgatggcacagtgggtgacctggcaggactgcagaatggctcagacttgcagttcatcgaaatgcagagagatgccaatagacaaattagcgaatacaaatttaagctttcaaaagcagaacaggatataactaccttggagcaaagtattagccggcttgagggacaggttctgagatataaaactgctgctgagaatgctgagaaagttgaagatgaattgaaagcagaaaaacggaagctacaacgagagttacgaacagcactggacaagattgaggagatggagatgaccaacagccacctggccaagcggctggagaagatgaaggccaataggacagcacttctggcccagcagtaggaaaaccacccttcaacctgggtgatgctccttggggccctacctagagggactgacttttgtccattgacacaaaccccttttagtactgttttgagttttgtcattaaaacagccacctttgtattttataatttatgacagaatgaagtcattttgaatctacatgaatgaacactttggattttgttgtagtttgattctagggtagaaccagtccatgctgtttttattttttatctccgtaattgtagaatcatgtttactcaacgtttttccccagctgcctcagtaactgggcactcggaggccttggcacgggttctggaggacagacagcaattctatgagtgctcactgagatacttgctggagacctcagaaaacacaagtgccttctccacggtgcaattcagacttcagtgatctccagtggtcaaaagacatttacccttaatatcagacaacatttatattttagtgaagaaacaagttctcgggtggggaatctatgtttcactcagatttatatgtttggaggaaaaaagcctttttttgtaaaatatttaaatttatataagaaaatgttagaaaaaaatatggggagtgtatataaaacttgctttattgcatggggcaggggaagtccaggcctaatactcctaaagtaagagttgggtcctttttttcttcaatacaactgtgctgtaccttgtaaagtattttatctgctgcttatttgtggaatgaaacctcaaacaaacccaaagggggagggtagggcagggcaggcagattggaaatctgcctgcaggattctattaaatacacccttttgccaaccacaattgggctactgacatgttcattttgttatagggagacttttaaaacaaatcatggcaacc

SEQ ID NO: 57279 - DNA, 768 bp, Homo sapiens; identical to SEQ ID NO: 23049
  misc_feature (1)...(768): n = a,t,c or g

SEQ ID NO: 57280 - DNA, 2340 bp, Homo sapiens
  misc_feature (1)...(2340): n = a,t,c or g
ggttaatcaaatactgcagtactgatttaatcagtataaaatcgaaagagctttagatctgtaataaaaatccaaatttggggaagggcaaactttaaaacagcagccaagtagagaagggttggggaagggagaggtgagtgaacaggcacattggaactgtggggacatgtaactgaccactgtcaaaccagtgtaagtttcttggtttctcatggaaaacattttatacacctatttttcttccttccatacttaagtccatcagtgtccaaatacgtctgttccattttttgtctgatttttgttgggatattacaacacagtattgcatttactccagttcctgctccatgtgaaaaaattagatgatttcaaatactttcttcagctccacaataagctgccagtcactcttctgcatttcatctctgaaccagtctttgagtgcatcaatggactgccggctgatcttactaaccaagaatatctgtagcttccaaatgtcttccaacattttgggtgactcacccagggatanggtcnatttttacacaaacttcttgtcctttttttgcaacatccacttgtttatggtttatttcaatacttgttactattccgatggtcaacaaaatttttggcttgggacacacatgggtgtcccctgtttcacctgacctgcttccaccgtcacccccatcactatcggatctcgagaattaaaaatgtactgagggaggatttttatcttgcagggaaatactgctatgtgcttaaattcttcttgtttctgtttcttgtagtcttgtctatattttgtaaaggcatcaaataaatgataaataatttctgcactaaaaattctaactcctaaactatcagccatttcttgtgcatctcgttcaattctcacatcgaaggccaaaattactgcatactgagggtcatgttccaacatcactgaagccttcataacatcttttttatgcactgggccaatgttaattcctgcatagggcacttctgatgttttcagaaattccagtagagcttccaaagaacccagtgtagatgcctggacatagactcctttttcttctaatttgatagcatttagtgtctgctttaactcatggatcaattcatctttaagaacagggatttcatcttctttataagccacaaggaggggtaaaccagccaatgttttctccaggtcttttccaagaatctttaccccctgagctgcttctacttctttatgcttttcatactggttcttcactcgtaattccttcataggaggaggtaacaggaggcctcgaatctgagttacaatgggcccttctactccaggaacaatgattgtatctccttccttcaaacgcccattgatcaagatgacatctatagtggtgcccatccccgggagagctttaacctccatcacctgtgctctcagctcttcacagtgtgcaagtctcttgctcaacatggtctgagttaactctacaagaaggtagatcagacttcccatgccatcaccagtatgtgcagaggtaggtaccaaagacacaaaagtgcggggatctttattctcataaaacaaagcagcattcaaaccctgctgtgcaaattctacaataatagcctttgctcgctcctcaaattcatcttttgtattctttttctgcttctttaaagtagcagccacatcagagtcaggactctttttccaatcatataacctatcaatcttattgagtgcaacaatgaagggacattttttagatttgagaaggttgatagactcaattgtctggggctccaaaccatgcataatatcaacaactaaaatggcaatgtcacaaagagagcttcctctatttctcagattactgaaagattcatgccccaggagtatcaataaattagcattcctggaatccgtacattctctctatcaaaatttttaatcatcttagtctgttcattaatagcttcaagaggaacattggtggcccaaatttgttgtgggataccacctgcttcaccgtcttgtacatgtgtgtgacggagcttatctagaatttttgtcttccctgtgtccacatgcccaagtacgcagataataggggctcttagcttttcggtgtttacatttttactatgttcaagtcgccgtttctcaatcctccgttttgctttgtcataagccctttcttctttagtccgatcatcatcagagtcatattcagaatctgagctcatttctttacttggctttttatctaatgtcttccctgaatccttctcatctgacaccttttcatcttc

SEQ ID NO: 57281 - DNA, 1074 bp, Homo sapiens
acacctgggcaacagagtgaaacctgtccctgttttcctgctcttactctcacctctgaggcctcctctgcctggaagagattacagggaaattccaggcagcccttgtcaattgtttttatgaattctttacctgttccttttaaagacaaggaaactgaggcccaaagttctaagttgtttggcaaatggagtctcctaccctcagctcctgcaaggacctggggggacccccaggtcaaggcaggccacatgattcttgcaggcagacaggggacctaggaggcacatctggatctcagccccacccctggcaacctgcctgcctagagaactcccaagatgacagactaagtaggattctgccatttagaataattctggtatcctgggcgttgcgttaagttgcttaactttcattctgtcttacgatagtcttcagaggtgggaacagatgaagaaaccatgccccagagaaggttaagtgacttcctctttatggagccagtgttccaacctaggtttgcctgataccagacctgtggccccacctcccatgcaggtctctgtggggtctttgggatggatctcctagggctgggctggaagcctcatgtactgttgtcttctaggtaaccaccctgaagagaaggggtggcatcaggaaccgcaggaaccaagcagcctttggtccagtgctgctccttggaacagttgagtgtggcctcaaaccattctcctgggtagctcagtcataaaacaccgaatgcctgcctcaaaatagcctctgagggaagggagctgttgacaagtgaagccctcaggttgtgtgggattccagcaggttattacagcttgtggggggagggagggtccattccaccagctttgaatcccagggtcccctcagcttcactgggccacagtgtctgtcccaggaagaagcaaatggacagtgaggatgatggagagactacagctgccttgtctaaaacctgggatcttaaaagtgttattttggcttttattttttaaaaaaagaaaaggaaaattggcaattgtattaaaaaacac

SEQ ID NO: 57282 - DNA, 1853 bp, Homo sapiens
ccgcgtcgactttttttttttttttttccaagtttatagtctaaattttattatctccaagtcacaatgctgatcacaaatgggcaccctttaaaacagtaacaaaaaacaccaccacacatggaaaaatccttgcaactaaacacagtggaccaacagagacaactctcacagtgtcttaaggtctgggaatctgggcatgctgcccacaggcttgaggagacatcttcaggtttaaggcaaagggaacagcctacaaaaggcacaaccaccagctacccctagaagaatctcttagttatttcctccttgggggttacagattaagtgcctctccccactctccatccccacacctgtgactcagagtgattaggccagctgctagatggaaggaataaaaacagtgacattaccggggagagacacagccaccatctttgccctcaggttctgtagaaggacagggacagtggccaggttacccctggcagacgtatgtactgcagtaataggaatctcttcccacagaggcagcagagaagtggtttagtgccatggatagggaggaaagataggagcccttgcccagaaggtgactggcttccttaggccttaagccccaggagtttttatattctgtctgcaaggacaaaaatagaattcggggaaaataaggtagtaacatctaaaacacttgtagcaggaaagacgtggagaagagcaattgcaaaggacagggtagactgcttgctggataatatttgcctttaaagagatgcattggtccacagcaactggaaaaggggtgtagcaagaagaatggaaagaagagaagcaaggccctctaattccacttacctcaaaagactgagccctgaggactatgtgaatacacacccctaaaggcaaaggctctcactccaccatccctttctcacaaaagcatctggtgtgccatctctccccacagtagggtattggccctcagcagagaacagaagcccatcatagtacaggtattgatggatgctcagactcctaaaaacctaagtcaaagagaagggctcctacccacctactctgagcttttctgcacaatgggaccctctgtgcagacagcccatgccttccacagggttagagttaagggaatacaagtatacaagaggataacaaatgcccaactaaaagtgaaaggcccaggtctttttagacttggtggggaaggctggctgatacattctccattatctgggatgcacggaagagtcaaaagggaatccagaggggctagaaaaccagaagactagacttgtttcatttaaaggcagggagagagagcaagaaacagaaacaaagagaaaaaattaaaataatattaaggataagaagccaggctttaaaaatgaacatcttagaaaacaaaacaaacaggaaggagcttccttgggaacagaagacacttcaatttcccagaagtgaagaacagcagaagacatgggcttctgtatctagactcagaagcttggggctgtctggctctctctgctcccccgaacacagccaactcaagtgaagagtgaagatgggacgaggtcccacttgtttctccctctctctagagcctgtcctcagaggaaggcaggggtcctcctctttcagctgtttgctggtaggagccacaccctatatctttgaagcccttctggtagtagatagccagctgtatttctcttctgagttctcacctctgctgctttttatatgatgttaagatttaaaatattcagaaacttgtattaactggaacccctgcttacaacctcaggtggagggggcttgatggtgac

SEQ ID NO: 57283 - DNA, 874 bp, Homo sapiens
  misc_feature (1)...(874): n = a,t,c or g
gcttcaataccctgctgatgagactctggacacccgctgagtcccagagccatttcctggctccatccctaagccccccaaaggaccctgcttgactacagagcacccccatgccatgctggcatatgaacatggggaatcctggaatgagaaagtctttgagctttcagggacctccatgaccaccttgtccagtttctccatttgtgtggagataatccaagcaagacaaggagggcttgggcaatcagaaggttttggagctcaggcctgccaaccctcatttcattcagactggtccactgtcacctgtttcagatatggtgcttctacgtaaacacttatttgaagactgaaaaaaaaagcatttgaaaaccattaaacttctccaaccactcatctttcagatgaggagactgaggtctatcagtgtccataaattattcattacctcctcagtcaatcattattcacccagtcattcacctggagggtggtgaaggcagggagaaccagccagtgcaagggcccctcatgtcctgcctggcctttgcttttcctacctctggtaactgactgtgctgccaaagtaacactccgtgctctatcacctgggcataggaatgccctctggcttggcgagccaagaaagacgctcaagtaatcatacctgaccttaagacaagnnnnacananntatctangnnngtanatatntnnaacnatnnacctngntatgnangatacnatatttngaancnancctatcncanacnaagatgnctaanaganntncatatnanttcnngananacagtgantctattncaannnangantnntcnctcnttnnnaanntntatnatnnnttata

SEQ ID NO: 57284 - DNA, 1608 bp, Homo sapiens
tttttttttttttagcccaggtcaacacgcttttattgccacttctggctcccctcgtcccagcaagattcctacctcttaccctgtaggaatactgagctccgatgcaggggaatggggtgggggtgttaccacttctcctctgcacactgccaagttaaagaaaaccctgcttgctggagagggagggccagacagggaggaattcaagggcatgtatggctcagtcccacttctgactgcagagtatagggaccagggttccaaactttttttcgaagtaagggaggtggggaagaatttggctgctgttgtaccccgtgtcctagctgccatgtttccatggaaatgaaggcggggcaggatgtagctcactctgactacctgggaggatggcaggacaggcatttggtaaacatatctccctccactcctacctagcacatacggctgttcccagccgacccccaggctctctcctcactgcctgctccactcccttcccttctggagctggtatcatgccaagtggagtccaggcagggctgccagtgctactctccacagccaggtctcactggcacgttaggatctaagtatgtccgccaagctcaggagcatccctgctagagctggtggtggcagtgcctcggtgaaaaggcagcagcagtacccccaactctctgtgcaactgctgtttcccaaacaaaactgaaaacataaacccaaacacttaagggtatcactctggcacaatgctgagggctgggatgggggagaggaggcgcatcctcctgagactggagccacctgtgcaccctgccttctgcccatctggagtttgcttcttcccactgggctgtcactggggggctggaatccaaatctccatttggtgctgctttcagcacccactgctgttcgtttatgaggcttgccagtttccatggtgaggaggtgcaggatggattctcagtaccatgggtcagcccggtgctgctggttgtagagctgtagcttgatctgatctttgatctgattcactaggatctgggacagcagaattcccaccagctgggggatggccaggcctagagccacaccaccaagtaagaataggttgctgtgtatccagttgaccaacttgtcaatacagccattggtgtagatgactttgctagcttccaagtagtcaaaggcctgcataccttggccacacatagtgttgatcactgcctggtcaggagtaggcaagcaacaggagtaaggcacagagcagcgctctcgactggggttgtcttctgagcagttgaaatacatgttctgagaccagtccttgtaggaaatccctccacagcagctaaactttttctggccaaaatcaatgaggttctgcagatccaagtcatctcggtagtgcacaatggcattgttgatgatctcactcactttccctcgagccttgtctgagaagacgaagcccaggatcccagcggccagctgcagcaggaacacagcggtgaggcagagggagaacgtctgcaggaggcagatgttctcgcggagggacccaatgcagccacagaaggtgagcaggaacatgaggac

SEQ ID NO: 57285 - DNA, 2099 bp, Homo sapiens
cgactttttttttttttggtagtgtagcttggttttatttatgtccacaaatatttcaaaaaaattacaaaatactcaaatggagagaacacagaagtcacgatttctgggtgtctactgtttacactgtgttatctcatggcaaactactcatatatacatttagcttcaagatatatagaaacgtagcaaatccgagtgtgcacgctgcctctgccgcagtggagtgaagctcaacctcgaggacaccgaacaagatacggacacacacagaggagccaaaccaaaccccgaacaaagggaggaaaatccgaaggaaaccgagtggttgggcttcaaagacacccatgaaggtcagggcctcctaaacaaactgtagtttatctggtgagggtttcgggtcgagggttttttagatggaagaatctcagcgcttcgccttgggatatggggagaaaagcaaagctaacaagaatgccttcggacggttttcaagcacagacctcagaggactcgactcttctttggaaaaatggatgccagaggaggagataaagaaggtttaactgaatggtagatgttgtgttctaccaaaaagaaagaaaaaccagaagccgagaaggtgggggcctggatgcaggagtctgggagcccagcaggaagaggcctcgctcagagccacgggaacaagcctgccatgagggcctgtccccaccccagaaggaaacgaatgccttcaagccaatgtggcctgaagtcccacgacaaaaggttcatgtcagctttgcctccctgtgaacaaactaaagttaaggcagaaatggaatgagagaaaaatgaaagaaaaaaaacttagaaacattttcaacagacaaaacaagcctatcccaactgaaaccaaacacggtttttaagagaaactggaaatgtcgctatttgacgccagaacctgaatttgagccagtagctgctggtttctagatcaaactatcagcatctcttcctgctccctctgcggcctgggtcctggatggactttgtgtccgccgacccagtgtggtctctgtcctacaattcttgggatgggaccagcacaatggcagaagagacctccagtgtctgagagaaaaggatcggaagaggccacgtcctggcaggaagcagggccgacagagggcagacaccccagaacacccgccctcagcctgggagaaagtgcgttacggctgcagcctggaaacgagggcaggctctctccaggacggttccgctcagaagggcctggcctcctgagaagcagcccccacacagcatgctttctgaatgcactgtgggtgggactccaggttcccacttccaggatgaagagtgggactcaaatggtttaccagtgcgatgtggggtcaccatgcagacctgcccctagggtaaaatacaggctgcccccaacacctgtcttaactccaggatctcccttgctcaaaagtggcctcaatctgtggcaagaaagatggggcccgtcctcaccacaagatccaagtgacaatgcgcatgagaaggcagccttctaacacatccctttggcaggcatatgtcctgggtcacttgtgtgctgagttatttgtatggaatcattttcttagatgatgaaattttcggagtattaaaaaagacattcatccagaacaatcaagtgtgtgtacacagaaatctagaaggaaatctacaatggacacaggcccatgcgctttccatcccgtggaaacagaacagtgacactggagaacagaaagtgaacattcacctccctgcactccctgtgcaaaatggaagaggtctgatggagcagatgtctgtgctgctggcagagcacaggctaggagcagacacaagtgaaacgccaggcagaaaacagagtctgtaacatcgtccctgcaaaccctggatgctcgctgctgtgaccaggcctcggtccaagcctctgtccatgtggaacgcccctttgctccctttaattaaagggataattatatataactttttattaaaaaatcaactctgtattctgtcaatagttggtaggaattcacaattagtga

SEQ ID NO: 57286 - DNA, 2346 bp, Homo sapiens
  misc_feature (1)...(2346): n = a,t,c or g
acagaacctccatttataggttnagtgattntcgtncctcagcttcccagtagctgggactacagngnttncccccacacctggctaatttttttatttttagtagagatgaggttttgccattttggccagggtggtcttgaattcctgacctctggtgatccacctgctttggcctcccaaagtgctgggattataggtgtgagctaccacacccagccttgtgacagtgattcttatctcatagtgcaaaagatggcatttggatgggagataatagttcagaaaagttccattctacagcaactcacaatttgaggaccatagttctaagaaatatccacaaagtcagttgaactatgatttttagctacttggcatataaagttttgctggtaagtaatgacttaaatccataacttttcaaaaacataagccttacttcaaaagcattatttgtacattgtagaaaattagaaaatacagataatcatctgcggtaactttcccaaaaaagagaaaatacagataaaatattaaatgaaaatattcttaccacctacaggcgaccaattttaatatctccataagtcttccccagctctatcttttgacttaaataggatcatatttaactattgtcttgtaacttgccattttcatttaataacctccatccttccgtgtcaaaataatttttcacctcttctcttacttagtctatattcagatgtaaattgttcatctcttatatttcccataagtgaaagttagtcctagacttgaagcctttattagctgtaagttcagcaaaatgcctttcagagccagtttgtcaaagccagcatccagtctggagaatgcacctggcatatggttgtgtcctttaattccctttcaatctagtggagttctttttttcatgatactgactgaagagattgcacagttttggttttaagtacagagacgtagtacatttcttaataataaatgtttaacttttgtgtgttttaacctaatttgtttttttatttttaaatttatattttatttcagcaaaacaagctatcgatcagggaagatctccagttataatagataacactaatatacaagcttgggaaatgaagccatatgtggaagtggccataggaaaaggatacagagtagagtttcatgaacctgaaacttggtggaaatttgatcctgaagaattagaaaagaggaataaacatggtgtgtctcgaaagaagattgctcagatgttggatcgttatgaatatcaaatgtccatttctattgtaatgaattcagtggaaccatcacacaaaagcacacaaagacctcctcctccacaggggagacagaggtggggaggctctcttggctcacataatcgtgtctgtgtcacaaataatcattaaattagctattttcagctaacacatttgttgttgcacttgaaaaagagttagtgagcctgtcttggagtttaagtagtttcaaataaaaaaaggctacagtgcctcacaaaggatgttcccagcaagttgtttaaattcccagcaagttgttaaagtgtaaataaaaatatatgaaattgtattttaaatgtttttatattctcttgttgtaatactcttggctgttatggaagcacctgagtaatagagtggtgggtaggagctaggatgtttttctacaatcgaattttaaactaatttatctattttatagacactattgaacagttttttaatagttcatatctaaatctaacttttcataaaactttacggtttttccttcactaccttaaatatgcaagaaatactgacttggtatagggtaccttagttttctctattcattagacaggtaaaattatatttcagctgattgatctgtgtgacaaaattatttcttagctataatcagcacatcacttagttcaaacaaaattccccagcaaatgttagatagtaggtatatcagtcacctggggagttttcttcataatatgcatattcatcttgtaatgcatacatagttaccatcctccttctcaacccatctccctaaccccacatgcttgccagttcttgaagggataaagtgattctaataatgttttacttctctctgttcaatttaatgtgatataattctagtataaaaatattttggacagttgcttaacatggtcataagaggatttgtactatagaatatcttctagtactaatttttctgtagagcaaattatatttctctcactggatagtttttagatgtgtttcttcatataaaattaaaaactgagatggaattcaaaaaaaaaaa

SEQ ID NO: 57287 - DNA, 897 bp, Homo sapiens; identical to SEQ ID NO: 13705

SEQ ID NO: 57288 - DNA, 858 bp, Homo sapiens
ttggaacagctatgacatgattacgaatttaatacgactcactatagggaatttggccctcgaggccaagaattcggcacgaggtgaagtgtgatacaaatgtaaatgacagcagtgatctcggggtggcccccggcatgctgccctcccccacgcccatgcctgtggcagcaaaccttgttcatcagtatagctttctttcctgtaacccaggatctaccttggggggcttctcaatactgcattctatgtagccagcctctttaacttggtaagtgagccaccccattctagaacctggaaattggagcccctcaaaaacagttcctgttcaaggaggactgacctgctggggcaatgttgggtgcagtgcagtccctgcttggggtggtcatgtctaggctgttgctctgggcaaagataagttgcaagattcacagaaatgggaaaatgtgaccaagtgtgatcttaacaactgacaaagtttgtaaccaacccaagttagaatgtggtcaaacaggaggtagtttagatatgcttccaagaacatgtctgtgttataaccatagtgcctaagcagtgagctctggtttttgaagggcttttaagaaatatatacatgtctgtgtcagtctataacttgcctcctctgggcctgttaaagcatgaagactgcatgacacaagagaaatgcaagccctacggttcctttctcagcagcgaattcacttgagaggatgctcttgactcattctctctgctctttcctgctcagatttctgataaaaatagagagcataggggaacagataatgaaataggaaacccactcgtgggttccacagatacctaccgaag

SEQ ID NO: 57289 - DNA, 1857 bp, Homo sapiens
tttttttttttttttttttaatttaaatccactttttattctttcacagattttaacaattatacacaacttttaacataaaggtagtgaaatctcaaggataaggaggcaatatatatggcctcttctattcgttattcaggatggaaggaaattttcaaagtacagtgtgtgagattcaacactggaaaaatacatatggaaacttgtttaattggctccacttaggaccagacacagcacaataaatacagaactgcatcatctttttaaaagatcattgtaattttaacacattcttactaaagaaatacatactatcagtgaccgatctgaaactctgtaacaggtgaagggagacttacgatgaatatctgagcataggttcgctagcatcttcacactcatacataaacattcttaaagggaataagaatgatttcaaattcaaaacaacaacaacaacaaaaaaacaaatttgggtccaactttcttcatcataccattcattgctatcacaatcctagtttgctggtaggtttaaagaaaggaataggaaagtttttgaaaatccttttaatttctaccagtcttagggcctcttgagtaggcccactttggaagcaaactgattaaacagcaccatcaagtcccgtatctcaacaacccattgccataatttcctgtcaatgttctcaaaggttaaaacaagttgtatagaagaatacctttccctcaatagcaggcccactgtaaaaacatgtaatctgcaagaatttaaacaaaactatcctggaattctctactgattgcttcttcccttaatagacccaagagataggcattacctaaaaaattaaataataatatactgaggcataaaataaatactttatttatgctatcacaatttgggtatttgaagattgttagccatggttcacacaccctttcctcttcccaaagaggaagcaacggtgccagcactattggtcagaaagagttaatgggaaactgttgctctcagagctgtgtctgcaatatgcagacacataaattattattttaaacatatacttaaaagacggataaaatgattttttttcatgtgacccagattctgttaatcagtagatacaaaattaatttcattccctattagggatgggaaaactgggtatgcctgcctgtggcccatagatattctggagaaacctccttaagcccagtgaacccaaaaaacccatatgaaaagaaagtaaatactttcctatgattggtccaactggctgttccaaaaattcaacaagcaaacaaacatgcaaacatgtgacatatgtcattattttgtaaaaacataatgccactctggcccccaggaatcactacagcccagctggtccttaaaggtgcaaaccagcctttaattgctactaaacatcttctctggtattttactgcccatcacacttgccacatgattctcagaagcttaggcttccaagatgtttaaggaaaataaacagggtgtgatgtggatcaagttttcagtgattgttttaagtgtcattttaaaaagaacttcctagtaatgaagtatgtaatagtccttgatattaaattttttctagtgaaataaactatgctttaataagacaatgttgctctaagtttgaccgcctgattttttttttctcttttttagagggtactatttcatatattgtgtgagccccacaaatgtctattttaaaaagagtatagtccctggccaggcgcggtggctcacgcctgtaatcccagcagtttgggaggccgaggtgggcggatcacctgaggtctggagttcgagaccag

SEQ ID NO: 57290 - DNA, 569 bp, Homo sapiens
tttttggggttgaggaggatgtatttattatttaggtgcaccagcccagtcagattaacatccaaaggactgagccctgaacaaagagtcaggttaccttttaagcatttcatggggtgagaggggagatctgtgcagggggaagcttactacagaagtgagaaacaaagacagttattcaattaactgagacatgcattacatcatttcttacttttcaaggaaaatcatgttttacgacttgagtttatctgtctagtgaccttgcagctgcacagctagggaaacagagtcttcacaatgcctgggaaaggaggagagataaggctcactagccacagaaaaacaggcagttaatttttaaaggactccagctctttctctttctcacggggaattggattttcttacatgcaactgaatttctgcttacacatttttaaatttcttttaattgcttttccaatgcaatagcatgaattattattctgttgacctatttgccttactatgagctgagggtagttcaacagaataataattcatgctattgcattggaaaagcaatt

SEQ ID NO: 57291 - DNA, 582 bp, Homo sapiens
ttttttttttttttcagtaaaaactctttattcattccttcatgtgacagttggccttgagtagttacaaagacagagcagttcctgcctctcagaattctaagcagacattccagagctcacagatcagtgtcccaccagctgctaccctggaagcttcagggagatggggagcctggagtaggggagtgctgcaggaacccccggcaggcagtggggccaggcttcacaggcacccagggctgagtgcgagatggcagggggcaagcaggcaggcagtgggatggtcttgaggtgtggggtgagggcaggaagcccacggtattcctgacttggagtcgagggagacagaacggaggggcccgagctgaagacagagtctgagggaactggagaggctagaagccagcactcagcttcccaggagaccccaactattgccgggccaagtgtccagggagaacgtcgggtatccaaatgtttcagtggaagattccttttccaaacatgagctggttctttgggtttttaattataaacataatacatggtcaaggttaaaaacattttccaagcaccaca

SEQ ID NO: 57292 - DNA, 3763 bp, Homo sapiens
  misc_feature (1)...(3763): n = a,t,c or g
aaggacaaaatgtacattacctgtgctgaatacactcacttttatggtggcaagaagccagatctcccacaaacaaattttcgtcgtttaccttttgaccactgcagtctctctctgcagccctttgtctacccagtctgcactcccgatggcatcgtctttgacttactgaacattgttccatggcttaagaagtacgggaccaaccccagcaatggagagaagctggacgggaggtccctgatcaagctgaacttttccaagaacagtgaggggaagtaccactgcccagtgctgtttaccgtgttcaccaacaacacccacatcgtggctgtgaggacgaccggcaacgtctacgcctatgaggcagtggaacagctaaatatcaaggccaagaacttccgggacctgctgaccgacgagcccttctcccggcaggacatcatcaccctccaggaccccaccaatttggacaagttcaatgtctctaacttctatcatgtgaagaataacatgaaaataatagacccagatgaagagaaggccaaacaggacccgtcttattatctgaaaaatacaaatgccgagacccgagagaccctgcaggagctctacaaggagttcaaaggggacgagattctggcagccaccatgaaggccccggagaagaagaaagtggacaagctgaatgctgcccactattccacagggaaggtcagcgcttccttcacctccaccgcgatggtcccggagaccacacatgaagcagctgccatcgacgaggatgtgctgcgctaccagtttgtgaagaagaagggctacgtgcggctgcacaccaacaagggcgacctcaacctggagctgcactgcgacctgacaccaaaaacctgcgaaaacttcatcaggctttgcaagaagcattattacgatggcaccatcttccacagatccatccggaactttgtgatccaagggggcgaccccacaggcacaggcacgggtggggagtcatactgggggaagcccttcaaagacgagttccggcccaacctctcgcacacgggccgcggcatcctcagcatggccaactccgggcccaacagcaacaggtctcaattcttcatcacgtttcgctcctgtgcctacctggacaagaagcataccatctttggacgggttgttgggggctttgacgtactgacagccatggagaatgtggagagtgaccccaaaactgaccgccctaaggaggagatccgcattgatgccactacagtgttcgtggacccctatgaggaggccgatgcccagattgcgcaggagcggaagacacagctcaaggtagccccggagaccaaagtgaagagcagccagccccaggcagggagccagggcccccagaccttccgccagggcgtgggcaagtacatcaacccagcagccacgaagcgagcagcagaggaagagccctcaaccagtgccactgtccccatgtccaagaagaagcccagtcggggttttggggacttcagctcctggtagcagcagcaacttgcaggctgtacctctgcccttccttttctcatcaatcactgatgctgaagctgcaggcctgagccctttgtctccctggatgctgggtggcgcctcatctggcatctctgcctcaccccatccactggccacaggctgcctgatgaccactagaggtatgtctgcccctcgtcacccctggctggcacaccaatctggtgggcctttaatcatgctaagaacaaagaactgcggccatgggtggcttccttcttcttctccagcccattccctttggcagcctgtcatccctgtctgtgaccattggtcgggggccctgggctctagagtgacttttgacgccctccatccctcccgccaggcactgtcctccgcaaggcctggtgcagccctggcagtaactggcttgtaagaggctcagacaccaagctgggcctgcagaggaggggcacagtaggacacagtgactgcccaggtgtccacacacctgtaggcctctgagccagcgtccagggtacaggtgcgggtggtggggatgaaggcctgaccagggagggagaagcaggtttggagaggaccctgtgcccaccctgacagacaccctggctggccctgactgactgtattctctggccacattcaagtcccccattggtgggggcagagaagtaggaccaggccatccttggctccagagctcgaagaccccaagacagccctctgctctcagcggcgccacagagagcctgggctcagccttctgcatcaggacatggcctcgtccactgagggcacgatttaaacatttgacatcagaagctttatttgtaaacctcacacagataaggaccaagggctggcggtgtggccagaggacaggggaagctgaaggccccgtgcttgagctcggcagtcctgctccttgcagtgaagccaccatgggtgaccgtccagcctcacccggtggcctgcacagtgagggaagggcttcagggccatctgctcccagggcaggggacaggccaccaaggacctttggcaaatgaaggtttacatttctgtagtttgtttgttttagagcttaatttgtagtttttttagctattaaaaccatttgaatttttaacgacctgatgagggcatcaggtaaattaaaggattttgggaagattcttattttcaattctaatatctgacagatgccatcaagaataagcattaaggtataaaaaatactgtgtgtataaaacaatgccaaaccacattcctacagcaaatgcactgtgccatttataaccctgacatcacctcccaaggctctcaaggaagatttattttaaataacttaaatagaagtcctagatgatattgtttaggaatttaagagggtggtggatatggtcctgtgaatagcacttcccctgaagccagctcatggtctgttcatttggtttaaaaatgagcttgtattttgcagaagcccaacaaaaaaaaaagtgataaaagtgttgttggtataaattacnnnnnnnnnnnnnnnnnnnnnnnnnnngtcataagactactagtaaaaaatgttcaatcaatgccgtcacaaaagacagtacaaaaaccaaagtgcccaaatagaaggagcagcgaacttgcccaaaacagaaaagctctaaatagaactttagtatatacaaaaaccactcggtagagttttagaagtttcttccatgtaagtgaagcatcttgagtcactcaggacttggctgtcctcgcacccgtggcaggctggggacggcacggacctccaactgtttcccctagtccccggggcatcggaggctgggttcccacatgggagaggaatgaagactcactcaaagggaagggtcagtttaagataagttttcagtgaactccttcttccacccgggaaggtgtctttcagcctcttcacagtctcaagacaattgactgaagccacaggcattgctaacttcatgggccagcttgtgggcggagcctcttcaggcttgagaccatggcagcaagagccctgcagcgtgcagtgacccctgcgctctgggtgntgcacgcgagctcaggaggacaggatgtgctggccagcctaaaccctcgggggagactagcgcagggataaagcagcttgcaggcnatagccggatgtggaggcttncaagacagtacaaagatttcc

SEQ ID NO: 57293 - DNA, 943 bp, Homo sapiens
attcggaacgcggggcggtgctgaggagctgaagccgtggccagctcgacgccggacagtccagcgagcagcacggcgggaaccggcagccggagcagtcccggagcagaagcagcagcagcagcagcagccctcgccgttcgcggagcgcagccgagccggccatggcgttgtcgatgccgctgaatgggctgaaggaggaggacaaagagcccctcatcgagctcttcgtcaaggctggcagtgatggtgaaagcataggaaactgccccttttcccagaggctcttcatgattctttggctcaaaggagttgtatttagtgtgacgactgttgacctgaaaaggaagccagcagacctgcagaacttggctcccgggacccacccaccatttataactttcaacagtgaagtcaaaacggatgtaaataagattgaggaatttcttgaagaagtcttatgccctcccaagtacttaaagctttcaccaaaacacccagaatcaaataccgctggaatggacatctttgccaaattctctgcatatatcaagaattcaaggccagaggctaatgaagcactggagaggggtctcctgaaaaccctgcagaaactggatgaatatctgaattctcctctccctgatgaaattgatgaaaatagtatggaggacataaagttttctacacgtaaatttctggatggcaatgaaatgacattagctgattgcaacctgctgcccaaactgcatattgtcaaggtggtggccaaaaaatatcgcaactttgatattccaaaagaaatgactggcatctggagatacctaactaatgcatacagtagggacgagttcaccaatacctgtcccagtgataaggaggttgaaatagcatatagtgatgtagccaaaagactcaccaagtaaaatcgcgtttgtaaaag

SEQ ID NO: 57294 - DNA, 1042 bp, Homo sapiens
  misc_feature (1)...(1042): n = a,t,c or g
tcagcctaaattaacaatggcgaaatgcaggcgaaatgtggaaaatttcctagaagcttgcagaaaaattggtgtacctcaggagcaattatgtttgcctctccacattttagaagagaaaggtttgagccaggttgcagtgacggtccaggctctcctggaacttgccccacccaagcaacagcagcaccagttatctgctgtttgaggatccccaggacggtgggcactggcctggccaaaacaaggaacaggacaccgtgattgctgctgccagctgtctgcttaaacaaagctcttgtgtgttctcagaagggaccgttcccatgattcctaacaggaatattttgcttcatttctccattttaggggaggttatttccatttccattgaatttttttacgaagacaccattggttttctcagatgaaacttctcttactgaaaacccagcacctaacttggctgtgttttcctggagagcaggcgtgtttcacgtgccagaaagcacatcttctgtgttaggcacaagcatgctgtgccattgtttttacctggtctcaagacaactggtctgctggtttctaaacttggttgttcattagactctcctggagtatttgttaaaatacagattcacattcagtagagctggggtaaggcctaggaatctgcattttcaacaaccattgcacatgtttttgtttttgcctgaggccaggagaattgcnnnnnnnnnnnnnnnnnnnnnnnnnnnnnnnnncaagatncgtgccattgcaccccagcccggggcaacaaaagcgaaattccatctcaaaaaaagaaaacgcgccccatctcgctccaccacaagcgcctttatatactcaatgatgggtggaggaaaagggcccaagggctcacaccgcacaggagcctttactcaagtttcagctagttttccttcccctgcattttgaactccttttagttgttggtgatatcctttggtgttcactgcctttgtaaaacaagtaaataaagtaagcggaagataaa

SEQ ID NO: 57295 - DNA, 1602 bp, Homo sapiens
tttttttttttttgatttaaaaatattttattctttagaaaatacagcattcaaccatcccaaactgcagtgacccctgccccagccctgactgaccccacttcttgtggccaaaggtttctgggctgtgctgggaccctagtctcagctccccgggaggccaggttcatgccaggcccctgacccagcccccttaagccagccaggcagggtccccggacaccctgggcacacagacgagatgcagggacagcaacagggaagggtcacaaaatgccagcccggtggccctcggacgctgcaagtgcgttcagctgccagccctcctgacctcccagaaacactttcctggagcccaggaaggaggatggtggcagggagcggaaggtgggcagccccacagtccacacgtggccggccctgctccagcctcctagctgtcatccccattttcacccgggccgcggatgaggcgcttatggccccgctttgccccctgggggccttgggcttggcgaaagccttgctttgaaagcgtgttgcttggggtgcacctcgtcgtagaggaactctgccgtcagctctgccccatcgccaatctcaattttcttggcgatctccagatggaagtcctgctccacggagtcgaggaggcggctcttgcagctggagtagagcattcgctccttgatgctgcacttgtaccccggcatggagtagatgaacactacagactcaagggggtcgccctcatgggtgtgcttgtagaggaagaagtggtagcgggcagcatctcggggcacccgggagggcagctgggccacatccgtgggctctgtgtgcaccagctcaatggtttcccgctctaggtccagcttcatctggatgtagttgaccattttctgcttgagctgctggagtgcccgctgggcctcaggctgcagggggaaggcgaggccctgcagggtctggtgcttgctttccacactgatctctgtcttcacctcgttaatgcggatctgctggagctctctctcagccgaggtcagcggggcaggtgccgcacaggacgacaggtgtttctggtacccagcaaaagagaggtcatccttcacagtcccgaaagagctcatccttgatgtggccacctcccaaactcctttttcactgtggcccgcgtggccgcgtacagcatcttcagccgcacgggggagttatcaggcgacccagcgaaggaaagacccattcgaaagccctgagcattctgtgagtcgaggcggtaaaaccaggtagcagggctgctgggcgtcccagcagtggcagcacggccctgtcatagtcctgatcccagcggcctactggctcctgcgaggcaccccagcacgagctgctcgtcctcaatcacaaccttgatgagccgcacagagccagcccgtgccttggcaaagaattccttcagctcttccgtggcgtggatgcccgtttggtgcgccatggctcggcgcttcgctccgtccgcgccgtcggagccctccgcttgaccctggcccggcaacgctcgctggaccaagagaggtggaggatgtggcggaggctgtcgac

SEQ ID NO: 57296 - DNA, 1897 bp, Homo sapiens
gccccagccagggctgtggctgaagaggctctgggtgctcttggaggtggctgtgcatgtggtcgtgggtaaagtgcttctgatattgtttccagacagagtcaagcggaacatcctggccatgggcgagaagacgggtatgaccaggaacccccatttcagccacgacaactggataccaacctttttcagcacccagtatttctggttcgtcttgaaggtccgttggcagcgactagaggacacgactgagctagggggtctggccccaaactgcccggtggtccgcctctcaggacagaggtgcaacatttgggagtttatgcaaggtaataggccactggtgctgaattttggaagttgtacctgaccttcatttatgttcaaatttgaccagttcaagaggcttattgaagactttagttccatagcagattttcttgtcatttacattgaagaagcacatgcatcagatggctggacttttaagaacaacatggacatcagaaatcaccagaaccttcaggatcgcctgcaggcagcccatctactgctggccaggagcccccagtgccctgtggtggtggacaccatgcagaaccagagcagccagctctacgcatcactgcctgagaggctctacataatccagggagggcaggatcctcttacaagggtaaatcttggcccttgggaacttacaacccagagggaagttcgtgctgttcttgggaaaagctccacagttaatctggacagatacctcaattctagggtgaccaacgggagggcttctcaaggcttagctctccctgagacccagctggcttttacccttgacctgtgtccctagctgaatcactagctcagatttttctgatctaagcaaacaactcccagctgaggaatgcaggccacagcacccaatcaagacaaattgttattatcagaaaatgaagcaacacttgagctgttcaggccagttccctgttgaagaaacagttccctgttgaagaaagtagagcctgacactgctcccactttggagaccacattccctgcacacggtctttgagagagcagttgcactctacaggcacacttctgaggtacggtatctctctccagccactctgataccaagtaattcaagctggcattccttctattagggaaattcattttacccaatttgcatttatggaattgatcatttaagacactaaattagtttttagaaccaattatgggaagaattccagttgttaggaagagatgaggagttggaagaggagggattagaaacaggaggaggcagtcatcctctccttgccaaaagatttaaacctgttccacattggtgggtgatgatgggtgagtttccatgggtaacacatccctaaatttttaccaagggaagaggagagtactcacttttaccatctttgaatatatttcatagaaatctagctctctggtacccctgaaatcttcccactagccctcacttttcaacagagtcatctagaagggagggttggcttccccaaaagcataaccttgaccaaaccaaacaataggcaccccagcaatgcctgtcattcagttatgcagaagcctcatttgtgaaattctgtttctctgatttcttcgcaagtctcttaatggtcatttgtgttagattacatcaaactgatggatagccattggtattcatctattttaactctgtgtctttacatatttgtttatgatggccacagcctaaagtacacacggctgtgacttgattcaaaagaaaatgttataagatgcagtaaactaataacagaattattaaaatatatcaggctaaaaaaaaaaagtcgacgcggcccgaaatttttttagttatgta

SEQ ID NO: 57297 - DNA, 453 bp, Homo sapiens
  misc_feature (1)...(453): n = a,t,c or g
gagnnnnnntttgnatngctatgncatgattacgaatttaatacgactcactatagggaatttggccctcgaggccaagaattcggcacgagcaggaagccgagaagagcaagaatcctcctgcaggctatttccaacagaaaatacttgaatatgaggaacagaagaaacagaagaaaccaagggaaaaaactgtgaaataagagctgtggtgaataagaatgactagagctacacaccatttctggacttcagcccctgccagtgtggcaggatcagcaaaactgtcagctcccaaaatccatatcctcactctgagtcttggtatccaggtattgcttcaaactggtgtctgagatttggatccctggtattgatttctcaggactttggagggctctgacaccatgctcacagaactgggctcagagctccattttttgcagaggtgac

SEQ ID NO: 57298 - DNA, 3802 bp, Homo sapiens
  misc_feature (1)...(3802): n = a,t,c or g
ttttaaaaaaatttttttttaggtttctccaatacaatttattattattacattttagcttgcatttactaagtgtcgtggaaatattatactcaaaataacagagctccagagaaagacagttaactaagaaagaacagtttcactttcttagcttgtcaactcctagttagcctgcttgcctccgcaccacagatgcttgtcttcttgtggttgttaccacaagccaaagcttgaaatttacatgggcatcaggccaagtctgtaaatccgtgaagacaggccatcaactgcattgagggtacagccttgctgaagggtcctttcttgacagtcaatgatgatgaatctggaaaaactgtctattctcttaggagaagaaaatataccccacctaaagtcgcagctaccattaacaaaaaaaaaaaattagcaaaggggaaagaatcaatggtaaggacagtaaatatactctgagaatagagtaagtacaatttacacacgctggagtaaatagtgaagcttctactgagttctactgagtctaagctcttttatttttaaaattctgataaaaatttactcaattacattttatacattaatatttagtgaatttgtccaaaaaggctatgtttaatttatgtgtaaaaataacaaaagatgtatcagtcagtctctgggcaataagaaaggaagaaagccttgctagaaataataaataatctcacgcaaaaggccaggtgacataagaatactacaataatcaatatgttttctttgtatttacaataaaatccatctgttaacactgtgatagaaaaaataatcagtccacatcatgtaataaaaacaggctttgaggatgattatacctcttataataaaaacatacaaggatttctcacagctaaagtacttttcaactttgacaactaatgacagtcatgggtgaaggtaaaactgacagagtactttagatcagctatgtcctacagtcaaggaatcaagggcattaccccatttacccaagcagcaaaaagcactttcatttttcccagaactatttaaatacagtagttgccatgtgatcagttaattttactttgtgagttagataaagtaaagactaaattgggaaactgcaataagtaatcaaaagtagctccaaacaacaaagccatcaatagaaacaaaaggcatttttcctaggtgtatcatgcataaaaagaataattacataatattattaaatatattccttaatgaccagattaataaatgaggtaaaatttagtcattggaacaaataaactatatttaatcacttgtgttttgctgtcactgtttaaaataattaacttaatgtctaaaaactacatactcttgaatgtttgctttttagagccccttgtgggatattaaagagccataacaaattatctgaatataaattatnnnnnnnnnnnnnnnnnnnnnnnnnnnnnnnnnnnnnnnnnnnnnnnnnnnnnnnnnnnnnnnnnnnnnnnnnnnnnnnnnnnnnnnnnnnnnnnnnnnnnnnnnnnnnnnnnnnnnnnnnnnnnnnnnnnnnnnnnnnnnnnnnnnnnnnnnnnnnnnnnnnnnnnnnnnnnnnnnnnnnnnnnnnnnnnnnnnnnnnnnnnnnnnnnnnnnnnnnnnnnnnnnnnnnnnnnnnnnnnnnnnnnnnnnnnngnnnnnnnnnnnnnnnnnnnnnnnnnnnnnnnnnnnnnnnnnnnnnnnnnnnnnttatcaataccaaatatgatacagttatgtaatacccattttgcatatgcacagtggaaatactgtaaaaactacaagatgaaagaaaaccgactggccagaactttaaatttcagactaatccatgataaaaatctagatgataaaaaacaaaaataaaattaacaaaatagataactcgatatcctttccatattcagtcgtctactaacatgccatctccaaacaaatccattacctcaaaagaggaagaaaatnnnnnnnnnnnnnnnnnnnnnnnnnnnnnnnnnnnnnnnnnnnnnnnnnnnnnnnnnnnnnnnnnnnnnnnnnnnnnnnnnnnnnnnnnnnnnnnnnnnnnnnnnnnnnnnnnnnnnnnnnnnnnnnnnnnnnnnnnnnnnnnnnnnnnnnnnnnnnnnnnnnnnnnnnnnnnnnnnnnnnnnnnnnnnnnnnnnnnnnnnnnnnnnnnnnnnnnnnnnnnnnnnnnnnnnnnnnnnnnnnnnnnnnnnnnnnnnnnnnnnnnnnnnnnnnnnnnnnnnnnnnnnnnnnnnnnnnnnnnnnnnnnnnnnnnggaagaaaatgtaaatctctttttaagttttccagtttatgctctgaaaaaagcctaacattaacaaaacctgcaacactactttaaaaaatctagaatttaaaaatatctattttagttattaaagataaaaaatattcaatttaaattgaatgaattagctggatcaacaatttcctaccacactactattatctacagctacccttggtataataatttataagatgtctaagatgtctaccttaactattgatagcacttttcacagtataccaatttccatttttactttcttctccccttgtcacttaaatgtattactttaactatctgataggaaattttattttacaaattccttgtttaattactgaagaggtgattttaaaacataaatggatgcacctgttaatcctgagatggtgacgacagcaaaactaaaaatcagatgattatttttactcaaatttctgctttagttttttttggaagatggctggcagaatagaaagaacagccaagatcatcagaataaatattgagttccaggaaacagcttctcctgctgttgtaagttgatacagtgttgttcctgccttaatggctacaaaagaaggaggtgcgacacctagaaaagtaccaataaaaaaaactttcaatggcacgtttatcacaggagatgtgatattaataaaccaattaggcagaaatggtgttattctcaaaaatataatgtagttaatgagatgttctctatgacgttcaacctgctgtgaccattttactgctttctctgttaggtatttgtatacaactggtctcccaactaaataggaaagcatataacagaaagaggcaccaagtccagaacacaaacaaacaagaaataaggctagtggaaagggataaagaaaccctgagagtatactgagaaatatagagcctggaatagcaaatgtttgcaagaaaatatatgtagcaaaataagctacaagtacttgaacataaaaggtgtccttgtatttggataaaacttttcctagagccttggcatcatccatatctctgggaaccttcatattcactctttcttcttcactaagctgaggaaaatttttatataccaaaaacataacaaaagctgcagataagaaaatggacaccaatataaggagtgacattcttgctgatccagcttctacccaggatttttccttctggtggtctctgctgccaggcgccgcgagaccccgcgtccccgctgccccgtcccccacgggggtcgtgtggtgagcgcccaactgcgatcgttcggcgactctgcctttcgccatggctgctgcaaggtgaagggagcggtgcggtgccgcgccccctaaacaacaaaactctgttgcaggctccttactacgccgaagcgccacggctagagccacttccggcgcgacctcctcacccgagacgacc

SEQ ID NO: 57299 - DNA, 1554 bp, Homo sapiens
tgccgccgtcccgcccgccagcgccccagcgaggaagcagcgcgcagcccgcggcccagcgcacccgcagcagcgcccgcagctcgtccgcgccatgttccaggcggccgagcgcccccaggagtgggccatggagggcccccgcgacgggctgaagaaggagcggctactggacgaccgccacgacagcggcctggactccatgaaagacgaggagtacgagcagatggtcaaggagctgcaggagatccgcctcgagccgcaggaggtgccgcgcggctcggagccctggaagcagcagctcaccgaggacggggactcgttcctgcacttggccatcatccatgaagaaaaggcactgaccatggaagtgatccgccaggtgaagggagacctggctttcctcaacttccagaacaacctgcagcagactccactccacttggctgtgatcaccaaccagccagaaattgctgaggcacttctgggagctggctgtgatcctgagctccgagactttcgaggaaatacccccctacaccttgcctgtgagcagggctgcctggccagcgtgggagtcctgactcagtcctgcaccaccccgcacctccactccatcctgaaggctaccaactacaatggccacacgtgtctacacttagcctctatccatggctacctgggcatcgtggagcttttggtgtccttgggtgctgatgtcaatgctcaggagccctgtaatggccggactgcccttcacctcgcagtggacctgcaaaatcctgacctggtgtcactcctgttgaagtgtggggctgatgtcaacagagttacctaccagggctattctccctaccagctcacctggggccgcccaagcacccggatacagcagcagctgggccagctgacactagaaaaccttcagatgctgccagagagtgaggatgaggagagctatgacacagagtcagagttcacggagttcacagaggacgagctgccctatgatgactgtgtgtttggaggccagcgtctgacgttatgagtgcaaaggggctgaaagaacatggacttgtatatttgtacaaaaaaaaagttttatttttctaaaaaaagaaaaaagaagaaaaaatttaaagggtgtacttatatccacactgcacactgcctagcccaaaacgtcttattgtggtaggatcagccctcattttgttgcttttgtgaactttttgtaggggacgagaaagatcattgaaattctgagaaaacttcttttaaacctcacctttgtggggtttttggagaaggttatcaaaaatttcatggaaggaccacattttatatttattgtgcttcgagtgactgaccccagtggtatcctgtgacatgtaacagccaggagtgttaagcgttcagtgatgtggggtgaaaagttactacctgtcaaggtttgtgttaccctcctgtaaatggtgtacataatgtattgttggtaattattttggtacttttatgatgtatatttattaaacagatttttacaaatgaaaa

SEQ ID NO: 57300 - DNA, 2580 bp, Homo sapiens
ccacagctatgacatgattacgaatttaatacgactcactatagggaatttggccctcgaggccaagaattcggcacgagaaaatttgtggcttttctcttcagggtcccaggccataaaacaacggagagctgtacttgcttgtcacttggaggaaccacatccttgagacagcctgctgtcttgtatgtcttcagtaggaaacttctgacacacacattcaagggagttcctgcccctgagaagtgttcccatagctttccagtcgcaggttactttcacactacgtcagcttctctggtgagatcagggatgttacatattacttgaaaatgatttcataggaagtgaggatggggcaagaaaggaggtagaagctgaattttgcttaacttcagaaggaaatctgatacttgccttggctagttctgatcaactaaagagcctgtgtctgtactggatgtgccaaagagtcaagttgtttctggaatatccagctcctctgaatgaacacagcttcctccctacctgtcttttatgggtgaaaagggaccgtctgatgagcatgatagacatccctgtacaggactcaagactgtttcattgcatttgaaagttggtgggaagtattttattctgctagagctcctaaccctcctagaaatatcttttcatgctctattaattcaattcattagtttaaaaagaaacagtgtgacataattttggtgtttacttcttaagttgtctccccaagggcatatatgtagcctctgaaaatgggatgatttcttctcaatcttccataaatttgaatatgcattttattcatttcttgacatgggctgtgtgactgttttccatcagcagttctggctttgtccacaagggagcaataaagtacgttagctttattctcaaccttctaaagaaagatcccacttttaaatctcttctggaatagcctcttagctcaaagcttattcatgtattttgattatttaagaaattttcccttattacaaagtccagtcgtcgttcatccctcatgatgccaagcaatgattgatgtgtgggtgtggagtccttgtgggtcaggcatcttaattaattagactttttacatattgatgatccccagattgaaagccaggaccttcccataggggcgcctttgtgtgctaaaggcagagcaggcaggcttctccactcctatctcctccgcaggccaccaccatcacatctataggaggaacaagagcactgggggaactctggagtatgagtaaggaaatgcttctcaccttctctgctccaaagagatatctgttacatcagggaacaagtcctctaggtcaggcacttcctcctgaccagtgcaacgggcactccagggttaggaaactgtgtgctccctctctgtcagttacttgtctaagggctcctatccgtggtcatcagctctctggccatgagttctgtttgtgcttattgcagcagcatcttcacaacaaacaggtcagtaatcaacctgggaagggaaaagacgacagtaaatattaccccctgtagagccgggaggcatttacacctggaatggccttcttaactgatttctgcctggccacctcacccccagccaagtctgaacctgagcaataccaggcacagagaggtgtctacttgtaactccaacacttgacaaaaaacaaaactgaagctgtgattggtttaggcagcaagtggccaggtgcaacttgtttgtttttatttttgttttccccaacagtactgagatcacttgcacttttcctcatttcttaagaaaatccagtttgcttgccatgacttgtttagcgttaggtttacaaagcttgttgttgaatgttgaatatttgtccaaaggagtttgacaaaatagaagctgcttggtccctgttctgcctgctaggtcataaggatgaaggccatgtggctggggtacttatgtcaagtccagaatggggcagtgtccctctcctacctctctgcggagacgcaattgaaggtcaagtagactcagtgtagggcaggcagctgtcatgctgcaaaggaagtttagaggagtctttgggttggggaggtgacaggtaggtaggacaggatctcttaagatgggaaagatactggggagaggagggctgcttggccccagggaactgcagtgaggtggaactgagctccgctcctgaatctccaaaggagcccatgctgcccggcttccctgagtcattttttccagcatcctgtcagatccctcaatgtactgatttcccccttgtgttaactataccgatattatttttttagcaattgaaatgcacttttttatttcaactcaatcatgattttaagtataaaaaatttatagattgttaaaactacttttttgtgtatttttaaccactcaatgtagcattgtatattttattcttgtgagactctggtacaggtgtgccgcctaatgatttttctgagatgctgggcctttggatgtgtacggtaaccaacttaatgctaatgttcaaagtaaaaaaaaaa

SEQ ID NO: 57301 - DNA, 5819 bp, Homo sapiens
  misc_feature (1)...(5819): n = a,t,c or g
ttttttttttttttttttctcaaggtatttcttttgtaaaggagccagatttggcaactagactgaaaatcttccaaaattctgtacaaatgtgtaatatacaaatatacacaaggcttttgccaagaaaagacatcacaacaaatgacagaggtggctttggtgtcacataccacctacagcatctcaaacccctaggaatgtgaggggctgatggaccacaacataggctacacatgtaaacacgctacattacactatgtacactggagtataaacaatccactgtcctctccggtctgttcacaagccctctggcgggaaggaaggccattcaccaggcaacccacataaggggaacttctttaaggtgggagggagaaccctgcagaatgaagtggttcaccctaagatctattaacagcacaaggcatgcccttaaagagacaggcggtaacagcgaattcgggagatggaccacttcttgtgctccttgtcatctctctctctctctctctctcactccatctcagtgaaccgggcaaacatggctttccggacagcatctttgtaggaatcggcgcccgacaaaccatatgcgctgcctttggctcctaggccagctccctttagccgaacttgagcctgggaaagcacagagactgtcagctgggaggtagggtatgggctgctccacctctcaccatgcccactccttacccagcaggaccacccaccaggagacagaagagagaaaactgtatatgaagacaaggatttctccagaagagaccaggagcaagtataaggactggaggaataaaatgggctacggaacacaggcagatgaagcaaatcacccacccctcaatgcctgctcagcaagcatccacgcctaggaaagggccccaaagtattcctctgaaggtctgggaaaggtctggtaattacaggcacacattatacaggatagctcaatgtcagcagaactcacataaacaggatgaacatggtctacaagagtctgacctaagctgtgctcccaggacagagcaggggcaattacgggtggagctcctgcctagaaggccagtgggtaggggcctccgatcctgggatatgatgcctcaatgtgggctctgatcaatttaaagatttcttatcatgggtgaaaaccctactaaannnnnnnnnnnnnnnnnnnnnnnnnnnnnnnnnnnnnnnnnnnnnnnnnnnnnnnnnnnnnnnnnnnnnnnnnnnnnnnnnnnnnnnnnnnnnnnnnnnnnnnnnnnnnnnnnnnnnnnnnnnnnnnnnnnnnnnnnnnnnnnnnnnnnnnnnnnnnnnnnnnnnnnnnnnnnnnnnnnnnnnnnnnnnnnnnnnnnnnnnnnnnnnnnnnnnnnnnnnnnnnnnnnnnnnnnnnnnnnnnnnnnnnnnnnnnnnnnnnnnnnnnnnnnnnnnnnnnnnncatgcctgtaatctgccccttcatgctaaggtaaagctgctcctggctcccaggctctatgagtgctctgatctcatctctggaaccggcctgtaagcctggcaaacatcaagacctgaccccactgcttacctcaatgggagccgtaatgccttgacactttcgtcccaagccagagccttcccgccagcccatggcctgcagcatcttgttgccaatgttactgtggtcaatgccatctttggtgggttgctcgtaattcctgccagtggcaaacanacagttacttaaaacagccagggccccagcttacgaactggaaaatgtgcacattacatacacagtgccggcatcaaactgcttcttgcgcttgggctctggaggttctggaatgccgtacttctcccgtctttctgcagctcggtctcggtatttcatctacatgggagaaaaaacactgctggaaatgttcacagacttcaacctgtaaccgtctaatgcacctattcaaaactatcccctcaagtatttttaaatctgaagaatgctttttttagactgctctgaaataccaaattcccttgttcccatcatcatacctagtcatatctgaaatgttaaatttgtaaatatgaattgtgtggaaccaggggcagaactatgtctccaacaagcagttttatttaattagccaccctctgtcaagctactcaaccagcccactgggcagtgggtacagcttgcgaagaggaaggcagagttgcccgttctcctcagcatttggacaggcatacctccaacatttggaaaggcatacctccaacatcaaggaggcttccagagacctgttcagcagtcgctggggaggtggaaccatagatagtagggcaggaagggtgtggggagaagaaaagcaaaagccttaactacaaacacttcagaaatatctcaggtgggagatttcaaacccacttgctcatttctaaaccacaggcctctatttgcatttaaatccctgcccacctggccgccaacctgccccaaccaccagcactaactgcttgcccattattgtgtcacaggcttctctcttgcctttgttcccagatctgcttgccatgccctgcccacccttcctttcatatcacctgcaataacctcacgtcctgctgtcccttgggattaatttgaagcgcacttctttgcccatgaaggcttccctggccaggccaaactagaccactctctccataacaaaatccagcgtatttaagcagcaagctctggcattgctgtgagagagtctcggcagtgtgcttctgccttgtgcacccttatgatgaagggacaatgtgaggctcacaaggcacacagaggctgggtctaggctacatgaactacaatggtcagatgacaagggtatgacaaatcctcctaccctgcccctgggatctggaactaaatgctacaaataaaagctaaaggcaattatcccaatatcctcttccttgtggcacagtttcccattcacctctctctcccttagctccaaggcttccagctcctgctcgctcagcctggatcgtcggtagatgtccatgttttgctacacaaaagatttgaaagacacagtaaggactcagaccatcttaatttgaaatgtcctaacattagtaacatctactgtactttaagagccaaagcccaaacaatacacaatcacataaaaactatagtttgatgtgtgtggagctgccagactccgtccactgtcatcgggaacagctttctgtaaggccatcattagatggcaggtatttttggaaccgtcaggactgttagggcactcaaattgtctcactgcctcccctcgccccctcagatcagctcagaagcatggccaccttgtgaaggtctgagagttgctggtgcctgactagggcatctttgttcgggaactggcgccggcagagcagacaggccatcttcttccagtcagctagcttctcttcctcactctcaagtctctccaccagctcctcctcattgtcactgtcaccactgtaagcagcaaccagacccctctggagacaaaaggaggacaggtcactggaaatgtacaataggaagatggcggtggctatgtacctggataaagtaatgcctcatccgaaatgttaacaaatccccattactgcatgtcacactttagtaatgaatcacattttgtcaactgcgtggagcagtcaggtccttgagtgctaggcctgacagcctcctggtaccaaccttcttggagcctaagaaatggattcctgggtgactacnnnnnnnnnnnnnnnnnnnnnnnnnnnnnnnnnnnnnnnnnnnnnnnnnnnnnnnnnnnnnnnnnnnnnnnnnnnnnnnnnnnnnnnnnnnnnnnnnnnnnnnnnnnnnnnnnnnnnnnnnnnnnnnnnnnnnnnnnnnnnnnnnnnnnnnnnnnnnnnnnnnnnnnnnnnnnnnnnnnnnnnnnnnnnnnnnnnnnnnnnnnnnnnnnnnnnnnnnnnnnnnnnnnnnnnnnnnnnnnnnnnnnnnnnnnnnnnnnnnnnnnnnnnnnnnnnnnnnnnnnnnnnnnnnnnnnnnaagactgnnnnnnnnnnnnnnnnnnnnnnnnnnnnnnnnnnnnnnnnnnnnnnnnnnnnnnnnnnnnnnnnnnnnnnnncccaaaaagtgcagnnnnnnnnnnnnnnnnnnnnnnnnnnnnnnnnnnnnnnnnnnnnnnnnnnnnnnnnnnnnnnnnnnnnnnnnnnnnnnnnnnnnnnnnnnnnnnnnnnnnnnnnnnnnnnnnnnnnnnnnnnnngaagtcttgcaatgttgcctagactgagtgactattttcaaaccactgaccacaaataaaaatcccaaatacaacatatcagaataatggcccacccagaccagtatctatctagtaaaacaagctttttcttgtcttaattttctctttccagaccattaaaactctccactcacagatgcaatgaaacttaattaactgagcttaggaattgaagcttctttcatcactccatctcatctgctctcacagaaaacaaagccccgacatggaatctatgtgcagaaactgctccaatacccatcaacagtgatcacattcagttttaagtaggaatcacattagccaagatgcagttgagccttaaagtgagacacaaaccacagatagggtctttaaaacactggtggtactcccttactttgaggggattctcctcatctccatttcgcaccaattctgggatgagctgctgcctttcagctaaggctccctgggaaacagaggacaagccatgagactcaagttttaggtaagttcccatcatgacatactggccattcctgctattaccttcttctcaaagagagcaaagccagcgtctgctgcagcagattctctcctttcttcttccctcaaggaattgacaggctgaaagctatttttaaagttttctttctgcttattcaaactcttagcccagcgttccatgtctttggcaatctaatgtcaaacaacaaacaccaacaaaaaaatatttaatcccctgtgccatgagaatgagccattaaggatcttatctcaactatatgccctgtaacaaaccccttttactcttacttccacctacaaatatttccattagatgttatcacatataaccaaagtcattcataaatactgcttgaaaagctttgagatttccagggcttttttccctaagtacacaggctgacagtcaagatatggtaacaataacaaattgcaaaatgctctaagaacttagtatgaataaaatgtgaagcccaatttttaagaatccaaataatactgacataaatgctacaaccccaaaactaagagttcagcccaatacctcaatgaaagaaatatgggtcatgttctaacctgctgggctgttttgctcttgggtttctccttcttctctttcccctcttttgcaggaggcaggcccgactgctggtgggagctagactctgcagctggcacgtaggtctctttttccccatcccagtaaaggtactgctgggtcaaggaattatagtagtactagaaaacaacaaacaaaaaacaattaatgcagactttctgctatgtcagtcgattacatattttgtcaaaaaaaagataaagtatgttgtggactagtgatatttcctgcccagaaaagaccctgggcacaccttggtataagtaaaggtgatgaaccacctagcaaagaggtgtgacactgctagagtaaaaatagaatatgatttctttaaaaagtttagt

SEQ ID NO: 57302 - DNA, 1758 bp, Homo sapiens
ctgcagggggacgagatttggaatgccctgacagataattatgggaatgtgatgcctgtagactggaagtcatcgcatactaggaccttgcacttgcttactctgaacctctcagaaaaaggggtaagtgacagtttgctctttgatacatcagatgatgaagagctgagagaacagctggatatgcactcaatcatcgtctcctgtgttaatgatgaacccctcttcacggcagaccaggttattgaagaaattgaagaaatgatgcaggaatcaccggacccagaagatgatgaaacccctacacagtcagatcggctttcaatgctttcccaggaaattcaaactctcaagaggtctagtaccggcagttatgaagagagagtgaaaaggctctcagtgtctgagttaaatgaaatcctggaagaaattgagactgccattaaggagtactctgaggagctggtgcagcagttggctttacgagatgaactggagtttgaaaaggaagtgaaaaacagctttatttctgttcttattgaagtgcaaaacaaacagaaagagcacaaagaaacagcaaaaaaagaaaaagaaactaaaaaatggcagctctcagaatgggaagaatgagagaagtcatatgcccggcacatatttgactacagtcattccttatgagaaaaaaaacaggaccaccgtctgttgaagatcttcaaatattaacaaaaattcttcgtgccatgaaggaggacagtgaaaaagttccgagcttgttaactgattatattctgaaagttctgtgtcctacatagagcagcaactttatctgcggtgggctccaagctagatttccgacagcattattctgagagctggctaccattacccttcttgctattggaaactcagcacatttgaacttgggtttgattcagtattaacagatcttgactacactaattctttatattatagaaccaacggaaatatgggcactatttttggaattctagagatggtttttgttaaatctactaataaactgttccccttagtagattaagagagagtaatattaattgtgcatgtgcagttgtatttctcattaactgacagtatgcccatttgtttttatggctttcttatctaaactgcactgatgaactagattaaagccttgggagatttatactataaattcagtgatgggcaagaaccaacactgtttttttgtgagaattgtcagtgtaactattacctaccagtattgttcagagagattgaaacagaataaacgggctgttcttgaagaagcaaaaccagaatatgcattactttggtttaatacttagtgctaacattgaaactgttggtggtgatggattttgtagcttgctgcttgtttcaccactggtcaaattttaaccattaaattgccattcacttttagaatcttgtatttaagtaagttttgattttcaaatgttctgcttcatgtgtctgtgaagaattgtacttttttaaaagtgtgtgtcctctgaggtgcttgagaaagtgtacactgcagaactgcccattctcattactgtgtcctattttattcatgcctgtgtgtttttcttaagtatgaattctagatacagctacttatggattcatcaatatcatgagcacttttgctggttccagtcaaatcaatggcatttaataaattttttaagaagtaaaaaaaaaaaaaaaaaaattccctgcggccgc

SEQ ID NO: 57303 - DNA, 960 bp, Homo sapiens
ttttttttttttttttttctttgtggaaaacaacaccttatttattcagggtgtaatactgtctacttcctttcagaagacttgaaaaagatcaaaataggataaatggacagttactactaaacgattcaaatacttgggcagtatctttccctcttaaccctttcacacgtttttaaagtgtcaaaattgatgaatggtataaattcaaaaggaaaattcttttctactgaaaaggacatccagctcgcacaaacggtggttcagctgaaggcaaggcgtttctggttttcctctgcactcgggcggatcgttaacttccccaagttacaactgagttgctctttccaggcttttcgaagcatctttaagtttccccaccaagtcctgtaattgttccatgctgcaactaaaactaatctctggataggatgggggaatcagtgttctgtacacttaaggtcaccaaatatgcaggtctgtacatcctatgaagttgattggtctttatctgatattccaagcgccaagaaacatccgttatatgagggagagatctgcctatacttcccagtaggatttctagggaattccttattattcttgatattccgtgcaaaacagttctattcgctctctgtcaaatttacagtcttctagataagtgcttagagttgacttgtcagctcggtgctttcctgcctctagtatgtaagttgcagctgctgcatgacaatgttttaaaaccactgggtcgatatgtttcaagtctggatgatctaacacggcctcggtccgcctgggcgtccagcagactctggaatgccgcccggaggagaagcgtgaaggcgttggagtcgaaggagccgggatccgccagcatctggaagcctttctgcacagactccgagagctccattgtgagcgcgccgtgaccttcgacacgcacaccacgtgatc

SEQ ID NO: 57304 - DNA, 2498 bp, Homo sapiens
tttatatttcaagaatggtatttatttccgacattactgtagaggcacacattggactctgacgattccccttgcagcagacatttgtgaagctgctggtcggcacacccatcaatcagtgactcctgcactgcagaggggccacatgcacgatgctcacgtgtgcacaggggggaggacagcacccccaccaggcagacgggcccagaaacagcatctgcccagcactccagaccatgcctgccaccagggcttctcagttctctagcatttgaacctctgatttaacattcatctctctccaagactgggtgggggcactgcctgtggccagacgtctcccacagcagggacagcaccaggcaagaagggggcctggtctccaggcaggaggagtgcagcccacctcccctctggctgacccctgggcagtgagcctttccatcacccctacacacatcaggctcagagacaaaaggcaggaacttcttggtacatgattttataggaagcacatttgtgttcaagtgaaggcagaggcgtccaccccaagtcaccagagcgcaggtgcagagaggaaaagctgtcagctagtgccagcctccaagggccagcgctacccttcaacagctggaggcaccactgtgcgaggctttccacaccggcctccctcaggaacaagacatcctcaccaggcaggggtgaggtatgggctccaggactggcttcagcaggcaccaggctggggcaccagctggggcctgggtacgcccagaaggtcacacagacggttgcgctgctctctcaccactgcaagctctgcgtcccacgcagtgtcactgagcacagtcaccacctcgtccagcacatccgcgcccacgacgtcactgtaggtgagcaatgtctcgtacacctggctggccgtggtcttccggatcagcgggaaacggtggcagaggagcagacacagctgcaggagggcctgcctcctcacgtcgccggggaactgcaccatcccgcagaacactgcgatgcctgacaggagcttctggatatcttttgaattcttgatttctttcttacagagcgcaagcaacttcacagcaaaggggtggtcctcctccgtggtgaagatgtcgaagcagccgtgggtgagcacgtggtccagcgtcttcagcagcggcacggacaccctctcattcagaaggttgtcctcaaagatctgcagaagggtcccgctgaagctgcccagggcctgcgggtcgctctgaatgcccttcatgtactcaaagaggctctgggtggagtgccggatcgtcgactccgtcaagccgcccagggacacgactagccccagcaggacgtggtagcggtaggtgggcagcccaaggagctgggtgatgcgtgggaaggcctgggaaggtgcactccagttcacggaggccacatcggacctgggaaacagcttttccagttctcctcggtggggcacgtgggggatgggagggctgtcaaagtgcaggagcgtcaggaacacgctggcggcgtgagcacggaaacggtcaatcttctcactggcctgctgggccacacagcacatgatgcgctcacaggtatgggcctcgatcagctcaggctggctccgagccaggcagaagtgtcagatccatcagactggtcatggcggccttgcggacccaggtgcccacgtcccctctgctgtccgtggtgtagtcgtccatgcagcccagcagcgcacagtaaatctgggaaacattctctccgcacacagcttcgtctggggctcctgctttcacaccaacagtctggcaaatcctcgcaatggccttcaagccgtctctccctggactcagcaaaacttacgtcctcgggggaagtgtgggtaactgctcttaaacctgtgagaacctgctggagccggcctttcagaaggaagccctggaagggcgcccaaggccaacgagaagccacagcgagtcatctcctcggggttccgaagctcagcccaggtactgcgtgatcagctcctcctgaattgcgggatctgcctcccccggctccttcatgtaatattcactgcatagagcagccagggccgagactgctgcatccttcatctgctggcgggagtgacttgagatgagatggagatgtctcaaagtgtcatttatcagccattgccaaccatcaattacggtgtcacctctaaagggcattttggaaagtgacaacttttctattaaaacacacactgcttgtctcatgagctgtcctcccagacccctgtataactgacgatcatagagctgctggtgaatctgcttcagggccctgcactgcctgctcgtccagatggtccgtgacgggcctgcagaagttcaaacacagagctgaagtcacactccccaagaccctaaccccgagtacactcggaggagctgaggccacactccccaagaccctaaccccaagtacac

SEQ ID NO: 57305 - DNA, 1816 bp, Homo sapiens
ggtggcgctctccgttcggcggcgctcccatggcgcacattaccattaaccagtacctgcagcaggtgtacgaagccatcgacagcagagatggagcatcttgtgcagagttggtgtcttttaaacatcctcatgttgcaaacccacgacttcaaatggcctctccagaggagaagtgtcaacaagtcttggaacccccttatgatgaaatgtttgcagctcatttaaggtgcacttatgcagtggggaatcatgacttcatagaggcatacaagtgccagaccgtgatagtccaatcattcttgcgagcattccaggcccacaaagaagaaaactgggctctgcctgtcatgtatgcagtagcgcttgaccttcgagtgtttgccaataatgcagatcaacagttggtaaagaaaggaaaaagcaaagttggggacatgttggaaaaagcagcagagttactgatgagctgtttccgggtctgtgccagcgacacccgtgctggtatagaggactctaagaagtggggcatgctgtttctggtgaaccagctgtttaaaatctacttcaagatcaacaaactccatttatgtaaacccctaattagagcaattgacagctcaaacctgaaagacgattacagcactgcacagagagtaacatacaaatactacgttggacgcaaggctatgtttgacagcgattttaagcaagctgaggagtacctgtcatttgcctttgagcattgtcaccgttctagtcagaagaacaaaaggatgattctgatctatttgcttccagtaaaaatgctattgggtcacatgcccactgtgggagctcctgaaaaagtatcacctgatgcagtttgcggaagtaaccagagctgtgagcgagggcaacctgctgctgctgcacgaggcgctggcgaagcacgaggccttcttcattcgctgcggaatcttcctcatcctggagaagctgaagatcatcacctacaggaacctctttaagaaagtgtatttgttactgaaaacacaccagctgtctctggatgcttttctggttgccttgaagttcatgcaggtggaggacgtggacattgacgaagttcagtgtattctggctaacttgatatacatgggacacgtcaaaggctacatatcgcatcagcatcagaagctggtggtcagcaagcagaacccatttcctcccctgtccacggtgtgttgaaagtacacggagccccgaggacgggtgagcagttgtttctttccactttggttgtgctgatgagaccggtccggtactgcaacaaggctccctgaagccggaactcttggaggcgcttttcccagggatgctgaggctgagattttcagcacacccgagttaatctccttcatttgtaactaatttcagcctgatgaaaacctggaattcctttttcacagactcggctggttctggagtctttgtgagacttctttgaaggaggctttgcgtgaaggctgctcggctcacttttcctaagtgtggttcctgaaggctgtctttgtaactttttgtagttctttgtgtaaaaagcgtattctgaatttatacacatggcatgttcttcattatatcttccaggatacatctatttttatatattaaatttgaatgtgttatcaaaatgcttggttaacttaaggcacctttttaaaagcagaatttaatttgatttaaattttccagattttatagcttgcctgtatggatgctcctcaatttatgatggggttacatcccaataaacttattttatttgcctttg

SEQ ID NO: 57306 - DNA, 1352 bp, Homo sapiens
cctgattataggttaaaatatttattttgtcaaaatattttcttgggaatgtgtttaaccctttctgcgttcattgttgctgagatgtgaaaactaaccattccctcctgcctacctttttggccactgggcggcagagaatggcgctatgtgcagttgggcccccggcaccatgggcctttggcctgcctgctgcagagtagccctgcctgggcagtctccaggcactgagcaggccatctgtggccaggctgagagaatgactggctcgcttaccagcgtgcatgggacaaggagctttggagcctcaaggggttgttgctggcctgggctagagggaaaggtgaccatccgtctgtcctcctgtctttctattagcgcctccatgtgagtgatggtgccttggttcactagccttcccccaccaccccaccatgccacctggtggtcttggggcctgtgctgtcactccagcccctggggaggagaggacccagcccggagagttggggcaagggctccacatggcccaagggcaacagatgctcgcagggcagctgctgccgatgctcacgctcctgcccccctccttcccgctgccacaccccaccctgggcccccgcagacacgcatctctaactcagttgggcccagccttctggatagcttggggtaggccatgggcccacctggggccaggccagcccctggggcagctctggaagagcagtgtggaggagcacttgcttgcagcctggcttcagcctctggcactgctggagtggtccctgggagcttctgcactgtcggctttggggacgtctcacccacttgggttacagtaggccttccccacccagagagaagtgtttccacccccagagacattgcctgtcagccccctgaagtgctcgccttcccccagtgcccgtcaccagcccttcctatctgtggggtccaagtcaggcttcccctgcggccaccagccatagggagcagccatcagcccccgagtcagaactgcttctgtctgtccatacctccaggctctcccggagaggggggacggatatttatttcctaaagtttgcacttaattgtgaggattctcaggattgttgggggctactgaaaagaggaatgtgttgaatgtcgcgtttgctgtccactcgtcctagaagtttagtgtttttgtcactgtcatgtgtttctgtgggcagagctggttctggagggtgggtcagtgcacccgaggctcagagcatccatccaccccactggccctccttccagataccctctctctaattgggttcttgcatgtaaaatactccacaataaataaataattg

SEQ ID NO: 57307 - DNA, 2228 bp, Homo sapiens
gatgcttttgctacattttggtggcattttaactagttatctgaatatttattaatcgtacttcctcttgtaaagttaactacttacttttttgttgttgtttttttaacatcaggttctgtatctaataggagatgtaacactttatttcatggcaggtttttattgcagagacttgaagtcttagttttttaaactggcacataaaacactttttgctgttatttttatttatgtcaatactgcagagtatctttatgccttattcaagtggattctgagcctgtatgtcacaatgtaaacactggaggttcactcacctacgcactcacccaccacctctgaaagaaacagaaactgcagagaaagacagcatcttagctcattttgtttttaaatgaggttttagacgcttgccacttcctaagggaaatcctaaaacagagcaagtgatgctcccaggtatcactgtgaacttttttctttcaaagtgtgaatttttacactggctttttcatttttttaaagtaattgaagcttgtggctttacaacttagtgttttttgctatccagataacaagtttcattgtttagaacccagtgacacttaataggtagataaattgtcctttaaaatatcccagatgatatacacaatatggtacatttgtgctctctctctctgtttttctctctttctctttctagttagatcaagataacgatgacttgtaccctccctgattctgttacagtagggcccgggcagatctgtgtttgttaaacaggccttgtttgtgcatgctttgctatgaatgaagttcctttaaggacaaagaaaagcacacttttcttcttttgagcatatctgcttttactttaaatctgctaatttctaaaatgtagagtccttcaccaatcccagagactcaatttggaaatgaactgatttcaagccgttactgtgaataaagcaccccagcattttgtataagctcttaattaaacctgtacagcttctttacctgatttaagaaagggagacaagcaataggggggaataagcttcttcaaaattcattccaagcacaaaagaaattttttccctttgcatataaacttgacatcagttgattctgttggggtcggggtgggtatgcagggattgccttttattatcaagtgatttatttcaagagcctttgaggggattcaggtgaaggaacccccatctgtgctggagagttggatactcctttaaatagcccccaccacagtcataacaataatgataatgctggattatttgttaagccaaggttgtctgcctcatatccatcatgctgtttgcaatattcttgctttcaatcaatttatactgagtgtaactttaggatttctgctattaaatgcatgctctctatcctgcttcagtttctgggctttgctttgtctgtttcaaaatatgtagcttcctcttttgtacaacaaaaaactcattctcacttttactaaatatactgtaggagtcatcattgatgttatttttctcttatgtatctgtaaagatttttggcatatgaatgtaatattaaagtcaatgatgctataacttgcgatgtttgcatcatgtcaacctttttgaaggagtgaaaaagcccctactatgtttttaaatagccaagtgtaagctcagtgctagagtggatatacacaccgcatgttttcatatgtggcacttttatgtatcatgttgggttattgttctagactggactgttaaatactatgtttgaggctgggttgtcatttttataactgtcttggtgttttatggccattatttattacttttgatacacagaatgagctgcatgcatttatagagcaataagaggatgtatttaatgtgccttgtttttaactgaataagaactggaagcatgaatcaataaaactgattaaaatggtctatttgctagcattttgatgttacttgcagtcagataactttgattactgttgaagtttaaaaaaagtttgaaaatatttttacaaactgtgtttttgatgacacaaaagtgaaatatctacagagatagatgtaattttataagactgccagaattatttgtattaatttgttgctgtagcctttagggcatgacttctgtatttgtgcaatcctattctacaattacattcatcctattacaactcaaaaaaa

SEQ ID NO: 57308 - DNA, 1239 bp, Homo sapiens
agtgtatgctgacttgtaaagtgaagaagccagtggtgctgcgggtgttcttttggggtagtgtctgggatccagtacgagttgaatcattgttcaaataaggtgtaattgaaaagtgatcctctcttcagagatgtcaaaaacaaacaaatccaagtctggatctcgctcttctcgctcaagatctgcatcaagatctcgttctcgttcattttcgaagtctcggtcccgaagccgatctctctctcgttcaaggaagcgcaggctgagttctaggtctcgttccagatcatattctccagctcataacagagaaagaaaccacccaagagtatatcagaatcgggatttccgaggtcacaacagaggctatagaaggccctattatttccgtgggcgtaacagaggcttttatccatggggccaatataaccgaggaggctatggaaactaccgctcaaattggcagaattaccggcaagcatacagtcctcgtcgaggccgttcaagatcccggtccccaaagagaaggtccccttcaccaaggtccaggagccattctagaaactctgataagtcgtcttctgaccggtcaaggcgctcctcatcctcccgttcttcctccaaccatagccgagttgaatcttctaagcgcaagtctgcaaaggagaaaaagtcctcttctaaggatagccggccatctcaggctgccggggataaccagggagatgaggccaaggagcagacattctctggaggcacctctcaagatacaaaagcatctgagagctcgaagccatggccagatgccacctacggcactggttctgcatcacgggcctcagcagtttctgagctgagtcctcgggagcgaagcccagctctcaaaagccccctccagtctgtggtggtgaggcggcggtcaccccgtcctagccccgtgccaaaacctagtcctccactttccagcacatcccagatgggctcaactctgccgagtggtgccgggtatcagtctgggacacaccaaggtcagttcgaccatggttctgggtccctgagtccatccaaaaagagccctgtgggtaagagtccaccatccactggctccacatatggctcatctcagaaggaggagagtgctgcttcaggaggagcagcctatacaaagaggtatctagaagagcagaagacagagaatggaaaagataaggaacagaaacaaacaaataccgataa

SEQ ID NO: 57309 - DNA, 476 bp, Homo sapiens; identical to SEQ ID NO: 23121
  misc_feature (1)...(476): n = a,t,c or g

SEQ ID NO: 57310 - DNA, 416 bp, Homo sapiens; identical to SEQ ID NO: 13743
  misc_feature (1)...(416): n = a,t,c or g

SEQ ID NO: 57311 - DNA, 2118 bp, Homo sapiens
ttttttcactctgataaatttattaaaataagaacaagcatcagttgtacatagaaataatcttctgctctagtaccatgcttagaacaaatgattatttctaagaacaagcatcagttgtacatagaaataatcatttgcactaagcatggtactagagcagaagagcagttttaaatgtattttttaagtcacaaaatatatcggttaaggcactataatcctgtctcatgttttcaataaatatgctggtttttttttttaaaggcagtagttttgtaaccgattacatgagtataggcactatactattaaagacaaactgctgtggccattgtgtgtaacttattctcaaaagaacttttgttagttaagattagtgttttttaagaatgagaatatgaaaattgtcacagttttctctttctaatttaggtctcttccagagagacctatatattaaaaggtgctgtttcttcactttattccttggcaacaatgaattatgcataaagtaaaaacattgcctctcaggaagtaaagccatcagaagatgtctcagaacagcttgaaatctttggaatagctttttttttttttcaactgcaataaaatcagtgcagttcagaaaactcgacctttcagtatccgagaaggcagctttgtaagcactttctgttcgaggaactttgttaagcagctgaggggaatctgacccagctcctgtgttgtctggtgtagacagggcaccagactgggagtcaagtggcctgggtgcttcttcactgccaccagcacttcctaataatggcaaatttacattttgttacggtgctcacagcttacaaaacacatacatgtgcatcatcacagtttgttcacctgtaagatgaaagggttggattctttgttttctgtggtcttttccagttctagtgccttgctagtctgatagtgtgaattattttttattacagctggcgctgctgctgcatcagggccatcctttctgcaagacacaatgaccacagcaaagagcgggaaagataactttccacgacatcgccacattgtttgacgtcctttcatcaaatcactgtatgctattaaaagtcaccgtgtaactggagttacattattcacagaggccattaagacttctcttattagacaatataacttttgtgacagaaataggctgcacagatctctaagataaaattcacgttattgcacattttgtttctccagtcaggtcttcaacacgtaagatatgattacaacattaaggctttgtacagcatgaggtaaaatatcaggaagaatcttgatgtgagccacacctcttttagagtgagaaaaaaaaatttttttttttgtcaattgtacagaagaggacacaatctgatatattttacaactgataaatgacattggaagagtacaggttgtcaagacatgctggaaaatatattcacttttcagcaagtaactagacacatggtcaaacaaagccttaagaaatctgggacctgcctgctcaggtgcagtagaaaatacatagagctaattttattatgaaatgtataagaatattgcttttacctgctaagatttggtcttcagtttgactttgtatgtatatgtgtgtgtgtatatatatatatatttttttaattatagacacaacttttacttcattataaaagattaaaatgcatcattgagaagcaatttaatacaaagcatctaatcataaaaatagaaaaggtaatcaaagagcacttcagaaagaaactctggaaccaaaggcttagttcttctcccagggacctgtaataatctgtcaggaccttccatgctttgggggccatgaagccatctgggggattctctccttcccgggcgagcttcctcattcgagttcctgagatgaagtcaaactcattgtgccttgctggatcatagaagtccatggcttttttggctttgttgtaggcagccactcggaatggaatgatttccacagaggtgagcaggggccatgctcaagaccttgcccccatgagtgggttcatacagatccttcttggtttcaggatggggcattcctgcagg

SEQ ID NO: 57312 - DNA, 912 bp, Homo sapiens; identical to SEQ ID NO: 13746

SEQ ID NO: 57313 - DNA, 515 bp, Homo sapiens
  misc_feature (1)...(515): n = a,t,c or g
anacccgnttnttntgattncgaatttaatacgactcactatagggaatttggccctcgaggccaagaattcggcacgagcagaaattgttgaatttttgttgcaacttggagtgccagtgaatgataaagacgatgcaggttggtctcctcttcatattgcggcttctgctggccgggatgagattgtaaaagcccttctgggaaaaggtgctcaagtgaatgctgtcaatcaaaatggctgtactcccttacattatgcagcttcgaaaaacaggcatgagatcgctgtcatgttactggaaggcggggctaatccagatgctaaggaccattatgaggctacagcaatgcaccgggcagcagccaagggtaacttgaagattattcatatccttctgtactacaaagcatccacaaacatccaagacactgagggtaacactcctctaccttacctgtgatgaggagagagtggaanaaaccaaactgctggggncccaagggcnagttttt

SEQ ID NO: 57314 - DNA, 1550 bp, Homo sapiens
tgttgttgttccccttacagacaaaatgaagactatcatgtgcaatcttttacagtggggttgatgatacatttggaaggatttgcttgtttaatatgtacattttttgtgttaacagctttttgacacaattactgggtaatttctaatataggcagcagactgttttacgggttgctgttttaacatgggtttttgtcagatccatggtcttaggacttgactgatgagctttcagtgaagaatcctctaagataaaacttctatttaaagactttaactagaaagtgtttattttggctacattgttcaccttctgctgtattggtatttgtctgttgggatttcaagggagtgtagagaagacagaaggaaagctgagagctgggcccgacatggtctgggacacagagttggagctggcactgaagatctccagggacttcagagaccaataaaagcccatagggaagagagagaggatatagggaaacagaatcagatgtgtaatatacttgggcacagcgaaaaaatggatttaaaagacaaaaatggaggtccaggtagatgtaattcacacagactgaaagtgagttcgggcttgtgtaaaacacatgagattggatttgaccccttggctctcaagtgtccccttagatctagaactgctccttggtggccattagatcgagtcagttttgatctgcatcacttagttattgggaatttctttgttggaaacaggaaaatttttttagattatttggtgtacggttttgctcacaacaataggtggaagttgctagtgcagtcttggtctgatggctgtgtgcatcgcacattcggcttggtgaaatccttctctaaagcctctttttgtatttttataactaaacagaggaagtcttcagaagacctcgctttaaaacaaatttgtgcaaacactgctagagtcattttgaagctcaagcattttcactttgtttcttacatgtgtacttttttgtttacttgtgaaaatggccatctttaagcatatttattttctgccactttatttaaaggcaagcaatattttcttgatcataaatattttgtaatgaaatacttcctcttttccagggctttgtatgcacttgtataattacattgatggcaatgtagagtttgaatttcagtctgtaaatacttttttggaaaatagaaatttttattgctttaaagttttggatatgggtggttttcttttccgggtttggtggaaagtaatttgagaactttaaggttgtctttttaactgctggcaaaatgttgattttttaatattagataaaacgagtaaacgaaattccccagaaattagtagtaagtggggtctttgtgggttgggaagtagttttaatgtagaaagacatttacatataagtctgtttaatttcaaaggagtttgtgaaaaaaaatccatggtgaaaatgaaacaatgacatggttaatctggaacttacgttcttataccaataaaaggtacctcaatacatgttctttcaaaa

SEQ ID NO: 57315 - DNA, 1228 bp, Homo sapiens; identical to SEQ ID NO: 23134
  misc_feature (1)...(1228): n = a,t,c or g

SEQ ID NO: 57316 - DNA, 1786 bp, Homo sapiens
cggccacaaggatggcaggcttcgcggacgtcgggctgtcatcgtggctcgtggaacaatgtcggcagctgggtttgaagcagcccacgcccgtgcagctcggctgcatccccgccatcctggagggtcgagactgcttggggctgtgctaagacaggcagtgggaagacagcagcgtttgtccttcccatcttgcagaagctgtctgaggatccctatggcatcttctgcctccgtcctgacacccaccagggagctggcctaccagatcgcagagcagttccgggtcctggggaagcctctagggctgaaagactgcatcatcgtcggtggcatggacatgggtgggcccaggcgctggagctctctcggaaaccacacgtggttcatcgccacgccgggggcccttggcaagatcacctgcgcagttccaacacttttagtattaaagaagatccgtttcctggtgatggatgaggcagacccgttgttggaacagggctgcactgacttcaccgtggacctggaggccatcctggcggctgtgccggcccgcaggcagacactgctgttcagcgccacgctgaccgacacactccgggagctgcagggtctggccaccaaccagcccttcttctgggaagcacaggccccggtgagcaccgtggagcagctggaccagcgctacctgctggtgcctgagaaggtcaaggacgcctacctggtccacctgatccagcgcttccaggatgagcacgaggactggtccattatcatcttcaccaacacgtgcaagacctgccagattctgtgcatgatgctgcgcaaattcagcttccccaccgtggctctgcactccatgatgaagcagaaagaacgctttgccgccctagccaagttcaagtccagcatctaccggatcctgatcgcaacagacgtggcctcccggggcctggacatccctacggtacaggtggtcatcaaccacaacacccccgggctccccaagatctacatccaccgagtcggccggacggcccgtgcagggcggcagggtcaggccatcacgctggtgacacagtacgacatccacctggtgcacggccatcgaggagcagatcaagaagaagctggaggagttctccgtggaagaggccgaggtgctacagatcctcacacaggtcaacgtggtgcgaagagagtgtgagatcaaactggaggcggcccactttgacgaaaagaaggagatcaacaaacggaagcagctgatcctggaggggaaggaccctgacctggaggccaagcgcaaggctgagctggccaagattcaagcagaagaaccggcgcttcaaggagaaggtggaggagacgctgaagcgacagaaggctggcagggctggccacaaggggcgtccacccaggacaccgtctgggtcccactcaggcccagtcccctcccagggcctggtctgagccccacacggccatctgcccagtccttgactcgtccatggagctgagggtcggaggaaccttccttgggggcagcagcccttcccgggggcctacccagtgccccacagcagaacccgtgggcgctcgtgttgtgcgggccctgctcctctgccccgaaaccactggctggtcccttccctgagccctggccaagattcaggctgcaggggaagaaagaacatgaccgggaggttgtgaccccaacccaaggtcaccccccaggggtgccgcatacaggaggtgcttaataaacgggtcttttgacttcctc

SEQ ID NO: 57317 - DNA, 494 bp, Homo sapiens
gaaagttgatctgtaatgttcaggccatggaagaaatgatgatggaaatgaagtataataccaagaaagccccacttggttaccagtctcttaagaagattgaggattgtattcgggctggccagcatggacgagctctcatggaagcatgcaatgaattctacaccaggattccgcatgactttggactccgtactcctccactaatccggacacagaaggaactgtcagaaaaaatacaattactagaggctttgggagacattgaaattgctattaagctggtgaaaacagagctacaaagcccagaacacccactggaccaacactatagaaacctacattgtgccttgcgcccccttgaccatgaaagttatgagttcaaagtgatttcccagtacctacaatctacccatgctcccacacacagcgactataccatgaccttgctggatttgttgaagtggagaaggatggtgagaaagaaccttcag

SEQ ID NO: 57318 - DNA, 1311 bp, Homo sapiens
gccggaggagacgcacgcagctgactttgtcttctccgcacgactgttacagaggtctccagagccttctctctcctgtgcaaaatggcaactcttaaggaaaaactcattgcaccagttgcggaagaagaggcaacagttccaaacaataagatcactgtagtgggtgttggacaagttggtatggcgtgtgctatcagcattctgggaaagtctctggctgatgaacttgctcttgtggatgttttggaagataagcttaaaggagaaatgatggatctgcagcatgggagcttatttcttcagacacctaaaattgtgggcagataaagattattctgtgaccgccaattctaagattgtagtggtaactgcaggagtccgtcagcaagaaggggagagtcggctcaatctggtgcagagaaatggttaatgtcttcaaattcattattcctcagatcgtcaagtacagtcctgattgcatcataattgtgggtttccaacccagtggacattcttacgtatgttacctggaaactaagtggattacccaaacaccgcgtgattggaagtggatgtaatctggattctgctagatttcgctaccttatggctgaaaaacttggcattcatcccagcagctgccatggatggattttgggggaacatggcgactcaagtgtggctgtgtggagtggtgtgaatgtggcaggtgtttctctccaggaattgaatccagaaatgggaactgacaatgatagtgaaaattggaaggaagtgcataagatggtggttgaaaagtgccctatgaagtcatcaagctaaaaggatataccaactgggctattggattaagtgtggctgatcttattgaatccatgttgaaaaatctatccaggattcatccccgtgtcaacaatggtaaaggggatgtatggcattgagaatgaagtcttcctgagccttccatgtatcctcaatgcccgggggattaaccagcgttatcaaccagaagctaaaggatgatgaggttgctcagctcaagaaaagtgcagataccctgtgggacatccagaaggacctaaaagacctgtgactagtgagctctaggctgtagaaatttaaaaactacaatgtgattaactcgagcctttagttttcatccatgtacatggatcacagtttgctttgatcttcttcaatatgtgaatttgggctcacagaatcaaagcctatgcttggtttaatgcttgcaatctgagctcttgaacaaataaaattaactattgtagtgtgaaaaaaaaaaaaaaa

SEQ ID NO: 57319 - DNA, 2101 bp, Homo sapiens
  misc_feature (1)...(2101): n = a,t,c or g
tttttttttttaggaaaagttttttccatttaatactagactttcaaggattgagatgcaagctttgtatgcaattacatccaatgttaaaattggtaatacataatttacaaagattaacatcaaaacaatcatctatttagatatgcttttgtaaaaaggaaatatattagcagcatttatattttccgcaatcacacagcctacagacatgcagactaactctgtatctatttgcagtgatgtagtgctttgccccgcatttcaaacaccaaaacccgcctggcagctggggggttctttttatttcgttattataaaataactgaaaaataaaaaaaggcattaatttctacaccagtaagaaaaaacaagtttttgcacttacctaacatttgattgtctaaaaaacatttcagtttttttttagtctttcaaccaaagaaaggataaaatggacagagcgtagtgtcttttgcttctgttctcgcattttacaaactttttttttctttttcatcttttttaaaattttagtgtttaacactataaaggaaacattgaattttaatctctttcttgtcattttctcgcatttgactaaaaggagacccccaaagtgcccctagtcccacctccctcccacccactccctgcaatgaaaaacaaaagaaaccactcaaacgggcttggacatgcgatttttccagctccacatgtgagtatcttatacccaggtctcttagtaatgtacagtgcttctctacagtaagaaaatactccaaactattttcttaattctcttttttctttaataaaatatttattttgctttttctctgctcaaggggatcattggcatcccctctctcttttgttttttcctcaagaatgacacagaaaggggaaaaaggaaaaaatatttaatggaatggaaggtggtcaatgtgtctacctaaacgagtcagagcatcgtcaccataaggggaaatgtacaattaggacagcattggtccaatattagaaaaaagtaatggggacatgtttactattgtattgcttaccaatcacacagcaggtgtgtgtgtgtgtgtgtatatatatacacacacacacacattantatattatacacacacatacacacatatatatacacacacacacacaacttggcacatttaaaaaccatcttttctcttataagaacatctaaaacatatatgcatatgtatgtctgaaaagacaacaaagctttttaaattttatttttaaagagacagtatagtctgttaacttctggtcaagagagtaggaaggaaggagacaccctggatatacctcctgatgtcattcaggagggtgagggaagatgggctaggggtgaagagaaatatactgtctctttaagaaagggacattgaaaactgtacaattaagaaaacaagagtagtgttttcaattgataatctatactcacaacaaatactctgataggtgaatactgctgaacagtttatgtagtgacttttgttgcaggggtgggtttagagttctttttatgtaggtttttaaatgattttattttgaactgaatctccatttgcacagcacagcagacacacaagaactacagcgcattaaaaacagcatgtgtgctggcgggggcctggctttctcattagaaaaaaatatgtttgacaggttatgaagggtaaaacaaaaataattgcaagaactaccgtgcccttctgaccccatgggggccttccctatcccatgattccattttggggagtagaggtagggagggggcagcagttacaagtgctttgagctgtcaactcacattttactttgacctggttgggcaagaaaggagagacaaacttccctagtcaggtatctaggaagaagcctcagctactgtttctgtttaaggtctctggggtagctcttggagccaacagagaatagatggggtaggaatagggatcctggccctatccctttggattttgagttatacctgggtataggaagcagcttcttcgcaatgcctgtgggatctgaggatgaccgaaaaacctaaactgtgggg

SEQ ID NO: 57320 - DNA, 531 bp, Homo sapiens
  misc_feature (1)...(531): n = a,t,c or g
gccatggacaactgtttggcggccgcagcgctgaatggggtggaccgacgttccctgcagcgttcagcaaggctggctctagaagtgctggagagggccaagaggagggcggtggactggcatgccctggagcgtcccaaaggctgcatgggggtccttgcccgggaggcgccccacctagagaaacagccgggcagccgggcccgcagcgcgttctcccgggagagaaatattattcatctgtgccagaggaaggaggggcaacccatgtctatcgttatcacagaggcgagtcgaagctgcacatgtgcttggacatagggaatggtcaggctgagaacatctctaaggacctctacatagaagtatatccagggacctattctgtcactgtgggctcaaatgacttaaccaagaagactcatgtggtagcagttgattctggacaaagcgtggacctggtcttccctgtgtgatgttgaccatcactgccatcacatcacctttttttaagtagtaagaatanagcca

SEQ ID NO: 57321 - DNA, 1853 bp, Homo sapiens
ttgggcaaaaaagctttttattttcccccacattccagctcttcactttttctaaaaccttttccaactcagagccaaggcccaagaagttgattcacacctggggagaaagaaaataaaacaacaaaacaggtcgaagagctgctagaggaagctctgagatgtgtgcagaaattgaggaaggagcagagggagtgacagctagagaccaatacgggcatttaatcccaactaaggtagcctcaggaccccagggtctgtcaggggccaggaagccctcctttcccagtccaaggttgacagggtcctgtcatttcctgtcccaagtaggtggttggggcatttaggcccagccatcagcaaaataagcacagttgatcttgagcttccacttcctctggcctgatcagttccctgggcctcaactatttccacttttcccatagtaacttcctagggcactgcagccagctgaagctgagaccagttcaagagctggatgcataacacatggctctcaaatttcatgcacccccctctgacaagtgaagattttttgcagaaatattttttcctttagtgagctgatgtgtgaactggttaaccaacatgacccccacccactgctacgtttgtgaagctgattccctccaaagatcttgttaacggaatcagctttttctaaaggtaacgatgactaaatggaagacagaaggtgcatgtcaagttcttgggcacatactatgtccccagtaaatgagtatcatcagttagactcttctgagcggttcaagttgaattttacaaaatttccatcataaaactgggtattggaatttcaggacaaaagcaagacaaacatggttcatattcaggacaaatcatcaaatgtgaaccctcttaactcaccattgttacccaaatgcttggatgtgaactagttatgagtcttaaaatcacaatgttgcttgaaagaagtcagccacaaaagaatgtgtatgattctgtctgagaaacaagtcgggaactaggccagtgccctcagagccgggttctagaccagtgggactcccggcgcgggtggaagcacatagcagtgacacagcagagaaggccacagaagagaagcaggaaggagcccaagaccagcagcctggagccacacagagccagctcctccgaggtgagcagcttggtcagcacaaggccttcatggctccagacactaacacattcctcacccattctagggctcagggtggcatttccagccccctcctctgagcaggatatgggtggctggctggagggtaggattcctggaacagcactaaaatataggcaggttcctgcagtcctttctgtggtcaccctggctgtgataaggaccagttgtcctgcagaagatcctttcaatcccatctgacttcccaggactgtggcctggaatgtccgggtcttgttcctgtctggaccgtctccgaagttcaaggtggtcagcaagcccacgacgtgagaccctcgccacttccctgtgacgtgtcccattcctgggacacagggtcagctggccgaaagatctcaaaaaagagacccagtcctgggggatgtcagggctgcgcaggccagtcctgtgggtgaggaggaagctgccaaggcccaggccagagaggccaaggagcagcaggatcaaagtggcacagaccagaggtgggtggtgggccagacacaggtgcaggttgtgccctgcctggcagttgcccatggggagcagagggggctgagcctccggggagagcctgagcaccccctccccggaaagcccccgccccgaacgattgcaacgccctcgc

SEQ ID NO: 57322 - DNA, 1022 bp, Homo sapiens; identical to SEQ ID NO: 13760
  misc_feature (1)...(1022): n = a,t,c or g

SEQ ID NO: 57323 - DNA, 1521 bp, Homo sapiens
ggcccgctgcataagacctgctccctcttcatgcgcaacatcgcgcccaacatctcccgggccgagatcatctccctttgtaaaaggtacccaggctttatgcgggtggcgctctcagagccccagccagagaggaggtttttccgtcgtggctgggtgaccttcgaccgcagtgttaacattaaagagatctgttggaacctgcagaacatccgtctccgggagtgtgagctgagccctggtgtgaacagggacctgacccggcgcgttcgcaacatcaacggcatcacccagcacaagcagattgtgcgcaacgacatcaagctggcggccaagctgatccacacgctggatgacaggacacagctttgggcctcagaaccagggacgcctccccttgcccacgagcctgccctcgcaaaacccgatcttgaagaatatcaccgaactacctgatcgaggaagtaagcgccgaggaggaggagctgctggggagcagcgggggccgctcctcctgaggagcctcctaaggaagggaacccggcagagatcaacgtggagcgggatgagaagttgattaaggtcttggacaagctcctcctttacctgcgcatcgtgcattccttggattattacaacacctgtgagtaccccaacgaggacgagatgcccaatcgctgtgggatcatccacgttcgggggcccatgccacccaaccgcatcagtcacggggaagtgctggagtggcagaagacttttgaggagaaagtcacgccgttgctgagtgtgcgggagtcactctcagaggaagaggcccagaagatggggcgcaaagacccagagcaggaagtggagaagttcgtcacctccaacacgcaggaactgggcaaggataagtggctgtgtcctctcagtggcaagaaattcaagggtcctgagtttgtgcgcaaacatatcttcaacaagcatgcagagaaaattgaggaagtgaaaaaggaagtcgcgttttttaacaacttcctcactgatgctaagcgcccagctctgcctgagatcaagccagcccagccacctggccccgcccagatactccccccaggtttgaccccaggactcccctacccacaccagactccccagggcctgatgccctatggtcagccccggcccccgatcttgggctatggagctggtgctgtccgccctgcagtccccacaggaggccctccatacccccatgccccgtatggtgctggtcgagggaactatgatgccttccgaggccagggaggttatcctgggaaacctcgcaacaggatggttcgtggagacccaagggccattgtggaatatcgggacctggatgccccagacgatgttgatttcttttgagccgtcccccgttcctcagtcctgtatcatccatacttgtactaccttgtcctatgaagctctgagaattttttgtacgatcagccttactgctaataaaagcacttccacagggaaaaaaaaaaaaaa

SEQ ID NO: 57324 - DNA, 1311 bp, Homo sapiens
tctaccaacacttgccaacaggcttttatttagaactaatgaacttgtaggtggaatcaggaagatcacaaagagagggttaaggataaatggaaacgatcactaattggactcgccaaaagacagactgtcgccttcaggaaaataaaaaaactttttttttttttttttaagaatcacagcaatccaagcaaagtacctcactgagtaggtatcaagacccttcaggcagaattccatcattctcgcaattagtgacagggacgctggttgtggaggagtatttggagtggtggcagaaaattgcatcggcatttccagcttgagtaggtcttatcttcttagcggatgctcagaagccaaggtctggatgcagtcggtcagttgcaaataacagctcaggaatgttaagtggcttcaggagtcgtgtggacagcacgattacctgggttcctggcttcaacgatgccacaagatctttggaccattttcacttccagagactgtgaccccaccttaccacaaaagaggatcaggagggggtagtcactaggatgaggccggctcaccttcatgaacatgctaaatccagttttaaggagatcagtgaggcctgaagacatgtgttcaatatcaacggaatctggcctctcgggatgaaatatttcctccacaacttgcttcaacaatggcttataagatgcctggtgggtatgatttccaggaacatatacagacttaaactgtttcaggagactccgagctccagcaatatcccgaagtgaagtaaagagttcatccacggcaattttggatttgtgaaatgtcagattaattgaagagtcccagtccgtaattttttgcagcaaaggtgacaatccagattcctcacagaagacctgagccaatgctttcttgactttttcttctgcttcacacaggtctttgtctaccgtgagctctccagtgacagaataaatatatatgagaaggatcagcagttcctcagggctgtagtcctcgttggttctctgggttacaggcttaatcatgggcagcagctgatttaacacaacggacattgctgactccccaatgctctgaagaaggagcctttcaaaagccagaaagttgtcccacttggcagtctgtgggtgtttcaacgtttgagctgtggccagtccaagctggaggaggccacaatgattcattagagctttgaggttgttcttgaagagctgaatataggacatgagctgtcccggtgtgactctccccatactcatcttgattggcaggttttctctgctc

SEQ ID NO: 57325 - DNA, 2038 bp, Homo sapiens
gaattcaacgtagaaaagttttaatgagacaaatgtcaaacaagcacatcaacttcttaaaaaacaaagaaaatctgaaagtttaattacaaaaacacttatacagaaaacttggcatttcaacagttccaaacacatgtacacaagttttttctaaaatcagtcagaaataaaataccttgtctccctttcctcagctgcttcttgtattttaattaaaaagaaacaaagaaatctgtaacactgaataggcaacaacttatttcttgagaacataaaagtacagtaatatctacaggtgtactgggaaacatgagttaggtattgtgctagcctgtaacttcatttactgcctcctcactgagcacagaggagagaggaggtggcacagacctggtctatagatactgacagttttgtggcatctgaatcccagccaccagaggcaggtgagtagctactgggaaagacagcatttcagaagcaagctgcttattttgtgaaaatgatttcatactgtaggctctcttgaaatctcatgcattcctgaatatgcaaatgtttcaagtcactgtcaagtgtcccatctagagtcagaaagaatgatgatcctggaccatgttatggccttttctggtcacaaaagcagtgctagcaatgcctgcacaaaactgaacacaaatgagaaacagaaatatgaggaggaaggaagacaggacacaaagcatctggcagaaggaaaaaacaaaactcccagaatgggctctggatgtccttctgccatagacagtgagttctagcttgggctttgcagacaaggagtctaagagaagtggcagaaatagcagatgatggcagggaaataggaaaatacagaagagcaagagaactggctaggtttatagcaatagataataatggggtcttattctaaaaaattgccaagtgatggtatgtgggtttcagcgcatggatatttgatatatgttcatataagacattttaaaaacagattttgttgctgttgttttcctttggactaataaagaaaacaggcaaggagatgctgagaagacaggatggtgtagcaacatgacaggtagttctgccctatgccctgacttatgggcatactatgagaggggccgcacttctatccacctgcctgcagtggtgtggggcccagacaacgggctctgcttgctctgcctttggttccaaagatctcagctgtaacctttagccttgtgctctgcagtgtcaaaacaaaaacaaaaacaaaaacaatgaacaaccaaaaaaccctgaggtaagaatcagaacctctctttccttttgctgttaaaggaaccagaaactgctaggcgtgatgcttgagcccaagagttgtaggctgtagtgtgctatgatagcatctgtgaatagccaccgcactccagcctgggcaacacaggaagacctcatctgtaaacaaaacaaaacaaaacaaaacaaacaaaaatgaaccagaaagtcctctttacttatgctgttaaagaaaaaatcactaaggagggggaaggaagggaagcctgtcttcctcacatggattcagcagttaatggctacagaaggaagacaaaggacatgagaattcttccttgctttttttgtgagctcaagtgactattttgaatgatatttccacctatctagatctatgaatcattactcctaaagaagacaggaattccctcagttttcacttacaataaacttagggctttgtactctttccctttctcctctgtttacaagtgaccttttcctcagcaaaaatgctccacaagacattgtcaacagatgggaacagaagagccttgctggggctgggactccatgtctgtgcaggagcaatgcttagaaaacagcaggcagtaccagtgaggaaggaaagagcattctcctttagggcagcaatcacctcgtgccgaattcttggcctcgagggccaaattccctatagtgagtcgtattaaattcgtaatcatgtcatagc

SEQ ID NO: 57326 - DNA, 1062 bp, Homo sapiens
ttctctgggaaaactggagatgagaatctgcccagtgctctgctgtccagtcaccgccttttgaattttagttttggcaccaggagtaccgttagctttccccttcttctggcccatttgactcatcagcacaataggggtcaccaccttaacttttaatttctaatctgctttactgtctttaggggtgtgtatgaaataaacattgacaggctttctgggagccctcaaggtgcctactttgctgggttccctttccagcagctcccccacctcccttagccccccctcctctggcagcctctcctgcctctgctgagctcccctccacgtgttccacccccttaccctgctgttgtttacatccaacctgcctgagaatttcctctggggaggaatctattcctgtcatggtctagtgcctgggagggagagaactttctgggggtagggtgccctccatctgaaacaggccaggtgagcatcatgcataaggcctccattctgtccgctcagattctgggtggggccacaggcaaatctcctgacttatggggagttggcttgtggttcctcccttggatagcctccatggaaccactataggctttcccaacagctgcctctgaaatagctgctgcttcgagatcctccctttttaaagcactttctaaagccctcaggatggcgggagcaaacagcactggtatattctaggagtaagtgcaggaattcagcagtgagagcatgtctgggaccacctggactgccatccatttaacctcaaatctctttgggatactcgccctccctgggaaccagagttctggctctaacattgagcagctatgcactagttccagagaagccactaacaggctgccatgtgtagatgtaggttcttaagagatcacaggctgggtcatctgatcactggatggatagctcagcctggggcatttagtgttttccctggtgataaatccccaaggcagctggatttggagctggtggcaagttgaaattattaaaaattgatttgtgtgggactgtcaaaaaaaa

SEQ ID NO: 57327 - DNA, 1081 bp, Homo sapiens
gcccgtggtgctccgtcgcccccgccacctcacgtcctcccgtgcgtcgggagcgtctcggctacaacatgttgggcatgatcaagaactcgctgttcggaagcgtagagacgtggccttggcaggtcctaagcaaaggggacaaggaagaagttgcctatgaagaaagggcctgtgaaggcgggcaaatttgccacagtagaagtgacagataagcctgtggatgaggctctacgggaagcaatgcccaaggtcgcaaagtatgcggggggcaccaatgacaagggaattgggatggggatgacagtccctatttcctttgctgtgttccccaatgaagatggctctctgcagaagaaattaaaagtctggttccggattccaaaccaatttcaaagcgacccaccagctcccagttgacaaaagcgttaagattgaggaacgggaaggcatcactgtctattccatgcagtttggtggttatgccaaggaagcagactacgtaggcacaagccacccgtctgcgtgctgccctggagggcacagccacctaccggggggacatctacttctgcacgggttatgaccctcccatgaagccctacggacggcgcaatgagatctggctgttgaagacatgagtgacccactgaaccaagaacttactggaagtgtgcctctgtgtctccttcctcgggggtaaggaggggacagtgcttcccaagttccagctgcaagtccaacttaaccaactttccttcaaagtcagttactgccaattttctgaaaaaagcatgttccatatactaagtctcttttctcacggtaggaaataatacagccaagatatgcagcatccttctcattgatgtagaaaattctgcgatagaccagaaaaatcctggcagcttttctcccaggcatctgggtcactaaaaactgattttctaaaattattggatttgtattttgttattaagggggaaaatgtgatttgtgcctgatctttcatctgtgattcttataagagctttgtcttcagaaaaactaaaaataaaaggcattgacttaaaaaaaaaaa

SEQ ID NO: 57328 - DNA, 1242 bp, Homo sapiens
gaactcatgagccaacagctgaagaaacccattgctacagcttccagttgaatgccggggagaaacctgtccaattttagcaggtttgaagggaggatcttcttcagttgtagtttggaaggttccttggtgtggctcatgaaatcacagagctcagagataccatcttgagaaatcctccttggtatcatgaaactggagcagaggaattgcaatttagcaggaggtcctctactggtgataccctcaccttggggtaatggtcctaacccagacccagggtctggaagcttaatgttgagttggtgactccagcctcttttttcctgggaggtcaacaagattgatggattgcgttagatgtttgcctgggtgcaaaagtgccccaaaacagcaattggaaaggcatatgtataaccaaactccaagtggataaccaggacccatctctcctccaccttgacaaaagcagattatagtatacaaggtaaggaattcctgtcctatttgagatgaactatatcctgtacctctgtgctctgtgtctgcatgaaggctcagcctttagaggcactccttctagttgcattagtactgtctttctgtggagtttggtttgaagactggctcagcaagtggaggtttcaatgtatttttcagttggctcatcagccagcattggtgaatattcagtttaggggaacagttctagggagtgagacatttttgggagcagaggaaaactctgctgatgttcggtcctggcaaacattgagttattttgagctgtgaaggcagtcgtctctgtttacacagtggcagctcttgagttatgcactgtgaagaatgagaagggaaaagcaaaaattatccttgtgaaatatctgctgattgtgccctactctttgcacctgacttttcctagttgtcctggtgctaacacaggagctacaccttgatcctctcctggcatgaaaataaaacaaaggttttcgttgttgttgttccattgcccatttcccccatgttgtctttcccttgggctgatgcctcctctgggtcacattgcttcttatcctgaacacttgacaccttgagggtagaatttagcgtttggtttttacctcctagcatatgctgtttggtatgtgagggtttcagtacaaatgctgctgtctatttctgtgcacttaacaatggaacccaaacagaagagaataaagccttgataccaaaattggg

SEQ ID NO: 57329 - DNA, 962 bp, Homo sapiens
ggctggagaggggaaaggatgccacacttcagaagcaggaggacgttgctgtggctgctgcagtcttggagtccctgctcaagctggccctgctggccggcctgaccatcactgtttttggctttgcctattctcagctggctctggatatctacggagggaccatgcttagctcaggatccggtcctgttttgctgcgttcctactgtctctatgttctcctgcttgccatcaatggagtgacagagtgtttcacatttgctgccatgagcaaagaggaggtcgacaggtacaattttgtgatgctggccctgtcctcctcattcctggtgttatcctatctcttgacccgttggtgtggcagcgtgggcttcatcttggccaactgctttaacatgggcattcggatcacgcagagcctttgcttcatccaccgctactaccgaaggagcccccacaggcccctggctggcctgcacctatcgccagtcctgctcgggacatttgccctcagtggtggggttactgctgtttcggaggtattcctctgctgtgagcagggctggccagccagactggcacacattgctgtgggggccttctgtctgggagcaactctcgggacagcattcctcacagagaccaagctgatccatttcctcaggactcagttaggtgtgcccagacgcactgacaaaatgacgtgacttcagggaagcctggacacccgaggcacctggaccagctatgggtagttctgtgggtggaacacattctgtgtaagagccccactgagggctctgcagcggagtgacagcaaccccagagatgaggcaccagagagtgccactgcatgagacacctgtgaccattcgaagtctgaaatgcggggggggagtttcatttttaagtgaagaccaaaagccctttaaaaataatagttttttatcattttatagtaa

SEQ ID NO: 57330 - DNA, 1551 bp, Homo sapiens
ttttttttttttttttttgaaagctataattatttatttccaaagagtttaaagattaaacttccctcaaaacaaacaaaaggcaaggtaacatcccaagctgtgaggggctgagtctctcctaggtgcagggcagcacaggaactggctgcacaaggccagagaggttacgtggcggctctcttcaaattagaccacacagagcgcttcattccctgtgcagtcttcacatcttcccagtccagtttgacgtctggaacctcatcttctggctctggatccttcctcaagggcccccggggggacgcaaccacaatgggcagagggccacattcctcccggatttccacaacatggaggcccttcttatcagccagctgttgatgggtttcctgtctggagagcccacggaagaggccctgggtgaggctgagcatattaatggacccagagaccttggcatacatgtctttgatgccaatgagccggcagatggtgatgatggccctgtggcagcggaggccgtaacctttgggttgtttcttcatcttgatatgcgtccttttaaatcttaatgaaatatcatggaatattgtatggtcttcatatcgttctatataatgcaaatggtgaactgctctgttctttgctttcctgaaagcatccatccgatcagtagctttcccaatagaaaaacctgcagctccttttccgttccccacagccaccaagacacggatcgatttctttcttccctctttcgcagtcatagtgaaaacgtttcttacctcaagtatcctggtatcaaaatcctcatatgtttctccacagggaccagggtcaggggggccaagacttgatgcctccccatgagtttccactccatcctcgctcccgtttaaccttcatcttcttctttcggtcccactcttctctctgctggatcatgtctgcctccaccttctcctgctcttccttgcttctttgggcaatggtctggcactgctccatttttcataagagggacattcagtccgggccatagaaaaccataacgcccttcacccaatgatctgacccctgttcagatcctttcttttcttctttttagttcttttgcctcttcctttttttgctccagcaccagtctctgctaaagcgcctttccacagctcatctgcagtcaatttagtgaagaaactatatggtctatactgctggctcatcaggtgactgggagaagaaatacagcattgtgtctgcagtgcacggctcaagctggcgtagggatgggtgtctctggttcccagtgatgacaaatggccattgccgagaacactcttccatgccaaaatggaagctgctggtaaggtgtttagggaacactgcctccccaataaatgacctgccgtcccgctacacagcacggggaggcagcccacagcgcgcaccgggtttcgccatgctggagtccgagccgcgcctcggccttccggcccagggcagccttgcccaccgcctaccgcgactgctcctcgtcaaacggcaagc

SEQ ID NO: 57331 - DNA, 4083 bp, Homo sapiens
  misc_feature (1)...(4083): n = a,t,c or g
agcaacggcaagggcccgcagccagcaccgggcggagagggctaccatggggaaaatcgcgctgcaactcaaagccacgctggagaacatcaccaacctccggcccgtgggcgaggacttccggtggtacctgaagatgaaatgtggcaactgtggtgagatttcggacaagtggcagtacatccggctgatggacagtgtggcactgaaggggggccgtggcagtgcttccatggtccagaagtgcaagctgtgtgcaagagaaaattccatcgagattttaagcagcaccatcaagccttacaatgctgaagacaatgagaacttcaagacaatagtggagtttgagtgccggggccttgaaccagttgatttccagccgcaggctgggtttgctgctgaaggtgtggagtcaggggacagccttcagtgacattaatctgcaggagaaggactggactgactatgatgaaaaggcccaggagtctgtgggaatctatgaggtcacccaccagtttgtgaagtgctgatccctcttccttcccagttgcccttaagaactgagaaaggacaaagtactctaagcagcagagcccacagaggctcgttcctttgacccttgtctcctggtggctatacgaaaccttcacaatctgcatgctggactttattacagcttcccaagccccatcaataaagcccctgttcacgctgcactggtgcatgaaggtgaagtaaggaggcagctactccctccacaaataagaattcgtgcagcagcagttcactccttaggaaaatgaagagtatttttaaggagatggtatctccccagtcaagggcaagtttacagagatgaaaccgcgatcccaccatcactcaatgagccagaagccaatggtgacgtactgttacctgaacttactgaacttgctgttggaaagatctttgtgaggattaggaattaggttaaaagaaattaagaaccatcttcaagcaaaaattaaactttatttctgcttaaacaataaatacacctgagttagttttccaaacctttcctcctgattaaatgcccttaaaacttaaatctcttgttatcttcagttgtgatctagtcccaagtggaaattacgtttagctttaaaaccatgaatttaaagctcaagcctgtagctggctgcctaggcagcttatgattagtttcacagaatagcacccactggctacacaggccccagnnnnnnnnnnnnnnnnnnnnnnnnnnnnnnnnnnnnnnnnnnnnnnnnnnnnnnnnnnnnnnnnnnnnnnnnnnnnnnnnnnnnnnnnnnnnnnnnnnnnnnnnnnnnnnnnnnnnnnnnnnnnnngtagctgggannnnnnnnnnnnnnnnnnnnnnnnnnnnnnnnnnnnnnnnnnnnnnnnnnnnnnnnnnnnnnnnnnnnnnnnnnnnnnnnnnnnnnnnnnnnnnnnnnnnnnnnnnnnnnnnnnnnnnnnnnnnnnnnnnnnnnnnnnnnnnnnnnnnnnnnnnnnnnnnnnnnncagttttcatgatgaggaagtgatggtagcttttcatctgcccagaagttaacttttgatggatttgccttctaaggcatcaaacatgtcttctaaggccttctccacacattggagaaactcccgggcattgcggcctgggtaggaagagacattgcagcctatccagttgtcatgaacagcatacccaacaccaaagccatcagagaccacaggggcaaagcccccaaggttcactgctgggctgctcagtgtgctcgtggacaggacattgtggtttatctgcccgtatgcagggtccaggtagagctcaggcaagatgatccctttggctgctgccagatgccgcagagcaaacaagtgtcggtcaaagccctggcccattgctgcttctttggtcagctggccatggtacttggagcactcaaccatcatctgctgaagctcaccagcactgtgcctggagggctccctgacaaaggcctcagagcacctctttgtatagacggaggccgggcggatggtctcagtgcggccgtgcttgaatgcggcagtgctacaggactcgtaggtggccactgtctgcccgtactgccgcaggaaggccatctggaatgccagctgggcaactgcgtcagggctcagcttttgcttcttcaggaattctttgcctcctctctgaaactggacgcagtcaatagtgagggttttcatggtggcatcaaacttttccttagcagctgtgatgccagtctttaaggcatcagtcagctcgaagttgagtttctgcaccgtgacagtagagtcagtggtagctggctggctctgtggagtgacggcaggggtctgagtgctgtctttaaatacttcattaaaaaatctgagcactgccacaccatcaccccaagagtgctcaaagtggacggcagtagagccatccttggcgataatgaggttaaaggatttatcaaaccagcggtttgtgccatccccatgcagcatattgtgggacaagtggacaaggtccttaatggggaagtcatctaggcagagacagaacactgccgagtccactttcctcaggctctcctcattgccactactcatcagcttctgcctgagctctgcccagatgtctcggttctcactggtcaggtatgccaggggaaactcgggggcggggctgctgtctgagagaatgtacttcagatgtgcctggatttccgaggggctcacaatgttcccatcttgatccaggacatcaaagatataaaaatttcctttccttaggaccaggaggtgtctggccttgtcatcagtgaagagttcatcccgactgggtttgggtaaacgagttgagttgaaaagccgaaaatactgggacatatccaggggatacgcattgaccaggtaggccccataccaggacagagaggaaggcacaaagcgtatgagtctcttgaaggtgatagtgtcactttttgcagggttcaagtggaacacttctggctccagaaggccagcccggagtgtcttcagaaaccggatggcagaaacagtcatgttggttgcccgggtgagctggtcattatactcagattttgggtcaggattgaaagccataaatggattaaagttcagaacaacggagtctcgagcagataggtacatatcaaaccagggtcccgaaatgtagcttgtatgtttattctgtttgtccagagcaaccagctgctcatgcagttcttttccaatcccattttcaaaactcttgcaaaattgttctgttttcctgaactggccatcattcaagagaggcttctgtgcactgaggtatctcctaatggtgtcttcaagtttgggaataggcagcctgggcaggctgtcctggtagtgcatggtgggcacgatgctgcgctgcaggtactggccgggcccggagccggcgctgaggggccgactgggggctcccggaccaaccgcggggccccggggccaggcgcgcagcagcaggcggggcaccatcgtcccgggagcctgcggcggcgagaacgcggcaagtggggagttctggagtctaaacacaaggccgccgccgccgttagcgcccaagacactgcgtcaggactcctgaggcacttctccgcccgcaggccacttccggcccctgtaaggccatcggctccgccccggactggctccttccgggcaggggccgctcactgacaggccccgcccactagtaggccccgcccggaagggggccccagcctccgcgttgctcgtctcccttcccttccctaggaggcgggaaaccgagcgccgcagccgctccttccccttttttggagcaagacagaaactggagttggaaaaaaaaaagaaaagctaagaaacgtgattggaatctgataacccaaaatttgatccaggctccatccttgcgagactgtggactaaattttaaacctctatttcctcacctaagaagtagatagatcgtaatgattcaaagtacctacccaaaattctagatatgag

SEQ ID NO: 57332 - DNA, 674 bp, Homo sapiens
cgtgcgtcctagttccagtacagcgtggagggtttaggcagcgtgttctgattctttgcgggacggcgagcgcatttgtgctttgcccgccgcggcctaggaggccttttgaggccgcgtagtcggtgtttttgaactgactctacagcttctggcaggccgtgcggcgccctgacccggcctcaccatgttggtgctgtttgaaacgtctgtgggttacgccatctttaaggttctaaatgagaagaaacttcaagaggttgatagtttatggaaagaatttgaaactccagagaaagcaaacaaaatagtaaagctaaaacattttgagaaatttcaggatacagcagaagcattagcagcattcacagctctgatggagggcaaaatcaataagcagctgaaaaaagttctgaagaaaatagtaaaagaagcccatgaaccgctggcagtagctgatgctaaactaggaggggtcataaaggaaaagctgaatctcagttgtatccatagtcctgttgttaatgaacttatgagaggaattcgttcacaaatggatggattaatccctggggtagaaccacgtgaaatggcagctatgtgtcttggattggctcacagcctgtctcgatatagattgaagtttagcgctgataaagtagacacaatgattg

SEQ ID NO: 57333 - DNA, 1774 bp, Homo sapiens
tttttttcaatagaaaaaaataacttttttatttacaaaaaaatccaaatattggatgctgtaaacaaaattcacaatctgttccctctagcactgattcaaacatgtcagttttttagtccattttccatcaactccttttctgcctgtgacgcagcctatagtcaaaatattccaaaagagtgacccaaggtgcagcttgctgcaacagaacacctcaaagcaggcatgattgtagagaggttggagggagagacagccagcaggcagagcctcctccgttctgcaaggctttgcagcaagtctcgttaacttgacatcttccaactttgtactttaccatttgctttgttagaaagccattattttaacaaaatataacatagagattctttcttagcactgaaaatgctatgctaaaagaaattttaaagaaagattatattcaaatagatgctatatatgaaattactttttttggctttttggtttcacctaacacacttcatcttcaacaacaacaaaaaagcttatttttgaactgacagctttcaacataatacatttcatttacaaaatagttcacaatatttatttaacaagcgttgcattgaaaacaactttatgcacagtgaagcaaccaacaataagcaaacagaaaggggtggtaaaaacagtacgttcacttttcatttccttccttggtttggattacacatattcttccatccttgcatttttggagctacattattagtccatccaataccaaagtgagcagatacttgatcccatttctggaaaggaaatgtccatcttggtgtaggagttcttgaggcagctggatttactgcaaattaagtaaacctttaaaaacggcattgtcacaggctatgtgttctctgacatgccaggctggacaggtgagaagagcctccaaaagacaaaacttcttcctggtttaaagaaacagcacactaggccagataaacacaaaaggaaacaaatcacaggcgctaatagggagtcgggagctgttcttttctctgacctatacacatggctctctctcaccagacattcaaatttttaggccgcacatccacaaagagagacatatatttcactgtgtgttcaactacatatgcacaagactatagtacacacaaaatagaaataaattatataagtcttaaagtaaatgctagaagttgtcttgagtacagcctgttctatatgaataggtgccaggtgctggcacttccaactaagctaccaaccctgaagtaagcaagaaaagaatataaatatttaagaaaataaatcaaagtgtatttcaaataaggctcttccaaacaaaaatctgtgttataaattaacagcaggttattgttatggcagagtcagagacctccagactctttaaaatagtagacgactcatttgtcaagagttagggtaagaaagcagatcaccagctgctcctgtgttcacaagtgctcccctagttttctttcagaaaactttgaaacaactaagcaggcggagctctggtttctgataggtgagtgccaggcttaatctgcaaactgaacaatgtttcctgggaagttgcaattaatttttcaaacccagggcttaagtgagggagactgagccaagatggtagtaggaggagttccttagaaaactgagtggcagtgcagcggctgttgcagctctgacagaattcacaaggaagctgctacagcaaacccatcaggtcctcgtgcca

SEQ ID NO: 57334 - DNA, 1896 bp, Homo sapiens
ctgcaccatggcggcccggcttgtcagccgatgcggggctgtgcgtgcagctccccacagcggcccgctggtgtcctggcgcaggtggtccggcgcctcaacagacaccgtgtatgacgtggtggtgtcgggtggaggcctggtgggcgctgccatggcctgtgccttgggatatgatattcactttcatgacaagaaaatcctgttgctcgaagcaggtccaaagaaagtactggagaaattgtcagaaacttacagcaacagggtcagctccatttcccctgggctctgcaacgcttctcagtagttttggtgcctgggaccatatctgcaacatgagatacagagcctttcggcgaatgcaggtgtgggacgcctgctcagaggccctgataatgtttgataaggataatttagatgacatgggctatatcgtggagaatgatgtcatcatgcatgctcttcactaagcagttggaggctgtgtctgaccgagtgacggttctctacaggagcaaagccattcgctatacctggccttgtccatttcctatggccgactccagcccttgggttcatattaccctaggtgatggcagcaccttccagaccaaattgttgataggtgcagatggtcacaactccggagtacggcaggctgttggaatccagaatgtgagctggaactatgaccagtctgctgttgtggctactctgcatttatcagaggccacagaaaacaacgtagcctggcagagatttcttccctctgggcctattgctctgctcccgctctcagacaccttgagttccttggtttggtccacgtcccatgaacatgcagcagagctagttagcatggatgaggaaaaatttgtggatgccgttaactctgccttttggagtgatgctgaccacacggacttcatcgacacagctggtgcccatgctgcagtatgctgtcagccttctgaagcccactaaggtctcggctcgccagctgcccccaagcgtagccagggtggatgccaaaagccgagttctgtttcctcttgggttgggacatgctgctgagtacgtcaggcctcgggtggcgctcattgggtaagacgataacagagcagggccactcccttctcactttgctgccagaggtcacacctgaactctgctttattcttagggatgcagcccacagagtccatccgcttgcaggacagggtgtcaacatgggctttggggatatctccagcttggcccatcacctcagtacggcagcctgtaagactgtgctgtctgcaaagccaaagccatcctttaacagggctgtgatgtagctgagatccatgcacaggaaaggactgcctgaggtgaagttttccaagttatcacacacttccctggcttttctttcaaaatcttcaacttttaaaataccccccttttcataatcaatcatgtctgtgtcaacagctcggtcataatagtaagagaaagcatagaaggaacctctctggacctcctctggctggtgaagttttcctcgtaccaccctcagcacttcggcatagcagggctcaaagcccacctcccctgccaggcaaaggtgcacaggggtaaggtgagaacgacgctgggggaaggggacactctctgaggcaggctgctggagacaatgagggaacagcaggaaggtcaaggaaagcaggagaaggctgaggcttgggacaagaggcgtcaaaacaaagatgagcaaacgtctgcagcctcaccagtctgtttctccatggccgctctcctgcctaatctgtattcaccagatcatggccaaccttgtgctgctgcctagcattacattccatagcatttgtaagcaagtagctaaagggctcgctg

SEQ ID NO: 57335 - DNA, 1293 bp, Homo sapiens
gtgaactggaccgagcagcagcagatggtgtcttgtctgtataccctgggctacccgccagcccaagcgcagggtctgcatgtgaccagcatctcctggaactccactggctctgtggtggcctgtgcctacggccggctggaccatggggactggagcacgcttaagtccttcgtgtgtgcctggaacctggaccggcgagacctgcgtccccagcaaccgtcggccgtggtggaggtccccagcgctgtcctgtgtctggccttccaccccacgcagccctcccacgtcgcaggagggctgtacagtggtgaggtgttggtgtgggacctgagccgtcttgaggacccgctgctgtggcgcacaggcctgacggatgacacccacacagaccctgtgtcccaggtggtgtggctgcccgagcctgggcacagccaccgcttccaggtgctgagtgtggccactgacgggaaggtgctactctggcagggcatcggggtaggccagctgcagctcacagagggcttcgccctggtcatgcagcagctgccacggagcaccaagctcaagaagcatccccgcggggagaccgaggtgggcgccacggcagtggccttctccagctttgaccctaggctgttcattctgggcacggaaggcggcttcccgctcaagtgttccctggcagctggagaggcagccctcacgcggatgcccagctccgtgcccctgcgggccccagcacagtttaccttctccccccacggcggtcccatctactctgtgagctgttcccccttccacaggaatctcttcctgagcgctgggactgacgggcatgtccacctgtactccatgctgcaggcccctcccttgacttcgctgcagctctccctcaagtatctgtttgctgtgcgctggtccccagtgcggcccttggtttttgcagctgcctctgggaaaggtgacgtgcagctgtttgatctccagaaaagctcccagaaacccacagttttgatcaagcaaacccaggatgaaagccctgtctactgtctggagttcaacagccagcagactcagctcttggctgcgggcgatgcccagggcacagtgaaggtgtggcagctgagcacagagttcacggaacaagggccccgggaagctgaggacctggactgcctggcagcagaggtggcggcctgaggggtcccgggaggcgggtgcaagccttcgctgtgccgagccttgtgtttctgacgcaagccaaatgaagaaaagcaaagcttaaaaaaa

SEQ ID NO: 57336 - DNA, 1670 bp, Homo sapiens
gtcccccgtagcagcgcaggccgggaagcttctgcgagccctagcgctgcggccccgcttcctggcggccgggtcccaggcagttcaattaacctccagaagatggctgaacctgcaggaataccagagcaagaaactgatgtctgacaacggagtgagagttcaaagattctttgtagcagacactgcaaatgaagctctcgaggctgctaagagactaaatgcaaaagaaattgttttaaaagcccagatcttagctggaggaagaggaaaaggtgtcttcaatagtggtttgaaaggaggtgttcatttaacaaaagaccctaatgttgtgggacagctggctaaacagatgattgggtacaatctagcgacaaaacaaactccaaaagaaggtgtgaaagttaacaaggtgatggttgctgaagccttggatatttccagagaaacctacctggcaattctgatggaccggtcctgcaatggcccccgtgctggtggggcagcccccaggggcgttcagacattgaagaggtggctgcttcaaacccggagctcatttttaaggagcaaattgacatttttgaaggaataaaggacagccaagctcagcggatggccgaaaatctaggcttcgttgggcctttgaaaagccaggctgcagatcaaattacgaagctgtataatctcttcctgaaaattgatgctactcaggtggaagtgaatccctttggtgaaactccagaaggacaagttgtctgttttgatgccaagataaactttgatgacaacgcagaattccgacaaaaagacatatttgctatggacgacaaatcagagaatgagcccattgaaaatgaagctgccaaatatgatctaaaatacataggactagatgggaacattgcctgctttgtgaatggtgctgggctcgccatggctacttgtgatatcattttccttaatggtgggaagccagccaacttcttggatcttggaggtggtgtaaaggaagctcaagtatatcaagcattcaaattgctcacagctgatcctaaggttgaagccatccttgtcaatatatttgggtggtatcgtcaactgtgccatcattgccaatggggattcaccaaagcctgccggagctagaactcaaggtgcccctggtggtccggcttgaaagggaaccaacgtccaagaggcccagaagatactcaacaacagcggactccccattacttcagccattgacctggaggatgcagccaagaaggctgtggccagtgtggccaagaagtgatgtctttgtcctgatccaatggagaaagaaagccatttttccataaaaagggatggttcatcattgtgaaagaaatggttatctcattggggaagaaaaggggagggggaaggcaagaatcactgaaaaatcttaaatctgtgttttctggaataagatatctagacagcctaaatctgattttagtctttataaaaataatatcttgtgttctcatacttttctgtcactgtaagcctgcccagtaggcagtgttttgcagactttggggagtggtctatgtggccaaatattgtgtgtatagacagaatttgaaatcaagtcctgcttcatttacaagaattttggtgggcatctaatcctacataat

SEQ ID NO: 57337 - DNA, 414 bp, Homo sapiens; identical to SEQ ID NO: 23185

SEQ ID NO: 57338 - DNA, 1209 bp, Homo sapiens
gagaaatcgtttattttagtaactgtctgatctttttcaactttggagatggaataagttaaaaatttgctatttttcctgtaacatctgctgaacgggcccacccacacgttgtatattcagagagagagagggagtcaaggtgtgaccgtcgaccacagccagtgtcaggcctctgcctctgggcctttgctttgtggcctcactgcaacacaaagctccaccaggaggctggttcacgtcccctaccacggaagcgaggtcccagaaggccagcggtggttccaggagcaacagctcccaaaccctgaggcaagggcaaccgatcgccaggaccaggaagcatcacccaggagatttgggcgcccacttccacctcttctctcagttttggacaagtgacaaaccattttgccccctcactcttcttttttaactgttaaaccaaaggaaagcacaaatgaaggaaatcctgtgtaaagcattgagaaggaaagaagcctggagcagcctctcctgtccacagccaggggttaggtctgcaggcccgtctgcggtccccatcgagcatcaaggggacgctgtgtgtgctgcaagtgaccccgaaaacaaccacagccgtcacatggtcctcctgaaagttggggcaccctcctctcagcaccaaaatggcccccactcctttcgtgtcctcccgctatctccaaatcggacgttctttctagctgagatttttatttttccacatctgtagtgccatgaagcgattctgtctttgacttccaatggcaaacctgggtgatcgggaacaagcacgttgtacccttggctggacatggccaagacacaaggcattccacggcggcaagctgaccgcacagcagtctggcttgattttcagccgtcatcattgggttctgttttgacagctctgctgtcccatagggactgcgactgggaccaggtcaaccacgccaggggggtgtcaccagccttttctttttttctttcttttttttttttcctccttaagctgctgtcaatccaaaccattggcatcatcgtttcttttgaattaaaaccaacatatcagcaatagtctgctctccccgggaatctctaacatgctctgtttacatcgataaatgcacttaaggaaaacaaacaaattaaagctcatcttaaagtccaaaaaaaaaaaaaaaaaaa

SEQ ID NO: 57339 - DNA, 2985 bp, Homo sapiens
ttttttcctcttccacaggaaaagaattattttattaagtattttaaaacaactacttaacatttactcatagataaaaatatttacaattttacaccttcaggaaggctccaaaatataaacactgtacctctccctagagaaaaaaaaaattattcttctcttcaaaaacaggaatacattcattttttctcactgtgtgaatcaagtaattatacaaataaacatctgaaacattttcctttttaatatatttatataatatatatttataacagctttacaaataaaggcaacgacttaataccaaaataaaaacaggaaaagaaaaagttaaaacacgatcagcaatcaggcatagtgcattttgaaaagctgctgcggagctggctggacacatcgggaaaacaagtactctggaccaaaaataaaacttctttgaaggagacggaatcctttttagcaataaggacactccatatgccgttgggcaagaggaattagcctacagaaaggatctggcggtgccaaggcttggttaggcctttgagaagctaagcttggttaaaaggagttttaggatggaattgaaaactgagtctagttctgtttgaagggggcagctttttactcagctttgtgcactttggggtgctcgctcggggtgtccgcatttctcagaccttggtttggttccctgcacagtaagtactaatggttaggcctagaaacaggtgccagaagcccagggaactcctccctccctccggggcagctcagcttgtacaaggggcccattttcagttccttagtaagctaatcactacgaaagcctgagtagggaactacattctctttattcttccgaggcaggggtggggagcagacctgcggaaacctccccaaaccactaccgtgctatgccagtgcctgctacctccccatgttagcagaaagctcggtctgactgctctctctccccgacgtctggtgagtcacgtcgacaataaaggcaaaagggtggggtcctaacagctggttgggagctgagccctggaaagccctcttttgaaagtaccttctgatcaaagccacagacccagctcccaaactgaagagtgactcacagaccaagactttgaagcttttgaaaatccagctgatgtgtatcgaagggggctattctctgggtggggaaaagcccagacgtctgctacaatcccccccaagtctcctgatgtcaagcaatccttcgtgacttccctatgccaaaaggagctttaaagtcctataccaacacgcaggcacacatgtgcacgcacacgcacatacacacacacacacacacacacacaccctgaatctgctctccatgcctcagattatctcagtatacacaatgcaacaatcttgcagcattcacaaaaacttttttgttgctttttaggaagtagcgaggaaggaaagcaaagcagcaggatcccctagagagtttagtctttggtttctaagtttaaaggggggattggcttcagagcttggagcaagacagaagagtcgacggacggatgagctggcaagggagaagggagtctctggggcatgagcaagggagccgagatcttgtctgggttcatgaagctagagagggctgcggcagaggcgttgaggcctgggtatagcactggcactgaggtgggataccagcacttctccagcatgggcaggtaggcagtcgctgaaggtgggatcaggtagaagggcaggcagaaaggaggctggtgtgggtgtgggcccaggaacggggagctgatcaggtcactgctagtgaaatggccttcatcatccgaaagctgcatccggttcttttttgtggggggttcttcggactcttgcttaattgcgccgatcctttctcccatcgtgaacctgcgtccgtggtcacttttgaagcacggctgctcactgcgcaagtcgcccttctccgattctcctccatagccactgtctgtgtccgtgtcgctgccgctctgctccccactcgagtgagcgaaagtccgctggatgactggcacgcagtttttcccaggaccttccgaacctttggccggagagctgggtttttccttgaagtccatcactttgggagctgggtctgatggcttcctggaggtaccaccctggcagcagctccgagaccacccggtgggaggtgggtggacaagctggcgaagacttcaggtcccgagtgttctcgtgcttgggccagatactgaagcacctcccgggcacatgtctggaaacctgagcagaacatctcttgacctgtttcgacatttctccctgacagctcaccagcttgtaaaccactctgcagggcaatgattttctgctgctgctgatcaattaggtttgttagtgctttcacatgcttcaaggtaagttcaagaaccactgctttttccaagtgacccaaagttgtaagtttgagatgttcgggtaggagatccttcagctgggcgatgcactcgttaatccggtcacgtctctttttctcgatgagccggtgcggcaatttgtaggtctccttgctgtcctcgctccgctttattccccgtcttgacttgtacacttggtacatgtgggcagggtacatccctggtaggtctccgtgctccagtcccggtgctttgggcaggcaggcggggggtggttgcgcgctggggatcgctccatggcgcggcgagccggggccactgcgcgctcctgtctgcactagcggagcgtctggatgaggactgccctggagagggcttcgggggtctctccgcagatgttcctctgagtctgagctctttgaaatcccctgggctgctggaatcttcggctttgagatgcagcttcagttgggggcgtgcatggcccggtgtccccgcgcgctctggctccgactcagcgcacagactggcggtgtgtgctcccact

SEQ ID NO: 57340 - DNA, 1405 bp, Homo sapiens
ggacattgtcattattcttcctccatctatctgattccattccttccacacccagctaaagttagaggagatacatatagaatctattttagattattgttaactatttgcatcaaattaagatacacaaatggccatggatgttgccttagccttaaacattactaatagtttcacatcacctcactgcacgcatcgaaggatctgatttgaatttgtaaaggcaattcttttgagagcaggattctccaggctaaatcaaaggcagctaatcctgtccctgaaggagcagctaggggaacctgaggcttgttcttgaagtgggcaagctggccaaaatattggaacacacagaaccaaaccaggtgtgttctacacctgcatgagtgaaggatttccacgtagacacctaggaagagccccgcatgccctagactcactccagaggaaggattgatttgcaaccagaaagggagctgaaaaccacggagctccattgggctctttcatttccaaaaggggaaaattaatggaattccacgtttgcctttttagagtttccaaatcaaacatcttttcctgggataaaatctattttttaacaatctttttattatttgtaaaagatataaaaacaactcccatcagtagcaatacaaggttatacattttaaccagattttctcaggccttttttggatacctttagtagttaactctcttttgtcaaaccctcttgtatataaccatcgcacaacatacagaaccctgggggaatacagccaaggggactgctcactgtggcccgtgtattcattcccacaggctgcactgaaataacctgggtaaacaacaccctcctccattttgcgtctatttcttctatttgtgcttctttggggggtaggggaggaggaaacataactactgttccaggtaacgtctgtatcatacagttagtgttgccagtgaaacgttcccagatacaaagaattgtgcttttaattccatttcacaatctgttttgtttttttttttttgtcattgtctgaccaaaattccttctgcacatgaggccagtatagggcaacgtcacatttgtttgtttcaaatatgcagtgtggtattttgtttactttgcatttaccgtgagcaaagatacttcttggaatggctgcagtgaggccgtgtcattggctcacaaaagtgactcataggtaatttctgtgtttgcattccactgctctgctccctaaggtccttgactttctccccaggaattcacttaaaaagggactgagcattgtgtcaacctgttgcagtgtttttcatatatgtgttcactctaaaaatgcaaataaagactgcttccttagagggtgctcatacaaaaaaaaaaaaaaaa

SEQ ID NO: 57341 - DNA, 1154 bp, Homo sapiens
ctccagctggggaatgagccaaactgtctcaaataaaaaaaaaccaccaaaaaagaattttaactacggagaccttagatagtagtttgtccttttatgacaggaaaactgagaaggagaaagggagagtgtcttacttaccccatgggtcacacaatgcactctgccttttcctattttattcaaattcaaaaataacatgttgtgctttaagctgatttcgtagctcactcactcatcagcgacagccagccatatgaagactgtgagatagagaacttggctagctgcactcacgcatttgcttgaggtgatccaacttatagaataaagtatctagaaaacgaagaaccacttcatctcccatcccccatcaaatgatgcctgtgagactaagtccgaaggggactgatataaaatgcttctgcccagcatggttgtgcagtttgttcactgcacaagggcacttggccaagggagtgagtgggactgaaaatcctgcccctgctccatgctgagccacatacaaagtccccccagtatattgtggggcccttctgggcagacatggagagcttctgaaagtcccacatgcatggaattattttcaagaccccgggtatgtggtctgtggtggtggttctccctgtgattatggactgagatactcatttagtcctaataagaccagagaagtacattgtgagatacgtgggaaacggctgcatcactcactgtcttgtgcatgtgtctccccaggggcattttcagatttcttgccacggagggggattgctcttcgcgaagggagagtcaggtacattggaggattcattgctgtggccagggaaagcagaggacatgcaaaattaatatttccctttctatcttctaggatggactttcctcatttggacagccgctctggtttaaagatatgtacaaacctctcagtgccacaagaataaataatcatgcatggaagctgcacaagaagtcatctaatgaggacaagatcctcaacagggaccctggggacagcgaagccccaacggaggaggaggagagtgaagccctgccataggaggagaacacagcccacctcaggcctcctgcaaaaatacatagaataaacaacgaacagttactaaatg

SEQ ID NO: 57342 - DNA, 636 bp, Homo sapiens
gaagcggaaaaacaattgccatggtaaccacattgagatgcaggccatggcagagatgtacaaccgtcctgtggaggtgtaccagtacagcacagaacccatcaacacattccatgggatacatcaaaacgaggacgaacccattcgtgttagctaccatcggaatatccactataattcagtggtgaatcctaacaaggccaccattggtgtggggctgggcctgccatcattcaaaccagggtttgcagagcagtctctgatgaagaatgccataaaaacatcggaggagtcatggattgaacagcagatgctagaagacaagaaacgggccacagactgggaggccacaaatgaagccatcgaggagcaggtggctcgggaatcctacctgcagtggttgcgggatcaggagaaacaggctcgccaggtccgaggccccagccagccccggaaagccagcgccacatgcagttcggccacagcagcagcctcccagtggcctgggaggagtggactagccggtccccgcggcagcagttttcagcctcgtcacctgagcaccctgagctgcatgctgaattgggcatgaagcccccttccccaggcactgttttagctcttgccaaaccttct

SEQ ID NO: 57343 - DNA, 1006 bp, Homo sapiens; identical to SEQ ID NO: 13799
  misc_feature (1)...(1006): n = a,t,c or g

SEQ ID NO: 57344 - DNA, 1456 bp, Homo sapiens
ttttattaggagtgttctctttatttctctttggtttcttaacacaaaagacatgcattctataaataaaaggaactaagattttctgggaaaccataaattgggaggaattcccacagtcacacctctgtggtcaagaggatggtcttcagcccccatctggctgtaatctctgatgaaatccagaagagaaggcccgtgtgttatccaagaaggtgaaacactcaaggacagtgaatgccacagtcctctgctcagagctgggctaggccccaaggcccactgagtacaatgtctaccctatctccttgttacatcctttttacaatatccttgggtgatgcttcttttcatggggctattggaaaggctccaacaccaaagagccagaccagccatttacgaatagccattcaccatcggactgaggaacctactgggagagtgtgaatatgttggtgtttcctgacttgtgctcagagcccagatcaaaacactggcttgatcttactttgaaacatcgacctcaggtgcagcagtgtaaattctacaccaggaggtgggattggactcaggaagtccactacaagagcagcaggccatggtagaaaatgatctgccatacccagtggcaaaatctgggccagtatcctaaggacccactcagtagcccacagaccgattcttaataccttcacaatccaggcttgttggtgctacttcaaattcacaaaagaaaggggcttataataagacaagcactgatacactcctaacaggaaatgcacaccccacccaccttccgagtctacccctacaggcaaaccaggaaggagggagaaatgctggagccctaccacgagcccaggttaaacgacatccgatatcagattgttgagacgttaaaaataaaaatatcattttcaagtgcttgtagcagaggcctagctcctaagttgtaggtaacaaaggtacttccctctgaatacatggcgattgccacacactggtaaacctgacggtcctggggtgggggagacaccccaggctccacattgtgcctttctgaacaggcttccaggccaccccaggcaggcagcaaaggataggaaaccaagcaggtggagactggagccctaagactcagtcttgggttacaggaattgaatcttcttttagtctctactggaagaattttagaaaaccaattttggcagcagcagttgaaggacagccccactgcccagtgcactggcaagagaaaatgtcctcctctttgagtcccgctgtgctacattaggtcctatccagggaggaggaagcaatatgaaatctttccaaaaggtaaaggtcatttgccaagattagaggaagaaatataaaatctgttctttgcagcagcaagagattctttcggcctttagttctttatgtcataaaacgccagctgtgcttg

SEQ ID NO: 57345 - DNA, 989 bp, Homo sapiens
cttccccgcccagcatcagatggcactcttgcgccatctccaggctgatgacgccccgagtggcgacgctctagtcgccatttgtctatggcaggcagggtggctgccttagctgccggaggttccgcactctctaaggccccgggtgaagccccacctctgctgcgcgcagcctgcggtgcgggtcatggcgcggctaccgaagctggcagtctttgatttgggtgagggacgggaaggggagaatttcgtaaggtgctctccttttccacatccctaacagcagctcccgaatccctgcatctcccgccccaggctgaaccttccctctccttcctctcgcagattacactctctggcctttctgggtcgacacgcacgtagaccctccgttccataagagcagtgatggaactgtacgagataggcggggccaagacgtccgactgtacccagaggtgcctgaggtcctaaaacgattgcagagccttggggtgcccggtgcggctgcttcaaggacaagtgagatagaaggggccaaccagctactggagctctttgacctcttcaggtactttgttcatcgggaaatctatccaggcagcaagatcacacactttgagaggttgcagcagaagactggaattcctttctcccagatgatcttctttgatgatgagaggcggaatattgtagacgtcagcaaactgggtactgagtgatgaggaacagcccatttggggtccctaggagggattaggtgttacctgcattcacatccagaatggaatgaatcttcaaactctaagtcaagggttagagacatttgcgacagccaaactgggcctttgaggtccagccttgaggagagcccatttgaggcctaaactgaaaggaaatcaagaaggcattttcaggtgcatttgtaatttattaaagttcatctgtgtgtgacagaagagattttaaaaaaaaaaaaaaaaaaaaaa

SEQ ID NO: 57346 - DNA, 4621 bp, Homo sapiens
atgtgctccagttccataatgcctcctgctatggcagacatcctgacatctagtgctgtggattcacatgatagcatctgactggctcccataccctgtagatctcctttctgcccactgtgatttatatccagttggaggtacctctggaagctaccatttcttatattaagcagatgttatggaagcaagttcacaattacccaatgttcaacctccttatggatattgactcctatatgtttgcatgtgtgaatcagactgctgtatatgaggagcttgaagatgaaacacgaagactctgtgatgtcagaccttttcttccagttctcaaattagtgacaagaagttgtgacccaggggaaaaattagactcaaaaattggagtccttataggaaaaggtctgcatgaatttgattccttgaaggatcctgaagtaaatgaatttcgaagaaaaatgcgcaaattcagcgaggaaaaaatcctgtcacttgtgggattgtcttggatggactggctaaaacaaacatatccaccagagcatgaaccatccatccctgaaaacttagaagataaactttatgggggaaagctcatcgtagctgttcattttgaaaactgccaggacgtgtttagctttcaagtgtctcctaatatgaatcctatcaaagtaaatgaattggcaatccaaaaacgtttgactattcatgggaaggaagatgaagttagcccctatgattatgtgttgcaagtcagcgggagagtagaatatgtttttggtgatcatccactaattcagttccagtatatccggaactgtgtgatgaacagagccctgccccattttatacttgtggaatgctgcaagatcaagaaaatgtatgaacaagaaatgattgccatagaggctgccataaatcgaaattcatctaatcttcctcttccattaccaccaaagaaaacacgaattatttctcatgtttgggaaaataacaaccctttccaaattgtcttggttaagggaaataaacttaacacagaggaaactgtaaaagttcatgtcagggctggtctttttcatggtactgagctcctgtgtaaaaccatcgtaagctcagaggtatcagggaaaaatgatcatatttggaatgaaccactggaatttgatattaatatttgtgacttaccaagaatggctcgattatgttttgctgtttatgcagttttggataaagtaaaaacgaagaaatcaacgaaaactattaatccctctaaatatcagaccatcaggaaagctggaaaagtgcattatcctgtagcgtgggtaaatacgatggtttttgactttaaaggacaattgagaactggagacataatattacacagctggtcttcatttcctgatgaactcgaagaaatgttgaatccaatgggaactgttcaaacaaatccatatactgaaaatgcaacagctttgcatgttaaatttccagagaataaaaaacaaccttattattaccctcccttcgataagattattgaaaaggcagctgagattgcaagcagtgatagtgctaatgtgtcaagtcgaggtggaaaaaagtttcttcctgtattgaaagaaatcttggacagggatcccttgtctcaactgtgtgaaaatgaaatggatcttatttggactttgcgacaagactgccgagagattttcccacaatcactgccaaaattactgctgtcaatcaagtggaataaacttgaggatgttgctcagcttcaggcgctgcttcagatttggcctaaactgcccccccgggaggccctagagcttctggatttcaactatccagaccagtacgttcgagaatatgctgtaggctgcctgcgacagatgagtgatgaagaactttctcaatatcttttacaactggtgcaagtgttaaaatatgagccttttcttgattgtgccctctctagattcctattagaaagagcacttggtaatcggaggatagggcagtttctattttggcatcttaggtcagaagtgcacattcctgctgtctcagtacaatttggtgtcatccttgaagcatactgccggggaagtgtggggcacatgaaagtgctttctaagcaggttgaagcactcaataagttaaaaactttaaatagtttaatcaaactgaatgccgtgaagttaaacagagccaaagggaaggaggccatgcattacctgttttaaaacaggagtgcttaccggggaagcccttctctggacctggcagttcacccctggaacccatgttgtttatcctctcagaactctatgttgaaaagtgcaaatacatggattccaaaatgaagcctttgtggctggtatacaataacaaggtatttggtgaggattcagttggagtgatttttaaaaatggtgatgatttacgacaggatatgttgacactccaaatgttgcgcttgatggatttactctgggaaagaagctggtttggatcttcggatgttgccttatggctgtttagcaacagggagatcgctctggcctcatttgaagttgcggagcacctctggaaacaatttgcttgacattcagctgaacagtagcaatgtgggctgctgcagcagctttcaacaaagatgcccttctgaactggcttaaagaatacaactctggggatgacctggaccgagccattgaggaatttacactgtccctgtgctggctactgtgtagcttcttatgtccttgggattggtgacagacctaattgccaacatcatggtccaaaaaactggccagctcttccacattgactttggacatattcttggaaatttcaaatctaagtttggcattaaaagggagcgagtgccttttattcttacctatgatttcatccatgtcattcaacaaggaaaaacaggaaatacagaaaaagtttggccggttccgccagtgttgtgaggatgcatatctgattttacgacggcatgggaatctcttcatcactctctttgcgctgatgttgactgcagggcttcctgaactcacatcagtcaaagatatacagtatcttaaggactctcttgcattagggaagagtgaagaagaagcactcaaacagtttaagcaaaaatttgatgaggcgctcagggaaagctggactactaaagtgaactggatggcccacacagttcggaaagactacagatcttaacgatcagccttcgctcctaatgtatttgttggtttcatttcattttcattttgcacttgcactaaattgaacatgaccctgttagagatgttataaagggaatgaaatcctggaactcagagttaaattaagaacaaggcatcccacagaacctaatctgaacaatccccgatgattccctctgctttttgaatgcttccaagacttatcatgaaaactgtcaatggataatcatttcctgctgactttgcacgccaaggaatgcctactagggattgtttccgtttttgtttgttttttcctaatatttggtacttcccagaatggtgtaaatacttcttttcaatgttgtgaccaagtattgtcactcagccaacaacttttccacacctgggggttggtggctgttcttactgtccaaatgaagctaaaaagaaaggcatctttcttcccttttaaaattgtgtaaactgcaaattataatataatttgaatttatgattattttccagaagaaatcttgtaaacctggggatactcattaattcttttgttaatatttatttccatgatagcatcattccagccagacttgctgaaaatctactggtgaggcaaatataatatatataaatatgctacatatatatttataaaatttctagtgggagttctatataaatgtttctttggtattcttcagcctgtgatttaaagttttacaaaaagcagagctttttcctaagttacttttcagttaggtaactgtgtgatccagttcttccagctgcttctataatgaggcacatattaatacagtttttatatggtatctatgaaagagttcacttcatagagaataatacttgagcaaatgtatccaagaaagcaagcaaatgaaaagaaacctatttatggaataaactccagatctgaaattcagtattttagaaaaatgcccagctcttcttactgtatttattaaaacttgtaataatgtgatttttttcaaggatattagttcaaattgaaatggtttcacgccacacggaaatctttaagttatttgttgaggtaccatatatttagggtgctaggggcaagtaatgttaatatgtgcaataggaactactggtttgaatgtgtaaatgggtgatctctctgagtcctggcaacatccagcaaaactactgcttattctccaaagaatattgggagctctcaatcctcggtgatatgggaaagagaactgagtatttgccctatgactgagctttctataggaattttattaaagaatgtttaattttgttgtccttcttaatgttctcagtcaaataaatgagtgagctggtttcggctgctcttggaatgaaaaaaa

SEQ ID NO: 57347 - DNA, 1956 bp, Homo sapiens
tttttcagagacctttttttattaaatgtgtaaaaagcagttctcatcttacaagctcaaaatcagacgaatgtatgagggtgtataattgttatatttataaactgtatcacccaaaaactcaatgaggacacaatctatattacattcaacatttgcatatttacatgatacttactgcaaagtaaatacaaaatgaactcccatcattttagttcagaacacaggtgatataatttcaaaacaaaggcaatttttttcaacaaagaacagaagtctcccaagtaccaattcactattttgcaggaaaaatacaacactaattataagatttccattccagtttagtcagtaagatacgttgtttgtttgtttgtttgttttgtttttagaaacagggtctcactctgtcatacggggctgggagtttcagtggtgcgatcgaattcactgcagcctgaacccctgggctcaagaatctcccacctcagcctcccaaagcactgggattacggtgtgagcctcaagtctagtaaggtatgtttttgttactgaaatacagctaaagttttggattttaatcaccaaaataacagtacttctggtttacaattgactttaaaataaaggatactaatatatatttattttcacattttttttaaatcttcaaaactgaaatacaattctgaaagtatttgtgccttgtcatttgttcaataaatttgatttgtttttaaacaggtcacaaaagttcaattagctaaccagaattctatatctattgcctgtctactggggttcagtcttaagtctgactatatcaaaagcagcagctcagaatttatttcataaaattaatcccaagagttactgggtagcttttaaagtatttcatcgcttataatacaactcactagatagatagtctatactagtgactcgtgacatcaaaattatctggagagttttttaaaaaatacgtaggatccacatcataactacactaagaatcaagaatgtctgtattttttttaacgttcccaggttataatgctatgcagcctagcgtgggaaaccccaacgtaccactaagcctgtggttctcaacttttcaggtgcactggaatcactgggggaaactttaaaaacaaaaaagcaaagcaaaacaaacaaagaaaacagatgtgcttcagtaggatagagaattgtgtgcagggaaccagcattttaaacaaccactgcagttggtcccaaatgactcagaaacgctgtactacctttgtcagatatcatattataatgagtacattcagcaatttaggtgacattgtctgcaagccctaatgaatcctgccctaggcagttttagcaagtgtttgagggcaacactcagcctttcaaataaaatatatttatattcttaaatattaggtcaaagtcaactgaattgtgagaccatcattcattaaagaaggcaaatgcctcttttccaacaatttaaacctttaaacaaaccagttcttagccctcaacttaaacctaatgctttctctatcgttagcctgatatgtgatcagaggtagtgattccatcttaccagaaatgtattgtggattataaaagataccattcatacatcttcacaggctctgtacagtccctatgtaatggagattggagaccagttggatattaaataatactgtaaaacagtaaacaatacactcttgattttaaacaatgaaacctcgtatttccctcaaacaataaattcttacatataatatccagaaaaaaattctagaaaacactaaaggtatcacgctgcctcttttgtgaagctatttactaatttttcaccatccctgtaattatctataaagtgggtatttggtgtacatcattccacttcaagaaatttttttttcttttttttggagacggagtcttgct

SEQ ID NO: 57348 - DNA, 441 bp, Homo sapiens
ctgaaaagcaaaaaagagaatcccacttgggcataatctggtgaaattcccaaaatccagccaccagagaaagagaatgaaacacaagaattgtgttacaggccaggtgcgatggctcatgactgtaatcccagcccttcaggaggcagaggatcacctgagtccaggagtttgagaccagcctgggcaacatagtgagaaccctgtctctaccaaaaaataaaaacaaattagtcaggcatggtagccggtgtctgtagtcctagctactcaggaggctgaggtggaaggatcacctgagcccagggaggtcaaggctgcagtgagccgtgattgcgccactgcactccagcctgagcaacagagtgagaccctgtctccccgcacccttcccaaaaaaagtaatacagagaaaagcaaagttaaaaggcaaccatgaaa

SEQ ID NO: 57349 - DNA, 962 bp, Homo sapiens
cggacgcgtgggctaatattactggaattgattactctccttctgcaattcagctttctggaagtattatagaaaaagaaggtttatctaacattaagttaaaggtagaagactttttgaatctctccacacagctgtctggatttcatatttgtattgacaaagggacttttgatgccataagccttaatcctgacaatgcaattgagaagaggaagcaatatgtgaaatctctctccagggtgttgaaagtaaaaggcttttttctaataacgtcatgtaattggaccaaggaagagttgctaaatgaattcagtgaaggatttgaacttctcgaagagctaccaacacccaagttcagctttggaggcagatctggaaacagtgtagcagcattggttttccaaaaaatgtgagactttttcttggacgaattcaggtagctacacagaatctacacagcaaagttaacctgacacagaaaatccttgtgcaaataaatgcttagtaagtacacaggatgcacatgttgaatagagtatactggattggtgaaagaaaataataataatgagcatctaagtggttgggttttagagatcaatcaagaataattttaattttcttttgtatttgaaatgtaaatagttttcttttcgattaaaaaaatttcctataactgctaaacagttaaaaactttaaagtagtaaatgagtttatagaaagcatgtattcttgatttttgtgccttggtaaagttgataactatttatgaatatttgaccaaattattccagcatcagaataataagcaaaataactttgttagtgttttgttagactgtttatgaaatataacaagaaatactattttgtgttggatggcggttatttttaaacttaattaatacctgtgaaaaggcctcttacctttatgtatataattaaacaaaatcagaga

SEQ ID NO: 57350 - DNA, 407 bp, Homo sapiens; identical to SEQ ID NO: 23200

SEQ ID NO: 57351 - DNA, 1058 bp, Homo sapiens
accagctatgacatgattacgaatttaatacgactcactatagggaatttggccctcgaggccaagaattcggcacgaggttggtctcgacacctggactagccggggttgtatttggaaacgcggagtgacgtttttccgtgctgtgtaggggctaacaatggacacccagaaggacgttcaacctccaaagcagcaaccaatgatatatatctgtggagagtgtcacacagaaaatgaaataaaatctagggatccaatcagatgcagagaatgtggatacagaataatgtacaagaaaaggactaaaagattggtcgtttttgatgctcgatgaatgctgggaattcagaggaatgtcttcacttatacttgggatttgctctcttcccatttctgattgttgtatagctttcgattttgcttacagtagttcccccttatcttcgggagatacattccaaggcccccagtgaactcctgaaacctcaaacagtaccaaacctttatacactgtttttttcccttattatattattacctatggattaaagtattaatgtataaattaagcatagcaagagattaataataatgtaatagaacaatgataacatactataataaaagttatgtgaatgtggttggtctcctcttgctttcaaaatatcttcttgtacagtactccacctattttagaatgtggttgactacaggtaaccaaaaccacagaaagggaaactttggatgaggggggcactactgtacttaggaatacaactatatacatatgattttatttttaagaccatattatatttgggtatctactaatattttgtataaagcaattttttgttccattacgtgactttttgttttattgtatatgtaatttaacacacaataaagggtaaagttgcttccccaaaccacacttttaatcaaaacctagaatcatctgcagtccttgttaaaaatgcaggtttctagaaccctctgaagttctgattaaataaatttattgcaaaccacaaaaaaaaaaaaaaaagtcgacg

SEQ ID NO: 57352 - DNA, 462 bp, Homo sapiens
gcctattcctgcaaagccagctctcggtgcctgagatagaagcctgtgtccagggccgaagtaccatgactgtgtctgatgccattcttcgatatgctatgtcaaactgtggctgggcccaggaagagaggcagagctcttctcacctggctaaaggagaccagcctaagagttgctgctttcttccaagatcgggtaggaggagctctccctcaccgcctcccagtgaagaaaaggaccatttagaagtgtgggctccagttgttgactctgaggttccttccttggaaagtcccactctcccacccctctcctcaccattatgctgtgattttggaagacccaaagagggaacctccactcttcagtctgtgaggagggctgtgggaggagatcatgctgtgccttttggaccctgggtcagtttaggaaacagttttggaaaagttgagctctcggttc

SEQ ID NO: 57353 - DNA, 1585 bp, Homo sapiens
  misc_feature (1)...(1585): n = a,t,c or g
tttttttttttcattgttccaaagttgttttttattttatatttgttgaaagaaataaaattatatttaaaaaaaatagagaaatctcacaaactgatgaaagccaggaacaaaaagaacaagttagtactttttcctgagaggcagatctaacagctgcagaatggacttcttccttcccagcttttgtgaaacaaaacaattctcctaaggcatcagaaagcactgagtgcaaaatgggttgttcaggtacaaggtctcaagccctctaatggggactgggaaacgtgaaaagctgctacaatttcctctcctttaataccaaatgttaaactgtctatacttctacttttttatgtaaatttgagaatttcacactcatgacctgcatttcggacctggtcatgtttgattaaaatcttactacttagtgatctgcactggcatcccaacaactgattgcaggggccagcagcaggaagagctgctctgatctcaccatccgcagccaaaaccagccaaagagcacccatcccaggagactcagatgcagctagaaatttatgctaaagcctaactcctaactatgctggacctgcccacaagggcagatcacatcctagtggttcacaggtcacacacagaacaaaagttacaaaagtcacctcacaattcccgaagctctaaattgattcattccccacacgtggtttccctaattttatactgataaatctatcaaattaaaagctttcatttccaaccacttcaataagatagacaacaccatgcttaacatttttgttctctgcctaattgcttgcttctgctaaactttgcatttccatggctaataggaaagcttgaacccatttttccaaaagttccaatcttgtgttctgatttgaaatactgagtacacacccctgatgctttctctaaagtttctttttcaagatacttaagtcaattcatataactggtataaattccatgggagcatcgaattcccaagagatttaaatgtctgtagcgcctaccataggtgcttgcttatacattcaagtgacctaatgcatctccaattaagttaattatgtaacaccaatcagctgctaaggagccagtaggatcctgtgggtgtgtcctggctagtttttcaaaacatctctcatccttcatgggtagattcatactccaaggtaagctggtgttggaccctagaaacccctatcctgtctcctggctctatagggagttaacagccctcctgggacagcttctcctgggctccagttttacattcagaaggacctcacgactcttaagaatggctttgctgagttgctggacaccatgatgtcttctcctgcccagaaacggcacggtcagcaatcttccaccaaccggagggtgcaacttgagttttattctggctacatcatcccaagtcctagtatgaaacagcaatgtggccaaaaatgaccatgttcactcgtgccgaattcttggcctcgagggccaaattccctatagtgagtcgtattaaattcgtaatcatgtcataggntttcaaatnnnctcc

SEQ ID NO: 57354 - DNA, 509 bp, Homo sapiens
ggtgtcggagtgtggtacttctcctagttgcagtcaggcttcatacgctgttgtcctgcccgtaagttcccgttttgtgtgtggttagagcagccagcgggtacagaatggattttggaagagggagtcaccactggacctccaaggaagccacgtgcagacatctacaaccttcgatctcctgacgagtttattgttggccaaaaccaggctttgattgaaccaggatgaatgcgggtgttggaagtagaatatatatatacatataaaattgaaactggcgatggaatatgagaggagccctctggaaagaaaaggacagaccctgtgctttcatgaaagtgaagatctggctgaaccagttccacaaggttactgtatacatagcctgagtttaaaaggctgtgcccacttcaagaatgtcattgttagactttgaaatttctaactgcctacctgcataaagaaaataaaatcttttaaatcaaaaaaaaaaaaaaaaaaaagtc

SEQ ID NO: 57355 - DNA, 1025 bp, Homo sapiens
tttttttttcatttttaaaatagatgttttattctgctagttccataaaaacaatgtaaacacaggcgttctgtacatcttgctggtgaattcacataatgcttagttccctgatcctttgacctccttgtcttctccggttattttctgtttggacccctggccacaggagtggagtggggttggggcttaggagagagcaatgtggctttttggtatgatttgttttattgcttgcccgctcagcacgctcctgttactcctaacaaagtttgagatttaagcccttaaacctgtaggtttcaccatcagtttttcttttttttcttttttttttttttgcataggcattactagggacataaatgggagactggcatagaaagtggtgaggagccgaagccaaggaattgctttaaacacaagatgaaaatactctgttctgtccaaagcatcacctaatggtgtgaggcatctcacttagctgtggagaagtccttggaattagatctcagaaagacagctttaagacagtaaaaccttttggcaatgggctaattgccttaaaagaagagttctacctgaaagaccttgcaggtggagaaattgtcctacaaagattcttggatatgttagtggagataactgacatgggtagctgtgggtcaaccaggaactgtcaacaacctgatctctgcaaaaccaggatggccagttaatggtttattcagttctctgatggtcacaaatgtaattttatttagccttgtggaggttctgcaacaaatgtaattttaaaggaattaggagccagaaagataaatgcaactccttcaactacgtgacagggcagactggtgaatctgggttcccagagtgtggagcaagtgccctgcatcagagaatggcccagggggaacgtgcatgatgctgaaccccgcaggacagaattacttcaatcgcctgctcctgactactataaggacgaagcctcagtgtctcagtttggatctacgctgggattt

SEQ ID NO: 57356 - DNA, 1107 bp, Homo sapiens; identical to SEQ ID NO: 13813

SEQ ID NO: 57357 - DNA, 798 bp, Homo sapiens
ggggtgaactcggggtccaccgcccgctgaggagatggatgaggacgggcttcctctcatggggtcaggcatagacctgaccaaggtgccagctattcaacagaaaagaacgggtggcttttctaaaccaatttgtggtgcacactgtacagttcctcaaccgcttttctacagtttgtgaggagaaactggcagacctttcacttcgtatccaacaaattgaaacaactctcaatattttagatgcaaagttgtcatctatcccaggcctagatgatgtcacagttgaagtatctcctttaaatgtcaccagtgtcacaaatggagcacatcctgaagccacttcagagcaaccacagcagaacagtacacaagactctggactacaggaaagtgaagtatcagcagaaaatatcttaactgtagccaaggatccaagatatgccagatatctcaaaatggttcaagtgggtgtaccagtgatggcaataagaaacaaaatgatatcagaaggactagacccagatcttcttgagaggccagatgctccagtgcctgatggcgaaagtgagaaaactgtagaagaaagttcagatagcgaatcttcttttagtgattaagcttaattttgataagaattacatatgcatgcataggggtacatttacattctgtaagagattgagcctgaactctcttagtcataaaaacatcaaatggccacatgtccactaccaagcttcttctatgttaaaaaaataataataaagcagttttaacctgccaaaaaaaaaaaaa

SEQ ID NO: 57358 - DNA, 3141 bp, Homo sapiens
cgaaaaaagtaaaagagttaaaggtgttggattcaaagacagcccagaatctctcaatctttttgggttccttccgcatgccctatcaagagattaagaatgtcatcctggaggtgaatgaggctgttctgactgagtctatgatccagaacctcattaagcaaatgccagagccagagcagttaaaaatgctttctgaactgaaggatgaatatgatgacctggctgagtcagagcagtttggcgtggtgatgggcactgtgccccgactgcggcctcgcctcaatgccattctcttcaagctacaattcagcgagcaagtggagaatatcaagccagagattgtgtctgtcactgctgcatgtgaggagttacgtaagagtgagagcttttccaatctcctagagattaccttgcttgttggaaattacatgaatgctggctccagaaatgctggtgcttttggcttcaatatcagcttcctctgtaagcttcgagacaccaagtccacagatcagaagatgacgttgttacacttcttggctgagttgtgtgagaatgactatcccgatgtcctcaagtttccagacgagcttgcccatgtggagaaagccagccgagtttctgctgaaaacttgcaaaagaacctagatcagatgaagaaacaaatttctgatgtggaacgtgatgttcagaatttcccagctgccacagatgaaaaagacaagtttgttgaaaaaatgaccagctttgtgaaggatgcacaggaacagtataacaagctgcggatgatgcattctaacatggagaccctctataaggagctgggcgagtacttcctctttgaccccaagaagttgtctgttgaagaatttttcatggatcttcacaattttcggaatatgtttttgcaagcagtcaaggagaaccagaagcggcgggagacagaagaaaagatgaggcgagcaaaactagccaaggagaaggcagagaaggagcggctagagaagcagcagaagagagagcaactcatagacatgaatgcagagggcgatgagacaggtgtgatggacagtcttctagaagccctgcagtcaggggcagcattccgacggaagagagggccccgtcaagccaacaggaaggccgggtgtgcagtcacatctctgctagcttcggagctgaccaaggatgatgccatggctgctgttcctgccaaggtgtccaagaacagtgagacattccccacaatccttgaggaagccaaggagttggttggccgtgcaagctaatgtgggtcctgtgaccgcggcagctcctcagcggagccgcaaactgtcctgccctgcagcatgtgcctaaaggctcaaggggatattcctctggggtggccactcccaccaccctgaccctgtctttctctctggcctgctgctctctcaacatcacatacagcttcagctgcctggaggccagaaggaaagggcagtgcaggggaggcctgagcccgacttagccagccctggctgttgtattaccaaagcagggtccatgtttgctgccttaaccctgtctcctctctgttactcagagggcctcatctcagacaagggcccagcctgctttttctcagccctgactttctaatgggctttcccccctaggtcagtcttgctggatttgtgcttttcttttgtggtttctctggccctgagaatagcatggggcttgtaaacctttgggctagatccctcctttcattgctgttgtctctgctcttccctctcctgggctgtggttatttattattagtggtgtggcactgggagctgctcctaaggaagcagggagcaaatcccacctttaccccaccttcctgggaaaggcctccaaagcaaaggatctggaccagtttccctgctgtgctgtggcccaggccagagcctgtgggcaggcaggcagggcatagcgacagtgtggacctgcccccagcttctgccacgctttatgcccttgcctctctggacgctctgcaccaaccccaggctactgagccaccttccctcctcatgccttccctgagctttggtgcatctcatctggactatgggttgtactgtgaccatcccaacacctcaccctctgtctacaaggaaatgggaggtggagcctcctggctgagaaattgttttgcaaatggatctatttttgtatgaaaaaaaaaatttttttaaagaaaactgttccttccccctttcccctccataatgtaagaagctttggtggcaggttacagagttctgggatttcttctcacaggcccaatcctgaatgtgcccctggaccttctggacccttgagtccaaggcagatcctctctcccagggaatccgacacaggaggaaccccttctctggttgagctgggccaggcctaagagtagcaggaactctaagaccacagagttttttataaatgtataaatgtatcaagccaaatgtgcagatgctaactggacattctggggaactgggcaccaggagtgccttcatacactgtaccccagctctcttctaaaaagagaaagtgggtgggcacactgaactgtttggtggccccaaccacaggaagctgcaattctctggcttagggtgatacttttgccctccttgtgcccctctcagctttccatccccagctaggaagaaagaatggcactctgtggcttggccccagaattagagttattagagcaagagagagcttaggaagcatgagggcaactatagtgaggccttattgcccaggagggagggttttggttcgtggcgcttgtgtataaaggggcaagagcagctcctttggactattcctgggaggactctgatgcagggcgtctgttgctcccctgggtcacctcctccctgctcgctgacatctggggctttgaccctttcttttttaatctacttttgctaagatgcatttaataaaaaaaaagagagagagagagaggtgtgagggacaaaatgcaaacctatttcccttgcctcataggcttctgggatgtcatcacctccagtttgttggttttgtttccaactgttaataaagcattgaaacagtaaaaaaaaaaaaaaa

SEQ ID NO: 57359 - DNA, 436 bp, Homo sapiens
gagcttctcaatccggtggactggaacttcgcacagccagaagccaagagcaggccagaaggcaacgggcagctgctgcggaagaagaggccatagctgctccagccggggctccggggcggcagcagagctggcacaccgattctgggaagccccgcgaatgatggcttttgaattaatgaggcagtgaatgttttgtgtttacttctaagggaaatactaactttctttcgcattagtattaattttgaagtagctacaaagtatttttaagaaattataattttatgactgtctggcaggctctgtcagtttagccgcgccggaccgtgtcaagcatctaggagaggagtccatggtgtccaggcatcggggcgtcacacctgttgaggagtggggtggctttgaatgctggaaatggcttcatagtgaagtg

SEQ ID NO: 57360 - DNA, 1597 bp, Homo sapiens
acatattaaaatttattttaaaaatacaccacatcagaaagcatattttacagtggtaaagcagcagttttttatttattacaaattctaaaaaagaatccaactttataagtaaaaaggaacactgatgatcacttaaaacatttaaatttaaaattactactaaaaaaaccctgtacattcacacaagtccaatgcctttgttggtttttacagacatagaatttctgtagggttttgggccctatcaacaatttttattaagtactgcaataacaaaatacagcaataaaacaactggacactcctaggggacaccaaagataaagggcccattaatcaggtgtaggccagagaaacccaacctgttggcaatatgacgctctttcccaactgggtcttggtgagacacgtggcacagcaaggctgtcagtgcatgtgcataaattgtagaccaggtcccactatgctacttcaggattcagccagcccttctatgagtcacagaggtcccttggtccttattcatcttgatatactcatgggatgtttggaattaaggagcccaaactaccttacttgcatttgaagtctttcacttcatatcctaccccatcagtctaagagcccacccaacaagggtagctacacatagatgctcacactctataggctgcctgatccctggaacccagcctggggccctgattatgatctccacggggctgtcagtggctagggaaagctctttaagacccagcgatcatgggcagtggcatcaaccatggtgaatcaaagttaagtataatgctccccagcaaacagtgttaccagttgggttgagcaataacaaaatgcatttgaaatcagtaagactaaaccgtgtatatacaaacaataatgaatattacaaacaccaacaaccacaacaataacagatcaggcttctcaaaatccagaaaccggaaggctattttaaagtgtttaatataatcatgtaaggaaaaaaaatctccccaaaacaataaagtcaagcaatttcatatctatatgaacttattttcatatctatatgactaaaaaatgaaaatgacctttgctggcattattgctacgcgaatatccatactttcccccttgatatttaaggacatgtgggagaactttataaacaagtaaagtgtgcagagaaggcactgttttggcactagcaaaaaggacagttaatttcacatgaatcacgtgaactttaataacgcatgatatacatgctaaactcaatcctttaaagccctgcggaaactgtattttttgtggtaacagttgcttgaagcgtattaggagaaatcatgagcagtatcaccggaaagggagagtcagaatcttggcatgatttcatcacgccaaggtgtgatgttctgtaatctcggaacacaccctgatttaagaggagggaaggcaaggctcaagtgctccctctgtcatcatgggtattggaggccgatggcttttccttatgcttcctgctaagcatttaaataaatttagaaaataggtaaaaatagattctaattaaagtgttttatttttattttta

SEQ ID NO: 57361 - DNA, 2558 bp, Homo sapiens
cgcacggaaagtttggaggcttagcaaggagggtggtgccggcctccgcccggtggtggcagaactgcctgtgcgagcacggcttccacgtgggctgcgccgccgggcgtcatgtcgggcctaagagacacgctctacagctgtgaaatctgaagttcaggtttgcatttccttactgctttgtcttgaagacagaacgatgccaaagaaagcaaagccttacagggagtgggaaggaagaggggccggctccgtgtaagcagatgaagttagaagcagctggggggccttcagctttaaactttgacagtcccagtagtctctttgaaagtttaatctcgcccatcaagacagagactttttttcaaggaattctggggagcagaagccccttctcattcagagagatgaccctgcactggccacatacttatggggtccctgtttcaagctaacagatctgaagagtctgttgcagccggggggatgtacttatggggaggagatgttgaatgtcttgccggtgttttcaatgggggaaggaaggaaggtttttaaattaaaggttgggcaaaggcacactttcttcagctgagaaaagattttgatcagaaaagggcaacgattcagtttcaccaacctcagagatttaaggatgagctttggaggatccaggagaagctggaatgttactttggctccttggttggctcgaatgtgtacataactcccgcaggatctcagggcctgccgccccattatgatgatgtcgaggttttcatcctgcagctggagggagagaaacactggcgcctctaccaccccactgtgcccctggcacgagagtacagcgtggaggccgaggaaaggatcggcaggccggtgcatgagtttatgctgaagccgggtgatttgttgtactttcccagaggaaccattcatcaagcggacactcctgcggggctggcccactcgactcacgtgaccatcagcacctaccagaacaattcatggggagatttcccttttggataccatctcggggcttgtatttgatactgcaaaggaagacgtggagttacggaccggcataccccggcagctgctcctgcaggtggaatccacaactgttgctacaagacgattaagtggcttcctgaggacacttgcagaccggctggagggcaccaaagaactgctttcctcagacatgaagaaggattttattatgcacagactccccccttactctgcgggagatggggcagagctgtcaacaccaggtggaaagttaccgaggctggacagtgtagtgagactgcagtttaaagaccacattgtcctcacagtactgccggatcaagatcaatctgatgaagctcaagaaaagatggtgtacatcctatcattccttaaagaatagtagagagacacacatgatgggaaatgaggaggaaacagagtttcatggacttcgcttccatttgtcacatttggatgcactgaagcaaatttggaatagtccagctatttctgtcaaggacctgaaacttactacagatgaggaaaaggaaagcctggtattatccctctggacagaatgtttaattcaagtagtctagtgcctttgcagaatcaaatgcctactattttatatgcatatattaaaagaaaagcaaagacctgagccgaggagaggatgaattcaagtttccttacctgcgtatctactaacaaacatgagacctccctgttacaggtggtcagttggccaaatgtactaacgggcacatgaaagaaagaacagcaaattaccaagtgtctcagaaaatgacaaaaccatattttgacaagtttatttaatccagtgtggtagaaaaggcacaattccaatgtatcatttagaattgaatgtcattaacctggctttgttctttggaagaaacaacttctttaaagagcttctttggctctagaaaaatttcaaacaattaaaataagaaaaaattttaaactggttttttataatgaaaatatacatacctttgtgtatagacaagcccatgcccattaaaataaagttatcctgtaacataaattttattaaataatacttccccacagatgagaggcacgcaacacctatggacaaaagggagttacagaggctgcttaaaagatggagaaaagcctgagattgaaggaggaaaaaaacccagtatttaaagtctataaaaaatactcaaaatagtgggccctccgagtttaaaatagtccattgttattttaccattcctaaagtgcatgtaggttgatattttttaaaatatcattggagaatttaatcctttcctttataaaaatagagcatttttcctgctttctggcaaaagttggggataaaaggaaaaaaagttgtcaaaatgtaattttcagtccaattccccaggaaaacatgcttgtgaattgtgcagtaaaaggtggtaatgactactggaagccaagtcaaagggtgatttcccacctgaattttacttacttaaataaaagttacttac

SEQ ID NO: 57362 - DNA, 4219 bp, Homo sapiens
ggtcgactttttttttttttttttaagggaatcaatgtctgtttattaaggcagatgctcataaaagtgactttcagtaacattttcagtataaaaatggatttacatttcatttctggaaaaccgttttgtacagtctgaccatggctaggagtcccagggacagcagcctctgctcagggcagactctgtgattcactgtctgtcctgactgctaccccacgtgggggagaacacgtgggctgagaaaaaaaaacaggcatgtgcaaacctgacagatgtcaaggggtcccaacacagttccttcagcgaaaataaagcccagttttaagatgtgcagggaagtgttgacactgaacaggcagctgaccaagccctgcagggctctgagcaggcaggcgagtcccaaggagagtcagtgacagcacatggggcaagggagctggacagaagaccccagagggtgcggcacctgggtgagagccctggaccgcacaccaaggcagaggggtgcccctgaaggactctgggcaggcaatgacaggatctgagggtgtccagacgcagatctccactgcctgagggagagtgatcagccagggggagaggccagggactgctacctgcccagaaggcggcagggaggggaagagcagataaggaggtatagggtgtgccctgggcaaggcagcaggggtaacgaagctctcagtgactcctcccagtagccaggggagagcagtgacagtctcaggtggccctgagcatgtgagctgctcatccacatcaggcaaaggcaaagccaggacctgaacttcccaccccaagccctacatccatgcaagccagaccagactgggtcagaggctagaagggagctcacaggattgcctggggaagcctcggcccaaaacctggccctcgctccagcccagagcacccacctgggcatgagactggcggcagccgtaggggtgccctgggtatatgcccgggctcccagggtgccatacctgccagccagcccagggagtggtgatgggctgggtgctggctgtccctgcacatagcagtgccccgcgggcagtaactacaactgctgcctgcccctcacccctgggttatgctcggcctcccctgtgcatttctgtgtccgtaagtgtcccctgtgcatttctgtgtccacaagactactataaaccctgtagacacctcacaaacagcattccacgcaggtgggttcatgtcccaggggcatggggctccctgctgcacagacttgggatgttccatgacagaccctgcatatgcaggcgagctcacaacccaggggtatgcggctccatgacaccaccccatactcaggcgagctcacgacccaggggcatgaggctccatgacaccaccccatacgcaggcaagctcacgacccaggggcatggggctccctgctgcacggcctcaggatgctccatgagcaacccccgcactgggctattcacggatgcacactacctgccattgtcacagggttgccctcgtgtccctcagcccagcagacaaaaggtgcaggagaagcctgcccagggccgaccccagcccagagtccactcgacactaaggaatcacacaggcacagctgctcctctcccaagaactcagctattggtcagaaaaaacctcctagcctcactaccttgaggccgtgcccagaggtggcagaaggcgctgtgcctcctcaggggtcacggctcctgtgcccccttcctcacccaagcccgacaagctactttcagaaatgaacctacagtaaaaatcaagagtctaagccacccaccctgtccccatccctgcctccagcctggcccccagattcacatctatgagatagaggttgaggggttggagcccaagacagggttatgggagggctccccaacccggccaggaccccttggcctcactggaacgcacagacggcacccagcaggtaggcatgttctcaggggtggccagcaagggctctctcagggtacagctgggagaagcggccgagggcccagatggggaagatgttcctgtagctcgtgtaggagatggcacaggacttgttgaagaccccagcaatgttttcctgcggccagtcgccattggggagctgtttctcaagtagacaccggactcctctctcctgggcctcgatgtcaggatgccgaacggccatcagccccatcatggcccagcatgtgttatggatctgggactgggcactctgcaaataacgccgctcctcgcaggactcaaagtcctccccccagcctccgtctgccatctgccgggacagcaggaagtcacaggcccgggagacctctgcacaggcagtcccatctcggtaggtctgccccatacaggcgaaggcctccaggccaaaccaggtgccgtaggtgaagcaaactccccaggagccttcccaggagccatcggccctctgctgccgccgacagaactctaagccctgcgtgagggtctcccggatctccgctgccctgtgctccgggaaacgcttgtggaaatacttaagcgcctgcatcacggctgaggtgcactccacataggtgtagtcaatcatgatgtccccgaagacctccgaggggttcagcagctccagcaagtgccccccacgcttggtctcataggtggcgaaccctccatctggatttctcatgttcagcagcacagccacagcatcgcagagccgttctctggggatgtgctcggtgacatggggacacttctcctgcaggagcagcacagccttcaaggcctcagccgtgcagtcagaaacgatccagccgcagtccagcgtactgaaggagaagccacccttgcgcatctggcggtagtacttctggtagtcgggagggttatctgggacctgtgagagcctcaggaactcatgagccttctgcaggcaggacgaaaactcgggcctgtggtgcccgcccgcctcaagcagagcctggatggcgaatgcggtgtcccagatctgtgagccgttggtgccctgcattttcatgccgtcaaggcccatccagagatagtccgggattctggagacatgctcctggaaggcagtggaggcgggcccgtccacataccagcgcacaagcatgttgatggttttcgagatcgggccgatgctgatgctcttggtgaatcggtcgtcggccacaatgtgttcatacagcttctgcacggcccgctgccgcaggtgggcactgtggtggtgctcatacaggttgaggagcgcatataccacgcggagcagccagctgtgcggcgtgtacagctcgtcgggggccacgttgttcctctgcgccagccagtcaatgctggcgaagtcctccacatagagctcctggcggaggctctggaccagcgggtcttccgcggcactcagccgaacggcgtagcagtagctcatgggcaggtacacctgccggcagtggcaccagagtgtggaggggtgtgccggtgcccagtcaggaaacagccacatctctgggaacagggtattgaggccttcccagctgtaaacattcaggacagccagccagaacttcccccaggaggggatggccacagcaccacctttcttgtgaagaatgttccgggctcgtaccaggtcaggatcgtcaggcccaacacccagaattctgagagacacatagttgagcgcagtcccaaacacggtggacttatcctcaatgtgcaggccccagccaccgtcagggagctgcactgaccgcaggtaccgcacaatctcttctctgtatccggctggcagagggatgcgtgccacgtggcaagtgatcaggaggcctggcaggaggaaaagtgggccaccataatcacccgtccagtgcccatcctcagcctgcagccccacgtaaaatgtcatcccgttcagagccccctcaaaggcggtgtgggctttgggcaagtccttaaagtaattcttggtgtccagccccagggcgtaggcttccaggccggtctgctcgcggccggcgcgctcgtcctgcaggtaggtccacgtctgccggcccctctcgcagttgagtcgccagcggccgaggtcggtggcgggctcggtcttgtaggggccccctcggcgccgcagacacgtgccctccgtcattgctgctgcagtgctctc

SEQ ID NO: 57363 - DNA, 837 bp, Homo sapiens
  misc_feature (1)...(837): n = a,t,c or g
ttttatgtctagaaacttttaaacagacttgtaaataactcaagttaaaggggtagcaggaccagaaagaacctagacttccaaataaccagtgtagttcatgatctagtccttttgttcatataaagctatttgttttaaaatagttgctgaattacatgaaagggtgagaaagtgggagagacagaaaggcagagacaaaacaaggtgggctgggaaagggattcactggagcaacgagttcagtgtatggaagaattgaagggtcagatagttattaccagccaggttcagcaaagcctagaaggatctgctggtctcagtgacctgggcaggcaaacaccacccagcggaggccaggggaagacaccagcaagcaggccagatcctttgagcttggatcgtagggtagattctatttgcttctaatcctttagtgcagatgagctcctgtgtgcagaggagagaggtggctcctagaagcgggtaaattccagaaactacaaggggcccaacagtcagtatccagaaggattccagatggttccaactcaacaatgccagaatactcacaacatagcaactgtccgttttctgaacattggagtccagtggtgcctgagccaggaggcttgccaattcagtagaccagacgtggtatttgctctacacagcacaaatcagagggcatatttgatagtgataacatagcagtcatttagcttgtgtagagggttactcgggatatttcagctcgtgccgaattcttggcctcgagggccaaattccctatagtgagtcgtattaaattcgtaatcatgtcatagctgttangac

SEQ ID NO: 57364 - DNA, 2799 bp, Homo sapiens
attttttcttgtcggctcctgtgtgtaggagggatttcggcctgagagcgggccgaggagattggcgacggtgtcgcccgtgttttcgttggcgggtgcctgggctggtgggaacagccgcccgaaggaagcaccatgatttcggccgcgcagttgttggatgagttaatgggccgggaccgaaacctagccccggacgagaagcgcagcaaccgtgcggtgggaccacgagagcgtttgtaaatattatctctgtggtttttgtcctgcggaattgttcacaaatacacgttctgatcttggtccgtgtgaaaaaattcatgatgaaaatctacgaaaacagtatgagaagagctctcgtttcatgaaagttggctatgagagagattttttgcgatacttacagagcttacttgcagaagtagaacgtaggatcagacgaggccatgctcgtttggcattatctcaaaaccagcagtcttctggggccgctggcccaacaggcaaaaatgaagaaaaaattcaggttctaacagacaaaattgatgtacttctgcaacagattgaagaattagggtctgaaggaaaagtagaagaagcccaggggatgatgaaattagttgagcaattaaaagaagagagagaactgctaaggtccacaacgtcgacaattgaaagctttgctgcacaagaaaaacaaatggaagtttgtgaagtatgtggagcctttttaatagtaggagatgcccagtcccgggtagatgaccatttgatgggaaaacaacacatgggctatgccaaaattaaagctactgtagaagaattaaaagaaaagttaaggaaaagaaccgaagaacctgatcgtgatgagcgtctaaaaaaggagaagcaagaaagagaagaaagagaaaaagaacgggagagagaaagggaagaaagagaaaggaaaagacgaagggaagaggaagaaagagaaaaagaaagggctcgtgacagagaaagaagaaagagaagtcgttcacgaagtagacactcaagccgaacatcagacagaagatgcagcaggtctcgggaccacaaaaggtcacgaagtagagaaagaaggcggagcagaagtagagatcgacgaagaagcagaagccatgatcgatcagaaagaaaacacagatctcgaagtcgggatcgaagaagatcaaaaagccgggatcgaaagtcatataagcacaggagcaaaagtcgggacagagaacaagatagaaaatccaaggagaaagtgcagcgtaagtatgcacagatgaagatggaactaagccgagtaagaagacatacaaaagcctcttctgaaggaaaagacagtgtagtcctgcaaaacattttgagcgttggtgttgtgagcggcccatgaaaagccaaattaaaaatcaaggattcagtcaaactaagcaggtactcatgccaggtactcctttctctacccacatccatgtttgaatgctattgcctgtgatctttacgcttaactgttgtgtatcttttttgttctttacaagaagtgcagaggggttttttgtgtattgcgtgaaaacttataaaacaaatgttaacagaatggaattttttttcaactgtatgtagggctgcagtggtggccagaattagatatctttaaagaattttaaatacaataaacacttcatattattcgccttgttacactcaatgcaattctcaagtctataagaggtatgtgcttaatatttcctactgtgtaggagaatttgcagtcagccataggtatgtaggaatagtcactcactggctgatacatttaaagcagcagtgtgaatagcaaggacagacaccttcaatttgtgaaatcaaagaactgatgcactatatagaacgaatttgggtttttaaagaaatattaaaagttaggtactgtaagtgttcttaaaacctgtaaacttcattctgtgggctagtggtgtgggacaaaatattcctaatgaaaggaagtaccaattagttgatttgttggtggcattccccttttgggaaagcaatgtaaggttatgtctgtgtatgtcattcacacttaggcaagcatacacaggcacatggctttaagaaccacactgatgccttgataattaaaaagaatacaagcattccatgtacacatgttaattagcagttagtgactgggccaacactttctcataaaaattggccttttacatgttgtctaattatcatttttccccaaattttgcgttgtaggactactgttccgaagatttttggaagaatactgagaacggcataaagtgaagatcgacatttaaaaaatgaggtgaaagaaagctatagtggcatagaaaaagtataaagctcagttagtttttttattattattattattaaaagttaattcaggactgatgtgacctaccagatttcagaacatgtgttaatagtatatatgccactgaaaacttaggtcctgtatcatacttttttctttaagactttttaagaaatattacttaaacatgtggcttgctcagtgtttaattgcaagttttcaatcttggactttgaaaacaggattaaacgttagtattcgtgtgaatcagactaagtgggatttcatttttacaactctgctctacttagcctttggatttagaagtaaaaataaagtatctctgactttctgttacaaagttgattgtctctgtcattgaaaagttttagtattaatctttttctaataaagttattgactctgaaaaa

SEQ ID NO: 57365 - DNA, 521 bp, Homo sapiens
  misc_feature (1)...(521): n = a,t,c or g
ttgaannccnttgganncccngctatgactgattacgaatttaatacgactcactatagggaatttggccctcgaggccaagaattcggcacgagtggccttttgagtgaaataggaagcttcatggtgttggagccacctttgtacagttgtttaaagtttcccattgtcacggaaaacattggttgcaaagcccctcaaagccctcaagtgccttnnnnnngtttaaatgtgctggtgccctccagaaaagcctcggcctcagctccgtttccgcctgttccctcccccaggataatgaatggttactgnnctgtaaagaccgtggtctcttttcactaaataggagattcgagtttcccagtttacatgaatgaagtcngaatttaagacggngatgaaactgaggttcagtactctcgggactcgaggaaattattcctgagacatggagtaattcttacaaatttaaactattgnacagatccacatacatgttgntaagnacctaatggtttgcc

SEQ ID NO: 57366 - DNA, 1826 bp, Homo sapiens
atatatatatataaaatattcagcagcaccaagttttataactattgtttgtttgactttattaatactagaatatgtagtctcaagccttaattttacatttacattattttgtaattttttattactatttttaaggggttaaagagaacatacattctcacattagtgtactttctggtagaaagttgctgcaaaaacatttgaaatgtatattaacctaatgtatgtcatatatatgtctttgtgtaagttcaagactattgatctgtgaagttattttgtaaggacatacatttggtaagtaagtttgtgtcccaggaaatgtatgtgtttttaaaccctttctaaatatgcaggccattaataaataagattgtttcttccctactgaatagataagtgtttttcttttttaaaattggaagcttcataaaagttatcttgttaaaaaacgatgatgatgttaacctatctttataattggaaattatttaaactgtttgttgttacagaagaaacaaaatggtaattacagaattagctgtggggaagattggctcccatggtactacaggttgagtatcccttattcaaaatggttgggacctgaagtgttttggattttggttttttgtggggtttttaaattattattttggaatatttgcattatatttaccaatttagcatccctaatccaaaaatctttcattagaaattggaaatgcttcaatgagcatttcccttatgtgtcatatctgcgctcaaatgttttgaattttggaacatttcttgtttctgacttttaggattaggggatacttcaccccgtaccaatatttgggagtccttaggacattaggattattatggaaaatggattggattggatagggtaaggaaagggttaaaaggaggaaatggacttttttaggggaaccaggacttggaacggtataaattaatatgtggaactagtttgcttttataattcattgtatcaagaaggagtcatgttttaaatccaaggcattgagactatctagaagcaaaaaagttggttttaaaaattctttttattagaagtgtgtttaaaaacatgtctttttttcccttgagcgacagtggcctcactacattgcccaggctagtcttgaactcctgggttcaagcagtcttcctgccttggcctcctaagtagcagggattacaggcatgcacccacatgccaatttttattgcttaaaatggcgagttctatggatattatctagccccaagcccatatctgtacacttttgttcattttataataccagaaagaatgttctatcagtaaaagaaggttttaagtatgaatctccatttttgtggagtttttctaccctgtaaaaattaactttgtggttcccagtaattacagtaaggagtttttctatattttcacagttggatttatctaaggatatttctcagcatattaaggaatccttttctacatttgagcaaatactgaggttcatgttgtaccaaataataataaattgcttttgtgtttaatatgtaacacgtaagaacaattgaaattttcttctaagatttaatactagtcttttagtataaaggaatgtaactggagaaaaaaattaatgctacagcccatttatcctgtgttatgtgttatataatctgaaatttgtcacaatgttacaatcaggaagttttttttctggtttcttcttccaaaggaaaataatagcctacttgtattttgaagtaactgaaataaaactctctccaagcctttttgcacaaaaaaaaaa

SEQ ID NO: 57367 - DNA, 1619 bp, Homo sapiens
tttttttttttttttttatattcttttctagaacaaccaatctttattagaaagttgtagtcacgtttacaataaatatcaacaatataatgaaaaagtagaacaaattagtttccaaatactgaactcctgtaaccaaaacacattttggatttgggaaaacacagtaaacacataccaaaaacacagccacaaataccaaaaacaaaaaccagactcaagtatagggattgaactggctgggaaaacacttattgtgttactgccttaaggaaccccacgggggcaccttgtaggcttcatttaactggcacattttccttggggggggggaaacagggtcctctctcagtcacatatgcataaggaaatctcaaaaccccaaaggccatcaggtggaagggtgatttcttggtttttctggggtagaataccgggacatggtggtgggcctggctgaacctgaggcattagtattatctgcaaaggagcatcaggaaccacaacaaaaagcctcataagttgagcataatgaggtttcagccctctaccttgagaggatgacagaatatataagggcatgtcactatttagggctttaaagctgattcctttggcccacttcccattactttcattactttgtcaggcccagagcacatgaatctccgacctcgagagtcttcatattcaaagcccacaaaagctcgagctatgtcatctcgccgtcttcctcttcccattacaaccgcacttctctttccaggaatagctttatttggagcaggccaagagtttgtgtctaagtctccttcatcttcagctctagtcctgatgacaatgtcccaaggcataagataatttgttcctggaataaagccctgttggtccaaacctgtatgaaagttataagacttagcagggcctagtttaaccaaagaccagctggagaatttgggtaggagacctttagggcaatttgaatgtagcatgcctgggagatactcaactgtggatgcctgtcgatcaacgaagtttggcctcttctcagttttcacttctacttgaccatgaacttctggattatctcctcctgcttgtggatcagctggataggtacctaagctatctgtggattggcccaaactcaaagctaaactcaggctcgtgctctctccttgggtttgaggttctttttctttaagtttatcagcatccgaatctggaggagcaggagaggattcatttttagcaggagccaggatctggagtacttggttcaaatactgggaaattgatatgatcccaattttcccacaacacttttcttcccagaagctgatagaagtcataattggctgctttgatatcaaagggatcatctcgaggtgcttgtttccttccacagttgcaagcaccagtagatcgagctcggctattgtgatatagcacaggcggatttctatcagcctctggtttttctcctgatttaggtaatgagtgaaatttgtgcacacagtgttgatcagttaaactcctctcctcacagagctgatggccattgctccaaaatttgtagcagtcctcatgtaactgcatggcgtatttgtgaaatgctg

SEQ ID NO: 57368 - DNA, 455 bp, Homo sapiens
ggtcgaccggagctttcgcagctggagaaggctcatccacctgcagacatggggcgcagaaagtcaaaacgaaagccgcctcccaagaagaagatgacaggcaccctcgagacccagttcacctgccccttctgcaaccacgagaaatcctgtgatgtgaaaatggaccgtgcccgcaacaccggagtcatctcttgtaccgtgtgcctagaggaattccagacgcccataacgtatctgtcagaacccgtggatgtgtacagtgattggatagacgcctgcgaggcggccaatcagtagcgacacagaggacccgccccctgagcagccccgcgtactgtggatccagctgttcggttctggtccagagacattccaggggtccagggtgtgggtcctgggctgtcacagccgtgtgtgtgtgtgtgtgtgtgtgtgtgtgtgtgtgtgtgtgt

SEQ ID NO: 57369 - DNA, 1737 bp, Homo sapiens
tttgccaagatccaaagaaaaaattttatttacaatagagaattttatttgaaacatgcatttcttgtttttttaaaaacaaatcagcaaatgcagatcaagtttacactccttaaggcaagagtccctatgcacgctgtacatgttcatattaaatccaaaagctgctcaccctgggaacttgtgtacaaagggcaaggccaaggtcagcaatgtgtcttttattagagaatcagacaatctccctgatacaggaactctgaggtcaacttgctatgaattatactaggaaaatgcaaaccaatagcaagaaattctgatagtctccttagtactgcatacaatcaaatcaattttatttagaaaggaaatacagtagtgcatacgaaaaagtgaaaacagaacctgtccatggaactggaggaacagcagtgtgccgacggtcatattgcacgcaacagttaagtccaaaacattcggttcagagttagcttttccccattttggcaatcagttcgtcacaaatcttggtgagttcttctatttctttattcttctgctccagcgtcctttccagggcgtccactcgcagctgctccttccgcaggctggcctggtgggcggcttgctcctgctgggccttgcctcgaacctgagcaatctcagcattggccctgtccagtttctcctccgcgtgcaccttcagggcctggtacctctgctcctccttcttcacccgggacaggtactcctgcgcacatctcttcaacacctcttcattcttgcggaagccttctaggacctccttcatcttctcatatcttctgaagaggtcggccagagacttctccacggagttcaggtcggccagggcttgctccttctccagaaccagctgctgcaccgtctggtggggagactgacttctctctctgttcgtcctctatcatctgagcgatggtcttctcatactcggccactattttcctcatttccatcacttcccgcctgctttcttcatatttatctttccattctgagacctctctctccttggttatgatctctgctctggcgatctggagggcagagtccaggtcgggctgctggaacagaaggcctgcaggtttctccacctcagcggtcccgatgcgggagtacaaggctgttttggagatggagacgtctgttgggtgagcagcctctctaatttcaatcgcttctgaaggggtgcccaaacccatggccctcccagctcccttcctgggaggatttcctctggcaccctgccaagtgtgaactccttggttaggggcccagtccctcgtgggaacaggatgctggtttttcgcagcagtgttcacaagggcttcagtctcttcaaaacttgaccctgaacacggcgtcggggactctgacatgcggacgggagatgacttgacagggctctcctgagaagtgtcaaacataaggtacaaggcctgcttcttcggggcatcgtcgtcctgaggtaaggaggagccaattttctccatatattcaatttcataggagtttctgtaatccaactcctcagtgggtgaactgaatttggtctcgtttacaaaggtggacaggtccgagggctgcgggtagtcctgtttgtcagcctcctcgtgccgaattcttggcctcgagggccaaattccctatagtgagtcgtattaaattcgtaatcatgtcatagctgtttccaaa

SEQ ID NO: 57370 - DNA, 1629 bp, Homo sapiens
tggtaattacagaagtttattaaaatttcacttgcttttacattaaaaaaactgaaaaaattaaacttaatatatataaaatatatttaatttgcaaaaatgtgaaaaatctgcctcatccagtaaacagtcactgaaattttaattaagagtgccatacccatgaggctggaaaagtatgtcctctcaagggctaaaaactgagaaccaagagacaatcatttctgtaactccagctcctctttctcccacaaaatgttactgcagccagctgagagctgcagggtatgtcaggtcagacacaacctggtgctatgagatgtgggggaggcatgctgcagaacactgcataaagtcaaattcgtcttcattattacaacacccatgataagaatttctttaaaaaaagtattccatacttgagttatgagagattttagttttgggtttctatagaccagaactctctagaacccagtctctatttgttggatctatactttcagttacaattcgatgcagcataactttcacttaaggaagaatttgtatacatgtcatttaacatcaaaatttcattctgtggaaattaggggttcccaccctcctccccaaactactccctcccatttcccaaaggactgacaagaaaccctgtggcagcttcatttggccttccacaccatgaccagcaggttcctaacacctcaactgcaaagggcttcctatttctctcaaactgagacctacattgcattggtgctacagatcaagtcacatctctgtgtagatcaagcatatcacctctgtaaagatgacttctgtttggtcagaccagagacaattttatgacctcaaacatgaatatcagctaacaagagctctcaaatacaaacaaaaccacaacaattcaaataataagttatttttcaaatatacaagaatatccttggtattggcagacaatttcaatttgtccttcagcccaagctatggcttggaaataataatgccattatctttaaaatagcttgttaaagaaaaatctatagcaatatacacaaggatcactctgagtttacattttttctgtaactgtggtcccaaggcagttccggcgtgcaaagtggagactggtatccaggcatagcatccattgctcaggaaactatttatctgcagaaattaaatgaaaggaagcataactcaggtctatttcattgctcggagtagagggaataaaacctctggactggttgtagcaatgagctgttcgttagcaatggcctgcagaatcatgaggtggttcttgcccattcctccacgactttcagtggttttcaaataggtcatccaaaggctagactgctgaaacttgttcattttcatctgcttcgctatctgcatcagtcacatctcctagtttaggatggaatggctgcaaattatgcctctgaggctgagttacaatcttcgatggaacacaggccacgaggttgctactgagagaagctggtggcagtctagagaggctgttatgcatcatctttgacctctgcactgccacactataatctggaggttttaggtgtgtgtggggtccttcctttaggtccgctaaagaaatcc

SEQ ID NO: 57371 - DNA, 1337 bp, Homo sapiens
ttttttttttggagaaattctattaaatacactttatttaaatagcatttatctcagttggctctatgccagttggtcttggtattggggtaagggggtattgcaggtaaaaagaggtgaagcagattctggctttcagtttcttagctcagaaattccagcaatccctgtagttctttgcatcccctcaccacctctggaatagagagcagggtcttataaatatgctgaacaatgtcatctagtttttctaactccttgtcagagcgccgaaggttctcctctaggatatttctatggctctggaacttgatcatgagtttttccttctcatttttcatctccaggaacatcactctcagtttgtccacctcctgagagagccacactttctcctggatccaattggtggccataggctggcagttggagtccagctggcctgccagggcctcctggagcactttggtctctgtctccgcacgccgaagtgagcgggtaaggtgggtcacctcctctctaaggcttatgagctcgccactcttgtctatctgttctaggatcttctcattctgctgctgtatcacttcctggagctccttttcattcttgtagcgcaagcacaaggcctggttcagcttctctatgtctgcttcttttgccttctggacttcctgatgctgttcttccctgggcctgcagcctagcttgcagctcacaaatttttcgctgcagagtcctgatggcttcttctttagactcttgtagcagggaacaaagactctgaagctcagtagtcataatactcatttctgccaggctctcctccatgcctggggtctctgcggggttgaagggaaaccattgatgctactcgggtgaaagcactcttgtcacttccaagcaagggcacaggagttgattctggctcttcatctgccactgctgtcaagatgcttcccaggaaggtcctgtcattaggcagagggtgttcctgggtgggaggacaggctgtactcagcagaagggtctcttgttcagtcttctcctttagttttgtctgtagaaagagagtcaggctctgtagttgctcagtcagcagccctagcttttgagagtactgccgtgttttctccagatcttgctcctggttatctgctatggtgctggccagtttagccgttaggttctctacagtgtccttgaggttctcacactgcaagctgcgctcccggagcacttccagtgtggttttcaattgacactcaacctgacccagctccaggtgagcaacctgattctcctggtctgcaaactccaaggtctctttcaggtcc

SEQ ID NO: 57372 - DNA, 860 bp, Homo sapiens
gctgggctggaccgaaaccggcgcggagcaactgaggcccgagccttctcgggacccgggggacgcctaaccccgcgaagatgaggaaactgaggccgcgaggagcgcgcacacagcagagaagcagcagaatcgggaatcaaacccagctctgtctgaccccagagcctgtgcctttaaccactggctaggctgaactgcctttgttcttcactgtccccatcacctctttcaaacctcagcctctccttcctcatcgttacatctctaggctgcacctgctctcttaaacattcacacaaaccctgcaaattttcttcctcataattgggagaagactcactggccgaatggcagcagtagatgacttgcaatttgaagaatttggcaatgcagccacttctctgacagcaaacccagatgccaccacagtaaacattgaggatcctggtgaaaccccaaaacatcagccaggatccccaagaggctcaggaagagaagaagatgatgagttactgggaaatgatgactctgacaaaactgagttacttgctggacagaagaaaagctcccccttctggacatttgaatactaccaaacattctttgatgtggacacctaccaggtctttgacagaattaaaggatctcttttgccaatacccgggaaaaactttgtgaggttatatatccgcagcaatccagatctctatggccccttttggatatgtgccacgttggtctttgccatagcaattagtgggaatctttccaacttcttgatccatctgggagagaagacgtaccattatgtgcccgaattccgaaaagtgtccatagcagctaccatcatctatgcc

SEQ ID NO: 57373 - DNA, 1194 bp, Homo sapiens
gcaacggagagagacggcaacctgggttccggaagccggagagctggagctttgaagccaccccggtcaaaggatgctgagtccggagcgcctagccctaccggactacgagtatctggctcagcgacatgtcctcacctacatggaggatgcagtgtgccagctgctagaaaacagggaagatattagccaatatggaattgccaggttcttcactgaatattttaacagtgtatgccagggaacacacattctctttcgagaattcagcttcgtccaagccaccccccacaatagggtatcatttttacgggccttctggagatgcttccgaactgtgggcaaaaatggcgatttgctgaccatgaaagaatatcactgtttgctgcaattactgtgtcctgatttcccgctggagctcactcagaaagcagccaggattgtgctcatggacgatgccatggactgcttgatgtctttttcagatttcctctttgccttccagatccagttttactactcagaattcctggacagtgtggctgccatctatgaggacctgctgtcaggcaagaaccccaacacagtgattgtgccgacgtcgtccagtgggcagcaccgccaacgacctgccttgggcggggccggcacgctggagggcgtggaggcgtcgctgttctaccagtgtctggaaaacctgtgtgatcggcacaagtacagctgcccacccccagcacttgtcaaagaggccctcagcaatgttcagagactgaccttctatggattcctcatggctctctcaaagcaccgtggaatcaaccaagccctcggagctttgcctgacaagggggatctgatgcacgacccagcaatggatgaagagctggaacggctggtggtgaggtcgaagctgcaccggacctcacggcagcacagagccaaggagccaggggcctttggctttcagagaagagagaagcaggaggccctggagagagtgtcctcagcttcggtaccgacgccctaccattaccggtgggagcccagagagtgaggccaggggccggcactgggcagggaggcaggatccagaggacactgcttcactcagaccaacagggagcccaggcctgcaggggctttattttgacatccactttgtttcaatacaaacagtccagaaaaaaaaaaaaa

SEQ ID NO: 57374 - DNA, 644 bp, Homo sapiens
cctctataccttccgcatgatcatggccaagacggctgctgaccgcaggaatgtcaagcagaaccaggccttccagtacgagtttggagccatgtatgcatggatgctgtgtgtcttcactgtcatcgtggcctacagcatcacttgtcccatcatcgcgccatttggcctcatctacatcctgctcaagcacatggtggaccggcacaacctctacttcgtctacctcccagccaagctggagaaggggatccactttgccgctgtgaaccagggccttggcaggcccccatcctgtgcctcttctggctctacttcttttccttcctgcgcctgggtatgaaggcccccgccactctgttcaccttcctggtgctgctgctcaccatcctggtctgcctggctcacacctgctttggatgcttcaagcacctcagccctctgaactacaaaacagaagagcctgcaagtgacaaaggaagtgaggcagaggcccacatgcccccaccgttcacaccctacgtgcctcggattctgaacggcttggcctcggagaggacagcactgtctccgcagcagcagcagcagcaggacctatggtgccatccacaacatcagcgggactatccctggacaatgcttgg

SEQ ID NO: 57375 - DNA, 665 bp, Homo sapiens
  misc_feature (1)...(665): n = a,t,c or g
gagaaacaataggacggaaacgccgaggaacccggctgaggcggcagagcatcctggccagaacaagccaaggagccaagacgagagggacacacggacaaacaacagacagaagacgtactggccgctggactccgctgcctcccccatctccccgccatctgcgcccggaggatgagcccagccttcagggccatggatgtggagccccgcgccaaaggcgtccttctggagccctttgtccaccaggtcggggggcactcatgcgtgctccgcttcaatgagacaaccctgtgcaagcccctggtcccaagggaacatcagttctacgagaccctccctgctgagatgcgcaaattcactccccagtacaaaggggacatcagcagccaccagcatggtgggggtctttgttggggagtgggggagtcttttgtaaatcaagacaaagccaaaggcccttgttagctggccatccctgccccattttttcccctggtcctttcccctgtggccacagggaagtgtggcctgaataccccaccccggctcctctgcacccagagctgggggccacctcagaagtgtcatctctctctgagcangcatttccctgcagcagtcgangactnagcagattgagtgattctggggaaaaangcctt

SEQ ID NO: 57376 - DNA, 1210 bp, Homo sapiens
ctgcactttgcggagaaggtgctgcccatcctgcacgggctgggcacggacagccacctggtggtgaagaagcaccaggccatggaggccatgctgctgtacctggccagccgtgtcggtgacaccaagcatggcatgatgaagttccgtgaggaccgcagcctcctgggcctgggcctgccctcaggtggcttccacgatcgctacttcatcctcaacagcagctgcttgcggctctacaaggaggtccggagtcaccggcctgagaaggagtggcctattaagagtctcaaagtctacctgggagtgaagaagaaactcaggccacccacctgctggggcttcacagtggtgcatgagacagagaaacatgagaagcagcagtggtacctctgctgtgacacacagatggagctccgggagtggttcgctacctttctgtttgtgcagcatgacggcctggtgtggccctcagagccctcacgcgtgtcccggggcagtgcctgaggtccggctgggtagtgtgtcactgatcccccttcgaggtagtgaaaatgaaatgcgccggagtgtggctgccttcaccgcggaccctctgtctcttctgcgcaacgtctgagcacaggagcccatccttggctctaggattccgccgctggaagccttctgttcagacaccccttatgctccaaggcctgatgtgagccagcggggggtgcatgggaaactgcaccccacaacccacatcctccatcctgactgcagcatggggttccccggcaggggtgggaggcagcaggggtcagcctgggcaggaacctctcccaactctgtccaggtgttcagacctcttggcccaacctgctcaccccaccgggttcactgtccttgtggggctggagagatgggcataagtcaggaacttgggaggaccaccaccctttcagaggcgtgaggccctggggccctgcccggcaagggagccccctgctcctcccaacaaactccagaacagcagaaagcgggtgctgtagaggagcactcagctcacggggagggagctcttggctgagcttctacagggctgagacgtgcgctttggggacttcagccttccttccagtctgggctgagtggggggtccagactacctgatgccccttccccaatttggggactttttgataatataaatatatctgtatatttt

SEQ ID NO: 57377 - DNA, 2388 bp, Homo sapiens
ttttttttaaaggaaagccacccaaagattagggagtaagcctttagtttaaatgttcaatttaagtattgtcaagcctaggctaaatagaggactgcattttcttagagtgtggaatacaacttatttatttcatttttgtttctctttctcttgctcttctttttgtcagcaaaaaggggaaaagctattcaattaagtacaaaggaaattccctgtaaggttaaaataaaaaatgaagctaccattcaagggaacttctctgtattcaaccctaatgtcagtggtttatcactgagttggaattaaagtgaatcaaagtctctatcaagcatactccacctagcataccatctgtacctgtaattcatttagagcccagatgtgtgcagttcacactaaatgtacttgttcaagccagtcacttgaggtttgaggtgtttgacttgaaacatctgaaccatctcctctgttggctgcctcgttaccactgtcaccagcttgagatgctgcttcccccgccagaatattttcttccaaaggattttcttctatctgggttcctctaccttcactgacactggcatcttcaaacattgaatcttctggcagcaccagttccacatccttcacaccttctgacccatctttgatacaggggagctgggaatctgcactgatttctgtagttgctggaggaatcagggcaatactctgagggttcatgtcatgaaaccaagccatgatgttgccgagaagattgtcattgatgttggggtcctggccagctgagtcaggatcactagatgagggacagaaatcacttcttgcctcactgagagggtgtgagctcagggtgtcagttgaaaatgggtcattctctgctcctagtctcatgaggctgtcaccaagttccaaaagctcagagctgctcaatgcagcccgagggctatctgtatttctggggacagagtccagcctggaaggtaaagaagtgcctatcgcacctaaggatgcttcattactgaggaagtctctagtttcttcatcgagggccagcccagactcttgcagtgataactgtattgcaagaagtatattgggatcgtcttcatccaaggaactcagagcctgaagagagtcctggttttcagagcgactggcaggggtgtagtcacgcagggaagagctgtgcagcacactcatagatgcagaacttaccacggatgtgccaggcctgcggctgctgcatgccgccttctggaatatctaaagtgctttcacttggctcatcagggtctggaggattactgagtagactgtgaaacatctcctcgacgacgttgtctgtgcctcctccgatactgaaattcagcatattcctctggtgatgcaaatcctaaatattcccaatcccatgttccacccagcaaagctgcgccttggagcttctggtgagtctgcaggagctactccccgagccacagatgccaggaattcttgcctcttctgctgtacaaggcatgctgctttgatgatcttgtggcggggtgtgcgaaggtaaggcctattgactttctgggcaaggtcttcagtgaccatttctaggtctgtttgcattagttcaaaaatttctttctttgtgcttttaggttccaagaaaaatccatatggataagaacacttgagaatgcgccgagtttttaagagcacatgaactgcatcttcaatgaaagtggtatctggacagcctccttcagtttctttgagagctctgctcaattgctccatcttttctttggctgttttaagaaggcgttgttctagctgataactatgctcatggtttttaaatcttgtataatagtgcataaatctgtcaagttcctgaaatcgtttgtgttttttctcagcctccacagtcatttccttggattgctcctccacgtgttgaatgacttcatagcgagtacatctgtaataacctccagtggacgaactatgttttttccactcttcaaggcaaatccagcaaaagtcatacttgcacttagcacactgcatgtgattgcagccttcattcttctgtattggagacttacagttggcacaaggcttggagttagttaataaccagagacaattggcggcatcctcgtaggcttcactaactcccacaagttcttctggtttcatttcggttattttttgcagccaattcttccatgtttggcagtcacaaggctcatgtgcttcaccaaggcactcccagcagaagaggtgtccttttccacaatcaacagcaggagctctcagcaatgggaagctgagtgtatcagatccagatgtatttgacccttgtttcgttagtcttactgctctgtcaca

SEQ ID NO: 57378 - DNA, 1656 bp, Homo sapiens
ttttttttagagcatttgatttataaaatctttactcactaactttacgaatgaaagaaaacaattccatccctctcacaaaaaggacatcttttaagctttcctcccaatctaacctccatgggatctcagaaattccaattcttataactcaaatccccacagtggtgtagatcgcattaactccccgggggacagcaatctgagggcagggcaggttcattaaacaaacatgttctgtgccctctggcagagagggcagcaggacatgcactgcccctgaggcccaagctgtggcatgggcaaggacatcaagtagctgacaacgatctgtccatctcagctggggcagaggggccagctcagccttgaaacagcagcttgggaagtgtctcagctgaaggttaatgtctccatgtctccagcttgggaggtggaattggatgaaggagtgaatgctttcttgccttcagcgagagcttttaaaaatgctgtgagttcttgaattctgagtagagggaaaagagcagatggagggactggatccgactcttgtagacagggatgtctagaatggcacagatcatgtcaatgtactctgccaggctgcaatcaatctctgccgtgggcaggcttaccttgcccaaaagctcttcaaactccggggaccattcctgcatcagcgtgtcaatgtcgggcatgggcctggtgtagtgcacagtcgcagggggcttagaacggtgtaattcagagatgctctcaatccacgtgtcaatggctttgggattcttttctgcatcttctaggctttttactttcatatgttgtgtgatgttgtgctgcttagaattctctgttaaccagagtgagagcaccgtagggtctgactgctttgtagaaggttcatccaataccaataggccaaggttgtcaggctttccatcaggacgtgggaccctttaagaatgcatcaatatccccggacagctgggataaaatcaggaatgcaaaggcttcagtttgtggtccccaggtcaatcaactgaggtgtgtacctactgatgtactggaagagttccttaatttcagcagaaactggcaaatgctcatagtctgcagggtcataggcccttccagaggggctccatgctcttcatcatcatcatcagaatcagaatcagtttcagatgaatcatcatcatcatcatcgtcatcctcattttcactaaagccccgttgaggtgtcaactgtgaggtcttcttcttctccttgttattttcctcttcacactcatcactgctgttatcagccatagccttgttaggaagatgggcagaacgaggaagtccttggtgtcttggggttggagtataaatacttgcaacctcttcggagtcgttaatctctagacgctcatcatatgtctggttttcaacaaccttggtctgtagcccttctgaatccgtctcctctataatggaaagaaccccagcctagggctggggtctcactccagtctcaaagccaggccactttaggattccacgccaagcaaccagcctgttgtcagtcgctaggcaaaaagataaattttaaaattcgcgagagttgcttccactctcgtgagacctcctgcgcgttaagcctcacccgcg

SEQ ID NO: 57379 - DNA, 868 bp, Homo sapiens
ggattctgtgtcactcatggtcacggtttcccaggctctgccagtgactggttctctgttttattcatcgtcgcttgccctgaggttgaaccacgactgagaagcctcccacatgagtgttttctcccccagcggctgtggcttcactatgtgttccccttgcacagaggggcgttgcccgagagtggacttggtgccatccgcccacgtagacctcacagttctattcagtgacactgaagtacagtttggcacctctcgggaggcagtttgcatggagacatgcgtatgacttgtccattcatcgtgcttccaggtcagttcaaagatcctagaactcgcccggaagcagaggatgaacacggacatccggagaaacatattctgccaataatgacaagtgaaaaatttttggatgcttttgaaaagcttctgaaagtagttgaaattcagtgaattggacaaacccagagtccgttttttacgaaaagtattaagtatcctattaatggaaacagaagttgaagacctcagtttaattttcacaagagtatctgacaacccaaagctgggggtgttacgtgagggtttgaagcttttcatcagccacttcttgctaaagaacgcacaggcccacagaagcgccgacgaagccaacgtgctgagagagaaagctgaccttgcaacgaagtgtctgcaaggaaaagcttccctgagaatgtagtcagggaaggaaggagggcaggtggccctttgactgtaaaatgtcctttgtaaacccaaaggcttattctgttgcctgcgtgtgaatgtttggtagagctatatcattgtctgttaatgtattatattttgagattttttttga

SEQ ID NO: 57380 - DNA, 1493 bp, Homo sapiens
ggtcctcttgagcaatgaagaggatcgaaaagtgggaaaactttttgaagacaccaagtataccactctgattgcaaaactaaagtcagatggaattcccatgtataaacgcaatgttatgatattgacgaatccagttgctgccaagaagaatgtctccatcaatacagttacctatgagtgggctcctcctgtccagaatcaagcattggccaggcagtacatgcagatgctacccaaggaaaagcagccagtagcaggctcagagggggcacagtaccggaagaagcagctggcaaagcagctccctgcacatgaccaggacccttcaaagtgccatgagttgtctcccagagaggtgaaggagatggagcagtttgtgaagaaatataagagcgaagctctgggagtaggagatgtcaaacttccctgtgagatggatgcccaaggccccaaacaaatgaacattcctggaggggatagaagcaccccagcagcagtgggggccatggaggacaaatctgctgagcacaaaagaactcaatattcctgctattgctgcaaactgagtatgaaagaaggtgacccagccatctatgccgaaagggctggctatgataaactgtggcacccagcttgttttgtctgcagcacctgccatgaactcctggttgacatgatttatttttggaagaatgagaagctatactgtggcagacattactgtgacagcgagaaaccccgatgtgctggctgtgacgagctgatattcagcaatgagtatacccaggcagaaaaccagaattggcacctgaaacacttctgctgctttgactgtgatagcattctagctggggagatatacgtgatggtcaatgacaagcccgtgtgcaagccctgctatgtgaagaatcacgctgtggtgtgtcaaggatgccacaatgccatcgacccagaagtgcagcgggtgacctataacaatttcagctggcatgcatccacagagtgctttctgtgctcttgctgcagcaaatgcctcattgggcagaagttcatgccagtagaagggatggttttctgttcagtggaatgtaagaagaggatgtcttaggaggagggcacccagaagtatcgagccatagctatccaaagtggtctgcatttctactgtaaaatgcaatttgaaaaaaataaaacgcaaaaaaagaaactgtaaaggaaaccaagagattttgtttaatttttttggccattttttcttcatcaattttttttcggtctcaacttttaaacttggtttaagcatttgatttgtaaaacagtaaataattgtatctttccatagcttttcaaatgtgaaatcatttttggaagcttggatctcattaaacttcatgtctctattccatttgtgccacacacttaaaagttagtgtactgaatggaaagatgagcattcctagttctacacttcttttttccccctcatgtgt

SEQ ID NO: 57381 - DNA, 1052 bp, Homo sapiens
  misc_feature (1)...(1052): n = a,t,c or g
gcttccggctggagctgctgggcgcgggacctggggcggttaatttggagtggcccctggagtcagtttcctacaccatccgaggccccacccagcacgagctacagcctccaccaggagggcctgggaaccctcagcctggcacttcctcaaccctcaggaagctcagcggtgggcagtcctagtccgaggttgccaccgtggaaggacagaatggcagcaagagtaactcaccaccagccttgggcccagaagcntgncctggnttcctngccnantcccccggaagcctccacactcaagggccctccacctgaggcagatcttcctaggagccctggaaacttgacggagagagaagagctggcagggagcctggcccgggctattgcaggtggagacgagaagggggcagcccaagtggcagccgtcctggcccagcatcgtgtggccctgagtgttcagcttcaggaggcctgcttcccacctggccccatcaggctgcaggtcacacttgaagacgctgcctctgccgcatccgcccgcgtcctctgcacacgttgccctgcaggtccacccccactgcactgttgcagctctccaggagcaggtgttctcagagctcggtttcccgccagccgtgcaacgctgggtcatcggacggtgcctgtgtgtgcctgagcgcagccttgccttttacggggttcggcaggatggggaccctgctttcctctacttgctgtcagctcctcgagaagccccagcccagctggtcctgtccttcctgcaccttcatcaatgccccagaccgccctggctgtgagatgtgtagcacccagaggccctgcacttgggacccccttgctgcagcttccacctagcagccaccagaggttacaaggggagagtggcccttccctcacaagtccgacatctccaggcccccactgaactccggggacctctactgactgcttgctgggacagtcaccagggttggggggaagggccacaaaatgaaaccattaaagacccttaagagccaaaaaaaa

SEQ ID NO: 57382 - DNA, 1113 bp, Homo sapiens
gggggatgagagctgcaccgcgcgggacaagtcgccggcggcgcccgacggagcagaagagagagcatggagctggagaggatcgtcagtgcagccctccttgcctttgtccagacacacctcccggaggccgacctcagtggcttggatgaggtcatcttctcctatgtgcttggggtcctggaggacctgggcccctcgggcccatcagaggagaacttcgatatggaggctttcactgagatgatggaggcctatgtgcctggcttcgcccacatccccaggggcacaataggggacatgatgcagaagctctcagggcagctgagcgatgccaggaacaaagagaacctgcaaccgcagagctctggtgtccaaggtcaggtgcccatctccccagagcccctgcagcggcccgaaatgctcaaagaagagactaggtcttcggctgctgctgctgcagacacccaagatgaggcaactggcgctgaggaggagcttctgccaggggtggatgtactcctggaggtgttccctacctgttcggtggagcaggcccagtgggtgctggccaaagctcggggggacttggaagaagctgtgcagatgctggtagagggaaaggaagaggggcctgcagccctgggagggccccaaccaggacctgcccagacgcctcagaggcccccaaaaggatgagctgaagtccttcatcctgcagaagtacatgatggtggatagcgcagaggatcagaagattcaccggcccatggctcccaaggaggcccccaagaagctgatccgatacatcgacaaccaggtagtgagcaccaaaggggagcgattcaaagatgtgcggaaccctgaggccgaggagatgaaggccacatacatcaacctcaagccagccagaaagtaccgcttccattgaggcactcgccggactctgcccgagccttctaggctcagatcccagagggatgcaggagccctatacccctacacaggggccccctaactcctgtcccccttctctactcctttgctccatagtgttaacctactctcggagctgcctccatgggcacagtaaagggtggcccaaggaaggtg

SEQ ID NO: 57383 - DNA, 516 bp, Homo sapiens
  misc_feature (1)...(516): n = a,t,c or g
tcttccagaaagttcaggtccctntgaacagccccatatcatactcagagtccacactgtcaagggaggggctgtcattcatggagaaaattttccctgccccaggcatcacgaccagttgattggtcacttctgacagagtgtgccgtctctgcccgctgcgtgtggactgaaatgcctcaaaggcatgagcggggtcttcctcggcctctccttctgtctccagcccttcgtcaatggaggtctccatcatgttgctgggcagtgactggcatcccttccgcaccaggacaggaggcacagggtcaagcagacagccattgacctaaacgccaggggagagaggaaactcagtttctgcactgctgagacagaaaaatccacaaaggaaaacatgtcaagacttgtggcgaactagaaattaattaagcggccgcaagcttattccctttagtgagggttaattttagcttggcactggccgtcgttttacaacgtcgtgactgggaaaaacaa

SEQ ID NO: 57384 - DNA, 619 bp, Homo sapiens
ttttttttttttactgtataattattatttttaatgtccagaatgtgtaatacaagggccagagcttcctcctggactcaattttataaattctcaattggttggtgaggccaatagggatactttttcttgtctaatttggtttctgggaaagcttcattcaagtcctcaatggtcatctgatcaaatggaattaagttcttcatcttctccatctctttctcatattctacaatcctggcctttgagagagacacccactcagcacaagatttcacatcttctttttcttcggcatccacctgggcagtatatttatcctctggcacgggaacctttcagcgcattaaacttcttctcaaagtcatccaccaagccagccttggccacattggccttgtagtaagcccagtcgatagctggtggattctcaggtaaagcagccaacctggaggtgagggtctcattccaggatttcagggaactagcaatggccttttggttctggggtatgatctctgcaaaagctacccagtcaatggtttttagagcaagttttcgcccagccattttgggatccttcaccgaccctggctgcccacgggtcctccgcagcaag

SEQ ID NO: 57385 - DNA, 328 bp, Homo sapiens
ctgtggtcgcgctctcaccccttctgctgctctcgtggccccctcgcgatggcgggcatcctgtttgaggatattttcgatgtgaaggatattgacccggagggcaagaagtttgaccgaggtgacaagtttcggttggtcatagctagtaccttgtatgaagatggtaccctggatgatggtgaatacaaccccactgatgataggccttccagggctgaccagtttgagtatgtaatgtatgaaaagtgtacaggattgagggtcgacgcggccgcgaattccagatctatgaatcgtagatactgaaaaaccccgcaagttcact

SEQ ID NO: 57386 - DNA, 855 bp, Homo sapiens
tggttctctccggtcttgtccacgctagggggtgcacgtactcccaactgtggtcgcgctctcaccccttctgctgctctcgtggccccctcgcgatggcgggcatcctgtttgaggatattttcgatgtgaaggatattgacccggagggcaagaagtttgaccgagtgtctcgactgcattgtgagagtgaatctttcaagatggatctaatcttagatgtaaacattcaaatttaccctgtagacttgggtgacaagtttcggttggtcatagctagtaccttgtatgaagatggtaccctggatgatggtgaatacaaccccactgatgataggccttccagggctgaccagtttgagtatgtaatgtatggaaaagtgtacaggattgagggagatgaaacttctactgaagcagcaacacgcctctctgcgtacgtgtcctatgggggcctgctcatgaggctgcagggggatgccaacaacctgcatggattcgaggtggactccagagtttatctcctgatgaagaagctagccttctgaacctcgcctgaagccagcctctctgccaagtcactcaggtcatgggcattgttcaagcctgagtggcagccgctcttgctcacctgttgaggaagggctggctcactgtccaccgtggcggcatctttaactggcctccactcaatgggaaactgactcgcctgtgaaagacacagtgggagagctgaaaatgaatcagaagctttatgtatatgatttttaaattaaactttactttttcagactgcccctcccctttttgtaaaaagtccatttactgtaaaatcgttttttccagttaaaaaaa

SEQ ID NO: 57387 - DNA, 355 bp, Homo sapiens
gaaaatttgctactgttttagaccatattttcctattatttatctgttcaaatttgtattattacaactaatagctcttgaattctttgctaaaggtaacagcaacacttccagaggcttctaaaacactactgttttgcagggcaggagtattctggaatctttttacttagatataaaataaacctcgaatattaaaaagttgtagccatctgagagaggaaagtttaagtgactgaaaatgtagaatacttcaacgtgcatgttactacttaaaactagtctttctgctggaatctaaggagtatatatatatatgcccccttgtggttaattattgctcctttaataattt

SEQ ID NO: 57388 - DNA, 4837 bp, Homo sapiens
tgctggagggggagccgtgggtgcggggcaccgtgggggccgaggccccgggacgcccgcccggccccaggccccgctcagcccgggcgcccccacgggtgccccccccttcttggtccgagcagtgtgagtgtgccagggagcccggcggcggcggcggcggtggtggcggcggtggcggcggcgtggaatccggcgtgggctggggggtccgagccgcggggggcagtgccatgcacaagcaccagcactgctgtaagtgccctgagtgctatgaggtgacccgcctggccgccctgcggcgcctcgagcctccggggtacggcgactggcaagtccccgacccttacgggccaggtgggggcaacggcgccagcgcgggttatgggggctacagctcgcagaccttgccctcgcaggcgggggccacccccacccctcgcaccaaggccaagctcatccccaccggccgggatgtggggccggtgcctcttaagccagtcccgggcaagagcacccccaaactcaacggcagcggccccagctggtggccagagtgcacctgtaccaaccgggactggtatgagcaggtgaatggcagtgatggcatgttcaaatatgaggaaatcgtacttgagaggggcaactctggcctgggcttcagtatcgcaggtggcatcgacaatccccatgtccctgatgaccctggcatttttattaccaagattatccctggtggagcagctgccatggatgggaggctgggggtgaatgactgtgtgctgcgggtgaatgaggtggaagtgtcggaggtggtacacagccgggcggtggaggcgctgaaagaggcaggccctgtggtgcgattggtggtgcggaggcgacagcctccacccgagaccatcatggaggtcaacctgctcaaagggcccaaaggcctgggtttcagcattgctgggggtattggcaaccagcacatcccaggagacaacagcatctacatcaccaagatcattgaggggggtgctgctcagaaggatggacgcctacagattggggaccggctgctggcggtgaacaacaccaatctgcaggatgtgaggcacgaggaagctgtggcctcactgaagaacacatctgatatggtgtatttgaaggtggccaagccaggcagcctccacctcaacgacatgtacgctccccctgactacgccagcacttttactgccttggctgacaaccacataagccataattccagcctgggttatctcggggctgtggagagcaaggtcagctaccctgctcctcctcaggttccccccacccgctactctcctattcccaggcacatgctggctgaggaggacttcaccagagagcctcgcaagatcatcctgcacaaaggctccacaggcctgggcttcaacatcgtaggaggagaggatggagaaggcatttttgtctccttcatcctggcaggaggcccagctgacctgagtggggagctgcgcaggggagaccggatcttatcggtgaatggagtgaatctgaggaatgcaactcatgagcaggctgcagctgctctgaaacgggccggccagtcagtcaccattgtggcccagtacagacctgaagaatacagtcgctttgaatcgaagatacatgacttacgagaacaaatgatgaacagcagcatgagctctgggtctgggtccctccgaacaagtgaaaagaggtccttgtatgtcagggccctgtttgattatgatcggactcgggacagctgcctgccaagccaggggctcagcttctcttatggtgacattctgcatgtcattaatgcctctgatgatgagtggtggcaggcaaggctggtgaccccacacggagaaagtgagcagatcggtgtgatccccagtaagaagagggtggaaaagaaagaaagagctcgattgaaaactgtgaagttccatgccaggacggggatgattgagtctaacagggacttcccggggttaagtgacgattattatggagcaaagaacctgaaaggacaagaggatgctattttgtcatatgagccagtgacacggcaagaaattcactatgcaaggcctgtgatcatcctgggcccaatgaaggaccgagtcaatgatgacctgatctccgaatttccacataaatttggatcctgtgttgccacatactacccggcctcgacgtgataatgaggtggatggacaagactaccactttgtggtgtcccgagaacaaatggagaaagatattcaggacaacaagttcatcggaggcgggccaattttaaatgataacctctatgggaccagcatccagtcagtgcgggcagttgcagagaggggcaagcactgcatcttagatgtttccggcaatgctatcaagagactgcagcaagcacaactttaccccattgccattttcatcaagcccaagtccattgaagcccttatggaaatgaaccgaaggcagacatatgaacaagcaaataagatctatgacaaagccatgaaactggagcaggaatttggagagtactttacagccattgtacagggtgactcactggaagagatttataacaaaatcaaacaaatcattgaggaccagtctgggcactacatttgggtcccatcccctgaaaaactctgaagaatcccctccaaccattctcttgtgaacagaagaaatcaagtccctcttccctcctccctcttcattcctgtccccatggggagaacaaatgctactgttcttgtccccttttttagatatgtcaaaaaaaattaagttttctagtcctgttctttttttttttttaagtttttgtttgtttcagtttattttttgggatgatgccatctcattcatcatgtgactgtgcccattcctgcatgggacctttcccaagcgctagaccaggtgcaaaatccatcagaggccattgttttcataaaaaccaagcagaagtgaaggggaaaagggggagggactgatgggaaaggacagactctggacagctggcacggcttgtgaagtgagctaaatgcaccacatgatgagatgctcctgggcatttctccctatctgtactgctgtcttgcagctctgaacggtgcaacgtaatggcgacagaaagtatcttatttatatatagatatatatatgtaatttatataaaatatatagaaattattatatatatatattatacactctcatataatatatatatattcacacacatttggggttagaaaatctatggagacttcatcaatggtactatgttattagagaaatgctttaattttcatattccaatcagatggcatcttctatcccagctggttgggaagggattgaagatggtagcaagtgctgcactaagggcactcgcatttggtcattctcttgagagctaggaggggtcagcctgaggccggagaggaagggcttttgcctggggtgagagggtgagagacttgacctgaaagcagctgctgcccctgaggtgcagccagagtcctgtgtgcggacagagagaatggctaatgatgctccgcgtggaattgcctattgttttatgccacctgatgtgtctgcatgagaggtttcctttttgttcctttttaagctgctgttaaaccaaaaccatgttgtgctactgtgtcagccttttcattattgcaaattttacttttactatttaagtgaatgcatagaatccaatttgccaaggttctaaaggcttatgaggtcctgaaggagccaggccttgtgatggagtaggtgacacaggcctggttgtcctgtcagcagaagggaaagcaggggctgggctgagaggaggacacggagggctctgctgaggttccttcctgggttccaccaacagggacagggagtcacttgccttccagttctgtgctgggatggcgggacagcacttggcttgcttggccagctgcgtcatgagtttgatttggtttttttttttttgcagctgcttcatatgctctgctccagcccctccccaacagctggtagcttatggtttcttcaagaggaaagtagactttatgctgtacatttgagctgtagagctaagattcgcttactggtgagctgtgaaaccttgttgctttttcccagagtctgatggcagtgactgtgatcaagggaatcttcaccgccacaagtgcaggcagcaggtgtggttcaggtccccccccaccccactgtgctcctttgaagccaacgtgcctccctcgcctccatactggagggacgacgcaggggagaacagagaagtgcttggccctaggattgaggcacttgtttcctagcccgctgggttagggctggtgcaagcgaggcaatgttgaggatgctttaagcactaccagccgaatccgggaactctgttaacagttgtccaaccagcagaatgaggctaactgtataaagcatgggacccaggatgaggataaggaaaggacagcggctttccctgggcagtacaatggcttgaaggcaaaaagggataaagtgacagccgactgtgactctggtgaggaggggtgagcagggaggttgattctctgatgttaactaagtggcaaagtctcaaccgtgctcagccctccccctcccagggaagagaaacaaagattcaaagtaagcatgatactagtgggtttaccagtgtttcttccaaggagacatatattttttaataaacgatagttgcaatgaactgtggctcagagaccttcttaaagtagttgagaagggg

SEQ ID NO: 57389 - DNA, 1147 bp, Homo sapiens
ccgctcgcttcaatatggctgcccccagggagagacgaggctaccatgaaggagccgagcgcagaccctgagtccgtcacccatggatcgcagcgcggagttcaggaaatggaaggcgcaatgtttgagcaaagcggacctcagccggaagggcagtgttgacgaggatgtggtagagcttgtgcagtttctgaacatgcgagatcagtttttcaccaccagctcctgcgctggccgcatcctactccttgaccggggtataaatggttttgaggttcagaaacaaaactgttgctggctactggttacacacaaactttgtgtaaaagatgatgtgattgtagctctgaagaaagcaaatggtgatgccactttgaaatttgaaccatttgttcttcatgtgcagtgtcgacaattgcaggatgcacagattctgcattccgtggcaatagattctggtttcaggaactctggcataacggtgggaaagagaggaaaaactatgttggctgtccggagtacacatggcttagaagttccattaagccataagggaaaactgatggtgacagaggaatatattgacttcctgttaaatgtggcaaatcaaaaaatggaggaaaacaagaaaagaattgagaggttttacaactgcctacagcatgctttggaaagggaaacgatgactaacttacatcccaagatcaaagagaaaaataactcatcatatattcataagaaaaaaagaaacccagaaaaaacacgtgcccagtgtattactaaagaaagtgatgaagaacttgaaaatgatgatgatgatgatctaggaatcaatgttaccatcttccctgaagattactaagctttggttctgatgtgtcttggccgtaatgtttctagtaggttttataaagctgctcttcataagagtattttagtttgttgagtgtatcagccattcataagccagtaatgacaagtgcagagcttcaaactataactttgttgcccagaggatgtgcagttgtcatctaagctctcagcagtacccggcttatcctacgacttcacctgaaatgctatagttatccctacttttttaccagtttctcccagaagcacctgcttaataaatcaaagatgtttg

SEQ ID NO: 57390 - DNA, 3577 bp, Homo sapiens
ttttttttttttttccaagtagtaacactaatttcaaactgttggtggctacatttgagtacagaactttattaggaaaattataagtgcatatacattttttcattggtatgacttcaaagtagaaattgttgtttctcaaagagttgtttcttatttattttttaaagcacgctgcgtataggaattggccttctcctggaccattttcacattatctgggagatgcaattgaaacaatacaaaatacagtattcatcacatttaacactgaatcattcactgctcagagactgagagtccagcgaggttgcaaaataacaaattttctacatggttttatcagtggtctgcttaggggatttggaagtttctagggaatatttcccaggaatggggctccttcagaatgggtcagggaagctctgtagagggatcagagcactcaaattctcatccagctggaaaagggtgtagcacctgggaaaggcgatcaactcccagtcagggagcccacggtgataacaccagtcagacgatcacaccatggaagggtccaatgagatccaatggaaagacttagaacatctaaggttgggggaggtgcaacccttctgctattcagcccctctgctccaagcggaagcttttttctcaggaggtaatctctaataacaagcagagtgccctctggagcctcctcgctggtatctcagtgcctggacagagggggacacaccacagcacaaacacgtggcacagactcaatcccaacacacagccagtcaacgagcctctggccccttcctctgggtcctgatacagagctggcagcgagggccctctgaagaggttacagggagcccaagggagtgtcaggtagaggcagcaccaggtcccggaggggacagatgagggatccctagtaaacagctcgtggacgcacttgactagcagttcgaaagcaaaaagagattcggattacaagagacttttcccttgcaaatggaagactgtatttaaatgcatattgctttagctgggcagtctccaggaaggagctgattgttagtagaggaattgttatgcaaataattttccctgcagtttctactcttatctattttctcccatggaggagaaatagaaatgattcctttcctgactgtagtcaagatttagggtcatgtttgtttcctcaaccaagaattcaatggtcttggttcatggattgggggcaggtacatccaagttctacgtgacagattttaaaatatcttggattacctggataatgactgccccactgaaaactcaattatactggtatagtgagaggttaatttcaaaaggttttgaaagagttctgtatctttataactagtaaagatccctcaggctctattttttcaatataacatagctggattgaggattttaatttttgtttaagggacaatttttgttgatgggtttgccttctgccatgaagctccaatttgaaatacttatgaaaatacttaacacatgttactaattaccctacagattattaaattcaagaacagttacaattcaagattacatcactataatttacttcctacttcctacatgttacatagtttccttgctttgacttccttgttttccactttcttcattaaaattttttttaactggagtctttaatcaaagggcaaaagtattcgtaagactgaatgaaaaacaaaacaaaaacccacaagtgcttgcctttgtcaaaagtgaacattttaagtggcttaatacagctctatcgactgccctcagtggaaggggaacactccaaatgtcaggcaggttgacttactcttcacatagcacattgttctcttagagaaatgtcctgtgggaagggcccgaagcacaggtgacacgcagagcagagagggcccaggaggaaggcaggagatgatggcattgccaaatggtgaagaagatgaggttagatgtgaattgggaaagaatcttcatgtccaggattggttattttgtggactgggttttaaaaaccaaaaacaagttgtgaatgcttgttttcctcaagcagtgctgggcttggccctagtttgaaggtactgacatgtgagggagcactgatggggcagcaatcctctggggtcaaccctggtgcacaccgaattcccttgggctctgcccatggacccaccatgtttttgtgatcagtgggggaaccaaggtagttcaccccaaaggaccacggctctgatcaggactgcactcaaagggcccaaggagcatctcctcgctcagcggctgcacagggggaacagtgcatgcatcaagacattggtcacagaggaggacgctggctttgaacaaaaacataggattggacaatggacaatattccaaacaagacacagatgtgcacagtgttttcaggtaacacaagacattttcatttcctgcttggtgcacagtttacatgaaagctttggtcctgagagtccttttgcggggccatggaaacagtcgtggacacacatgatgatggatgagacagagaatgatgagcagaacgtggaggatgtggaggtgctcgggatgagggctgggtctcactctgccctggcctcacactgctgcctcagctcagggtagccctgctgccctcccagaagaggcagacccggctcaccatgtggatggagaagggggtgaacctcccatgtggccctccaccatcccatcccacagagagaagccttcactaggctttgcccaggttgactggtcctgacacccccaggcgtccctcttggtggctctccaccctagggctgaccatggggccaggctccctcagcccagtctccccacctgcacagctcagagaatccaaaacccaggagccctgagtcagaggagtggctccgtggaaagacactctaataaggcaagtacaataatggccttagtctaagctgctacgtgtcgccagtgacactgaataatcaaactaaatgaaaaataaatgtcatgtattttgctacataatcaaatggtgaaaatatggcaaagtgtccaaaacaaagcccttggcaatgcctggggccctgccctggcaggggaggctgtggcaggcccttccctaacactggtttcagagctggactcctactgtaagggttcctcaggcgtctgaccctctcacatcttgaacctcttgtttaaagctttctccaggtactcctgaatccactttagcttcgggtcaatgcacacttgtctgttgttgttcttcagccgggctacaatctgaagggcacagtttggagtgttgagaattttgagatgcttgacgttggctctggcaacatggctttcgaagaatcggcatgggcatctgtagctcaggctgacgggcttcccgtcgctgaggcagagcgcggtcagcacgaggaccagcacgaccacgaccttggcgttcatggcgcgggcgggcgggcgggcgggcggacgagcgcgggtcgggggccggacgccgagcgggcaatgcggctgacggaga

SEQ ID NO: 57391 - DNA, 1394 bp, Homo sapiens
gctctccactaaagtatcactgtagagaaaactaagctcagaatatactcaataacataccaaggaaaaaagtgagtgtgactgaggggacccccgtcaccaaccgcagtacgccctgctaaacggtagttatcttcttgtccttggtggcttgcttgatggcagcctgctcgcagatgatctctttgagcctctgcagcctcgtgttctgggtggtcagttcccccaccccagtctggctgcggtgcagcagggtcagagcgtggatgtactccagctccgtgtacttcacaccctggtccaccaccaggttcaggagctcgtcagctgtgttgtaaagcatctcgtagtactgccttgcaaagtccaggtctgcctcccgcgacatggtgatgttggtcaaattctgctgaagaacaaaaatgttcctacacattttcttgatgccagactcactgatgcgcctgaagtactgggcaccattaatgaggatgcaggagatcaggtggcccaggccttcgaagatatactggaacttgtgctgctgaaggctggcgctcatggcctcttcaatggcgctgatatctttgttgagcttgaccaccagggggtcataatccatactttccacattagccacaatggcatagttcccctcctttgcaagagggataagatagtggaaacagtgaaccctcacttccagatgtaagacaagcaagcagcggtcagccatatcctggaacgatttggcaagttcactgagagtctgcatgatctgctctgacactggggggagatccgtgttcgtgtggctgtcttgagcaggagaaagcatctgggatgtagaaagattggagaaagctgactttgttcgacttgccaaccattccaggctttcatgcatgttggccaaggctttgaggtcactgacgtcacgaaggatgtcttgtggagggattaatttatcacccaggttcccaataagaacttcagactccttgccaaaagctgcccttatgaaatcttcttcctcctctctttttggcctcagctgtttgggttgagccatattcatccagtttggtagagatttcaagagtctgctgatatcatcatcttttgcccaggatgcactgatgacaagtttttcttctgactggacaatacccctgtaagctgcagtgcaggtgtccttgtactcctggagcttcacgcacaccatgttgaggaattgatctgaatatgcactcaagtcatgcatcaggttcaggaggtcttgaactgtcttctccacaatgattgtgctctgtaggagaggccgctgcactcccagcaccttcatggtgtctgcgttggccagaatcttcaaagggtcagatgttttagtgacc

SEQ ID NO: 57392 - DNA, 940 bp, Homo sapiens
gatcaaagacttgaatgaacacattgtttgctgcctatgcgccggctacttcgtggatgccaccaccatcacagagtgtcttcatacttgtgagtgccttggagactgcctagttcttccagtccctagtcttcaccaagctgactgccagcttctgtgcggcctgcctcacgcatccaggcaccccacccagcccatgaatccagtttccagagggcctgagaatctgctttttttttcctgcagtctgcaagagttgtattgtgaagtacctccaaactagcaagtactgccccatgtgcaacattaagatccacgagacacagccactgctcaacctcaaactggaccgggtcatgcaggacatcgtgtataagctggtgcctggcttgcaagacagtgaagagaaacggattcgggaattctaccagtcccgaggtttggaccgggtcacccagcccactggggaagagccagcactgagcaacctcggcctccccttcagcagctttgaccactctaaagcccactactatcgctatgatgagcagttgaacctgtgcctggagcggctgagttctggcaaagacaagaataaaagcgtcctgcagaacaagtatgtccgatgttctgttagagctgaggtacgccatctccggagggtcctgtgtcaccgcttgatgctaaaccctcagcatgtgcagctcctttttgacaatgaagttctccctgatcacatgacaatgaagcagatatggctctcccgctggttcggcaagccatcccctttgcttttacaatacagtgtgaaagagaagaggaggtagggggccaagcccccaccccatcccactccccttccctccccagatatttatgtgaaatgaactgcagctttattttttgaaataaaaacttttaaaaagcaaaaaaaaaaaaa

SEQ ID NO: 57393 - DNA, 681 bp, Homo sapiens
tttttataagcaatatgactttatttagttcctttggaaacaaaaccccccaaataatgcctgaacccaaaggtacataaaaatgacccaaaatagatttgaacatcacttgtagtttcttcctcgtaacatgagtgctttcagctggacagtagattacaaagcatctccgatcacgttaaggcagatgatcaatctgtggctgcatctgtaactcctccttattgtctccaccagagacagccaggatgttggctgtgatggaccagctcacatgccacaccacatcgttgaacttgtgcaacaatttaggggaccacgtattgcttgaggcatcatcacaggtccaaatgaacacacgaccatcctgggagcagctggcgatggtgctggtgggcaggccgatggagggggcccaggccacatctcgaacccagtcactgtgcgcttgtagcttctgctcctccttccactggccgtcctcctcctccttccacagcttgatgaggttgtcacagccacctgatgcaaacctcttgatgtaattgggtttctgccccgatgggtggtctatgaggcttccaggtacaacagcaggggcccagctgacggcattgcagccaatggtgtgagcgttgttgatcttctttacttcccattggccttccccggtgtaagtcc

SEQ ID NO: 57394 - DNA, 726 bp, Homo sapiens
ggtttaaacggaaaagataaaaattcctagaccagcaggagggaggtgtctgttgcccggcagtgtccaggcatcctgttcaggggccaagctgagcacccggtgggccagtgggaaggtcccacaccctccagccgttcccatcctcctgcccttcttcaggatgtgaaggtcttccgggccctgatcctgggggagctggagaaggggcagagtcagttccaggccctctgctttgtcacccagctgcagcacaatgagatcatccccagtgaggccatggccaagctccggcagaaaaatccccgggcagtgcggcaggcggaggaggttcggggtctggagcatctgcacatggatgtcgctgtcaacttcagccagggggccctgctgagcccccatctccacaacgtgtgtgccgaggcccgtggatgccatctacacccgccaggaggatgtccggttctggctggagcaaggtgtggacagttctgtgttcgaggctctgcccaaggcctcagagcaggcggagctgcctcgctgcaggcaggtgggggaccgcgggaagccctgcgtctgccactatggcctgagcctggcctggtacccctgcatgctcaagtactgccacagccgcgaccggcccacgccctacaagtgtggcatccgcagctgccagaagagctacagcttcgacttctacgtgccccagaggcagctgtgtct

SEQ ID NO: 57395 - DNA, 1214 bp, Homo sapiens
cggacgcgtgggcggacgcgtgggttcgtggtgagaagccgtcaaggagtagaaattggtatgcttaaaagcagattctaaaagcagtttctcttcagaacatcttttttcataccacttgataagcatcttgaaacaccatgggctgtagctgcagtaaaatgggtgatgtcaaagagaactatcttgaaacatttatttccagtccaaaatggagctttatattgtgtttgtcataaatctacgtattctcctctaccagatgactataattgcaacgtagagcttgctctgacttctgatggcaggacaatagtatgctaccacccttctgtggacattccatatgaacacacaaaacctatccctcggccagatcctgtgcataataatgaagaaacacatgatcaagtgctgaaaaccagattggaagaaaaagttgaacaccttgaggaaggacctatgatagaacaacttagcaaaatgttctttactactaagcaccgttggtatcctcatggacggtatcacagatgtcgtaagaatctgaatcctccaaaagacagatgatgcggaggttcctgggggaatcaaagagaaatgtgcctcatttgccatttgagaaaatgcagtctggtgtattcagtaatatatagtaaagtaataatgataaaatatcttttcatatattagaatgtgtacttttatataaagtaattctggatttgacattctcatttagagaaacctattttcttttttctttttctattttagtgtttcatttatgtgcggtctccaatttaggacttttccatagtgccaaagccatacatattcagtagaacatcaataaattacatcagaaattcaacactttattataaaacgggcttcgtgttagataattttgctaaacagtaggctactgtaagtgttctgagcatatttaagacaggctagcattttcaatttacaatattttcaactgatagtaggtttattgggatgtaaccctatgataagttgagaaacatctctttttgtgtgtctactgtgatttaagtatttttaatcatcagccaagcattgttagtagtataaatatgattaataaaaatgtgcatggctttcctgaaggagattttttaattgcctttgagaataaactcataaggtctaccaagaaaataaatgttatgatgtttcaaaaa

SEQ ID NO: 57396 - DNA, 679 bp, Homo sapiens
tatttgggattatactgaacctatttgtccaataacctgagttttcaaataattttagttctataagtactataattatataaatattaatgaattcagattagctgaaaggaaaaaaagtagaagcctgactacttggtgctaactactaaagattttggcagaatcaatgttggatttggctttcctgtcccttccccatgccagccccccagagtgttctgccttgtgctgcctcccttcacctggagtgccacacccctctctctgccagttcagctcttcattcttcaaggcctgaccttgtctgacccttgtgcctctaaacccgtgggccccacctctcttggttcctatgtcaggtgatgtttgtgtttttggttatgcccatctccatagccagaccaagcactctggaagccagggttgggtgcttatttatctgtttgccatgcagaaaatatcttgcacaaaattacctctgttaaggaatctgaagctgaatttagtttggctgagtcagggttgggtttttttttaaggggctgtggggtgaaatgttgactggaagccacccacaaacacacacctgctggttaggaacccggctgtgggtggttctgagctgtttggcttcagttgacagtttctgattgccctgagcaccaggtctcatctt

SEQ ID NO: 57397 - DNA, 3369 bp, Homo sapiens
gcggccggaagtagccggaatctctgaaagactgaccgactgactctgacaggatccggggctgagggaaggaggcggcggccatggagttgggcgagctgctctacaacaagtctgagtacatcgagacggcatctgggaacaaagtcagtcgccagtcagtgttgtgtggaagccagaacatcgttctcaatggcaagaccattgtgatgaatgactgtattatccgaggggatctggcaaatgtaagagttggacgtcattgtgttgtgaaaagtcgtagtgtcataaggccaccattcaagaagttcagcaaaggtgttgcattctttcctttacatattggagaccatgtctttattgaggaagattgtgtggtcaacgcagcacagattggttcctatgttcatgttgggaagaactgtgtgattgggcgccgatgtgtgttgaaagactgctgcaaaattcttgacaacacagtattacctccagaaactgtggttccaccattcactgtcttctcaggctgcccaggactcttctcaggggagctcccggagtgcactcaggagctgatgattgacgtcaccaagagctactaccagaagtttttgcccctgacgcaagtctagcatctctgcctcatgtcttgaatctgcttgagctctaagatgaacctggggacaaagtgagccagtcagcacctacaaagagcttttgtgtctttgacatctaccaccctcctccttttaaaaaatttctttagaatttctcaatcttcaaggctctaagtgcttaagaattcactaacagacagaccatctggaggagctgtcttcaaatgctgtgcttacaccttatctatgaacagtcactttgtaccattatctgtggaacacagaatcatctgttcccaacactccagccccttggtcctgtggatggctggatcccgcctgaaacggacctgcagagcagcagcacccttccggtgtggaggctatgtagctggtgcgctgctcacggccattcactgcccatgctgagcgcctctcacacaggtaatgcccagcttttctgctgctaacacatttggccagttgttgcagttgctcatcatcttgggaaaggtgtttgtgacttttcagagcccagattcctgttgtctattaaaacttgaagggaggggtgaatagtgtttctctcttcttcccaaaatgaccttagctgtcctaggatagttagtaaaagactttttagcattttgacctagggcctttggctttcactaaaagtggggacctcagtatcccagattgtaattttgccaagtgttagatttgagtctctcatgtggatgcattagtcaggtggttactccttgcttcaaggtacttaccttatttcattgaagacaccgcatttgtgaactcttgcttcctggcctagaaccattccagcctaaccctggtatttgcccataaactccacaattcacaccaaaatggtctggaacttagagctaattcggcatatatacaggaagggctccttagaatcagtttgtgggcacagagcctcaggagtaaatgaagttactagggctgttcttaccatctccttctggccaaatagcacaacatttcctcgttctgctctgacctcttagcttagaaggaagattcagaagtgaggggctaagaaggttgtccttgcctaatgctctgatctgtaagtgaatagggcagaacagttcagccttgaggttagaatttagcaggagctatcctgacttaatatccagttgtggggtttgcaaaacaaaacagctgtatgtaatcattgccactagttccatctagaactcctttctagtttgttatttttaaaatgtttatacataaaaccaccaaaatacatagcttcgacaagatggaagtttatttctctctcccataacagtgcagtgatagtcagctggtccaggccaggcaaggggctggccatgatgtcatcaggcacccaggttcctactgtcttgccatgtggccacagttagcaacaaaggaggctgtaaatttagtttctacttgggcagccaaaactctgaggaaggagattctgctagtaaaaaggagtgggggaagaatggccattgggagacaacaagcagactcaaccaggcctctttgttggcttcctttcctcctgctgcacatgagccttcgccgtgcatttggagccatgacagctgatagctccagacctgcatcctcctagcttgggggggctctgaatgaaaaggttttctttcccttccagttcgaatttggaaactcccaaagttctcaatgggtttgttgtgagttccatgtcctcttggatcagtcactgtggccatgcatgtttggccacatgattaatccagtctgggtcatgaccttttcttcatccaaaacaaggtgatgggaagacaaaaacaatagctactacaaacaataggagtttataattatgtgctgatgtattcgaagatgtgttgacagtcgtgagtgtgtatcctaggaaaggcgagctggactctgtctccatggtggctctcaccccagggacctaggaacagcctgtcaccacacaattacttttataaccctggagatgaaaatctccttgtcctcaaaatacttccagaagaacaaccagatgggaaggaccttggttgggactctttccagttcacttggggcagagggaatttaatggctcacgtagctgaaaaggatgggctagattgggcttcaggctgcatcccaggactccaaacagggatctgtctctttggctctcagctctgctttcatttgagttggctttattcttgggcttcacagtgtggccccacagcaccagttattgataaaaagagctcccctttgctgacagaactgctggatttggttctcattggtccagacgaggaaggtatccagcctcaagtcatcattgtggccaggaagatggaatacaccaaatggacaggcctggcatgtacccacagagactgagagttggtgctggtggttgtggtggcagatgatattacctgaagaagggacgaatgggtgctgggcaggacaaagcatcagctgtccagttcaggcctctcctctttccctggtgtcttcattttcctccgtctccctgctgtcccttaccctctgcccaatctctcattactcctggtcttgggagttgccttctgaggatactccactgggggtacctgagcctggattagagggcagggggaggatattgcctagccaaagtgggtgttcaataaaaaaccatttggagatggtcttctgt

SEQ ID NO: 57398 - DNA, 393 bp, Homo sapiens
gatggtttttattttgtattttttgctttatgtaaaatgtcaatggtttgctgactctttaatcttaaaattattttacatttgaaccttgcctctagccccaaatatttaagtactttgaatacacatgaataattttagttgaccattaacaggtgtgggtgccaacatttcttaacctactgtgttattttaatttattttgagagatggggtcttgttctgttgcccaggctggagtgtagtggtgcagtcatagttccctcggtctccaactcctgggctccagtggtcctcccacctcagcctctcaagtagctgggattacaggtgcacaccgtcatgcctggttaatttttaaacttttttttgtagagacaagatcttgctttg

SEQ ID NO: 57399 - DNA, 934 bp, Homo sapiens
  misc_feature (1)...(934): n = a,t,c or g
ccaacagctatgacatgattacgaatttaatacgactcactatagggaatttggccctcgaggccaagaattcggcacgagggaataaattaccgataatattattctatcattcattttagttacaataagtttgggtgcatataatagaaaacactaaaataatagtggtttatgtaagatagaagtgtatttgtccccattatttaaaaatagtccagcaggacttacaccacatcattaccattgctcaaaaaagaagttacaagaaaaatcaggaaatattttattttgaataataattaaaacaccacatatcacaatttgtgggatttaactaaagtagtcttcagcgggaaacttttgttttaaagaagtagatgagaatataggaaagataaaatcagtgatctctgcttttacattcagatgctagaaaaaggcaagttattaaacctaaagtaagtacaagaaaggaaataaataaaagcagaactcagtgaagtggaaaagaaacaatggagcgcccaaagctagaagataaatttttggtaaacattaataatattaacaacccttagtaattaaacctatagagaaaaaaagagggacatcactgtatattttatagacattaaaaggataataaagggtatatttatgccaataactttaacattttagatcaaatggacaaattctttgaaagatatgtcaccaaaatggacacaagaacagatagtaagtctaaatatccctatagctgataaatcaaatgcataattaaataatttttaagggcaggcccagtggctcatgccagtaatctcagcactttgggaggccaaggtgggcagatcacttgagctcaggagttcaagaccagcctangcacatggtgaacccatgtctccaaaaatacnaatattactgg

SEQ ID NO: 57400 - DNA, 1099 bp, Homo sapiens
  misc_feature (1)...(1099): n = a,t,c or g
ttgcatttaggaacaaaatttattccaatttaaaacagagttcatttcaggagaaagatatgaaaagtcgacttccatcggtgtctggattaagggtcagggccggtggctgtgggaggtgacactgagccgctcctcagcccctcctcccatccccaacgcgcacaacacatgcatttcaaatggtaaaaggcttaaaaacagcttgtatagaatattcttttttaaatagattaaggttgaaattgtctgaaatcaggactgtgtaatatacaagtatcactgggtcccgtccgccaggccggccacaggatctgctgccaccactgggggacattggcacggggatgcctccctgggggagccgagggacccaggggcattgggtttgcagtggccgggggctgctgccgcccgggcgtaacatggtcggagaaggtggtcggcactcacgagaaatcgttggcaggtgagattcaccaaggtaaaacacacaccccacatgcccacgtggccccacacgtggcaagggtgggggttggctgtccttgcccctgggtgccactggcacgagaaccactgcctgggactctcctggggcaggcacccctgccctgggcctgcaacacctacctctgcttttttggggggcaggggatcaggcactcagacccagaggatccaggccacgacgttttggcggtcccagcccggctctgggatgcttggcacgccccctccctgggaaggcctaatacttagccccgcagcgccccggcctgcgtgctgggcgactccaccctcaggccacggccaggtcaccttgtgcaatctgggccctcagagatgccacaagcacaggccccccagagggctccgctgctggaaaaagttgtagcggccctgccaggggtggccccatctgctcccccagggcaccgccggggccccagcactcgccatggggggcttctggcaccaaccctcttaggtagacacctggcacaaaaaaaggacgcttccgggtgagacagaagtggtgtggggaagccggggtgggtatcccgccagccccgtcgtcncatgggctgatcaccag

SEQ ID NO: 57401 - DNA, 828 bp, Homo sapiens
  misc_feature (1)...(828): n = a,t,c or g
gcttccagcaggatgacgctcacatcttctgtacaacagatcagctggaagcagagatccaaagctgtcttgatttcctccgttccgtctatgccgttnttggcttctccttccgcctggcactgtccacccggccatctggcttcctgggggacccttgcctttgggaccaggccgaacaggtccttaaacaggccnnnnnnnnnnnnnnnnnnnnnnnnnnnnnnnnnnnnnnnnnnnnnnnnnnnnnnnnnnnnnnnnnntgacgtgcacctccacgatgccctgggccggccacatcagtgtgggacaattcagcttgacttccaactgcccctgagatttgacctccagtataaggggcaggcgggtgccctggagcgtccagtcctcattcacccgagcagtgctcggttctgtggaaagactgttgggagtgctggcagaaagctgcggggggaaatggccactgtggctgtccccgttccaggtggtggtcatccctgtggggagtgagcaagaggaatacgccaaagaggcacagcagagcctgcgggctgcaggactggtcagtgacctggatgcagactctggactgaccctcagccggagaatccgcccgggcccagcttgccactacaattttcagtttgtggttggccagaaagagcaaagtaagagaacagtgaacattcggactcgagataatcgtcgccttggggagtgggacttgcctgaggttgtgcagcgacttggttggagctacagaacacgagggtccccaaatgccgaagaaattttctgagccttttgtacatagaatgaagg

SEQ ID NO: 57402 - DNA, 1424 bp, Homo sapiens
  misc_feature (1)...(1424): n = a,t,c or g
tcaactccttgctgaccaacatggccggtggggacatggcacgagtcagcacctacacaaatgcctttgccttcactcagttcggagtgctgtgtgccccctggaatggcctgctcatggaccggcttaaacagaagtaccagaaggaagcaagaaagacaggttcctccactttggcggtggccctctgctcgacggtgccttcgctggccctgacgtccctgctgtgcctgggcttcgccctctgtgcctcagtccccatcctccctctccagtacctcaccttcatcctgcaagtgatcagccgctccttcctctatgggagcaacgcggcgcttcctcacccttgctttcccttcagagcactttggcaagctctttgggctggtgatggccttgtcggctgtggtgtctctgctccagttccccatcttcaccctcatcaaaggctcccttcagaatgacccattttacgtgaatgtgatgttcatgcttgccattcttctgacattcttccacccctttctggtatatcgggaatgccgtacttggaaagaaagtccctctggcaattgcatagttcagaagccctcacttttcagccccgaggatggttttgttcatcttccaccacctttgaggacctcgtgtcccaaaagactttgcctatcccagnnnnnnnnnnnnnnnnnnnnnnnnnnnnnnnnnntaaagacacacaaggacgtctggcgcagcaagaaaagaatctcagttgccaagcagattgatatcacacagactcaaagcaaaggcatgtggaacttctttatttcaaaacagaagtgtctccttgcacttagccttggcagacccttgactccaggggaggatgacctgggggaggaagtgtgtcaactatttctttaggcctgtttggctccgaagcctatatgtgcctggatcctctgccacgggttaaattttcaggtgaagagtgaggttgtcatggcctcagctatgcttcctggctctccctcaagagtgcagccttggctagagaactcacagctctgggaaaaagaggagcagacagggttccctgggcccagtctcagcccagccactgatgctggatgaccttggcctgaccctggtctggtctcagaatcacttttcccatctgtaaaattgagatgaattttggtgttgaaagttcttcctggagcagatgtcctagaaggttttaggaatagtgacagagtcaggccaccccaagggccatgggagccagctgacctgcttgaccgaaggatttctgacagactatctttggggatgttttcaagaagggatataagttatttactttgggcatttaaaagaaaatttctctcgggaataattttatagaaaaataaagcttctgtgtctaaggcaaaaaa

SEQ ID NO: 57403 - DNA, 1532 bp, Homo sapiens
ggagaggtgaccctgacagtgaagctgatagcatagacagcgatcaagaagatcccctaaaacatgctggtgtctacacagcacatgaagtggccctgattatgcgtgaaaagctaattcgtttgcagtcgttggatattgatcagattaaacgacttcagcatctgctcaaggagaagaagcgccgatacttacataatcgcaaaggggaacatgaagctctaggcagtagtctcctgactggcccagagggacttttggccaaagaacgagagaacttaaagcgattaaaatgtctgcgacgataccgccagcgctatggagtggaagccttactgcataggcagttgaaggaacggagaatgctggccacagatggtgctgcccaacaggcccataccactcgttccagtcagaggtgcttggcctttgtggatgatgttcgttgttccaatcagtctcttccaatgaccagacactgccttacccatatttgtcaggatacgaatcaggttctcttcaagtgctgccagggatctgaagaggtaccctgcaacaaacctgttcctgtaagcctctctgaggatccctgctgcccactgcatttccagttgcctcctcagatgtataagcccgagcaggacttggatgttgtgggtgatggtatgcagtgtcctccttcacctttgctttttgatccttcactaacccttgaagatcatttagtcaaagaaattgctgaagacccagtggatattttgggccagatgcagatggctggagatgggtgcagatcccagggatctcgaaattctgagaaagcctctgcaccattgtctcagagtggattggctactgcaaatgggaagccagaacccacttctattagttgatagtttggggaaccattttactttggtggatttaaatttctcgttcttcaaagaagtatttctgatcatctctcacaaaacacaggcaacccagactaccttgtttttcttctggattgagtattatagtcaaacgtaaagccaaattttgaggacgtggacccgtgggtttcttcccactcagggcaaggaagagaaagagagataatccctatcaaagcttctgggattatttgggactatacctaaaaggaaagtgacatctttgtaatgggatttcccaagtcatggatagaaatccacttaagtagctaggtgggagctgtctttgtgagtggtgtctttgagatactgatggccctaatatcggttatctctatctgaagacctgcagtttagcttttcttcacctctacttaattgggcagtctttaacccctttccctggtgaactctggctttttatcctctgagaaaacagcccacaggactgggtcctccttatccgtcttgcttttaacctatgtaaatttctgtggttgctatcttatgtaaaatatagtaaaaatttattgtatatagtttctattaaatgttaaagaaaatgttatgaaaatatcaaacagtcacctgaattga

SEQ ID NO: 57404 - DNA, 506 bp, Homo sapiens
  misc_feature (1)...(506): n = a,t,c or g
tnnncnnannnnttttgaannccaancagctatgacatgattacgaatttaatacgactcactatagggaatttggccctcgaggccaagaattcggcacgagctcgcctacacaaggacccgcgctaaaagccagagctcccagtccccgaggcttgaagacggggactcccttctccaccaactctgtcctcggggggtggggccccagccgagatcacagcgcgacaggagtgggggtggccgctggagacaggtgaagaaacaagaaaactaagaaatccgagcggttggagggggagtctgtgtggatgggatggggacgccgggggaggggctgggccgctgctcccatgccctgatccggggagtcccagagagcctggcgtcgggggaaggtgcgggggctggccttcccgctctggatctggccaaagctcaaagggagcacggggtgctgggaggtaaactgaggcaacgactggggctacagctgctagaactgc

SEQ ID NO: 57405 - DNA, 1534 bp, Homo sapiens
gtgttggtgtgtttggtttgtgcatagtgagaaccattttctagaaaatcaaatattttattttcattaaaaaaaaaccttgaataataggaatcattttacacattaatggttgctctttaaaagttatgaatctcaagagataccaaaagcacttaagagttaccaccacattttgcccaagttctaaggaaagttctgaaacttagtggtggtgtgtttgtactcagcaagctccagacagtctgagttgctcattccatgaacagaagcttgaaaatgcccttacagttgagatataaacgagggaagaggtgaagctttcaggaagccagagagcccctgcccggtcaggtttcctgaggaagggcaggggtgctctatgctcatcagtcattcaagcttctcaggaaatgtgcccatcatgggaacagcagctatcttccaagcttaaaaattatgaatcccaggaagttaaagcccaaccagccaaccaccttcacatccttctcatactagtagagtcattcaaaacagcaagtggtgcttctgaggcagcctcaggaaggtctttgggtggctattctagaggtgaacatactggaaaggtttttacctaaagcattttcagttgaaatgaaaaaagaaggaaaacctccaaaagtcaagtttcaaattctttcagtgctgctcccagagaagtcccgtgtgcaaaggtgtgatgttctggtcataagcggcatactcagaggtgccggtactggccagcttgagctgctgggcagcatgggtcagctggaatgcagcatcaagggtgggctgtctcaggcagcagtgtgcattccctttccagcatgtcagccacccctttcagcaggtcccaggaaaccaaaggctagagcggcctttcgcaaacggttcagctccttatagaatgtctgtgtttttttccagggtaagtttcccttgccaatttccttaaaaaccttcctgtaacatcctgtcctgcaaggcccgcctgggtttggatcccaagacaagtcaacattcctgggcaataaactgccgtttgtttttgggctgcaagggggaatggactccttattgtcatccctcgcccataagggttttcctttagcatctgaaataggaccccaactgtgcccattttcccctagcccatgggagaggttctgggcccaggctcaaagagagacatcatgaggtttgatttcttcttgctgtcagcttgggagtagaagcattccatgccattcaggacctaattgaacaatcgctaccattccttccacttttaggctaccatggagcaggacacaaaagttgggtattttgcctgcaatctgattggctgaattttcatcttcattgtcatcagtgatgccagtacccacctcatcaccttctttgttaagtgctataggtaagaccagatgtctggacagaactgggggacttgaaatatcagctatatcaataaatcccactatttccaaatctgtgttaatgactt

SEQ ID NO: 57406 - DNA, 559 bp, Homo sapiens
ttttttttttggcattcaggctctttaatgtctgaggatggggggaagaagtcaatggtgaggcttctctgggaaattctgcaggccttgtagttctctaagcccctctagcaacatgtggatatgggctttgatattcatggagtccttggtgaggctgttgctgagctctgtgaggagagagctcttacgatcaatgaacttgagagcttctgccagtgtcaactccaggaaaaaaccatatcccagggccacatagatgcgtgaagtatctgggaccactgtgtcaaccgaagaagttacagcccaaatccacctgcatatataactccgagtgcttagcttcctggagtcgctcaatgacatttctcagttgaaggtatttggccagctgctcatataccttgtctcgatggtccagcacctttcgcaagtcccgctgcagcacgtcactgatgaaggtctcgtagcgcagcactttctcccccgtggcctccaaccgcccgccgcttagggggcgtcgccatgatgggctcctcaggccgccagcaataagaac

SEQ ID NO: 57407 - DNA, 1203 bp, Homo sapiens
gcgaccgcggctgccctctgcccgggttgtccaagatggagggcgctccaccggggtcgctcgccctccggctcctgctgttcgtggcgctacccgcctccggctggctgacgacgggcgcccccgagccgccgccgctgtccggagccccacaggacggcatcagaattaatgtaactacactgaaagatgatggggacatatctaaacagcaggttgttcttaacataacctatgagagtggacaggtgtatgtaaatgacttacctgtaaatagtggtgtaacccgaataagctgtcagactttgatagtgaagaatgaaaatcttgaaaatttggaggaaaaagaatattttggaattgtcagtgtaaggattttagttcatgagtggcctatgacatctggttccagtttgcaactaattgtcattcaagaagaggtagtagagattgatggaaaacaagttcagcaaaaggatgtcactgaaattgatattttagttaagaaccggggagtactcagacattcaaactataccctccctttggaagaaagcatgctctactctatttctcgagacagtgacattttatttacccttcctaacctctccaaaaaagaaagtgttagttcactgcaaaccactaggccagtatcttatcaggaatgtgggaaaccactgtagatgaagatgttttacctggcaagttacctgaaactcctctcagagcagagccgccatcttcatataaggtaatgtgtcagtggatggaaaagtttagaaaagatctgtgtaggttctggagcaacgttttcccagtattctttcagtttttgaacatcatggtggttggaattacaggagcagctgtggtaataaccatcttaaaggtgtttttcccagtttctgaatacaaaggaattcttcagttggataaagtggacgtcatacgtgtgacagctatcaacttatatccagatggtccagagaaaagagctgaaaaccttgaagataaaacatgtatttaaaacgccatctcatatcatggactccgaagtagcctgttgcctccaaatttgccacttgaatataattttctttaaatcgttaagaatcagtttatacactagagaaattgctaaactctaagactgcctgaaaattgacctttacagtgccaagttaaagtttaccttattct

SEQ ID NO: 57408 - DNA, 874 bp, Homo sapiens
gctcggcctcccaaagtgctggggttacaggcgtgagccaccgtgcccagccacagtcttcttttttttgagacagggtctctctgtcacccaggctggtgtacagtggcgctatctcagcttactgcaacctccgccttctagactcaagcaatccatattcagataatttttaactatttttttgtagagacaaggccccactatattgcccaagctggtctcaaactcctgggctcaagcaatcctcctgcctcggcctcccaaagtgctgggattacaggggtgagccactgcacccggccagttgatcttaccttatacattagaaggctctgcacccccttcaagccactcttggcctataaaggagtggacagagaattacccaagggtggtgggatcctgggcatttgagagctcagccttctgtcccctaagatagcttttttttttgccatctgcatgtctcaaatacgttcaccaccccccatacaccacctaagaagtcaatgcaaactttcacccctttgactaatataaaatgagtattcctggaggcagtcatccccaaagaaaatggggagtggcaaagcaacagggcaaggtgttcctgtttcaaagcggtgaagaacaaaatcgcacggacaattttgagctgcaaaaattggccccaggaaacttctgagcttgggagataaaaggcagaacctggaattgtagcatccaaggacaaaaagaatgtttgccagcaaatcttggctgtcaattttaaaggggccgtgggcggggcggaggggggcgggtaggattccaacaaaaaatgagtataataaataaaaaataaaaggggaaaaaaaaaaaaaaaaaaaaa

SEQ ID NO: 57409 - DNA, 1203 bp, Homo sapiens
ttgaacatgtaactcaggaccccttttccctcttgcgtctgtgccagctcaaatccagcccctcgccctgtgccaccccaactgtgcctgatagacctgccccagcgttcctgacttcttgctggcctgtggagggtgaggtgtaattatttgtcacctgaacctaatgtatattctccttgagccccagatcccttcaagctggaagggatggggctgttggtggggtcagggtccaagaggaatgggtgttctgtggcctcgagtcctctcctgtttgcgaaaataccagttttgctctctgtgggacaaagcactgctgatgaagtccccgtgggctcatccgggctggaattcttggtttttcagccattccctgcagagtcactcaatcatcaagtccctcacagccatttctgttcccagaggagccaggcctgcagctgggctgctcaggagatggcctcattcctcctgttctcccagtttgctttccacttaagacaaagccttgtctatgtggggggcggggaccggggaaagagggaggctgaaatgtttattctgcttctcccgtgtttcatgccatctcgcgtcccccttcctgcacatgggtgtgaatgcacacacatacgcgtacacacaggacttggtctgcttggcctggcctcttctggcccaggtgggttggaacacgtttgctgcctgagcctgtgccactgagcatgttaggtggagcagttggtttgggcacgtgcggggtgttggcaccggaggcatggaaaagcacaggctgtactgccaggctgcgatgcgtgctggcccccgcacaggctcctgtgtgcagggactgattcctcagcacacgaggcttccacaacccagtctgctccatagcactctggcccaccctgtctgcaggtgaaacaggagggctgtttgcctctgccccatccccccgactgtgttcaggagtcccaccttgcatttcagacctgggctggcagtctgttggacttctcttcaggaagaaaaagcatcagggggaaatggaatgcccctgcccccaggaacatggcagaagcacaggttctgtacctcagatggactcctgctgggccttcggggtctcagttggcttcccccagattctgattctacagctgcagaatgtatataacgcaataaaagcaaatgtttgaa

SEQ ID NO: 57410 - DNA, 1246 bp, Homo sapiens
gcggccaggagaagctgcggccgctggtggaagtcctacagccgctgcacggacggcatcatctacgtggtggactcggtggacgtggaccggctggaggaggccaagacggagctgcacaaggtgaccaagttcgccgagaaccagggcacgccgctgctggtcatcgccaacaagcaggacctgcccaagtcgctgccggtggcagagcattgagaagcagctggcgctgcacgagcttatcccggccaccacctatcacgtccagccggcgtgcgccatcatcggcgagggcctcaccgagggcatggacaagctctatgagatgatcctgaaacgcaggaagtccctcaagcagaagaagaagcggtaatgcgcccggagcgaccggggagcgagcgagtgcgtcaagaaagaatgaatggatggatggatggttggatggatggatggatggatgagcgagaaccccgcgcccgcgaacaaagagcgaaccaaagcgatgcttcgaatttttaaaacggaatctctgcacccaaatgcaggactggtgacttaaggagctgcgaagtctgatttaccggcctactctcgacctgccccccacccccagctcaggggaccttttgtctgaacgccagagctactgaccaggtcggggggccgcggtggggagtggaagagccggtcctgctgtccgccctcccagccccaggtggaaggctcagttgtcggaaagacaaaagcgatttcttcccactcctgcagggccagaagttcaggctgccccgcctccactgggggatcgcacctgtgaattacctgaggtatgcatttcccagaaccgtgggcgtacccaccttggggggcatgttggttctggggggaccacctctccttgcattcaggggctgtgaagctgagtaattttcggtcacagggcaggcccctgttgaaatttcatttgtcctgctctgggcccaaaggtggtggtggtttgggtcatcagaggactgcctgggacggttcagcgggcacggagcgctgtgctggcctggctggggatggccgcggaggtgcccttttcctggtgctttgtggtggctgcagaagaccagttttgttgagaactgcttttcagcctggaatcagacatcttccagatggtttgaccctgtccatgtgtaggtcattatcacacaaagagaccaataaaaataaaaaaaaaaaaaaaaaaatgaggcgc

SEQ ID NO: 57411 - DNA, 596 bp, Homo sapiens
tttgcatcttggtggtcatatttattggagagcttgagaaaaatgaaaataccatttagcttaagaagttgtgagttatctgcaaatcaactcatttcaggagtggaagaatccccggaattatttcttaatatcaaaatgtatgcaggtttctcttatgaatgttttgtacttttagagaggccactgtacaaagtctccccgttttccatacaggacaaattctttgtttcagccaactctcagtggaggggcaaccaggacaacgccatctccccggacaaagagcattggaatattcccgtttccgttgatttatatatctcttcatatgtttcttcatcaatttctatagtagtcacagtttcttccacatctcccaagatcatatttaaatgttgatcataagcatgtaatctgcctcgaagctctcggtcatttctcattttcacataaattcgctcatctaggctgagcctgataagatccagggggctcctctacagtgttggtagtttgttgctggtctacgtcgtccgccatgtttcaaaccctgcgccctttcccgcctctcgcgagaacacaagagcaacgtc

SEQ ID NO: 57412 - DNA, 893 bp, Homo sapiens
tttttttttttttttgaggtccaaaacaaactttatttacatagagataataaggatctcaataactcaaatgctgaataattaagctgtaggttgactagaagtccgtgattcaccaatcctgttttatggaagtagtataaaactacatttggtattttccctcagttctctggtattcttgaagcttgacagattcagaacactttaatggtaacttgttgaacagcaatagaaaggagatgatgtacttagaagtcagtctctcacaaaaaagacattatatcccgagttctgttaaagccccagccagcaaggccccataaaggaatgaagacataggatagattcatggtagtaaactgttccagtttagcacagagtgcgaggcagaaggctaatttaagtaacattgcaatgaggtaccaggctttttttttaatattgtgtgatccatgtcgagggtcaaagccagacttacaccgcccagccattttcacaatcagcaggacaagaaggatagtatcaaatatccagactggaataaatatgaggaaccagttcccaaggtgctttctcatcccagtttcaacaccaacataatcaagaagagtagtgtgaaaagcccaggtgagtagtactctctgagccaaggacattctcatttaaacagtttaaagaggctgttgcaggatcggaaaaaaggaaatataccctggcagcgctgccggccggaaagcggagagggacgcgaagatcagcaaattcgccagtttggatccttgtccttttccgcccttttccccccattaaatccagaacccgtcacatgataattaagaaaaaacttcagttccgcctcctcaaacgactgcggtagaggatctctcagc

SEQ ID NO: 57413 - DNA, 457 bp, Homo sapiens
gccatttctcaggtgcttgcgaggtgatcagaaggcaaagatgtcggagcgaaaagtattaaacaaatactacccgccggactttgacccatcaaagatccccaaactcaagctccccaaagaccggcagtacgtggtgcggctgatggcccccttcaacatgaggtgtaagacgtgcggagaatacatctacaaggggaagaaattcaacgctcggaaggagacggtgcagaacgaggtctacctggggcctgcccattcttccgcttttacatcaagtggcacgcgctgcctgggcagagatcacctttcaagacagacccttgaaaacacagactacaccatgggagcttgggagccacgcggaatttccaggctgagaagctcctggaggaggaggagaagagggtgcagaaggagcgggaggacgagggagctgaacaaccccttgaaggtt

SEQ ID NO: 57414 - DNA, 1312 bp, Homo sapiens
  misc_feature (1)...(1312): n = a,t,c or g
tcttagatgagaaacctgttataattgccagctgtctacacaaagaatatgcaggccagaagaaaagttgcttttcaaagaggaagaagaaaatagcagcaagaaatatctctttctgtgttcaagaaggtgaaattttgggattgctaggacccaatggtgctggaaaaagttcatctattagaatgatatctgggatcacaaagccaactgctggagaggtggaactgaaagggagcggtggaggggatgccctggagttcctggggtactgccctcaggagaacgcgctgtggcccaacctgacagtgaggcagcacctggaggtgtacgccgccgtgaaagggctgaggaaaggggatgctgaggttgccatcacacggttagtggatgcgctcaagctgcaggaccagctgaagtctccggtgaagaccttgtcagagggaataaagagaaagctgtgctttgtcctgagcatactggggaacccgtcagtggtgcttctggatgagccgtcgaccgggatggaccccgaggggcagcagcaaatgtggcagatacttcaggcagtcgttaaaaacacagagagaggtgtcctctttgaccacccattacatgtcagaggctgaggccttgtgtgaccgtgtggccatcatggtgtcaggaacgctaaggtgtattggctccatccaacacctgaaaaacaaacttggcaaggattacattctagagctaaaagtgaaggaaacgtctcaagtgactttggtccacactgagattctgaagcttttcccacaggctgcagggcagggaaaggtattcctctttgttaacctataagctgccccgtggcagacgtttaccctctatcacagacctttcacaaattagaagcagtgaaagcataactttaacctggaagaatacagcctttctccagtgcacactgganaaggtntccttanaaccttcctaaanaacaggaagttaggaaattttgaatgaaaannnaccnccccccctcattcaggtggaaccttaaaacctcaaacctagtaattttttgttgatctcctataaaacttatgttttatgtaataattaatagtatgtttaattttaaagatcatttaaaattaacatcaggtatattttgtaaatttagttaacaaatacataaattttaaaattattcttcctctcaaacataggggtgatagcaaacctgtgataaaggcaatacaaaatattagtaaagtcacccaaagagtcaggcactgggtattgtggaaataaaactatataaacttaa

SEQ ID NO: 57415 - DNA, 791 bp, Homo sapiens
gagaggatccgaggggaaatgtttagagccctcaggaggaggaagagaccgagttttaggaaaaacatcaaagctggataggttgggcagaagagctggggataacatttagagaggctgagagtcctgggttctgggttatcaaggtgagagaaaccagaggttgccagttgtaggtgggcgtcaggactagagtgatgcttccagaagtttctgcaagtgggccgagtctaaggtagggcagggtacgccagaagttgaggggcactaggtagacaggccgagctggtggctgggtgctcccctcaccctccatgctgctaggagcccgtgagcagggacttgctctcctctccctccctcctggggcctgcctgtctgtctgtgaactcttgtcggccagcgaggccgggagcaggtggccttcatctgcaactgtgtctctctcagcctccacagccacggggacaccctgcacctattcccacgggacaggctggacccagagactctggacccggggcctccccttgagtagagacccgccctctgactgatggacgccagctgacctggggtcagacccgtgggctggacccctgcccaccccgcaggaaccctgaggcctaggggagctgttgagccttcagtgtctgcatgtgggaagtgggctccttcacctacctcacagggctgttgtgaggggcgctgtgatgcggttccaaagcacagggcttggcgcaccccactgtgctctcaataaatgtgtttcctgtcttaacaaaaaaaaa

SEQ ID NO: 57416 - DNA, 2560 bp, Homo sapiens
tttttttttttttttaagagagtacagatgtcatgacatttattaaaaggcatgctacaatgctatatttgttaggaaaagagattagagatatcaagtaatagtcagcaaatatacaaactgaacgaaaatggaatatactgtagtgtacagaagcttgaattaaccatgcactacgcatttagaaaatatgttttttaatattttatcttctctttgcatttataacataattcacttcaacaatcacagactccttttttcccaatgccacagactgttacaaatgaaagctggtactgctgcttatccaaaatatacaagacaattgatgttttatataaaaccactttataagttcatttgttcccaaaaacctttttttcttttttggccttgttaaaaaaaatgttgttacaaatatttacagcattttcttctgttagacgaacattcttaaaaactgaaaaggggaattttgatgaacagaccacgtaaaacaccagacaatgtcagaggctcctagctgtgctattttttttttcttagatacagtactgaaaatgcccatcaaactcgtcatcctaatccattctgttcacactgaaactcacattttctctaagtagtctattcagcagtagaaattgaaagtaaaggccgctctgcactgggtcttctttcagaaaggagcttggggaaaatgcaaaatgctttacagagaggagttaaaaccacaacagtcagtctttggtcagagcaatgaggtgacactttgatgcaaaactttgcttggtcagcaatctttataactggtactttctggatatgggatgaatttttaaaagatctgggaaacaacagtaagggggaaaaaaggccagagtatgatttttttaatggcatcaaaaaaatagctatttaaatatttgttattacaactactacatagatccaagaagtgaaaataatacaacaacaaatcagttgacaatgctgatttaagcatgccataggcatctttcaattatgactatgatcaccaaggtcactggaccagacaaatatccctgttctctggaacatatgcctcaggttacaaaaactaaggaaactaccacaaagattttgagcagctctattcttggacctgcacaatgctctacaatgaatattatgtgataaaggcaaaagtgtaactgagactttatttatagttacaattctttgcttggatgaatagttggtgggacaacattcttttaaaactatatagtacatatttcctgaaaaccagaatactgatactactttagtctcaaataggaagaaaaggtcaattaagactactgaagaaggcacataaactttggtcctgttttttctcccactataaaacccctcaaactaagattttaataattttctatattttaaaccactcacaactagctgttaaaatttgctctgaaaaaagactgctaatagtcttgtagataacaacacaactcttttaaaagacagctgagttatattttcaaattttgtgcaatctaaattgtatttctttcagcacaatagtagagtattttgagtctggcagttttgttctcattaacagatcaagacaaaggaaaggctaagaaaaatgctttacgcatcgtcacgctgtctctttttggttttaaaaatagcagttacacattaggttttctaagggataggtggggaaaaacacatgtacttttgtcaattttttgcccaaaaatatctcgtgggaacagaagagaaactgcatgacaatatgctaaacatgtaagcactgctgactgatggcacggagacactgaaaagaacagagagccaggcgtggtggctcatgcctgtaatcccagcactgtggggaggtggaagcaggagaatcacttgagcccaggagttggcgagacccctaaaaataaaataaagtaaaataaaaagaaattgagcagaggcattcataggagccacttctcatcaactaaaacagaacccatgattatcatactaggtggagccaaagaaggcctcactgtcataagggaacaggcaggcataaatgatatctccaaaaactgagctcagcaacttttaacagtaaatcagaaacattacttcaaataattgatttcaatatttagtcttaaagaatttatggcattctgtaagagctgctgggtaattctgatactctccagtaagtatcaattaagatactgggtcatttttctatttgtatgttacacaaaacacattttactgctatgcaaattattcaaatctcaaagtaaatcattttggtgtaattcgctactgttaaatgtgtactgctattttttaaagtcctgaatatatatactttgtgtagaagtcaagacaccttgaaaagtgatgacaatactccttaaaaataaaataaacttaaaaataggatactacggtagatcaacagagaaaaaccattgctagaagatactgaataaatgcatgccaaaacagagatacacagatctagtttttc

SEQ ID NO: 57417 - DNA, 1736 bp, Homo sapiens
tatttttaattttgttaaatttttattattagggtttgaaataaattcagtgttcacatttctataaagaattaacccagtttcaggaaaccctgccccagcagggcaggtaagcaaccctctccctgcccacatctagtttgatttcacgccctgatgcttcaaggtgcccagaaaagcggcagcttgtggaagaggaaatctatgcccggcccgtgcttggggcccagggctcagtaagctttcgagaaagcagaggggaagactagcttactgcaaaaacctttttaaaaaatattcatacacttcagtgagcgcctgttgagacgttaggggaacaagagcttggaaacatcccgtccaggccattgggaggcagcgtcttcctcacaccccgtccctggatgtcgggggtgcagggggaaggtcccggctcttccactggagaaaggagactcacctggcttcctagttcatgtttgactatttcctctaaaacctgtgctgagtctttgactgcatgcacgggaagcacaaacgttcggcttgtatgcaaaaaaagtacaaaaacaactagaatataaaagttttggtaatataaggccatctgttcaagtccaccttggaaacctgtaacagatatttaaatactacagtgaaaaggcatcttaatatactttttaaaaacatctgaagtaatccgctaagattaagtgtgtaaaaaaaaaaattcaattccctttgagggcactttgtcctttgaagaagggaaagtggggcggggagggcacggggcccaccggttaatgcttcagccacgggtgggcttcaatggaagccttgctgcggtccccatagtcatacaggagctcctccccagccgcgatgtctcgggaggcgatgaggatgaggtgaggtacgccgtcgatgtcgtgcagtttggtttggcagttcccacatttgctgtgattgatcagtcttcctaggcgatttgtctctctagttgcatccacgcagtaggttttgctcagatactgaaaatagtacatgtagcagcccgtggaagggtcctgtgcgtacagagcctcccgtttcttggcgtcggtgatctcgatgaggtccccgtggtattccaccacaaagtcaccccgggagaactgcttggtggcaatcacacccctgcctttgccatcgatgaggtcaatcttcattccttcttccttcccactttcaatcaattcatctattcttttcctttcttcagactgcagctcggctttgctcttcctggagctccttcggacagggtagaaatccgtaagtttgcgattctgttgcgtttttccttgagctttttttcggggggcctgtttgcccttgatgggctttttcagggcttgcttggcgatggctgcattggtggaatcacaagatgagggtggagtttttggaggttctgctgcttcagatttttggtttggaaaaggtaccaggggacctttcctggcgtctttgatcttctgttcctcggacttcatggcgctccgtactgcgttcccagcatttcttttctcttctcgtttcctgtagattccggctaatggtttcccctggcatttgacttcgtgatgtgtaactgagttctcttcctgaagggggaaacgcattccagagcatttgttcgggctcatgtaggaatagatctttgactgcatgcacgggaagcacaaacgttc

SEQ ID NO: 57418 - DNA, 1255 bp, Homo sapiens
  misc_feature (1)...(1255): n = a,t,c or g
ttttttttttttttttaaaaaagctgtaggctttattaagcagagtgacagtacaaagctttcacagcgtggaaggggtcccgagcggggtagccagtgttagatttttttatcaccttttaaactctctaaggcaggaaatatgtgtggtgggaagatgttaccagagggagaaacaaagacaattaacatgtctcagatcttgaggaaaactggaattgtaacttaagttttctctacttataaccttgcagcgggatggcaaaggagacaggatctcacgggattttacaaattgtgtttacaaggaattggaattgggaccatagataaggtctgctggtcacagaaaagtgggcttttaacattccttttagtttcaggggagggggaagggagagagggagagaggacacagggaagcttacaacaaaattttcgctgtttatagctttcttggggaagaaaacacaggcgcaaattctgatgttaggaatgttttaagcacatatcttcagtactcttcatccaggaccgaagtaagtcccgcatgcaggaaatgagtgtttcacagctttcctgagccccctactcgacccaggaagccccagctggaacctcctctcactttcctactttcttctgatattccttgaaaatacttctccttcatagcggagataagtagttttaaacagcttggttccttccctgctgtgaagtattgagttttatttcaggaccaaaggacataaaccagtttatgacataaacaggtttagacaatccctcatgcaagaactggggaaagtttgcatcgggttcagtaacaatctggtttaagttgccttctggtccacttgctctctctgggatattaatgcggctgctgctcctttcattatcactccatgaaaactctgtatcttgagaatcctgaaagatagggtttctcttattccttttgggctgggtggaatgatggttgccctctttactgccatttcttcttcttttcaaccaaagaaccagcatgttccttcggagaaggcttcgcgggaatttttttcaagcacgaaggggggggcacgaggcaagcanggccgcncaccggccaacactgtcacctgcaggtcatgagagccgagcgccaccaaccccggaagaaaatacatatccgctngtttccgccctgagccccgagatcttggctgagaaagcaaagcgtgatgaccgtggggaccagagctcggac

SEQ ID NO: 57419 - DNA, 2680 bp, Homo sapiens
ttttttttttttttttttccgcttttagttacatagcatctaagttttctgatcactaccaggtaattttcaaccaataagaaaaaggaaccaacactcagctctgtagaaatctaccttcttttagaaacctcaggcctctgcacccctttagacaactcatttacaaccacaaccttccatggcttctcacatgccagccagggcagggtaaaaacggcaatttcttacaccgaaaggtcctttttatgtaacaaacagacctccccaaaccacaacttttttgtcctattgatgactcgcatgagatcaaatctctagtgtcccctgactgccccgacagggtctaggacaacacaggttaaaaaggacagcagggtcgttcaactcccacactgcctcaggtgttttctcaaagcacgacaattctgcaatggagacttacacgtggaaaagaatcaaactgtgcaggtaccctcagtcctctgccactaccagctcaatagcttgagctcagaggatcaagtcaagtctctgtctcacttttaatctagcacacaagaggcacaactcaggcagtacacggtattgaagcatgcaacaggtcattggtaacaaaactcagttagattaagagtacattaaataaatctttgtagttgagtagaaatcacaaaacagttggtgaggacaggtctgtaggctcagctttacatccaggtttttatacaccagcagccagattcacaattgatagatattgcaccggaaagatgtgtgcagggaaaagaaatcatcatcacatttaatgttcatgataaaaaaataaaaacaaaaccagatatgacctccatgtagtacataaagtgccttcagaattggtgcatttacaacaaaaactggttatttagctaccattagcaaacgcatacaaacaggagactaaacagatctggtttccacagttttgaatcaagcagtgccaagtttcattcaaaatgtctctactacaaacagcaaagaggaaatagaataaaagatgactgtacagcgcccaggaagggttaagtaatttctcggatgagaaatgggagtccaaccctgtctcaaatgtgttagaacacatgtaattacttctaaggaataatggtgtgattcctttcaagtcaacacaaaatttgtcatgctatgttacaattctctcagcctgtagctattagctaaatttgtacaaaaaaaccccaaaaaaaaaacgtaatatccagtttttcattctgagtatggaaaaaattatcattatgtctaatattatattggaaattctctcaaagtacttgtctgtaggtttttggacaaaaatttgccttccaattctaataaagtagagggtggaggtgtcagagtacttcaaaaataaaaatgtcattgacattaagcctggtatgaaagtgaaataaaaaaaaaaaaaaaaatgctcacttttccaagtacatgagacatctttaatcataacgaaataaaatctgaaaatcggtctaaatcattttaaaaagtaaacatgagtcgtaatactatacctgttgagtgattaattccattcattgtcattagaaaggatgtaaaatatttattaagggctttgcctgcagaggcacaacataaatagcattaagtcctcctgaaatgtaattagtgtacacatcaaccagttgataatttgtggtgggaaaggcaggaactcaagctgggaccaggttcccgcatccgaacttggacgagtgcgtggtgaaggctcggctccagggaccatgcctgcagctgctctctgccatcgcctctgcaaaagtctgttaggcaaatgcaaaagtgcaagcagaacttgcttgaagaacaaccacccccgaggcacagggtgcttaatccaccccttcaaatccttgagcattttccacggccatgagaagtttctctcgtaaatcttcaaaggtttcatatggaggtaagtcaaggcgattaaagcatgtgtgagctctgggcagtttctcaggactgccccattgctctattgtaaacagctgaggaccattggaaccataaagttcggcaaatccattcataggtactcgcgatgtccctgtgacaaactgcagtaaccggatacgcttttcggcgtccatgagtagcacagcccttcccagaacccactgaatgacggggtggtttggggcagtagccgttcttgtaaatagaatgctgtctcccagtcattcacatccacatcaccgaggccgcacatgagcaactccagctcattttcatcaaaaattttaatcaaatcaataggaagtagttctgtgaatccctccaagaaggcgttcatctgcttctggaccctgttcacaaatctccactggatgactaaagtcgatatattcccttttgttttcatttgtgaccattatttctgacccattgggcttcaaatccacttgatatgtctgtccaaagttttcttcgtctatgcagaacatgaggtccagctcagtagggtcattctccaggatccatttcaaagagttgtaatattcactatccacagattccatgtcattcagggttatctgctttcccaacatcatcttgtaaaatggtctaatgaagaaaccatctaagagcttcc

SEQ ID NO: 57420 - DNA, 1899 bp, Homo sapiens
gaatgcattcaagacaatagacttgtggacttacctatttctaaacctttttttaaacttatgtgtatgggtgacattaaaagcaatatgagtaaactgatttatgagtcacgaggtgatagagacttacactgtactgaaagtcagtctgaagcttctacagaagaaggtcatgattcactctcggtaggaagctttgaagaggattcaaaatcagaatttattcttgatccccctaaaccaaaacccccagcttggtttaatggaattttgacttgggaagactttgaattagtaaacccacacagagccagatttttaaaagaaattaaagaccttgctatcaagaggcgccaaattttaagcaacaaaggtctttctgaagatgagaagaacacaaaattacaggaactagtgctgaagaatccatcaggttctgggcctccacttagcatagaggatttaggtttaaatttccagttttgcccttcctcaagaatatatggttttacagctgtggatctcaagccaagtggtgaagatgagatgataacaatggataatgcagaagaatatgtgggatttgatgtttgacttttgtatgcatacgggtattcagaaacaaatgggaagcctttaggagatggggtttaattaaagtttttccaatgggagaaattaagttccttgcagccatgaaggaagtcccaaatgattctttgtgggaaacccagttcaccatcctgggcagcagaggatattatcaattacactgaacctaagctgggttatacacgtgacagccctggtttcctgaggtttgtgagggttttatgtggcatgtcttctgatgaaaggaaagcattcttgcagtttaccactggttgttcaactctacccccaggtggactggctaacctgcatcccaggctcacggttgtacgcaaggttgatgctactgatgcaagctatccatcagtcaatacatgtgtgcattaccttaagttgcctgaatattcttccgaggagatcatgagagagcgcctgctagctgctacaatggagaaaggctttcatctcaattgagctttgaagtgcaatgggagacatcagagactttaaaaatactagtgaagcctcttgtgtttgtgtgcagagaagtatatgatccaccatgctaatgacacttgcctttttttccaccattaaggctttaagaacatgtggaataagttttttagctgctaatgacaaaacaaatcctgtaactacccagccagcaagtatatagcacagaacactgtgttactttacaagggcttatgtgactggaataaggtggtcccacttgactgttccaaagagcagcttctcagatcttcagtgttcactggtaaatttctaacagtgtatttgtgtaaagtttgtcatttcatactccatacactacagttgctgtcactgatccctgttttgctggcttttaagctacttggtcaaaaatcctgcttccttaaaacatagagaattaatgagcatctcaagctttttcttttcctttttaatgatgcctgcactatcaagagtattctagtgttctctctttgtttggcatataatcatgcaccaaactttttatttctttaaggtgggagtatatttttatttcctaaatgccatactatgaagatcaaagtcttaagtgtgtttgcagctcaaaaataaagatgtattaaggggggaaaacctggtctaagtgcaaggcacacttacagcgagttttactttcggttgtattttctttgtatattataaacatttatttaacttgttgccgtttgaagtaaaaaatttccaaaatgtatgctcaacaataatcattaaaatgtttgcagcgta

SEQ ID NO: 57421 - DNA, 431 bp, Homo sapiens
ggtttcaccatgttggccaggctggtctcaaactcctgagacctccacctgcctcgacctcccaaaaagctgcaatatcaggcatgatccatcgcacccggccacccatgtattcttgattgaaaacatttgctcatgtcttagttctacagctgaccttctttcactgttttcaaggtcaataactgtgtgttcacacttctgcattttataaatgttactgtgattttcttgtaatgaagaattaaatgttgggagtcaatggcatcagaaccttgcaaaagaggtttttttagcccaggtatgtgaaagatgcttctttaattttcaataatgggtgtgataaagaccaacccttcccattagcccttctgggcccccatgtaagaattcagacacaccttctcactcatctcagaccttctcagggc

SEQ ID NO: 57422 - DNA, 3969 bp, Homo sapiens
aattcttggaagaggagaactggacgttgtgaacagagttagctggtaaatgtcctcttaaaagatccaaaaaatgagacttctagcaaagattatttgccttatgttatgggctatttgtgtagcagaagattgcaatgaacttcctccaagaagaaatacagaaattctgacaggttcctggtctgaccaaacatatccagaaggcacccaggctatctataaatgccgccctggatatagatctcttggaaatgtaataatggtatgcaggaagggagaatgggttgctcttaatccattaaggaaatgtcagaaaaggccctgtggacatcctggagatactccttttggtacttttacccttacaggaggaaatgtgtttgaatatggtgtaaaagctgtgtatacatgtaatgaggggtatcaattgctaggtgagattaattaccgtgaatgtgacacagatggatggaccaatgatattcctatatgtgaagttgtgaagtgtttaccagtgacagcaccagagaatggaaaaattgtcagtagtgcaatggaaccagatcgggaataccattttggacaagcagtacggtttgtatgtaactcaggctacaagattgaaggagatgaagaaatgcattgttcagacgatggtttttggagtaaagagaaaccaaagtgtgtggaaatttcatgcaaatccccagatgttataaatggatctcctatatctcagaagattatttataaggagaatgaacgatttcaatataaatgtaacatgggttatgaatacagtgaaagaggagatgctgtatgcactgaatctggatggcgtccgttgccttcatgtgaagaaaaatcatgtgataatccttatattccaaatggtgactactcacctttaaggattaaacacagaactggagatgaaatcacgtaccagtgtagaaatggtttttatcctgcaacccggggaaatacagccaaatgcacaagtactggctggatacctgctccgagatgtaccttgaaaccttgtgattatccagacattaaacatggaggtctatatcatgagaatatgcgtagaccatactttccagtagctgtaggaaaatattactcctattactgtgatgaacattttgagactccgtcaggaagttactgggatcacattcattgcacacaagatggatggtcgccagcagtaccatgcctcagaaaatgttattttccttatttggaaaatggatataatcaaaattatggaagaaagtttgtacagggtaaatctatagacgttgcctgccatcctggctacgctcttccaaaagcgcagaccacagttacatgtatggagaatggctggtctcctactcccagatgcatccgtgtcaaaacatgttccaaatcaagtatagatattgagaatgggtttatttctgaatctcagtatacatatgccttaaaagaaaaagcgaaatatcaatgcaaactaggatatgtaacagcagatggtgaaacatcaggatcaattagatgtgggaaagatggatggtcagctcaacccacgtgcattaaatcttgtgatatcccagtatttatgaatgccagaactaaaaatgacttcacatggtttaagctgaatgacacattggactatgaatgccatgatggttatgaaagcaatactggaagcaccactggttccatagtgtgtggttacaatggttggtctgatttacccatatgttatgaaagagaatgcgaacttcctaaaatagatgtacacttagttcctgatcgcaagaaagaccagtataaagttggagaggtgttgaaattctcctgcaaaccaggatttacaatagttggacctaattccgttcagtgctaccactttggattgtctcctgacctcccaatatgtaaagagcaagtacaatcatgtggtccacctcctgaactcctcaatgggaatgttaaggaaaaaacgaaagaagaatatggacacagtgaagtggtggaatattattgcaatcctagatttctaatgaagggacctaataaaattcaatgtgttgatggagagtggacaactttaccagtgtgtattgtggaggagagtacctgtggagatatacctgaacttgaacatggctgggcccagctttcttcccctccttattactatggagattcagtggaattcaattgctcagaatcatttacaatgattggacacagatcaattacgtgtattcatggagtatggacccaacttccccagtgtgtggcaatagataaacttaagaagtgcaaatcatcaaatttaattatacttgaggaacatttaaaaaacaagaaggaattcgatcataattctaacataaggtacagatgtagaggaaaagaaggatggatacacacagtctgcataaatggaagatgggatccagaagtgaactgctcaatggcacaaatacaattatgcccacctccacctcagattcccaattctcacaatatgacaaccacactgaattatcgggatggagaaaaagtatctgttctttgccaagaaaattatctaattcaggaaggagaagaaattacatgcaaagatggaagatggcagtcaataccactctgtgttgaaaaaattccatgttcacaaccacctcagatagaacacggaaccattaattcatccaggtcttcacaagaaagttatgcacatgggactaaattgagttatacttgtgagggtggtttcaggatatctgaagaaaatgaaacaacatgctacatgggaaaatggagttctccacctcagtgtgaaggccttccttgtaaatctccacctgagatttctcatggtgttgtagctcacatgtcagacagttatcagtatggagaagaagttacgtacaaatgttttgaaggttttggaattgatgggcctgcaattgcaaaatgcttaggagaaaaatggtctcaccctccatcatgcataaaaacagattgtctcagtttacctagctttgaaaatgccatacccatgggagagaagaaggatgtgtataaggcgggtgagcaagtgacttacacttgtgcaacatattacaaaatggatggagccagtaatgtaacatgcattaatagcagatggacaggaaggccaacatgcagagacacctcctgtgtgaatccgcccacagtacaaaatgcttatatagtgtcgagacagatgagtaaatatccatctggtgagagagtacgttatcaatgtagggagcccttatgaaatgtttggggatgaagaagtgatgtgtttaaatggaaactggacggaaccacctcaatgcaaagattctacaggaaaatgtggggccccctccacctattgacaatggggacattacttcattcccgttgtcagtatatgctccagcttcatcagttgagtaccaatgccagaacttgtatcaacttgagggtaacaagcgaataacatgtagaaatggacaatggtcagaaccaccaaaatgcttacatcccgtgtgtaatatcccgagaaattatggaaaattataacatagcattaaggtggacagccaaacagaagctttatttgagaacaggtgaatcagctgaatttgtgtgtaaacggggatatcgtctttcatcacgttctcacacattgcgaacaacatgttgggatgggaaactggagtatccaacttgtgcaaaaagatagaatcaatcataaagtgcacacctttattcagaactttagtattaaatcagttctcaatttcattttttatgtattgttttactcctttttattcatacgtaaaattttggattaatttgtgaaaatgtaattataagctgagaccggtggctctcttcttaaaagcaccatattaaatcctggaaaactggaaaact

SEQ ID NO: 57423 - DNA, 2442 bp, Homo sapiens
  misc_feature (1)...(2442): n = a,t,c or g
ttctcttttcccccctggactgtgaagctggannccgaaccgcagaggtggnnanagttctcctttctttttgacacagcgcactgcagtgcttccaaggaacaacttctgccttggtgtggaagacaccgtggacaagctcaagatgctggaaggccgcaagaccagcatccgcaagncagtgcaggtggcctatgaccgtgcgatgatccacctgagcagagtccgggggccccactccttcgtcacttccagctacctgtaagggcagggctggcctgcatccgcttgccctgcctccatcccgcaggggacagagaagcctcttctgcccctgccagatgtatggccggcagcttccccctctcatggtaggccagggactgggctttctccccactaagggcaagggcccagttttgaccaatcgcatggttctcctggcaggcctgctgtgtgccaaaaactcccacccaagtcctcaggggatatttcactgaagaaccagttagaagtagaaacagctgtggggcttgggcccagcttaggagattgcccagatggcaagaggtcctgggctccttcttgaggggctgcctggcccgctccatcctactcccactaactacacctcagggcgggtgaggttccgacactgatcccagagatgccgtggatacgccagggtcccagggggaatctccccaagctcacactctctcccgcttatcgcctattctcacacctcttctcggtcccatcttctgcacccattgcccagtcttgctttctctttcccatattccttttctttttctcttgtgccaaactgacagaaaccgtcaccacactggtctttttntttaatgtctcattccccttgaggccagctgctatgccaggtggtgtctctgccaggctcctcaggcccagacagaggccagcccacaacctatgaccccctcccccaggacaccacctcccacccacagaccttccctttagctgttgacacaacttcccagctctgcaagtgtgccccctggatcaaggcgggtcccctcttgtttttttctttgctgccacgaggtggtccaagccttcagggtgggctcctatcaggctgggtgtgcgagtgtccatctgtccacatggatgtcgagggtggtttgtgtggagctgtgctcgcagctgggtctgccctcttccccttttctccttcttctctcctcatggactttttctgcaattgcagtcttaagcttcactctccaccacctggatggcatggcgcctgccaccaaacatcttcctggcctgcgctctgccctgccctgcctagcctctgctactcccacttcccaactccagggaatgcattacttttatttcaaaccctctgcctccttccttctttctcttcaaccccctccccaccttcaccttctcaaaaatggaaggaaaaaaaaactgtgaatggggaatgctgactgacaaaccaacacaactttcagaggcttcagtgtctgttctctggacatttcttttcacctcctgagcaccaaagtcgcagggccagttgcaggccgctgattgccatgttgatttttaacctgatattctttttaattgttttaaatttttcataggggagttttggacaaaacagtcactggggagatcactgccatttttacacacttgactttttaaaaatacaaccaaccaaccaccacaacttcttatacatttgggacatgagccagagtttaaaagggaaccaacaaaacactataacttaaaaggatggggttttggattttgtataataataaaaacaatacagcatatggctagggaaggacatggtgtatataattgtaaaatactgttctaaattattcaggcctatagtttccattactgggagtcctccattgtgtggccacacagtgtcgttgatttaaaggagccagtgcttcccctctccccaggtagttggtcagctgtggactctgtgacctttgtctaaacctgtgttgtaagatcttgggacttcctctctttctatgtctatctcttccccccaacactttctcttcttagtctctctctttatttttcaatctctgaatattttagtctctctctgagtctcattttttaaaatgctcttttagaacggggaaacggctcagatcctgctgtggcacggggcctatgtgtctctgtcgcgtctgctgtgaagcacatgatgctctatttattgtagagagtgactttatttgctttctagaattgtttataacagatggtataagagaggtaataaacagagaaaaatctatgcttgtaaagaatacaaaagttaattttacctactataatatgactgtctgaaacttattttctctctgagaaataaatgttctaatgggcagt

SEQ ID NO: 57424 - DNA, 938 bp, Homo sapiens
ggaggcggcgtggagatcgctgggagcggttgcggcgtgcggggagctgagttatagctgtgacttctgccctgccaggccgcacacaagctggctgacccggtttgtaaaaatggaatttcaagcagtagtgatggcagtaggtggaggatctcggatgacagacctaacttccagcattcccaaacctctgcttccagttgggaacaaacctttaatttggtacccattgaacctgcttgagcgtgttggatttgaagaagtcattgtggttacaaccagggatgttcaaaaggctctatgtgcagaattcaagatgaaaatgaagccagatattgtgtgtattcctgatgacgctgacatgggaactgcagattctttgcgctacatatatccaaaacttaagacagatgtgctggtgctgagctgtgatctgataacagacgttgccttacatgaggttgtggacctgtttagagcttatgatgcatcacttgctatgttgatgagaaaaggccaagatagcatagaacctgttcccggtcaaaaggggaaaaaaaaagcagtggagcagcgtgacttcattggagtggacagcacaggaaagaggctgctcttcatggctaatgaagcagacttggatgaagagctggtcattaagggatccatcctacagaagcatcctagaatacgtttccacacgggtcttgtggatgcccacctctactgtttgaaaaaatacatcgtggatttcctaatggaaaatgggtcaataacttctatccggagtgaactgattccatatttagtgagaaaacagttttcctcagcttcctcacaacaggggacaaggaaggaaaaagagggagggtctaaaggaaaaaggggcttgaagtcctttaggatatcttacagtttttatttaaaaggaaggccat

SEQ ID NO: 57425 - DNA, 837 bp, Homo sapiens
cttgcgcgagcccgggctgtcgggtgtgttttgctctccagcctccgtcgtctctgcagcactccgggttctcctccagagcgctagtcccaggagctcggaatgttcgtggaacttaataacctgcttaacaccacccccgacagggcggagcaggggaaactgactctactctgtgatgccaagacagatgggagtttccttgtacaccactttctctccttctatctcaaagctaattgtaaagtctgctttgtggcactcatccagtccttcaagccactacaagtatcgtgggacagaaagctgggtgtcagcctgaccatggcgcgggagcgtgggcagcttgtgttccttgagggactcaagtctgcagtggacgtcgtcttccaggctcaaaaggagccacaccccctgcagtttctcagggaggctaatgctgggaacttgaaaccattgtttgagtttgtacgggaggccctgaagccagtagacagtggagaggctcggtggacgtacccggtgctgttggtggacgacctcagtgtgctcctgagcctgggcatgggggcggtggctgtgctagacttcattcactactgcagagccaccgtgtgctgggaactaaaggtactcatggaactgccttctctgcgcccacctgtgacctccaagaactcagacaggtccagacctcacttgcttgctgtgatctttttatttgcttggggttttggctttactctggcaggcccagaaagcttttgcagccaccctgttttcccttacctgccattgctgaaaagtaaagccccccaaaataaagggatgatcaac

SEQ ID NO: 57426 - DNA, 479 bp, Homo sapiens; identical to SEQ ID NO: 23383
  misc_feature (1)...(479): n = a,t,c or g

SEQ ID NO: 57427 - DNA, 353 bp, Homo sapiens
gaggtggttgtgcaggatggctgacggccggcctacgagcagctgaagctgcatatcacacctgaaaaattttatgtggaagcttgtgatgatggagcagatgacgtacttaccattgaccgtgtgtccacagaggttacccttgcagtcaagaaagatgttcctccttcagctgtcacaagaccaatatttggtatactgggcacaatccatctggtggcaggtaattatcttatagtcattaccaaaaagataaaagtaggtgaatttttcagtcatgtagtctggaaagcaacagattttgatgtcctttcttataagaagacaatgttgcacttaactgatattcagtt

SEQ ID NO: 57428 - DNA, 659 bp, Homo sapiens
gtcgactgaatttctgtaaaataaactgtattcgcaaatccaacattgagcttctggactacgctgactccactgctgaatcctcaatggaaagggtcgactggttgcagttgaaatgacctgaaatgtagcctctgtccttgtaagtcagcgtagtccagaagctcaatggaaagggtcgactggttgcagttgaaatgacctgaaatgtagcctctgtccttgtaagtcagttgacttgccgcacatctctttgtgtacttgtacggtactggcagaaaagtcatttttcaaaagccataggcttttccttgcccttagctgtaataatgcatctgattttgatttcctccagagctgtgtttctgtccatcacctgtgtattggccctgtgtttaccactctggcccactcctcacccccttgctcccctggtcttctggagtttgtgacattgatttgaaatggatggtgttctcttgagagcaagtgagattgttagaattaagttccaactatacagttttctaacatagctataaggtccttgttgctgtttgtgataactgatagataactcattggaaacgtgcatacatttatattcagatgaaattatggtttgcactgtctattaaatatctcgattaattttcata

SEQ ID NO: 57429 - DNA, 377 bp, Homo sapiens
gaaaaaattagccaggtgtggtggtgtatgcctgtagtcccagatactctggtggctgaggtgagaggatagcttgagccccaggaaattgaggctgcagtgaagctatgattgcactactgtgctcccagcttgggcaacagagtgagatcttgtctcccaaaagtccttgaaggattttaggaagttgttaaaagtcttgaaacgatgtttgggggcatgttagggttcttgaatgtttaattcctctaataactgcttattcaagagaagcatttctgactgggtgcagggcagtggctcatgcccataatcccagtactttgggaggctgaggccaggagcattgctttgagcccagggactttcaagaccca

SEQ ID NO: 57430 - DNA, 1659 bp, Homo sapiens
agacctcggcttgcagtagtgttagactgaagataaagtaagtgctgtttgggctaacaggatctcctcttgcagtctgcagcccaggacgctgattccagcagcgcctctaccgcgcagcccgaagattcactatgggtgaaaatcgccttcaatacccctaccgccgtgcaaaaggaggaggcgcggcaagacgtgggaggccctccttagccgaacggtcaggaactcagatactgaccggcaaggaggcttccgagttgccacccagggaaaaagagggcttctcttgggagatgtatgcttactctcttaggcctttcattcatcttggcaggacttattgttggtggagcctgcatttacaagtacttcatgcccaagagcaccatttaccgtggagagatgtgcttttttgattctgaggatcctgcaaatttccccttcggtggaggagagcctaacttcctgcctgtgactgaggaggctgacattcgtgaggatgacaacattgcaatcattgatgtgcctgtccccagtttctctgatagtgaccctgcagcaattattcatgactttgaaaagggaatgactgcttacctggacttgttgctggggaactgctatctgatgcccctcaatacttctattgttatgcctccaaaaaaatctggtagagctctttggcaaactggcgagtggcagatatctgcctcaaacttatgtggttcgagaagacctagttgctgtggaggaaattcgtgatgttagtaaccttggcatctttatttaccaactttgcaataacagaaagtccttccgccttcgtcgcagagaccctcttgctgggtttcaacaaacgtgccattgataaatgctggaagattagacacttccccaacggaatttattgttgagaccaagatctgtcaagagtaagaggcaacagatagagtgtccttggtaataagaagtcagagatttacaatatgactttaacattaaggtttatgggatactcaagatatttactcatgcatttactctattgcttatgctttaaaaaaaggaaaaaaaaaaaactactaaccactgcaagctcttgtcaaattttagtttaattggcattgcttgttttttgaaactgaaattacatgagtttcattttttctttgaatttatagggtttagatttctgaaagcagcatgaatatatcacctaacatcctgacaataaattccatccgttgtttttttagtttgtttgttttttcttttcctttaagtaagctctttattcatcttatggtgcagcaattttaaaatttgaaatattttaaattgtttttgaactttttgtgtaaaatatatcagatctcaacattgttggtttcttttgtttttcattttgtacaactttcttgaatttagaaattacatctttgcagttctgttaggtgctctgtaattaacctgacttatatgtgaacaattttcatgagacagtcatttttaactaatgcagtgattctttctcactactatctgtattgtggaatgcacaaaattgtgtaggtgctgaatgctgtaaggagtttaggttgtatgaattctacaaccctataataaattttactctatacaaaaaaaaagtcgacc

SEQ ID NO: 57431 - DNA, 1472 bp, Homo sapiens
  misc_feature (1)...(1472): n = a,t,c or g
tttttgtagagacagagtttcgccgttggccaggattgtcttgaactcttgggctcnnnnnnnnnnnnnnnnnnnnnnnnnnnnnnnnnnnnnnnnnnnnnnnnnnnnnnnnnnnnnnnnnnacttgaatatatatatatagccaagaatagttggctatactttcatctttgcctagttctaagtaattgattggtttcaggatccaataaactctacaggtaaatccactaaggtaatggtctataccggtggttcctgaacttgagtgtggagcagaattacctggaaggcttcttaaaacacagatttctgtccccacctcccaggatttgattcaggcggcctgctgtggagcctgagaatgtacatttctaacaagttaccaggtactacagatgcttctgttctggagactgtgctgagaaccactatgctatatctttccagggacagtaaggatcccactaaaaagacaagaattcgatttttatcagtttactaaatcaacatcttatatttctatactaaacactagccactacttgaggtttattactgttgtgattatgtttataaaacagggacatcttgcatacccctaatggtgtgaataaaatcaactgtgtcagtacctttgagcacttcataacttaaaattctaaaaaattgagatttggacctacagtttgctatttaacagaccaggtctggtcttgacagtaaagccaccatcaaaagctgcattaagaacctcatccaggcagcttgctgtgacaaaacttaaatcctgtcgtacgttgcctgggattccctcaaggtctttttcatttctccgaggaataatgacttgcttcagtcccgctctgtgtgccgccagcactttgtctttaattccacccactggaagaacaagacctctcagtgtaatttctccagtcatggctacatctgaacgtaccagccgcccactaaaaagtgaggcgagacaggttactatggtaactccagcagatggtccatcttttgtgacagctccagctgggaagtgcagatggatgtctgtgttgtcaagaagatcaaaacttccaaaagcattggtcagctggtacttctttgcgttgctgcggagcccagctgatagcgaggtgggcggactccttcatcacgtccccgagctggccggtcagagttaactggccctcgccatccattcgactcgcctccacgaacatgatttctccacctaagggagtccaagccaaacctattgctactcctggctgactcaaacgctgagataccttgaaagaagaagaatgatcagagttgggttggcaaatgctaaaggtgactgataccacacaatcctgcaagagtcggctgactccacagaagacttcagccacttacctcaaagtccttgttacctaacatgattctgcgtnanaatcagcacttactctctggct

SEQ ID NO: 57432 - DNA, 514 bp, Homo sapiens
gatcgcgggattctttttggatagggttgaccgttcgtggatagactcatatctgtgaccagtgtccgccaccgcggatggcaagagacctgatcggaccggccctgccgcccggcttcaaggcccgcggaacagcggaggacgaagagcgggacccgagccctgttgcaggaccagctctgccccctaattataaaagcagtagttcagattcatcagacagcgatgaagacagtagttctttgtacgaagaaggaaatcaagaatctgaagaagatgacagtggtccaactgcaagaaaacagaggaaaaatcaggatgatgacgatgatgatgatgatgggttttttggaccagcccttcctcctggatttaaaaagcaggatgattctcctccaaggcccataataggtcctgcattgccacctggtttcattaaatctacacagaaaagtgacaagggcagagatgatccaggacaacaggaaacagacagcagtgaagatgaggatat

SEQ ID NO: 57433 - DNA, 1484 bp, Homo sapiens
ggagagagcagatccctaaccatgagcaccagccaaccaggggcctgcccatgccagggagctgcaagccgccccgccattctctacgcacttctgagctccagcctcaaggctgtcccccgaccccgtagccgctgcctatgtaggcagcaccggcccgtccagctatgtgcacctcatcgcacctgccgggaggccttggatgttctggccaagacagtggcctttcctcagggaacctgccatccttctggcagcttgcttccccagggaccagcgggcggctgctgcagggttgctggggccccctcttcctgcttgggttggcccaagatgctgtgacctttgaggtggctgaggccccggtgcccagcatactcaagaagattctgctggaggagcccagcagcagtggaggcagtggccaactgccagacagaccccagccctccctggctgcggtgcagtggcttcaatgctgtctggagtccttctggagcctggagcttagccccaaggaatatgcctgcctgaaagggaccatcctcttcaaccccgataaagaaactgaagcccagagatgaagtgacttgcccaaggtcacccagctaataagtgacagtgctgggattcatacccaggaagcctaattcttaaccattactccacactgcctcttcataaatggatggatgaatacattgaaaattgataaataaattacctcctctaaaggaggaggtagtagtgggacctcaaaggccgagcaaaggaggcagaggggtgtctctgatggcccagatcttgggccagtcttgtcctttggtggctgggagtagggtgctcaccagccctcttctccctctctgcccacagatgtgccaggcctccaagccgcctcccacattgggcacctgcagcaggaggctcactgggtgctgtgtgaagtcctggaaccctggtgcccagcagcccaaggccgcctgacccgtgtcctcctcacggcctccaccctcaagtccattccgaccagcctgcttggggacctcttctttcgccctatcattggagatgttgacatcgctggccttcttggggacatgcttttgctcaggtgacctgttccagcccaggcagagatcaggtgggcagaggctggcagtgctgattcagcctggccatccccagaggtgacccaatgctcctggaggggcaagcctgtatagacagcacttggctccttaggaacagctcttcactcagccacaccccacattggacttccttggtttggacacagtgctccagctgcctgggaggcttttggtggtccccacagcctctgggccaagactcctgtcccttcttgggatgagaatgaaagcttaggctgcttattggaccagaagtcctatcgactttatacagaactgaattaagttattgatttttgtaataaaaggtatgaaacacttggaaaaaaa

SEQ ID NO: 57434 - DNA, 1158 bp, Homo sapiens; identical to SEQ ID NO: 13954

SEQ ID NO: 57435 - DNA, 1866 bp, Homo sapiens
gacttttttttttttttttttttgtatctatgtaaatattttattctgcttccagatagaacattgaagtttacatgttattttaaagacaataaacagctaagctactgacataaaatatgcaataaatttatgagatataaggtacagatgagaaaaatctgaaataagtttttaacttcatttagcctattaggaacatgaagatgtctggaattgatgctggccttggtctcaagtactttttcccatatgtatttgttttatccttccagaaagcatatcatattagagtgtctaaggaaatcagtgaatcactaagttttccatcttaccgaagtacaaaacattatttcaaatctaggccttctgacagaatccaatatctatttttatacttacttttctttctactaagttctttaataaaattatgaatcagaaagcaagtacaagacatgcttatttcacacagaatatcaatgaagacttaagaagataaatagcaagtacttctaaaaaatcacaaattttgacatttggaacaatataattgccatactattatatcttttattaaaaaagaccttttccagcttgtttccagacttcttttactcctttaatgctttctttcttcacacacttccagtattcttgtatactctgatgttgtggtacccactaaacctcgatgcattctgttttttaacaccccaagaaactcttcatgactaagacattcatcaccatccaaatcaaagatcttaaagacagtgtccaaaatattgtttgagagttcttgtcctgttgctactttcacagctctcttaaactccgctagtctgacaggacgatgagctaaactgaacatctgcatggcaatagcaaagtcttccaagtgggttgtaaaatggcaaaatgacttgaattcatccaaactaatgctctctcctgctgacaacttctctctcacatttttccaataaatatctttattttcagtgttagtgaaaaaaagtagccactctgcaaagtcttcttttctcatgaaactcaaacctttagaaaactgaaggaattccatttcttgaatctctgtttgtaaattttccataaatcttcgaaattctttataatgaagttttctttgtcctctttttccaaagaaacgcatctgaagagttgtgttaatttcaggttctttcactattgcttcctgatatccagtttcattagttttcactgtcatcaagtcatcttgtttacttatgatcttctgcagcttaaaaaattcccttttttcaatcatctcattaccatctgtatccagcattttaaaagcaacatgaaatccagaatggggtttagtgaggattgtaagcaagaaaagatactcggtatatgaaattagccctttatcgccaaggtctctgaaaaaagttgatccacagccagctgtttggatccctgacagtgtatcctcgatgtccttttttgtcagcttcttgactgaagttttacgttccatttgctcaaacatcactgagaagaggaagtctcgtggtgtcatataatattctccttcatgttcgagtgaagaaaactgcatgaagcgctgcttacgaagagacggtttcccaatatatattattccatgttcaacatttttctgtgcggagactgtaaaactgccatcccgcgccgcaacactgacgcggctgtggtgccaggccgctcctgctcctgccagggccgcgccggccactgccgctgccaaggggccgggactccgcacagcctgtcggctgacagcgagcccccgtcgcagttttccgccccaggccgccacccgcgcgcagctac

SEQ ID NO: 57436 - DNA, 886 bp, Homo sapiens
gcgggtgctgctagcggaggcgccatattggaggggacaaaactccggcgacagcgagtgacacaaataaacccctggacccccttgttccctcagctctaagggccgcgatgttgtacctagaagactatctggaaatgattgagcagcttcctatggatctgcgggaccgcttcacggaaatgcgcgagatggacctgcaggtgcagaatgcaatggatcaactagaacaaagagtcagtgaattctttatgaatgcaaagaaaaataaacctgagtggagggaagagcaaatggcatccatcaaaaaagactactataaagctttggaagatgcagatgagaaggttcagttggcaaaccagatatatgacttggtagatcgacacttgagaaagcctggatcaggaactggctaagtttaaaatggagctggaagctgataatgctggaattacagaaatattagagaggcgatctttggaattagacactccttcacagccagtgaacaatcaccatgcttcatttcacatactccagtgggaaaaaagggaaatattaatccaactttcttcaccattacggacaacagatcatattcctgaaaagaaatttaaatctgaagctcttctatccacccttacgtcagatgcctcttaagggaaaatacactaggttgttcgaaataataattgccacagcctcttctaacaatgcctacaatgtgaattcctcccaacctctggggatcctataaccttgggctcgttatcttcagggaactggtgcaggggcaattaccatggcagttgttcaagcagttcaggctacagctcagatgaaggagggacgaagaacatcaagtttaaaagccagttatgaa

SEQ ID NO: 57437 - DNA, 765 bp, Homo sapiens
  misc_feature (1)...(765): n = a,t,c or g
tgaaaggagctccacaactcacctaaagccatcgccaggtagagaatgacccagctgaaggcctgcccagtgccaggcccaaaaggtactcactattcagacacgagctggttaagacgccgggatatataaaaagggaacagactctggtctgcccagctgaggcttgcttcatattacccccgaaatttaaaagaacaaaaagaagataatgtggaaagagatggctaaaacaaaatgacccaatgtgaatttctgaagaacagtgatggacacactgcggtacatcgtattattctctccacgttcacatctgtttgaaatgtgatccataatctttcatattaaaaacagtcaaattgaacactagccctaaagaatagcctctgatgggttccccatacatttgtctaggatcgataagggttaacaagnnnnnnnnnnnnnnnnnnnnnnnnnnnnnnnnnnnnnnnnnnnnnnnnntncacacataggttttagaatagtgcaaaagcatgcaacagaatcaccaataaacagattctggtccctagctccagggattctgatccagtaggttcggtgtagagcctgagaattagcctttgttttcttttctgttttgaggcagtcttgctctgtcgccctggctgagtgcagtggtgcaatcacgactcactgcagcctcaacctcccaaactcaagcaattcttccacctcagccttccgaacagctgggactacaggcacgcaccaccacacctg

SEQ ID NO: 57438 - DNA, 421 bp, Homo sapiens
  misc_feature (1)...(421): n = a,t,c or g
ttggcccaccntnnatgnacagctatgacatgattacnaatttaatacgactcactatagggaatttggccctcgaggccaagaattcggcacgagcggacagcaggacattggacctctagagcaagatgtcagtaggatgacctccaccctccttggacatgaatcctccatggagggcctgctggctgaacatgctgaatcatctccaacaaaacccagccccaactttctctctgatgctccagcattggggcaggggcatggtggcccatgtagtctcctgggcctcaccatcccagaagaggagtgggagccagctcagagaaggaactgaacccaggagatccatccacctattagccctgggcctggacctccctgcgatttcccactcctttcttagtcttcttccagaaac

SEQ ID NO: 57439 - DNA, 2229 bp, Homo sapiens
agccagaaggatggggtggctcccactcctgctgcttctgactcaatgcttaggggtccctgggcagcgctcgccattgaatgacttccaagtgctccggggcacagagctacagcacctgctacatgcggtggtgcccgggccttggcaggaggatgtggcagatgctgaagagtgtgctggtcgctgtgggcccttaatggactgccgggccttccactacaacgtgagcagccatggttgccaactgctgccatggactcaacactcgccccacacgaggctgcggcgttctgggcgctgtgacctcttccagaagaaagactacgtacggacctgcatcatgaacaatggggttgggtaccggggcaccatggccacgaccgtgggtggcctgccctgccaggcttggagccacaagttcccgaatgatcacaagtacacgcccactctccggaatggcctggaagagaacttctgccgtaaccctgatggcgaccccggaggtccttggtgctacacaacagaccctgctgtgcgcttccagagctgcggcatcaaatcctgccgggaggccgcgtgtgtctggtgcaatggcgaggaataccgcggcgcggtagaccgcacggagtcagggcgcgagtgccagcgctgggatcttcagcacccgcaccagcaccccttcgagccgggcaagttcctcgaccaaggtctggacgacaactattgccggaatcctgacggctccgagcggccatggtgctacactacggatccgcagatcgagcgagagttctgtgacctcccccgctgcgggtccgaggcacagccccgccaagaggccacaactgtcagctgcttccgcgggaagggtgagggctaccggggcacagccaataccaccactgcgggcgtaccttgccagcgttgggacgcgcaaatccctcatcagcaccgatttacgccagaaaaatacgcgtgcaaagaccttcgggagaacttctgccggaaccccgacggctcagaggcgccctggtgcttcacactgcggcccggcatgcgcgcggccttttgctaccagatccggcgttgtacagacgacgtgcggccccaggactgctaccacggcgcaggggagcagtaccgcggcacggtcagcaagacccgcaagggtgtccagtgccagcgctggtccgctgagacgccgcacaagccgcagttcacgtttacctccgaaccgcatgcacaactggaggagaacttctgccggaacccagatggggatagccatgggccctggtgctacacgatggacccaaggaccccattcgactactgtgccctgcgacgctgcgctgatgaccagccgccatcaatcctggaccccccagaccaggtgcagtttgagaagtgtggcaagagggtggatcggctggatcagcggcgttccaagctgcgcgtggttgggggccatccgggcaactcaccctggacagtcagcttgcggaatcggcagggccagcatttctgcggggggtctctagtgaaggagcagtggatactgactgcccggcagtgcttctcctcctgccatatgcctctcacgggctatgaggtatggttgggcaccctgttccagaacccacagcatggagagccaagcctacagcgggtcccagtagccaagatggtgtgtgggccctcaggctcccagcttgtcctgctcaagctggagagatctgtgaccctgaaccagcgtgtggccctgatctgcctgccccctgaatggtatgtggtgcctccagggagccaagtgtgagattgcaggctggggtgagaccaaaggtacgggtaatgacacagtcctaaatgtggccttgctgaatgtcatctccaaccaggagtgtaacatcaagcaccgaggacgtgtgcgggagagtgagatgtgcactgagggactgttggcccctgtgggggcctgtgagggtgactacgggggcccacttgcctgctttacccacaactgctgggtcctggaaggaattataatccccaaccgagtatgcgcaaggtcccgctggccagctgtcttcacgcgtgtctctgtgtttgtggactggattcacaaggtcatgagactgggttaggcccagccttgatgccatatgccttggggaggacaaaacttcttgtcagacataaagccatgtttcctctttatgcctgtaa

SEQ ID NO: 57440 - DNA, 369 bp, Homo sapiens
  misc_feature (1)...(369): n = a,t,c or g
tcgagtttcaaagctgaagaacatggagtccaatgtttgaggacgggaagcatccaacatgggagaaagctgtaggctgggaggctaagccagtctagtcttttcatgtttttctgcctgctttatattctggtcgtgctggcagctgattagatggtgcccgcccagattaagggtgggtctgcctttcccagcccactgactcaaatgttaatctcctttggtaacactctcacagacacattcaggatcgatactttgcatcctttaatccaatcaagttgactgtattaaccatcacaagtccaccacttgtcaacttaaacacatacatatctcctgagatcattcataatcttcaaatnaaga

SEQ ID NO: 57441 - DNA, 516 bp, Homo sapiens
cggaaacgacctgctggccatggacgccatccagggctgtgatgttaacctcaaggaacaggggcagctggtgcgacaggatgagtttgtggtgcgcactgggcgccacaagtccgtgcgccgcatcttcctttttgaggagctgctgctcttcagcaagcctcgccatgggcccacaggggttgacacatttgcctacaagcgctccttcaagatggcagaccttggtctcactgagtgctgtgggaacagcaacctgcgcttcgagatctggttccgccgccgcaaggccagggacacctttgtgctgcaggcctccagcctggctatcaagcaggcctggacagctgacatctcccacctgctttggaggcaggccgtccacaacaaggaggtgcgcatggctgagatggtgtccatgggtgtggggaacaaggccttccgagacattgctcccagcgaggaagccatcaacgaccgcaccgtcaactatgtcctgaagtgccgagaagttcg

SEQ ID NO: 57442 - DNA, 366 bp, Homo sapiens; identical to SEQ ID NO: 23422

SEQ ID NO: 57443 - DNA, 444 bp, Homo sapiens
  misc_feature (1)...(444): n = a,t,c or g
ggtttgctgccagcctgggcaacgtggcacaaccctgtctttacaaaaaatacaaaagtttgccgggcctggtggcacatgcctgcagtcccagctactcaagaggctgaggtgggaggattacttggacccaggaggtggaggttgcagtgagccaagatcgcaccactgcactccagcctgggtgacagagcaagactctgtctcagaaaagaaaaaaaaaatctctcctcaggtatctcaagaggaatgaattttattatatcagaagtcaccagtgctttctcacagtaggttccaggaatatagaactcttttcaagagcagttctcaccatctttatttccattattagtgagagtttgttgagcatatattgttttttttctttttcttttttttaatttttattgggcacaaaagccacattcaagagcncttatt

SEQ ID NO: 57444 - DNA, 966 bp, Homo sapiens
  misc_feature (1)...(966): n = a,t,c or g
ttttttgttcattaagatgtatggcttttcttgtggttgttattacaatccataaataaagtctttactgtttgactgaaaaaggtttttacaaaactgcacttccaaaattaacatttttattaaatcaagttaaaaaaaatgttcagtgtagaaaagtcaacaagggttttaacaaaaccaaaatatacctttttatacaatatatgtatatattagcagcaaactacttctgagattctctttcttttatgttcttctagttatattaaagaaagcataaacaatgtatattagtatggaatgtcagcaaatccactcttagtcctttattctgtgatttgggccttctacaaaatactttgtgattctcactaatgaatattaagaacatacccaattttaactaaaaagtagtgaaacagtggttggtagaatctttctcactatatcacggtcacacattatatttgagaataacaaatgagcaccatataaacaggtaattgtgtgtgtgtaaactcaatttttaaggtgtaatagtagccaactagataacttagcactgtgactatcactttttaaaaatttggtgatatacaaaattttaaacaaatcagataaacacttcaaccccctattgcttgtccatttaaaaaatccttaatagaaattctatatataacctgacaaactgcatacacacatatgtgtatatatacacacaaaagtatatgtatatatacatctttagctttgaataaatttctaaactgagatgaagccaaacctctcatttatatcttctagaatacaatatcaccaactgaaagtttctaataagagtttcaacttagttaatcagaaatactggctactgaaaattctgaggccaaagagctgttattcagcttagtatattctaggcttacaaatnagtcaaagactgaaattatcaaatgccca

SEQ ID NO: 57445 - DNA, 2254 bp, Homo sapiens
tctgacttcacaccggatgagagagctatgtttctgaagttcgtgaccagctgctccaaacccccgctcctgggattcgcctacctcaagcctccattctccatccgctgcgtggaggtgtcggacgatcaggacaccggggacactctgggcagcgtcctccggggcttcttcacacatgccaagcgggcagccaggcggccgcctgcccacctcctccacctgcttcaacctgctcaagctgcccaactacagcaagaagagcgtcctccgcgagaagctgcgctacgccatcagcatgaacacgggctttgaactctcctagctcctgtcccgagccctgcctccagggctcctgggctgccagggaccttcagctcccagaggcagtgtggtcctgggaatgtgaccaacatgccaggtgacattggcccctagaccctctctatagccatgagactccttgtggcctcaagaaatttagacgcccacgacagcactacacagcatctccaggtgatgcccaaggcacagggctgcagaaaataaacctccagattccaccaacacggggtccattcttcctggtgatggcagaggggcttcttttagctagtttgatcttttgggagtctgtctttccttagccgtctgagtgagctgtgtatgaacaagtcccaggagttccaagagtctagagtggtttttgcagcatgggttgagtgtacaaagcctactgtgcgtgagatcctctccttccgtttctgaaatctcttactcaggtaaggcctcgccaagcctctatgcaccccacaaagtttctgcctccatgccgtccacagcgcctcttcccagacagccaggcccatctgctgcccagggaagcgcaggcgccttgctagggacgctatggacaccggtgagtccaaggccgctgctcctgccttgaagccacgcgctccacgccgcggccctcccattttctgcgtcctcagcggggctgagctgccagagagccttcccggacctattcccgtcctatgcattcacattggcatcctggtttgggggaagaaaaacaacggcccttagcagcagccccgtttccagaatgtgctgcctgttccccaaagcctgcttgtcccgcggaggacggctgcctttgaccctgcttatttgtctcactggttatctaatgaggaacaaacactaacctaaggtacacatcccatctgggcggtggcttcactcctgagtctgcaaaatcccaggaaacttgggtcttgctgcccatccttcctcagcacagggaacccggaagcccgttgcactgacagaggctcacaccctctgggttttttgttttttttttaaacttcatttctcttccaacccattgtgttcctctgccctcattctttacctttgttgtaagaactttagctccagggaactgaggcagaggccctgtttgtggtctgtgttgacagccacccaccctctcccacctcatgctcctgcacctgcaccaccaaggttgatgccggattcgaagccaggaaggcccagtccctcctctgctctcctcaaagacgcaaaacattttccaacaagagctgtcacagtggcagcaaagcaggggccacccgtctccacagtccttcagagtttcagctgcatcctggtgtcccacccaggtcgagcccccaggcttctggaaaacaatgtgtgctctactttgatggaaacatggcaaggaatttaaagacaggaatgtattaatattattgaaggtgtgttcgtaacctctgattctgtggacttgccactttctccaaacgctcggttcctttgaagatttcttctgaacgtgtgtgcgcacgctgggcgggttcgtgcatacatgcggggaccccagactgtcagcacagggaagatggatcccatcctaatttttatcacctgaaggttggaaccagtgagggactgggagagagtgatttataagcaccaatatcaacttcatgtggatttttgacaaggaggggtagtttgtaatttcatttaaattcttttcagcagctggaaatattgcactatctgaaacactgaatctccttttgtaactggtgttcactgacaccttgatggctcttgatggctctaaaaagttgtaggattttttgtttttgtagctaacttatggattgagatgtgatcaaaggctttattaaatttgtacttcagcataaac

SEQ ID NO: 57446 - DNA, 373 bp, Homo sapiens
gcgtatttacctgcattgaagacatacattgtatttgccaactcaatagaagaacagacatatacttgattgtacagctcaacagaaggagaacagacatatacttgattgtagataaataatacaaaagaaaggagctcctccttttctctttcccaacttgagtatcatcacacccctttcctttcagcacccagagttccttttgtttctattattccccctaaacctagagctcactgaaattaaaaagaatgctgtggttcctctcgggactgttgggtgacttgagcctttgacaaatgcattaccctaggttttttcatctccagcccctcagcttccagtgttgcacagttgctgtatataattc

SEQ ID NO: 57447 - DNA, 1186 bp, Homo sapiens
cggtttttttttttttaagattgttctcatacaagatttattccccagcacacccctcccctcctcagttcacagtggagactatggagattcagggcaggatccctcaggtacaagaaacaccttccgaagattttgctctccttccttccctccctcttgccaactcccaaggcctgaagcgcacactcatgcaaacacacgaaatccccctccttccccacacctcctgtctttccacatcagagctctgaacttgagaggtgtcaaaagtctgtttgagaagcctaaagtggggagatgccattacccctgaccaccccactatgagtgactatgagacacctaactcttccctcttctgtcaaccattttcactccctggcctctgtaccttctccatcaaccaagagcaaacatgtcagcacacccccacctgcagtacatgaaaacaggctctgtccaacatccctcacccaagtacaggggtgttgggggagtggcccctgaggatcagcaaagggttaatgcagaaggaaagaggacagaagcgtttggcttgagctctgcttggggaggcagaggctatagactggcacaggtttagaatcaagtaccatgtttaggtttctgtctcacatcacatgatttcactaggggctgcagaacagatacccctcagaggggtctctgctgattacagccacattcttactattggctcatccttaaaggaggccccaccaagttgggaagcagttgaaaataaaagctgtaaaggagctgaacaggaagtaagaataggtggtgcaagagattatggcccctgggatgaatgacatggagccatttgtaaagtgctactgtatcatcccccatgaattattgcttctccaaaggaggagcagaggaaggaacaggaacatagaaatgagtatggtattgctttgctcactgctgaggctgatggccagatggacccaggggttatcagaaaccgaagattaactacacagctccagaagactcagacctcaaaatacagaggtgctcactaatcctcccagccagctgatccccctgggccaaggtaatgtagaagaggcccatccccacatcatattcacattttttaaatttcacaagcaatactttggaccactggggttcaggccccaagaaatga

SEQ ID NO: 57448 - DNA, 1191 bp, Homo sapiens; identical to SEQ ID NO: 13971

SEQ ID NO: 57449 - DNA, 1292 bp, Homo sapiens
  misc_feature (1)...(1292): n = a,t,c or g
ctggctcttgtcaagaatttacaaagtttagctggcggtcttcatcagtttggtcttggagactctcagaggaattgttttctgtctctatatcataatcctcagaaatcgcatgcacttctacagcaattggaacatcttcagcagtgtgaacttctataggactctcctcttgggtttgctggttgactgattcaggtgagtcacactcttcatcacaaattacaatatcagcagatttttctgtagaaaaggcagtgtggtctagaattctaagtacaggactgggaaccaggtagttctgatttctgtttctggccttgattccatctgcaaattttggcaagtcatttgacaacaaagatgatgattctgataccgagacgtcaaatgacttgccaaaatttgcagatggaatcaaggccagaaacagaaatcagaactacctgggttcccagtcctgtacttagaattctagaccacactgccttttctacagaaaaatctgctgatattgtaatttgtgatgaagagtgtgactcacctgaatcagtcaaccagcaaacccaagaggagagtcctatagaagttcacactgctgaagatgttccaattgctgtagaagtgcatgcgatttctgaggattatgatatagagacagaaaacaattcctctgagagtctccaagaccaaactgatgaagaaccgccagctaaactttgtaaaattcttgacaagagccaagctttgaatgtgactgcccagcagaaatggcctttactgagagctaatagcagtggcctctataaatgtgaactttgtgagtttaacagcaaatatttttctgacttaaagcagcatatgatcctgaagcataaacgtactgattcaaatgtgtgtcgagtatgcaaggaaagtttctctaccaatatgcttctgatagaacatgccaaactgcatgaagaggatccctacatttgtaaatactgtgattataagacagtaatttttgagaacctcagccagcacattgcagacacccattttagtgatcacctctattggtgtgaacagtgtgatgtacagttctcctcaagcagtgaactctacctacatttccaggagcacagctgtgatgaacagtacttgtgtcagttctgtgaacatgaaactaatgatccagaagacttgcatagccatgtgggtaaatgaggcatgcatgtaaattaataggagttaagtgataaggtattaacaatgggtggaacatgggacagtattagncctcttta

SEQ ID NO: 57450 - DNA, 1062 bp, Homo sapiens
gctcgacctggacttgtcttggttccagaacctgacgacccggcgacggcgacgtctcttttgactaaaagacagtgtccagtgctccagcctaggagtctacggggaccgcctcccgcgccgccaccatgcccaacttctctggcaactggaaaatcatccgatcggaaaacttcgaggaattgctcaaagtgctgggggtgaatgtgatgctgaggaagattgctgtggctgcagcgtccaagccagcagtggagatcaaaacaggagggagacactttctacatcaaaacctccaccaccgtggcggcaccacagagattaacttcaaggttggggaggagtttgaggagcagactgtggatgggaggccctgtaagagcctggtgaaatgggagagtgagaataaaatggtctgtgagcagaagctcctgaagggagagggccccaagacctcgtggaccagagaactgaccaacgatggggaactgatcctgaccatgacggcggatgacgttgtgtgcaccagggtctacgtccgagagtgagtggccacaggtagaaccgcggccgaagcccaccactggccatgctcaccgccctgcttcactgccccctccgtcccaccccctccttctaggatagcgctccccttaccccagtcacttctgggggtcactgggatgcctcttgcagggtcttgctttctttgacctcttctctcctcccctacaccaacaaagaggaatggctgcaagagcccagatcacccattccgggttcactccccgcctccccaagtcagcagtcctagccccaaaccagcccagagcagggtctctctaaaggggacttgagggcctgagcaggaaagactggccctctagcttctaccctttgtccctgtagcctatacagtttagaatatttatttgttaattttattaaaatgctttaaaaaaataaaacctgtctctggctcattgggcaggtagataagtcacctgagttcaaccttgcctctgaaatgtagtatgggaaagacttgtgtttctgcagcat

SEQ ID NO: 57451 - DNA, 1548 bp, Homo sapiens
  misc_feature (1)...(1548): n = a,t,c or g
tttatctttttccagatcaggaagttttattgctgacatgcaggaagagtccccatgtagtacaaaaatatgtctttaatacaaacttttttgtgactttttccgtttctttacaataggacttctctcagtgtgtgacacccagtgagggctgacccatcctcctctcctttgcttcaccaggaatgtcatcagacacatggcttgaccttggaagggcccagtctgtctgacagggctttgcagacccggcggctattgctttgaaaaggaggagaaagaccacgcacgggcagcagcctggagggacccggtgggctgctgcagaggggggctccgctgcgacgggccctggcccagcttcaggccctcacaggaggacagtcaaggggcttgggagccctaggccggacttgcatttccgctcccgcagaagactttctatgaaataaatatagaaaagagggcatcccccagccccacagcacaagaccctggccctcagcgctggacagctgagacagacgcaggctcgctgctcagggggagtaagtgctgggctccagtaggctcccacaggcccactgaggcagaggcatgagtcgcccaagtgctggatggggcatggggagaaaggggcgtgggcagccctgctactgctggcaagaggtggccccattnnnnnnnnnnnnnnnnnnnnnnnnnnnnnnnnnnnnnnnnnnnnnnnnnnnnnnnntcacagtgagtcagctttttagggggaggagagcggctcacactctgggaaacacagtcacctccccactggggagcagggccaggcaggaggggcctcagggcccatgactgcctggaggggacactcagcctctctgaggacatatggggggtaggcctctggggaagggtctttgcttggcatcaggcagggccaagtccagtaagggcaaggggagggggcattctggtgagaacagcatttctggcaagacgggcatccacttcaaaatctcggctcaaaagggcagcagggctgttctcaagccaggcaggccagggtcccccaatccctacaattctcctgagtccctcaccaccatggaggacccttgctagggtctaccgggagagtcaccacatctattatgaggcaagggcactgggatatgttcccaccatcccctaaacacaagagtaggctaggggagcgtgcaggcagcccccgctcacggccaggcctgcagcccaacccatgggccccttcgcactgggagtccacgtgagctcagtaccacggggaaggatagagaagggaacaggttaacgcgcgtgtacagcacctcagagaagccactgagacgggagagaaagagccaggtctagaaaggcctcccatcaccggcagcagagagggactggtgggctgaaaggggacagggactggcaggaggggcttccctgcctgggggtgaggagggagctcacgtgtgggctgtggattccttgctgtccagccaggctgggggcagggagtggccatggactgag

SEQ ID NO: 57452 - DNA, 491 bp, Homo sapiens
cggagtagtcctcatggccgccccgccggagcccggtgagcccgaggagaggaagtcccttaagctcctaggatttttagatgttgaaaatactccctgcgcccggcattcaatattgtatggttcattaggatctgttgtggctggctttggacattttttgttcactagtagaattagaagatcatgtgatgttggagtaggagggtttatcttggtgactttgggatgctggtttcattgtaggtataattatgcaaagcaaagaatccaggaaagaattgccagagaagaaattaaaaagaagatattatatgaaggtacccacctcgatcctgaaagaaaacacaacggcagcagcagcaattgaacaatcttgagcatagaaaagaagtcaatgtaaacgaagttaagatcaaccacataaaacatttcatgtgcaataagctctcaatcaagtaaataaagtttaagttgtagtcaaaaaaaaa

SEQ ID NO: 57453 - DNA, 1568 bp, Homo sapiens
tgaaaccgtttgacatgattacgaatttaatacgactcactatagggaatttggccctcgaggccaagaattcggcacgagccattacaaagccgccgactcgaagcgtgagcagttccggaggtacttggagaagtcgggggtgctggacacgctgaccaaggtgttggtagccttatatgaagaaccagagaaacctaacagtgctttggattttttaaagcatcacttaggagctgctactccagaaaatccagaaatagagctgcttcgcctagaactggccgaaatgaaagagaagtatgaagctattgtagaagaaaataaaaaactgaaagcaaagcttgctcagtatgaaccacctcaggaggagaagcgtgctgaataggattcttctcagtttgaaagacaatgaaaaatggttttgtatgacttgaatagtttgtatagtatataatcttttctgaacagatgctatagaactcttttaatatgtttaattcacctatcacactctgttaaaaacacatagaatcatcaataaaaactcaatataactttctttgggtcttaaagcaggagaatccaaagtaaatcctgaacaaaacctaaacacagccatctaactcattaccttaaaagacattctgtttattagtctgattaggaatgatggcactggttgtattttagccaagacagtttagcatggagctattccttggtgcagttcaggatatgaacacaggtacagtcattctttgaaggtgacactgttctgtatattccctataggcagctggagagatctgtgtgacacaagatgcttttgtacggggttcccatgaatcttctgctcttgtttgtgtgacatggaacaaataacttctttgccaccactttgccttagataactgtgtgtgtgtgtgccagtttgaactctgacaccacattttccttctatgcaatcatgcctgtctgataatcttgcattgctttcctctgagctttagtgggtcctagttgcacactggcctttctgtgctgtttttcaatttgcctaataatagcagttaccctgattgtaatttatgtaactttaaacaggatcacactgtaccccctgcctgccttatttgcttactgagcacaggacagaggcaatatacaactctgggttcacacacaagctgagatgagaagaggaatgagccatatattggggaaaatcatagtttgtaggtataattatatagtgcttttctccctcaaagtatttttctagccttgaattcattttatcttcattatccctgtgaagtaggtgggacaagtataaggggaagaggggtgctgaatttttaggccaaagactgatattaatacaaatcactcactaactgtagagccttgggcattatcagtgaactactctgagatttactgtcttcatctgtttaatgagtagaatgtccgtgatgcctacctcacagggttgttgtgagggtcaaatgagaatgtatgtgaaagatttgtaaatggtaaagcactatattcttgtttgttaa

SEQ ID NO: 57454 - DNA, 518 bp, Homo sapiens
gcggcctcctgctcttcatggatgaagcagacgccttccttcggaagcgagccactgaggagataagcaaggacctcagagccacactgaacgccttcctgtaccacatgggccaacacagcaacaaattcatgctggtcctggccagcaaccaaccagagcagttcgactgggccatcaatgaccgcatcaatgagatggtccacttcgacctgccagggcaggaggaacgggagcgcctggtgagaatgtattttgacaagtatgttcttaagccgggccacagaaggaaagcagcgcctgaagctggcccagtttgactacgggaggaagtgctcggaggtcgctcggctgacggagggcatgtcgggccgggagatcgctcagctggccgtgtcctggcaggccacggcgtatgcctccgaggacggggtcctgaccgaggccatgatggacacccgcgtgcaagatgctgtccagcagcaccagcagatgatgcgctggctgaaggcggaagg

SEQ ID NO: 57455 - DNA, 1321 bp, Homo sapiens
ttttttttttactgcaaactggtttattttttataggaaagtgtcaacatgtttattgctaatataagcatttaatgtcaaagaaatgaaggtaattttacaaactcagtttttgtaagtacatgaagtttctatttgattatgtggttttatatcacattcgttcaaatgcatttctctcccttagagggactattccaacatcactcctttggaattatttcagtcatccttaacatgtgactttaccaaagaccttgaagctaaacaaacaagcaaaacaaaatttcaatgactcttagatgaatggaataagaaatagtcatcacatgtcaattagggatgttcatctccaacccaagacactgtcaaaatgtttcttctgatacagcagttataagtcagagccttcaaaaaacaagggcagaacaagagtacaataaaagaagcatctgcaacttaagcctcccacagtcctaagcctggatatgcgcaaagcaaagcctctttcccgcaaactaaattccatccatttgagctttcagagatcgatgcccaagagctatcattaatatatacagcatattgactctagttgcatcaattatgcctgaagagtttaatacccatccaagtccaaaggtggaagaatacatacactggtatggtaataggcaagagcaggctgtaaaagcaaaggctggctgtgctagtgcagccctgtgggaagttttcttccacagaggctgagtagaacagtcctgctaaagaaaccagtggaataagaacagtcaacgtaggaaagagaacagaaacattcttctcttccacttattacctgccaactgtgttttaaaaaggtaatatggtattaagaaaagttggctgttgccgtttttttaatttttttaaattatgaactagcgctgctccacttcttcttgcttcttactttgacgtgtcatcctagctgcctgtggtatcatattagggatcccatcaatgattggataagctattcccaactcttcattaatcaattcgtttgttgatgcttcatatctgagcggcttcttggagagcgggcacaccaggaactccagcagcgccggatcgaagtcgcggggcggctcctcagtcttcttgcccccggtcggccaaaggccgcgaccccgacgcgtgcaggcacctacgggcgaccgcggacggcggcgcgcgcgttccgccgcagcgctgaggcgagcctgcagcgtgctccactcagcatggtctggcagccggagaccaggcctcaccgcagcctcgcacccgtggccgagct

SEQ ID NO: 57456 - DNA, 1332 bp, Homo sapiens
accttaccaaatcactcttgaacattcatgataaacaacttcaacatgacccagctcctgctcacacttccataatgagctatctaaataagttagaaacaaattacagttttacacattcagagccactttctacaattaaaaatgaggaaaccatagagccagacaaaacctatgaaaatgttctgtcctccagaggccctcaaaatagtaacactaggggcatggaggaagcatctgcacctggaattatttctgccctttcaaaacaggattctgatgaagggagtgaaactatggctttaatagaagatgagcataatttggataatacaatttacattccttttgctagaagcactcctgaaaagaaatcaccactttctaagagactatcccctcagccacaaataagagcagctacaacacagctagtcagcaacagcggacttgctgtctctggaaaagaaaataaactgtgtacacctgtaatctgttcctcttcaacaaaggaagcagaagatgcacctgaaaaactttccagagcatctggatatgaaggacacacagctcctcaagaaaataaaggaagcaattggtaagatccctgctgccaccaaggagccagaggaacaaactgcatgtcatggcccatcaggttgtcttagcaacagccttcaagtgaaaggcaatactgtctgtgatggtagtgttttcacttctgacttgatgtctgactggagcatctcttcgttttcaacgttcacttctcgtgatgaacaagacttcagaaatgggccttgcggcattagatgccaacatagctagactccagaagtctttaaggactggtcttctggagaaatgaattcagaagaaaattcatcaggtgcttctttttaaaactagaacttggctatattgaatgtgtatttttctttagtgaaatgatgttttatgttattatgtgtgaagtaatatattgtacaagtaataaatgtattgttgagatatattgacactgaggagcttataaaaacaagtcatcttaagttcacaattgctacaagaagaaagttgtggataactaggaaattattgtaagtaatgttttatttcagtacttagcaattagagttcttttattaagatgtatctgctggattaagggtacaggttgaaatagttctgtggctgtcctaagaaataatgggaaaagaatctctgggatgttaagtttttctgttggaaactaggaggggtttttttttctgtttcccatatacttttttttaatagcaatgtgtttttattaaacatgctgtgtgccac

SEQ ID NO: 57457 - DNA, 560 bp, Homo sapiens
  misc_feature (1)...(560): n = a,t,c or g
ttnnnacncttgactgattacgaatttaatacgactcactatagggaatttggccctcgaggccaagaattcggcacgagcctttaaaccctattaaacaagatgtgaaaaaaggaaaacttcgctatgttgcgaatttgttcccgtataaaggatatatctggaactatggtgccatccctcagacttgggaagacccagggcacaatgataaacatactggctgttgtggtgacaatgacccaattgatgtgtgtgaaattggaagcaaggtatgtgcaagaggtgaaataattggcgtgaaagttctaggcatattggctatgattgacgaaggggaaaccgactggaaagtcattgccattaatgtggatgatcctgatgcagccaattataatgatatcaatgatgtcaaacggctgaaacctggctacttagaagctactgtggactggtttanaaggtataaggttcctgatggaaaaccagaaaatgagtttgcgtttaatgcagaatttaaagataaggactttgcattgatattattaaaagcnctcatg

SEQ ID NO: 57458 - DNA, 2099 bp, Homo sapiens
attttgttttttttcatttttctcaaaacatatatttacccctcctctcagtacatctttgagcacctttcccagaatctcaggaatgtatagacccccgccccacacttcatacccgccctaggccttggtgatgaggcccctcacagcttgtgcaatggcatccctgtcgataccaaacatcttcagcagctcagccggcttcccacttcttggtacccggttaacttgccaggtgggtgacagtgatgccaggctcgcccactactgcactggacacagcctcaccaatgccaccttcataataatggtcctccacgggtgaggatcctgcccttggtggcacgagcgctgtcgagaatgagttttctgtccaggggcttgatggtgaaggggtccagcacgcggatgttgatcttttctttcttcagcagttcggcagcggccaaggcctcgtgcagggtcaccccagccccgataacggtcacctggtcatccttgctcttcaggaccaccttggcttgtccgacctggaagtcctcattgttgttatagatgatggcattttctgggcggctggtccggatgaagcagataccctttgtattggcggctagttccactgccttctctgtagcaacgccatcacttgggtaaaagacagttgatgtggggactgaccgaaacatagccagatcttctagggccatctgggagggcccgtcttccccgatggaaacgccgcagtgggagccgcagaggttgatgttgctctcggagatggcggccatgcgaatctggtcaaaggcccgcgtgaagaaggctgcaaaagtgctgcagaagggcaccgtcctgttgcgggtggcacagcccaccgcgatgctcaccatgttctgctcagcaatgtagcactcgatgaagcggtccgggtgctcctttttgaagatctccgagaaggtggaatttttggtgtccccatccagggcgatgatgcggttactggcatggccccagcttggccagtgccctgcccgtaggccttgcgggtggctatcttgtccccaaactttgtagctgggcaggctgggcatgcggatgttggcaatgtccactgagggtgcgtcctcctgtggaggggttgccaggatcttctttttgctctggatctggctgtagatctcctggatgatctgctcagccatgtttttggggaggggcttcccatgccaagactccttatcttctaccccccgtgatccctcggcccttgaaggtcttggcaatgatggctgttggctggtgcttggcctggccaaaggccttgcacagctcctccacgctgtgtccatccacgatgatggcatgccaaccgaaggcctcgcaccgcttctggtagatgtccatctggtgctgcagtggggccgggtcactctggcccaggcgattgatgtctagaatggccacaaggttgtccagcttatagatgctggcgaaggccatggcctcccatacagagccctctgacagctccccatctcccagcaagcaatagactcggtagctggccttgtcgaagtatttgccggtgtaggccatcccacaagcggccccgaggcccctggcccagggagccagtggccacgtcggtgaaagcttgtttcgggaccgggtgcccgtccaagtcggagctgatcttcctcaggttcagcacgtccgcctcggcccaggaaaccagcttcagcccagaccgcgtagaggatgggagcttgcatggcccttggagagcacaaagcggtcattgtgcggattccgggggtcctgggacttgtagcgcatggtgtggaaaaagaggacagccatgatctctgcggcgctgcagcatgacgtggggtggccagagcccgccgcagtggtggcctggatggagctgatacgtaggcggttggccgtgtccttcaaggcctgcagcttctgctggtcaggcttgtggtagctctccatggtgcggcaggcggggaccgggcgcacacgcggacacacagagatagcggctgctcccgcggcgacaggcggctgccgaggccgggcgcaacgtgtta

SEQ ID NO: 57459 - DNA, 654 bp, Homo sapiens
gaagaaaattagtacacatagaacaaagccagaggctgttcatcaggacaagggagaaaaactccaaagccatttcagagatcttcaagactgcccctcccattactggcccagagctctaagagggcagaatggtttggaatgaccagctgctgcccagggctgccttgggtctcgtctccccacatttctggtgcagcattcctcagccatcccagctgtggttcaggtggccacaggtgtgatgtggaaggtaaaagtcataaaccttggcagcatacacatggcactaattttgcaggtgtgcagaatgcaaaagctgagggggcatgccttcttccacctacatttcaaagggtgctgtgaacagccaccccagagagcccctagtagagcagggtctagtggagctacaagggtggggccaccgccaagaccccagaatggtagagctatcatagtgcaatgccagcttgggagaactgcaggcatgagactccaacctgtgcgaagtgcaacatgggcagaacccagcaaaaccacaggggcagagctccccgaagcttcgggggtccaaattccatagtgtgtccaggaggtggcacacagagtaaaagatcattctgaaggtttaaggtttaatgttgttttctc

SEQ ID NO: 57460 - DNA, 308 bp, Homo sapiens; identical to SEQ ID NO: 13990

SEQ ID NO: 57461 - DNA, 1333 bp, Homo sapiens
actttttcctagtcttatggaaagcaaaaaaacaatgtttttacagtaggcttctggaatagaaacagtggtttgaaagaccccactgccacctttatggactggcccctttgagtctgaatccccggcctctgtcacctgagacccaacccctagctgggccaactccagtgaattcacccatttttcttcttcagaaggcctttcctgtgtgagacccacatattttaaccttttgctcctatcccatttttaaagaattagagaataaaccagggcctgtttcttttcccctgaaatccctgcctctggcttcctaaacccatcatctaaggtgacagagcagtgctgggaatagcatctcctttcactttcccaaaactgccacagatagctgccactggcatgctctttgattcctgggaaggcaaacgtgggactgtcggaggaaagggattgttctggtcttactcataactgggtggtttgagggtgactgaagtcgtgcttttcctgtgtgtgctgccagcacagggctgtaaaatgcagatattgcgcctgtgtgcgtgtgtataagtcaagctccaagagggtcctggaatgtgactggccgtgctgaggaatgtgtttacgctgtttaatgtcttgccagggtgaggggtttacactgaagatgcacaatccctaaaataaagatcaccacttccccaaagaagcagccctcgggtccatgtgttgttcagacatgtgaagagaagcaagacagagggtctcagatggacgagggctctccaagggaatgcctggggattcacccagtggtccccagaggtgctccatggaggcaacaagtcattccatgaagccccagaggtagaagggacctcaagcaccacgccctccagggcagccgtgcagacgaccttggttcacttttcaggggtcgtcccaactctgtatctccagccactccaactgtggaggctgtaaatccagattttcactgttccagtctcctttgcagcttaggatggctatgtgatcaggtgtggccaatgaaattgaagaggaagtctacctgggcttctgggaaagcttttccaataaaagacacaggcatggctaacacctccctgggcctcttcttcctaccttgattgagggtgtgatgcctggagccacagcagccactttgctaccatgacaaaaaggccaagagaatcacagagtcattgaccctatcattatttcaccaagccaataccagccgccatccttctccagaattcttgtaaataaaataaatccctctttgtttaaaccaaaaaaaaaa

SEQ ID NO: 57462 - DNA, 462 bp, Homo sapiens
ttctggttaaaggcaatatttatatgcacagatgtataattatattgtgtatgtacacatagggcagacattacacattaagaatcagggaactttactctgtaatttttagctggagttatgacttcctgccactgacattaaggctgacagatgaggctctgaaaatgccacagatttaaacggatggaacccgagggctttagctgagctgttccttgagcccagcgggacggggtagttacaacatgcaggccatcacctacgaaggcctctgcttccagctgtggcagctggcctgaagccttttggggtagagcccagctctgcagagggcggggagtgtgaggaaccccacccttcctgccagcccctccctcactttactgggcagcacacctgaccctcagccatactggtccctgcaggggctcgctggggacacccagattgggagtcatc

SEQ ID NO: 57463 - DNA, 1672 bp, Homo sapiens
  misc_feature (1)...(1672): n = a,t,c or g
tttttttttttttttaactacttcaaacatatttattatttttacagactcaaaatacactaataatcctgcaatgcatgctggtgtcatgtgacaccaggcctggaatcacacctctgtccagcaggcacttgtctcaggtgaggcagttttctgagggggctcccaggagcagcatctcaggacacctgagagggagggggctgcaaggaacacctctgtgtgcacacgcctgtgctgtgctggagatgagctgtcaccttgaggtggcgtcagaccttgactctggcttgggagccccaaggttaagggaaggttaagacatgatcaaggtgcccatgagattgtgacagggacatgctggggtttctgtggcttgactgcttggatgaacatctcatttttcaatcacacagttgcagtgcagaaaggcatcaggaggcttggtctggtattaggaactgaagaagcagcccaatccctgaccagaacggtagcatcaaatgccttgtggtttccaggtggctgtggtagtgactcaggagtcctttagtgtgttctcgtgaacaccaggttatgtggatggcaccttatacttttcaaagctctttcaatctgtccgctcattctcttctaggcattgtagcttataccccttcctctcaccgacgctggtttagacctgtcaagttcttgagcgtcactgctgcacccatgagtccttgcaccagtgcctctcctgtggactttacctgcttggcagtgtggcccatgttcattgcatcattaacccggttttccaggaagcgccaagtgtcctcaaagtctggagaggagtcctgcatcatcaccagctctgttgtgttgtagatggcagccagcatggctcggcgggtgtaccagttaaaatcagtggactggtccccagcgtaatgccacatgtcatccaccatgctggtgagcaggctcaggctggacgggatgttgtgagggagcatgaggatgctgagggcccggggccagtgctcaatgtatgggatcagcattctcagtctggtttccactgcatccctcaggaactggtctgtcttcctcttctccgcctggcccaactgtaccagcttctgctcctcttctagcacacgtgtgagccgggtattgcactgggtcacaaaatgcagtattagctcactgccatccttcccgaaacatgctggctgctgccactggagagacccagagactgggctccttctgcaatcgccctctgctgtccacccgtgggcgggcacaaactcaagggctgccgtcaggcatgcggtgctgcaactgctcctcactttcatagtcctcctcctcctcgccgccctggtctgtatacctggggggtgaatgagaagactctggatcaggtttttctgccccctgtgtctcagaatgctgctgagaaaatgagttgggaggctgctgcttctgctcatctgaagaccttagccccacagctgaagcatggaaggcacgcggcaccagggcttgtcggcaacgggccacgggcaggcatcgcagctgcaggagcctccagcccgcccggccaagcgcaccagataccgccgccgccgccattttggaagcgggcaccggacgcgtgntcgnccgggtttttcaaagggtt

SEQ ID NO: 57464 - DNA, 459 bp, Homo sapiens
  misc_feature (1)...(459): n = a,t,c or g
gtgntttgnnnaacagctatgacatgattacgaatttaatacgactcactatagggaatttggccctcgaggccaagaattcggcacgagtggagattggatcatttaacaatataacaaaacttcctgatttgattttacgtatcttctatctacgcccttcctgagccagcaggtgggtcggagccaggcaggacctcagatgcttctctgacacctaggaaatccttggcctactgtcgggacctggagcctgtggaggattgggagctgtagaaccgtgtggtcagctctgtctcctagaacagtcactgtaggcaaaggcctggcctgggcatgagtgaggctgggagatctgtgtgagatgttctgagaagacggagggaagaactatggtggtacagtcaaaaggaattagacttgtgaattaaggaggatttactaaaaatgcctgtttga

SEQ ID NO: 57465 - DNA, 818 bp, Homo sapiens
  misc_feature (1)...(818): n = a,t,c or g
ttttttttttttgaagcggaggcattactttattcaggcagggactagccaggcagggccacagcgtcagcggatggggggagtcagcacatgggagtgccgtcacctccattagccacaggccagacggccgaggaggcggtgctactgcagtgagatggtgcactactgcagtgaggtggcgcagggctggtgagcttgggcacaaaagccagcatgtcaccctccctttggagaagcctctgggccacaggcttttttccagctgacgggatgcggagggaaggggacctagtactatcgggattcagctgacttagcctatgagatggagcaggcaagagattccctttgcagggtgggaggttatattcctacagcctccattcttggagtaggctcctttgccacaccccttttcaccttagcgggccaggcctctcagccagaaaccatatgtcaagagatcgtaagttaagagtgctgctcctgagcagggagcgggcttggaggcgtccttcccctccccgcacccctaagtccccagtgccgggcagatggtcttttcctagtcctcccctgaggaccaggactctctatctccttccctctgagtgaacttcaggaactgaccctggcccaggtgaacaggagcccctgcccaagaggtcttcagagcactcccctcctcctcctgaaaggggctccctcggtctccctcagagactagcggcattccctcgtgccgaattnttggcctcgagggccaaattccctatagtgagtcgtattgaattngtcaaagngcatnnaaatgc

SEQ ID NO: 57466 - DNA, 1472 bp, Homo sapiens
agcttttagaaaacaatttttatttaaaaaatcataaaaagtactggaatgaaaatacaggtaaagcatttgaaaattatttttctggcttagactgtttactggctcgattctagctctgtcctggtaaaggcctccagaaccttcacctactattatcaagtctggcctcatagggagggacttttactgtactgaaaggaagccagctgaagccgagatctgaagcgctcagcttccagttcccggaagaaaacatcatcatcattctgtgttatcatgtcctgcagctgctgaatttccttctccatcttagatctcagctccctcttcaccttatgtaatgtctgggcctgagatttctctctggctttaagttcttgatgttcctgtgatatggcttctgccagcaatgaaaactggtccttatagtagttctccatggagtccagttcatcctggtggcgtctcctttgttcatctcgcttttctttggcatagtttcttaggtctcgtaatctttgcttttgaatgtttaaaccttcttcaaacagtttcttaaatatcatttcttcccgggtcctcattctcatcatttttgcacacaactgaactctataatcatcataatattttcgagcacgaacgatttgctgtcgattttcttttatctttgattgggtcaacctttgcctacgaatgcagtccttgaagtcttgcagtctcttgttatgttcatattctttcttgacaagggtagtaaggaggtcatgccttcttagggcttcttctatttcatcttggagtttcttctttgatcgattttctctacatgcttctttcttaagctgttcaacctgtgcaatttgctgtttccacattttgcttagtgttgggccagaaacataaagaaacggaaactgctccagcataaggggcaggagactgtgttcacttactttcattggaactgctttatttggctttgggaggccacctcttagactctgcgttgtggtttttctagagtaaatcttccagggctgactacattctggagttcctttacgaacagcttctcctctgtatattttttcccactgtttcctcctccttctcatgtattcttagaggtccaatattctcttgaactttatgtcttcttagttccctttcaaatgcttcagtaaacgcctgtgcttggaattggcggacatctgtttctcttggcttgcgctgcctttttctctccaagtggaactgtttgtgtttgttaactggagatggagagagcgaatgggatctgtagggtggctttctacgcatggaaagtcctggccttgacttctttggcccatactccacgatgccatcactgtgctgagacagtgtctcctcaagttccatcctctacctcctcatttccagtattttcttctttatggtcagtcttttctttaatccgatcaccc

SEQ ID NO: 57467 - DNA, 928 bp, Homo sapiens
tgaatcccattgctatgacatgattacgaatttaatacgactcactatagggaatttggccctcgaggccaagaattcggcacgagcattttgctaagagttagcaaatatatgattttttccccctccttcaatatggagtgttcatgtgtcaatttcaggaatttcttagagattttcaactcttttacattaggtagctcattttttatatccagaaatgggaatgatttcaaggataattaccattttgaaatgggatcatttgcttgctagaaaatgttaacattgactccagccaagtacagaacattaaaaacaatctggaaaaaggggtgtggatcaaaatagattatgagccaaatctgtctcgaggaaggaagagagtagagtttagcatttataatacatggcctatcccaagagaggggagggactattttatacataaaaaaatattaaaagccttactttgaccaataaattaaaaagaggccatcagaaacaagagccgtggagggacataatgacacataggctggggctagtactggagttcattttgtgacactctggtggcaaatcctgtcagttctggtcctgtctctgcctctgccatggccttcattgaggagggttaggggatttggtggcagcaggagcacactgctgatcccagaagcatagggttaagaactaactgccttgaatacgatcttagtgattttcagtggagccaaggagtttgaaatgcataggcaatgtaacttcatcaaacttcaaagagccaagcttgataatctttcagggttgtgagaaaaggatgagaaaggattgtagaggacatgggttagagagagcgagctggtttagcagaattgttgtgaggattaaagataaatattggtggcatgtttgtatctatctc

SEQ ID NO: 57468 - DNA, 1512 bp, Homo sapiens
ttttccaactgatccacacttggcagtatttattgaggatttcaatacaccaggcatcattatcatgttatacatatttacagaaagtgtatggaaatggagtaagaaaaaatttcactgttactaaacagacctattagggtcattttgtaaataataataattataataagactctcgtaagtttccctgtccttgaatgctgtaaagaaacaaaacaaaaacatgagacagagaccactgacttaacaaatggatgactttattaagagagaaggacaagactgatgtttaccttggtcaaaccatccaggaaaacaaagcacacagacttatagaatactttggtttaaaaattattcataatatcaatattaaacctgatgtttaaagaacctaatcgagaaatatagtgtaaaaaacaaaccatgaaaacacaagtttgcatagatgaattaatgtagatgtacaattggcatttaaaaaaggaggtttgcgttttgggagtgccttaacgatgttgaacacctcaacctcccaagacacatgaaagtcaccagcaccacaattctcattttcccccaatgagggcatgagccaggaacaacttgtgctgtacggaggtgaactgaaagagactgcttccattggcctagtccagatgagtgtatatattcccatcagaacccaccactggtcatctttaaggcatccacaaaatgtccctcacaaattcacttaatctctagataggcatgtggtctgaggcagcctcctttgttttctgtcctcacacaggcaactgcattccatcaaggttctgttcaattccacgaactagctatttcaaagctgcctattcttctggggcttggttataaatccatgtggatttggaataacaatccatttgttttataaatatatccacattccaaatatcaaaggggcacttcctaaggaatctgaaagtgcccaggcaatgcgtagtctctctctcaagagatcacgtttctaaattatgagacaaatgatagctatcacctcaggtttcctgggcaacttgatttatatgagcaaactcttgtactttttaattcagcaccttttcaaaatatgtgctgggatggattcttcttagggaaagccccatatagaattctcattttggagcatcatttttatatgctatctccccagtgtatcttctcaatatttataacactttatgaaataaatattgggttgcctgtaagaagagaaaaatatagctctttctgagaaagagcatttggcttgcagtttacagcaagagctgaaattagagaccatagggatttccaagaccaatttgaccagaaatacaaaaattctgatgtcaaaaaccctctcacaaaatttaacaggtagaaattattttagcagtatagcctgaaatccagtgcaacaaaaatgtatcccaattctatgatatgtcatagtatgttctcttagctgtcttcccttacttgt

SEQ ID NO: 57469 - DNA, 2163 bp, Homo sapiens
tagagtagacagaatcacacatgtggtgggcagatggaaataagtacctgtggtgaacaagtttctactgtagttggagatcattagaattgaattcagtttctcttagaatataatcaggtataaacctaagttaaactttttcccaaacaaggagcatccaaagacacagtgacttgagctatagatagtaaaaatcatacgagagttgaacctgagtcaggtttaggaagcaagtttggttgcatcaattaagcaggctcttttcaattgactgatgctggggccttcagttttattctcagtatagattgccagtattgttaagagtatccaaaggcctttctagatggagacagaataactgacttgaacatacagtgtgcctgtaaggtgtccaggctcagagctggtgaaaacccttctgttgggcgtgtgcagggttaaactcctgaagtaacttgtgaggacttcagtgcttgctggtgtcctgggcagcaccatgaatgcctttaccaagacatgccaagttggatcccccgaatgaagcagatgtggctgtggtgtgacccttgctccctgctacacagaggcatcgcaggggctgggcctgtgtggtttccagatgagggtctggggtcccggaagcttgtgttgagagctcagtggacccaccccgcttgctgaaccctcacagttcttggggttgtccagcctggacttgtagcacacatgtcctgaagcaaagctccggtgactgcatgagccacctggccacagtcctcccatggagggcctgccgtgacgctcagtggagagggcagggcctgtgtctccacttaggccacacagtgatgaggaaaccacagatggagcttcttgccgataatactgactctagcccatgattgccttgcccaagccaaagaggaaggttaggttggcttgtcgagcccttgagcgttgggagatggggtgggaaggaggtgagcccctgcagagagttgggtagtgtccttcaggaatgaaaggaggggcaaaggagtcaccagaggtcctgcatttccatcagggtttccacagtcatcagggcttctctcttgagttgctgataggagatgtgagttatgcccagagatgtcttatcgtgaggaaaaagaaacttccttttgttcacatttaggactctcagtgccatatgaagtagcaaaaggcagtatcggccagatcagtgttacattgattctaaaattacagtgtccccattagacaactattttaggtgctggagtatgtttgaagagtgtgctgggaaaaaggaagcatttcttcattgatttaaatcagtatgaatattatatgcctaaataaaaaatttgcacaggtaaattctctcacttgtgaatgggagaagctgccccaggaatctgtgaggatggtattccctggagtctggctttgaaagatttcattgttggtagaaataacaggttgagaaagagggagttagcatcacctaaaacctgcacgtgaacaagggttgacatgatacactatggccttagaaaagggccaggtgaaaccccaagctaatcactgcggtctttcagagccggacagacaggtgccagcagagcccggggctcactctcctttcagtcactcctcagcccttcgaagggaagcccaaacactttgcacgctgtgctgcagacattctggcctggtgtgtctgaaagttgcatcagtcctcacggtgcaaacacagttgatttagggaagtcacacaatgacactgaaatcctacagaccaaaatccacttgtcagcaggagcagcagcccaggcccagcaccagcggtcttccggctcctctgagggctgccacgttgggcgaggggagccatgccaagggtccaggctgctttaggccatctgtgccccactcatctggggacagatggttttttttttttgtaaaattgtggacttttaaaacctgttgactaaacagtaattaatttatatttgtgaaaaatgccactgtcctagtgatttctgatgtaaataatgttgtttatatagtatgtattaaattttcctacattgtaaaactgctgtacttttgattcttgtatattaaaaagtgttactgagcattttt

SEQ ID NO: 57470 - DNA, 591 bp, Homo sapiens
gctgcacttctcagcaagttaaaagattagcagttaatctttattcatttggcctttgtgaatttgtatttaaattatttttttcaggattggcaaattattcttgtttctcctttacaaaaaaataaatgcgatattttgttcaatgaccccaaaaccaacttgaaacttaggtggtcatattggcttgcaaagcaatgtccctaattgtaccagtcagtcacacaagtggattcaaggacctgctttgccagattgacctgtcaccaagctcacaacacatatcctccacaaacaacatgtgttatgtgaagaaaaatggtaattataaataagaacaggatataacacacctttcatccactttaaatctccacagtttcattttatgtcattctctgagcaaatctctttgggatgtgagctagcgtgttcttctcccatttggaatataaggctgggaatagaacaatgcttaacaaatcagtgaagctcgacagtaatatgtaattttaattcagttaggaaagagttgtattgcattgcaacaagttgacaaatcatagccatctctgtagggtgtcaggaatt

SEQ ID NO: 57471 - DNA, 965 bp, Homo sapiens
  misc_feature (1)...(965): n = a,t,c or g
ttcatctcctcacttcaggaaaacacagttcagcaaagtcttcagatgcgatcctgtgtaggagaaaatacccttctggtgccccatgaaaaagggaaataccaaaaccatttgttcactgagccttgcaataggtgctcccttaccaatttcagaagcttccctgcaagtagatatcgagagagcacactttccattagagcctggtaatacccatatcacctctgctctgaggctgggcctgcagctgtgtagtctttggaagaggtagcccctgaacgcagagcctaagagaagcaagtcggccctgacgccaggccccagtgggcgcctcacactcagaacctcataccccagagcaaaccgatggtcagggagagggctagagctcacacccagctcggaatagatcttccctgatgacatttcatgccctctaaggcagtttttaaatgaaggtacacacatccaggggtgtttcacaggctttcacagcaagggtacctatttcatggcaaaataggcagttttaaaagaataaacaagctaggtgtggtggctcatgcctgtaatcctagcactttgggaagccaaagctgatggatcgcttgagcccaggagtttgagaccagcctgggcaacatggcaaaaccccatctctacaaaaaatacaaaaagtaggccgggcacggaggttcacacctgtaatcccggcattttgggaggccgagataggtggatcacctgaagtcaggtgtttgagaccagcctggccaacatggtggaacccaatctctactaaaaatacaaaaaaactagccggatatggnggcgggtgcctgtaatctcagctacttgagaggctgaggcagganaatcgcttgaacttgggagcacaggtgagctgagtgcagtgagccaagaccatgccattaccttaagcttgggcacnagagccnaacttt

SEQ ID NO: 57472 - DNA, 1170 bp, Homo sapiens
gaatacccgttatgacatgactacgaatttaatacgactcactatagggaatttggccctcgaggccaagaattcggcacgagcaagagagacatttctggctctgaaggcgaacgcttcgctggccatttaggagctctgctcaaagccagacgtatcctagaaggaaaacatcaccatggctacagaaattggttctcctcctcgttttttccatatgccaaggttccagcaccaggcacctcgacagctgttttataagcgacctgattttgcacaacagcaagcaatgcaacagcttacttttgatggaaaacgaatgagaaaagctgtgaaccgaaaaaccatagactacaatccatctgtaattaagtatttggagaacagaatatggcaaagagaccagagagatatgcgggcaattcagcctgatgcagggttattacaatgatctggtcccacctataggaatgttgaataatcctatgaatgcagtaacaacaaaatttgttcggacatcaacacataaagtaaagtgtcctgtatttgttgttaggtggactccagaaggaagacgcttggtcactggagcttctagtggggagtttaccctgtggaatggactcactttcaattttgaaacaatattacaggctcacgacagcccagtgagggccatgacgtggtcacataatgacatgtggatgttgacagcagaccacggaggatatgtgaaatattggcagtcgaacatgaacaacgtcaagatgttccaggcacataaggaggcgattagagaggccaggtttatacacaatataccattttctgtagtccctattgtcatggttaaattattctctaagtgtattctgggtgcagagatgcatgggctctgtcagtttctgggaaactttctgcaccctataaacacaatatttttctttgttttcacacattcaccattttgctggcacctttctgaagtagtgttgtcccggtatcagcctttgcaatatgttagagatgtactgtctgccgcattttgcactggttttctcttttcatttatgattaataatgtgtatacgttattcctttttattatctactgtgtaagacaagaatatttcattccaaataaagaattcagtctttaattatgaaaaa

SEQ ID NO: 57473 - DNA, 1063 bp, Homo sapiens
  misc_feature (1)...(1063): n = a,t,c or g
tttttttttttctcaattaaagatttgatttattcaagtatgtgaaaacattctacaatggaaactcttattagatgctgcatgtactgtgctatggaccacgcacatacagccatgctgtttcagaagacttgaaatgccattgatagtttaaaaactctacacccgatggagaatcgaggaagacaatttaatgtttcatctgaatccagaggtgcatcaaattaaatgacagctccacttggcaaataatagctgttacttgatggtatccaagaagaaatggttggtgatggataaattcagaaatgcttccccaaaggttgggtggtttttaaaaagtttcaggtcacaacccttgcagaaaaccactgatgcccaacacactgattcgcggtccaggaaacacgggtcttccaagttccaaggggctggggttccccaacgatcaagttcctgtgctgtaatcaagagggtcctttggactggatagggagcacttgggagctgtacaccatcagtcataatggatggcagtgtaaaagatgatccaaatgaccatgaacaaggcaaaagaggtcataaacccttccttcgtgagctcccacgtgccaccatattcttcctcatcaatctgtaggtaattgctgaagtagaggtacaggactcctgcattgatcaggcagaatcctgctattcccaagaaccctcgtaatggcaaaactccccaaatgacacccaggaccacagcaatgatctgtcggaaccagtagatcacatctaaaaattcatccttatcctcccaggccgcgtcgctccgcagcaccttactccagacggagactttgagggccccgttggccagctgcggctgaggcggctcctccttccgccgcccgccgctcatcctcccgtcgcgccnccgggccgggcctggggcgcgcgggctgagccaaagggagtcggggtctagggtcgcaggtcacgggcggggcggctgcaggctcagcggcccggtcctgcgggcgctgcggttcctcacaacctggccaagctacccggt

SEQ ID NO: 57474 - DNA, 2743 bp, Homo sapiens
gtcgactacaaggtggctacgagttttccagatttaggagacttcagaaaggtggggcagatagaatggagatggcaaagatctctttgggcatatatgggcctggcgaagtaatggaataatttctaattttcggagaaggcaagtgccctcatgccgggatggcagaagatgagcctgatgctaagagccccaagactgggggaagggcccccccaggtggtgctgaggctggggaacctaccacccttcttcagaggctccgaggtaccatttccaaggccgtgcagaacaaagtagaggggatcctgcaagatgtacagaaattttctgacaatgacaagctgtatctctaccttcagctcccctcaggacccaccactggagacaaaagctcagagccaagtacactgagcaatgaggagtacatgtatgcctataggtggatccgcaaccacctggaagagcacactgacacctgtctgccaaagcaaagtgtttatgatgcctatcggaagtactgtgagagtcttgcctgttgccgcccactcagcacagccaactttggcaagatcatcagagagatcttccctgacatcaaagctcgaaggcttggtggccggggccagtccaaatattgctacagtggcataaggaggaagaccttggtgtctatgccacccctgcctggacttgacctaaagggttctgagagtccagaaatgggcccagaagtaaccccagcacctcgagatgaactggtggaggcagcgtgtgccctgacctgtgactgggcagagcggatcctgaaacggtccttcagttccatcgttgaggtcgcccgcttcctgctacagcagcatctcatctctgcccgatctgcacatgcccatgtgcttaaggccatggggcttgctgaagaggacgaacatgcacctcgggaacggtcatctaaaccaaagaatggtttagagaacccagagggtggagcccacaagaagccagagagactggcccagcctcctaaggatctggaagcccgaactggggccggtcctctcgcacgtggagagcggaagaagagtgtagttgagagctcggccccaggagccaataacctgcaggttaatgccctagtggctcggctgcctctgctccttccccgggcccctcgctcactaattccgccaatcccagtctctccacctattctggcccccaggctttcttcaggtgccctgaaagtggctacactgcctctgtctagtagggccggggcacccccagcagctgtgcccatcattaacatgatcttaccaactgttcctgctttgcctggacctggacctgggcctgggcgagctccacctgggggactcactcagccccggggcacagagaacagagaggtaggcataggtggtgaccaaggaccacatgacaagggtgtcaagaggacagctgaagtacctgtgagtgaggccagtgggcaggctccaccagctaaagcagcaaagcaggatatagaggatacagcaagtgatgccaaaaggaaacgggggcgccctcgaaaaaagtcaggtggaagtggggaaaggaattctacccctctcaagtcagcagctgccatggaatctgcccagtcctcaaggttaccatgggagacatggggctcaggaggggaaggcaactcaagctggaggggcagagaggccagggccaatgggagaggctgaaaagggggcagtacttgcccaggggtcagggagatggtactgtttccaaaggaggaaggggccccggttcccagcataccaaagaagcagaagataaaattcccttggtcccctcaaaagtgagtgtcatcaagggcagcagaagccaaaaggaggcttttcctttggcaaagggagaggtagacactgcaccacagggtaataaagacttaaaggagcatgtgcttcaaagttccttatcccaggagcataaagacccaaaagcaacacccccatgatacaggtctgtggggaagagtgtttatatccctacgttaactttgcctagtagaggcccttctttgcacttgcttctcatttggctattcttttcctaaggaagtccattctcctctgtacagacagctgagtcacccagtctacttagtacctggttgctgcctctgaccttttcagcttgataccctgggctttagtgtaaccaataaatctgtagtgaccttacctgtattccctgtgctatcctgtgggaaggtaggaatgggctaagtatgatgaatgtataggttagggatcttttggttttaaatcacagaaaacctaattcaaactggcttaaaataaaaaggatttattggttcatgtaactagaaagtccataggtagtgctggctccaggtgaagacttgacccagtagttcagtatgtctctaaataccggactgacttttttctcactgttgcatcttctgtaggaccatttaagtctgggccacttaatggctgccagcattcctaagattacacttttccccatttatgtccaatcagaaaaagaaggcatctttgtaccagaaatctcagcaaaagccctaatattcacactgattaggcctgggtcacatgtccaccctgaccaatcactgtggccaggaggatgatacatgctaatttgcttattctatatcatggacaacacctttggggaaaagggtgggggtcagcct

SEQ ID NO: 57475 - DNA, 730 bp, Homo sapiens
gctgcttcccgcttacccccagcgacgctaacgttaaagcagttcgtaagaaggcaacaagttcttctcctctacagaaggattttgcaaacaattcggcaagttccaaatgattctgatcgcaaatacctgaaagattgggcaagagaagaattcagaagaaacaaaagtgccaccgaagaggtgagaacaaaatcatccgctccccccccctgcccccactcaaggccctcctcagctcacggagttagaaaaaacacttgctttagcaaaatcttaactatagcattattctgaaggattttcaaagtctccatgtgttttgttgcatttaggattaacaatggacaacacaaagcccagtcttactatttatatgtacagtatttggtgatagagagcaaaggaaaaacacatcagaacagttgccttaacactgaaaaacataccctgcattttgaaaatgtttatggatgtctcagcagttcttaaaagaagaaaaaaaccactaacaaatggccagtagatgctggacacaatcattagggaagtgtaaatcaaaactactatgaggtcgggtgtagtggctcacgcctgtagtcccagcaattttagggaggccgaggtgggcagatcacctgaggtcaggagttcgaggcctggccaacatggtgaaaccccgtctctactaaaaatacaaaattagcccgggcatggtgtcaggcgcctg

SEQ ID NO: 57476 - DNA, 428 bp, Homo sapiens
ggaaccgagggattgctactcgcctttggcttggcggtctctgtgctcgggggtccgaaaactgctggaaggcccccggtctctggaggggagcaggcggtagcgagtttagtgacgtggagcaggcgcagaacagtcggaggtgcctgagtggttattaaaaacgatttgaagagatttcctgggtgtggagtgtgactttccaaaaccagcttttccttgagctgtatttgttgcagcaatgtttaggagattgacttttgcacaactgctttttgccactgtccttggaattgctggaggagtatatatttttcaaccagtatttgaacagtatgccaaagatcagaaggaattaaaagaaaagatgcagttggtacaagaatcagaagagaagaaaagttaatactacatggagttaggcctgg

SEQ ID NO: 57477 - DNA, 1931 bp, Homo sapiens
ttttttttttttttttttggggagaaaattaaaccttatttatttttaaagtcaaaccactaggaaaatatatcacagcctggaaacagcaaacggacaggctatattataatttcaagtaataagttggtgaaaattcaacgaagttgctatcaaaacaataaggtgccatgcttggggcaggaacactgccagctgcacaagccccaggcaaaaatggtatttggtaatgggggctgtctctcctttgctctaagggagtcagctcatcctagcccaagttgcttactttttctcccttgaatttcctgttgccaggggtttgtctcaattgggctctgttaattcagggggctaagtaggcaatgctaggtgtaggctttcattccatatgttctaataaaaccaggttttcccaaatccagtacttcatttactctgttgtaatcaagtagccaactgctcctcttttactgttcattcctagatactagtatatatcacaatcaaaacccccttctcttcaaggggaaagtgttactgcaagattgtcctgtcattttgttacacacagcctccaggggccatcagccagtaattctgcttcccataattagtgtgtcatcacctctcatgtttctgcacagtctccaggctgaaagatgcagcatgtaataattttaagaaatgtacatccacatcttgatgaccagaaatggggatccacaaggaacatttcaaagttcttatccaaactagtctacctcccagttccacatcttaaaatcaacttgtatgcccttgtataaattaccccaaatcaagaaaacaaagacccagaaaactttctttcccttctaagttagtgacctcattgattttgtttcacagcttatggaagatggtggggtgacacttttggtaaacaggatgttggcaacaaagagaaaatatctctcctcagactccaccaactctaacctgccagcctgttagtacctgtgtagtaagaagagtctggtaccttggagggctctggcttgttacaggggaaagccttactgccaggacaagcactggccacaggaaataataagctctaaaactctcctgtaatatctctgactcgatttagcaccacttttttccatttcattttttagggactgaaacataaaataaccagtgtccagaggcaagtgacatatgccttacgcttgtggccatccttcatttcttcattcgtaaactttgcttaaaagactaaaattcccaattccttataaaaaatatattcttgccctcagccctgatggccactggcaaatacttttattttccaattgataagagagcctccttcatcttcttggtcatagttgggatgaggtgcatgtggtcatccacacacttggtcacacaactgtccagctgctgcttcacctgaagctccttactcccagcatctattgaatctttggctttgtcgttgcaatgcatggtgcaccgggccaggcggtcctggaacttctccagctcactggtgaccaaagcctgggcttgagccagaggcacatggcagcgctcgatgcactggtgcacctgcttcatggaggcctggctgtcctcacaacagctggcgctgcaccggaacatgagaccagaggcattgcggggctcagagaagaacagtgtagaaacccgcgctgtgtgaagcgaggttgggcgcaagagaagcaggcatgacctggccaacggggaggccggaagtcctcgcctttctggtctttcacgttggcagcgcctctgctgggcctcgggccgctcacctgcatcttccggatgttctctctttccagactcttcaccatggactccaccgcctcctgcacccggagctgctgcagctcagccatggccccacgcgtccg

SEQ ID NO: 57478 - DNA, 1443 bp, Homo sapiens
ttttttggccaaaattagtataaatagactttattgaagtcagtgcctctgtactgagacagaagattgtgtctacataagcacaagttgtaacatttcacaacttctaaaaggaatgtcaacaattacaacgatcatgcataccatggtcgataatcacattttagaagcattttcaaccatttctaaagaaatgcttataacattgttatatatagaactactttcaataaactgcaaaacattgatcgacttttccagtatgagctacagtgtcaacacaaaagggaggcataaatgtttaatttatgaaatcagaatggaatatttactgtaaagaaaaattaaaaagctttcaaataaaggccattatcgaaccaacgtgaagagcacaactcgaacttttgagttcattcatcttttaaagctgtcctctcaataacttcagttctaagcactgaattcagtactgtgaatattccttggattgaagtttggcaatgatgcggtccaactgtctctttgcttcacactgtgggaaattgctcatgtcataatattgaggggcaattttcaccaaccattctggcttgatatctgtacatgtccggatgtaattctttgttgttagaacaaactcattataaagcacccattcaggtttgtggtcaagaacagtagagggatgcaactgaaccacctggttatctttcacagttaagtaatgccctgttcgttctaaatgtgccacctgcataaaatacccagtaaccaaagcttttcttatattaatataatagtccctgcttgtaaagtcagtacttcgacgaggcaaattaaatctgtccataattcgagatagctgctggcgtacattgtctgcggacatcagggacctgtagttaatgaagttgtcataacaccactgaaccgattcatgattttgtttaaaagcatggtagacgttcagcagtgtcagatgatctccatctatgtgggcaaatctcatcttggcctcatctgcggctttcttggcctccgtggggcgaacaaaacactgtgggactaaacaaggttggtatgggcccaacacaaacggcccatatcgatgagtcacgcattcacagatagaggaacaaggcctagctaggtcagttcacagagcatagggcagggcaggatggcctccaactgcatcttggattgtttactaccttgatttggtacatcaacacctaaccacatctgtaagacaagagggtttcaaagctacagagtacctgattattttaactagatctaaaagtaggcatcaaaacagctattctgaaggccatcaggatactaaaaagctcaacttatttaaaaaaaccagtgctgatagctctaccaataaccagaataacggtgtcaattgccttttagctaactgtaatttttcaa

SEQ ID NO: 57479 - DNA, 2958 bp, Homo sapiens
gtgatggatctcatcccaaacttggccgtggaaacctggcttctcctggctgtcagcctgatactcctctatctatatggaacccgtacacatggactttttaagaagcttggaattccagggcccacacctctgccttttttgggaaatgctttgtccttccgtaagggctattggacgtttgacatggaatgttataaaaagtatagaaaagtctggggtatttatgactgtcaacagcctatgctggctatcacagatcccgacatgatcaaaacagtgctagtgaaagaatgttattctgtcttcacaaaccggaggcctttcgggccagtgggatttatgaaaaatgccatctctatagctgaggatgaagaatggaagagaatacgatcattgctgtctccaacattcaccagcggaaaactcaaggagatggtccctatcattgcccagtatggagatgtgttggtgagaaatctgaggcgggaagcagagacaggcaagcctgtcaccttgaaacacgtctttggggcctacagcatggatgtgatcactagcacatcatttggagtgagcatcgactctctcaacaatccacaagacccctttgtggaaaacaccaagaagcttttaagatttaatccattagatccattcgttctctcaataaaagtctttccattccttaccccaattcttgaagcattaaatatcactgtgtttccaagaaaagttataagttttctaacaaaatctgtaaaacagataaaagaaggtcgcctcaaagagacacaaaagcaccgagtggatttccttcagctgatgattgactctcagaattcaaaagactctgagaccccacaaagctctgtctgatctggagctcatggcccaatcaattatctttatttttgctggctatgaaaccacgagcagtgttctctccttcattatatatgaactggccactcaccctgatgtccagcagaaagtgcagaaggaaattgatacagttttacccaataaggcaccacccacctatgatactgtgctacagttggagtatcttgacatggtggtgaatgaaacactcagattattcccagttgctatgagacttgagagggtctgcaaaaaagatgttgaaatcaatgggatgtttattcccaaaggggtggtggtgatgattccaagctatgttcttcatcatgacccaaagtactggacagagcctgagaagttcctccctgaaaggttcagtaaaaagaacaaggacaacatagatccttacatatacacaccctttggaagtggacccagaaactgcattggcatgaggtttgctctcgtgaacatgaaacttgctctagtcagagtccttcagaacttctccttcaaaccttgtaaagaaacacagatccccctgaaattacgctttggaggacttcttctaacagaaaaacccattgttctaaaggctgagtcaagggatgagaccgtaagtggagcctgatttccctaaggacttctggtttgctcttcaagaaagctgtgccccagaacaccagagacctcaaattactttacaaatagaaccctgaaatgaagacgggcttcatccaatgtgctgcataaataatcggggattctgtacgtgcattgtgctctctcatggtctgtatagagtgttatacttggtaatatagaggagatgaccaaatcagtgctggggaagtagatttggcttctctgcttctcataggactatctccaccacccccagttagcaccattaactcctcctgagctctgataacataattaacatttctcaataatttcaaccacaatcattaataaaaataggaattattttgatggctctaacagtgacatttatatcatgtgttatatctgtagtattctatagtaagctttatattaagcaaatcaataaaaacctctttacaaaagtattattggatgtttcctgcacattaaggagaaatctatagaactgaatgactgagaaccaacaactaaatattttgatcattgtaatcactgttggtgtgggaactggagtgcagtggtgcaatcttggctcactgcgagctctgcctcccaggttcacgccattctcctgcctcagcctcctgagtagctgggattgcaggtgcctgccgccacgcccggctaatttttctatttttagtacagacggagtttcactgtgttggccaggatgctctcgatctcctgaccttatgatccacctgcctgggcctcccaaggtgctgggattacaggcatgagccacggtgcccagcccaatttgattattaacataggtgagagttaacccactatgactttgcccattgtttagaaagaatattcatagtttaattatgacatttttgatgagacacagtggctcacgcctgtagtcccggcactttgggaggccaaggcaggcagatcatctgaggccaggagttcaggaccagcctgaccgacatggtgaagccccctttctactaaaaatacaaaaattggctaggtatggtggcacacgcctgtggtctcagctacccaggaggctgaggcaggggaattgcttgaacctgggaggtggaggctgcagtgagccaagatcatgccactgaactcccagcctgagtgacagagtgagactgcatctaaaaaataaaattatgcctttttgtagcacatatattttgtaacatacaactgaagccagtattatattattagttttcatttaatgttttcagcccatctcccctgatatttctgggagacaggaaatatgttttcttacacctcttgcattccatcctcaactcccaactgtctaaatgcaatgaacatttaataaaaaaaacagttgattggtcaattgattggaaaaaaaaaaaaaaaaaaaaaaaa

SEQ ID NO: 57480 - DNA, 383 bp, Homo sapiens
gagctggcttgtgatcataatgccaactatagataaggcaagtagtagcctagtagttaactgaagtttcaagttagtcatgtatagtcagtttttattatcatgtgaataaaataaaattgttttccttttcttttcattcagaaaagttctaggaactattttggtgcacaaccacattatagattatgcttgggtgatatgccatttgtagctgggaagtccacaagccctagccatgccgtggtagccaatgttcagcttgtcttgcatctaatgaagcaacacagtaaagctttgtgcaatgatcgagtcatcaacagtattcctttggcaaagcaagtatcttcacgaggtggtaaaagtaagaagttgtcagtaac

SEQ ID NO: 57481 - DNA, 1186 bp, Homo sapiens
  misc_feature (1)...(1186): n = a,t,c or g
gcgatcattcaatatggctttattttctcatcggccggctgcatcccacaccagcctgagccccagacggtcagtcagtgcatccatcatgacgacctgtccaggaaggaaggaaggaagctccctccaaaatgctggccccgtggcacccagacaggagcctgctggctagcatgcaagcactccccaaattctctcatggtgacaaggtggcagctgcctgggtcccagagtctcagcacaagtgcccagaggccagtggtgatgggcccttgggcaagtctctggaggaggcgggcaacccgcagggcagacgggagaagagggtcccctgccaacctggaggaaagaggggtggttgtcccctcacccctccaggctgcaggttctggagggcagaggtgctggccgaagaactggtggccaaagtgagaccccctggtcctatctggacagaaccccaggctcccatgggccggcccaggtccttcggacagcaaacacctccctgggccacggaagggagacggctgcgggtgccaggccaggacttgcccagctcaagtcccttccccaccaagcctgctcggcacgcactgggtaggttatattgctaaagaacggacacatccggggtctccctgagctcaacacgggcctccttctctcccacacacacacgacgcctggtctgcggggtggagggttctgtccaaggcttcccgagggcccggaccttcctctctgagttccaggaagcgggcccagagccatgccccaagtcctctccttcccagcaaacgttctcacctgacgcccccaccccgaaacaacatcctttctaattgatgaggaaagctgaaggcccagggcgaggancgaaggggaggagccacaagcctccccgggccacctcctgcctcccagtactccacccgcacccaaattcccccaaggaggacccaactggcccgttgcaaaaccctggaatgcctggggccccagtaccgagccccaggaaacaccaggcactggctcaggactcagggcagggagctgggccagggccaagcaggtgacggccctgggagctgggctggggccgcagaggcacaggggccggagggatgggctgggagaagaggagtgcaggggaacggggatttgcagtgggtcgggggtcggg

SEQ ID NO: 57482 - DNA, 432 bp, Homo sapiens
  misc_feature (1)...(432): n = a,t,c or g
gngngnnnnnntttgnnattgggnaacngctatgacatgattacgaatttaatacgactcactatagggaatttggccctcgaggccaagaattcggcacgagaggcagatggctcttcttaaggccaataaggatctcatttccgcaggattgaaggagttcagcgttctgctgaatcagcaggtcttcaatgatcctctcgtctctgaagaagacatggtgactgtggtggaggactggatgaacttctacatcaactattacaggcagcaggtgacaggggagccccaagagcgagacaaggctctgcaggagcttcggcaagagctgaacactctggccaaccctttcctggccaagtacagggatttcctgaagtctcatgagctcccgagtcacccaccgccctcctcctagctcagggacccagc

SEQ ID NO: 57483 - DNA, 685 bp, Homo sapiens
gcgaagaatcacagaaagcagataaactagattttgaatataagcggctaaaagaaaaagttgacagtcttcaaaaagaaaaggacaggctgagaacagaaagggattctctgaaggaaaccattgaagagcttcgttgtgtacaagctcaagaagggcagctcacaacacaagggttaatgcctcttggaagtcaggagtcttcagacagtctagctgcagagattgttacacctgaaagtccggagaaacttattcgtcttcagcatgagaataagatgttaaagcttaaccaagaaggttcggacaatgaaaaaatagccttattgcagagccttctagatgatgcaaatctacgcaagaatgaactggagacagagaataggtacttgtgcccataaatttccctcttactacggcttttgctgtatcccatagatttcggctggtgaatcaaagacttctggaagtacagtcacaagttgaagaattacaaaaatctttacaggatcaaggctcaaaagcagaagattcagtccttctaaaaaagaagcttgaagaacatctagagaagctgcatgaggccaataatgaactacagaagaagagagccattattgaagatctcgagccaagatttaacaacagctccttaaaaattgaagaattacaagaagctttacga

SEQ ID NO: 57484 - DNA, 1745 bp, Homo sapiens
  misc_feature (1)...(1745): n = a,t,c or g
tttttttgttgttttgttggcattgggcagctttcatctgtgtttattttttttcatataaaagttacatgtttgaaatgtctgcaggaagatgccaccatcagacaggttagctggggcatatatattacaatgtaaccctgtggaggtcgtggggccggagcgggaagatgctccccagaatcgggttcaggtcagacatggtgtgtgcctggcccctccttgcccccccccaccccgacacctgcaggtgaggactgacctctgcaaggaacgagtcctccgcctggctcacgtctgtctgtgaagactgattcccacaacccgcccgggccccccaaaggaacagacgagccacggccaggccgcagcactgagcacagagctcagcaataaccagggccaggcttagggggcacagggggctgcctgccatcaataagttagacatacatcgcaccttgccgtcctcacgcagggagcccctgggcactgctcatgtgctgcctgggccctgctgctcagaacaccaagggctcccaatgagggcctggggaattgcctgggcacactggggccaggcacagggtctgttctgaattcagggaaggtgaagagaccccacctctatccagctcaagcccaagaacaaggcagacagagctgtggacagcacccgaccacagacacggttctgcctgctgctggagtgagaggcctggtttctgaggctgcagcatggcactggcattgcctgtgctacagatggggactcctgcgagtctcacaaatcacagggagaatttcagttcacacaacccaagggccctgtgtgcagagcggccctcacacgagcacagcagcattcaacagagctgggcaagggaaggggagagagagtcaaggattgaaatgaagggacttcaaaaagaaggaacaaactaaaaaccccaacccacacacaatactggttaataagccagcgactcctaacacacacactccttaaataataaagtgacaggtccccggctggccccgcaagaccaccgcaagagggggtcccgccaccagagggggtcgccgcctgccactgcacggctttcctccctctatctacaggacaaacaaaacacgggagaggggaaaaagcccacattttcttcttgataaatgctgttcaaaaacccatgaaggactcaaagtgacatggtggtttaaaaaaaaacctaaatgatcaacagatgttgctttctatatttttcctttgttctgtttgaactgggctaagtaagcacagttagaccctgctgttcacttgaccacgtcctaaacccgggacaagtgagcactcattcatgcacagcagacccggaggcatgggctggggcagcacaactgggttcccgcagcgccctgcctgcaggctcatgctggaggccacggaaccaggcggcacagggcagattctgtttgtcaagcgccccacaagccttgcccagattgtcaagctcagcagcgagaatggttttgacgaggaggatggaaacagcatctgctctggaagccgctctggcgtggggagagtggggagagggtgcgcttgctgcagctgctgccttaggaggctcctctgtggccagggnttctgcctccctgcaccctgagggaccattcgggtgcctcagggatgcccttccctcccaggggcactgacagcactggctgaaaggtctgaagagcca

SEQ ID NO: 57485 - DNA, 1312 bp, Homo sapiens
tttttttttaaaaagaacttaagtataattttattctattctgcatcaatgccatacacacacaaaaaaatgtttggatcacttaataagttataacattctatgttttaacattaataacaaggacataaatgatcatttcctgagttaacagtgcaaggtaaaatttaatctgtattgctaataagacattttacagcatagaaacatgatcgaaggtgatcatttactttatcatgtcataaaacacaagtgcttattgtagaacagtgatataatttaaatggcaaggaaatttgtgattcataacaaagaatcctgtatgtatttgttgccatgattaactttccaggtcaaatatcagtagtaaaataagttgtggtacaaaagaaagccaagaagttacctgtactgaaggaacatttgatttcatttaagaaactgaaggctggattcctagttaaccttttgttatgtacaaaaatgttctcttaaaaaaccctaagcaatcacaaatttagataaactagttgaataaaggacaatgacagctcttcattatgctgtaaaactatggatctcatttttggaaaagttgagatcatgcagcaaccttactccttgttctgtaaatggcactggtccacaaatgcagacgagaactttggatttgtccaaatttcttttcaaaaattcagaaagaagagctggtgaaatatgtccctgtttgccattccattcagaaataggtgctgagagaacaaattcaacatccagtcttttatctttaaatgctaatttctccaattggcttctccaaattatatcatcttctgttttattgaagaacatcagcttcactttcctgagactgggtatatcagtcaaagcataattcagtattttaaccattggtgtgaagcctgttccagctgccaacaaaaagagatcttctaattcttggaacttggatattttaaaattgccctcaggactgcttacagaaacaaaatctccaatctgaagacgatcaagctctggtgtgaagagtccagtgggatagatttttatcaaaaagtagatgtatttattgttgggaagaactggttccttgaactctgagagtaaggaaccagatacaggtgtatatggctttactatttctgtacctgtaataggtagcttgaggtaaacatgttcgcaatgggcacttgaagatgagtgcttggtggcagcatcaaacagaaaagcctcgtatcatgagtaacatcttccttggaaattaactggcactttctgtagtacaaacctg

SEQ ID NO: 57486 - DNA, 952 bp, Homo sapiens
gtttttttgctgcttccaccgccccttaaagttagtcagtttttcttctcttctttgacattctaagaacttatagataacttaaaacttttgtgaggaagattaatgtggccaataaaacctttaaatgttaagtgtcaagaaactgcactctcccttcttaagaactgcctaaagtgtaaaatacatttgaatgcaatttttggaagattttttaatgttcgtttattaaactaaccctaagtgatttcttcaaggactgcaatcagcgtatcaatttgctttcccaaaggctcttccaacccgtgggttttggggtccaccgccaccaccagagaggcttttgaacaggtgcctggctgtgttcagaaggaagctggcctgtgtgcttctctccggtgggctcagccgacgtgtgagacttgttctgttaccaaatgaaccgggctgccacgctgtgacaggcgtttgtcctctgctttatttttactttgaagctcaaatgcgagtactaagtgttcacctcagcgttcgaatcattggcctgtaaccctgtgggctgcttcacgagaattcaggacctgcattttcattctaaaaagaaatgaacagcttgtgaaggagttttttggcttcatagtttctattcatgaggtagtgttacttctttatccccctaaagacaaaatgaagataaagggggattgccaggaatgggtttaaaagcacaaatgtggtagcttatcatctacaccatggagagtgaacccttacgaaatgaaagtcaaatgagaccatccgagaaaaagatgcgcataggcatttgtaccatgatcaaccccacgcacatgaaaactgtgaccaagtgacgtgcctgggagctttgacacacgagccgtgtgaattcactaggaaacatgtaataaagtcatggaagagaaaaaaaaaaaaa

SEQ ID NO: 57487 - DNA, 1547 bp, Homo sapiens
gtgggctattcagaagaaaaagtcagtgacagagagaccagaacccattggttcaagagacctgcagggattataactctttactctgtgagcagcggtgtttcgtgccctgtctctgcctgtgtgtttttactaagaattccagaaatcctgtaatttgtaaatgggaaacagaggaaccagattgttttatagctgataagaaacagtctgttttagaaacatctgtttggaaagtattactcatgtattcacaaagtcatatttataacactagtcttctttgactgtattcaacaaaaggcagtttcaccattaatttcatagtaaagcttttttaaaggattctagatctaaattgcctaaggaatgtttaacccacattcttgttttaaactctctaatttaataaatgtaattattttatagtcttttataggacttacattttcttcatactaaaggtaatgataatatagtcatttgccagtactttaaggtattcaggcatttgagacaagaaagctgtcttgtagaatagtccaattgctttcttaaacagtactggtttcatttagacagtttctaagccagcaaaggtgtcaattttaatgccaacttgacagtttaacagttagtgtttgtaagcagtttagcctgaattatcccatactgctgtagaggagaattgttagtaacatcaaaggtcagaatgcttcaggtgactaataagaatggaaagagactgagtaggttttttgtttcttttccctgtctttgagtaactttgaatgactaaaattagtatgaaactaggttttgggacccccttctcacctcacccggatgtaatgccaccaatttcaaataactaaaatgtgaccaattactttgcttcaagttctatacaaatatctctgaaatctgtaagccatatttcagctattctggtttttataatacattctaccctaaattaaccaaaggactttttattcagtgtattccatgtttcagcataaggaaagtttgtgcctgatatggcaggagaaagaacactatggtaatttcattgttacttcaggtctctttcaatctgaagaactgggttgtctggagaattgaacatagccaagcaatattatcaattagtaatgtcatcttaaaaatgttcacttttactaagttttattcagaggatctatgtattattagaaaaatgaagtatttctgacatggaacaaagaaagtggaaactggtacttaatgggggaagcaaaattagctgggactaaaacggacatgttttgttttgtgaattctacctaaatgtctctctatccacagagaaactagtattacttgaagatgtgaaagttcctgtggtagccataccttgaagcacagtgtttgtacataagtaaatatcttgattctaaattaaatccagatttaactaatatatattattttatatctttgttgtattaaaatgtttaaaaacactaaaaataaaacatttgaaagttggaaaaaaaaaaaaaaaa

SEQ ID NO: 57488 - DNA, 3415 bp, Homo sapiens
  misc_feature (1)...(3415): n = a,t,c or g
gtagcaggtaaagatggcagctaccatgttccgggctacgctgcggggatggagaaccggtgtccagcggggctgcgggctacggctgttgagccagacccagggccctccagattaccccaggtttgtggagtctgtggatgaatatcagtttgtggagcgcctgttaccggctaccaggatcccagatcccccaaagcatgaacattatcctacccctagtggctggcagcctcccagagaccccccacccaacctgccttactttgtacgacgctctcggatgcacaacatccccgtctacaaggacatcacgcatggcaaccggcagatgactgtgatccggaaagtggaaggggacatctgggccctgcagaaagacgtggaagattttctgagcccgctgctggggaagacacctgtcacccaggtcaatgaggtgacaggtaccctacggatcaagggctactttgaccaggagcttaaagcctggctcttggagaaaggcttctgaggcccagccgagcagcctgcttgtcagcatgccctgtggatcaagtctagggggcctcaggaggagggaggtgggtgttggagcccctgagacaggggatacagaaactagggctaaaggactttggggtcaggccttgcttgcataaaggagaaaacaactctatgtacatgctgggggagagtgcctaatgtgggagaccaaatagggatcaccaggctaatggggggcgtcacgagctttctctccctcctatcttggccnnnnnnnnnnnnnnnnnnnnnnnnnnnnnnnnnnnnnnnnnnnnnnnnnnnnnnnnnnnnnnnnnnnnnnnnnnnnnntcaacttccacctctgggatcaannnnnnnnnnnnnnnnnnnnnnnnnnnnnnnnnnnnnnnnnnnnnnnnnnnnnnnnnnnnnnnnnnnnnnnnnnnnnnnnnnnnnnnnnnnnnnnnnnnnnnnnnnnnnnnnnnnnnnnnnnnnnnnnnnnnnnnnnnnnnnnnnnnnnnnnnnnnnnnnnnnnnnnnnnnnnnnnnnnnnnnnnnnnnnnntggtccaccttggcctgttttgtttttctttccttgggctcagcaattcaaattctagttgttatttggtggaagcagtagcccaaccccagtttaggggaaggtagcacagggcagagccactgggcactttgtttccttggccctccgaagctcactgttgcaaatacccccaagcctttgctctaggccagatcttgtttggtgcaggtgatggagaacacagatgactcgggcatgggtcttggagatcttctgttcaaagtacagtgctggcactgggggcacagagtcagcggtttagccccgggctctgatagagaggtaggaggcacgttcttggtcactgttccattgcagaccagacttgctggcctgaccacaagggagtggctgggaactcacagccagcataggggacatccccctgcagccttctgacctgcaatcaaggctggggaggggtttgcaggcaggaatatgctgacctttcaccctgccatcccatcccaaccccagctcactagccttcatatatgccttatacttggagtcacaggggccaaaggcctgagaccccaccctgcccccaaactggctaagacagctttcagttcctgactccccaacttggtctctgccctgaagcagggcactgaactctgggctgcttctctgtgtgtaaaatgggcacatcttcctaatctgttaatggtcagtggtgtccccaaggatagtgctggcttccatggaaaccctcactcctggagattccattccattttcaagtgtaacagccacagcaaggagcccgacactgatttgatcgattctgtgacacaaaccccaccaattgttaatgcaagtttttatttggctgtatatacaatttaagctattaaaatttgtacaatatttacaaattaaataatcatctgaaactgtctccaacaactcttgtaacacaaaaccaaggggaaaagacaggggcaggcaggtcccagctcctgtggtccctccttggcacagagccttttctaaactggaaagaccaggagtctggcactcctgttcctctttcccgggattaagcattcaacttcaaaagacaaaatttaagccaaaagacactagtaaggaagtaattccaattctaaacttcagaagttctgccagttgagaagtggccttccttgggcgctgggattgcagtggtcaggagcaggcgcactggcccttgcctggagtgcggctgggcagtggctgctgggtgagacaggtcagtctcacttgagaagctgcaggggaaaggggcctggggggaggggcggggcagggtccctcagtgctgcccgcctgcacccccactcccaggcattcctttccctgagttgtgtggttgccagtaagacgcagaaatgccacagggcatagggggcacagccaccaccacaagaggcttctggggagatcagggtaagaaaaggaaatgggtaccagtcttaggggtgggccagcgagcaagttcatagcttgcctccagcccctctggagtccacacttgggaacgggagctaatactgttcggcactgcagtgtgactccgcacatacaagtagggcttggaggggcagccccttctccctggaaaggggtgggggaagaagagggcttctcagaggctaaaccttctgccttcatggccccagcagaacacagggctgaagagttggagaggaaggctggaactgacccgagatccccatggctgcctgggactggagtcaaatgggaaccccagcctctttccacttggcctaggggatgccgcctctttctcagagctgggggtactactccctggtgcagacagagagggagctggcacttggtggcaggacatgttcccagcgagggctgctcaaaagagcagaggctggggctgggctggggcagtgtcagtgggcaacaggagactccagcttcctgcaggcggcgcccggcggaactctgctgcatcgggctctccatcctcaggcatctcctctgtgcccactgactcaggagctggaggcctttccatttcaggggctggtggggaggctcctggggttggggtcgtggcctctgagctagggatgctggtggaggaggcagcagcaacaactgtagtggcagtctcctcagtggagttgactgaaagtggcaggccgggggggccccaaggaggccagcacggtgaggtactggttgatctgcagcatggcggcgtccagcagtgtgtggatgttacgcaggtctgcagccgggcctccaggtcggccgctcatggccctccagagctc

SEQ ID NO: 57489 - DNA, 923 bp, Homo sapiens
gtgaagtgaacttagaggttgtggggccgaggggtcgtcttatagctaccagcccacaggcatttagtctacgttggaggtaaacaaatacgggtcctgcttaggagaaaagaaaaacgtcttacagccagtgtctaaactccaaacaacggaatgtatcaatgagaccttgtatatggatacacgtgcatttaaaaccgccctgccggcttgtagagcttttgccgttctccagcgctttacaggggttatcgcacttaagcctcggaacaactttaccagatgaggacacctgaggttcagattaagaaatctgccccaaagtcttagaactgtgattctaccagaaaggaatgaagaacagaaccttcaggaattgagtcacaatgcagacaaatatcaaatgggagattgttgcaaggaagagattgatgatagtattttctactagccattgggaagataaaaggagacagaagattgaagcctttgccagccattctttccctttttgcttccaaactcctcaactgggaaccttcatatgtgcagtatttatattggatcatactggtgattataaaagttcctaggaggctagaagagccaaccaacagagaagggaaagcagtctgttctgaacataggggacataagttcattcatgccaagtatctttccagcatgtttctcccatttagaatatctagcatgtaaggcctttcaatattaatataagcccaatatcagctctttctctttgtatttcatctctttctactctcctatttgtattttgtgttcctatcaaagtgtcgtatctgggagatgacctgccttatcctgttctataacagttttgtttgctgctgtgtctttagaaacaggcctggcacacagtaagcactcaataaatctttgat

SEQ ID NO: 57490 - DNA, 1779 bp, Homo sapiens
taagccactgaaagaacatgtggatgccctgcgcatgactctgggcctgcagaggctccctgacttgtgtgaagaagaggagaagctttccttggattactttgagaagcagaaagcagaatggcagacagaacctcaggagccccccatccctgagtccctggccgctgcagccgctgccgcccaacagctccaagtggctaggaagcaggatactcggcagacggccaccttcaggcagcagcccccacctatgaaggcctgcttgtcatgtcaccagcaaattcaccggaatgcacctatatgccctctttgcaaggccaagagtcggtcccggaaccccaaaaagccgaaacggaagcaggatgaataaagaaagggagagcacatgaagctttgctaattataacccctaccttgaccagagtcattgatgtcctgatgtgaaacaacccttgcccaaccccacgaagtctcctatttaatgtgatggaagcacaacccctctctcactttgctcctatttctttctgctcttgggatttctggtttaggaagagatgtggttcaggtgctaaacagtgtgtctgatgatcccttctctcccactcacatttcaacccctgcccttgtttggagctaagggaagggcaaaaggctcagatatgattctctatctcttgtgcctgaggcctggagcctaaggagctgtagggtctgaggggcaggggaggcccatatcttgtttcaggtaaaggacccagtatttcccctccttgtacttttgccttaggttctcaagggacaatagtcttcatgttggattctccaacaggctgggtgcatgtatccccctactcctaccctcatctcatccttaaggcccagaggtaggcttggacaagccctccttttcataatcatttgggaggcatggctgtaattctttagctttctccacttctgtctcccacatatactaaaattcttaggtactaggctgtgtgtcttgggatcttaagatcaatgaacctttccccaatatctagtctttgcaaattctagtagaagatttccacagtgaaatcagtgagccagaccaactctacatctcctggcctaacctactgcctaagtcattagggctgagggctcggctgtaggggcttccttaggctgagagtgcccccaggctgacatctgtgttggcttttgttcagaaccattactctggcacatgctcaatggtatattgcagggaggagaggagtagatttagatttgagtaaatgccaatcactttacacatgaaggtgggtgggactttccttccattcatcccttgctctcttggatctgaactcttctggagcctcagctcaggatagctgctggccactcctgtcctgtggattgtgcaggtggcctttcctcccaaaagaaaaggcatcaggctccccaagccccacagctctcctttccaccaaagccaggtttcctggtaaggtcactcgaagataagggatggggatgggggctgactgacaaaaaattttagccccaggtctcagtacctggctggggagggggatatttttccttccttaagtagttttacattgccacagtgtgtatgtgttcactatataaaatgttcctctgctctttgaaagtaagagtgttgtgtctgtacaaatccttttaacatgcattcattggagtaaattctgagtatctactgtgtattggataatacaaaagatgtaatgtcaaaaaaaa

SEQ ID NO: 57491 - DNA, 2872 bp, Homo sapiens
  misc_feature (1)...(2872): n = a,t,c or g
actatattgtgcctattctttggcttaatgagactgggaccattggtgatgagaaggcaaacatgttcagaagtcaagtaactggaaaaataaacctccttggcctgatagaaatgatcttactcagtgttggtgtggtgatgtttgttgcttttatgatttcatattgtgcatgcagatcgaaaacaataaaataagtagtaaatgattcttcacatttgtgcgccagctacatcatgacccttggtaataccgaccaacaggatgaaaattggatatgctttacttttacaaagcacaccttatcttttagttgaagaaatggtggcactatttctttttttgcactaagcaactgcacatttcaaaaggattattgagatgttatgaaaatctctaccttgcacaaaaaaaaacccagcagcttttaaaattcatcatttccacaactgaattgatttccgtttctacagacctggctcaagcacaaaccaatttgtgttgttctgattcaataattggtttctgggtggccaattcagaagaagagtgtacatgctcaacaaatcctaggccctgcattcctgtcatcctcatccgggggaaacaccatcatcccagtagctgccctattcaactgcaacagtctccaggaccatcagtatactgcatttcatgtgcaccaaatattttgaaagacatttataaataattggcttatgactcatatttctctatgaataccttcatacagcaggtataactcttttctttatgggcttaaatattttgtcactgatcctgcaaatggacatcattttagcacactagcggtttatattttaaggaccttcattctctgttctgcacctcttctggaaattgagtaaattttgcttttttttttttactcagttgcaacttacgcttggcatcttcagaatgcttttctagcattaagagatgtaaatgataaaggaattattgtatgaaatattacaaagcgtagactatgcattgttattcattataatattttttgctatcataatcgcctcataaagacaggtttcaaccattaaaatatgttcttccttaaattcctgtgctttttctagttcctgttgtgtcataaaatgtttatcctaattttctctctgaagtatattttatctgaatccacatttctttataaatccatagtccttgctgaaatatgctttctaaatttctaccactttgttctaggctaattttttaagctaattggatgaagaacaaaaagacatttggtttcatcctttacagcagtaggacaattgcaaaggtttttcctttttcataaggagacacattaataggtaactctgtttcttgagcaggggttcacttattctgagagcattagttctcctaaaaagctccagcatagaaagggaagataaaccaaattctagcttgtgttttacccacagaaggatacaggacaaaggaatagtaactggcctgtttggatactaaaattgaaaataacttttagcctcctccttatgatagccgccagagtaaatgttgagcattactacagaaaagccacaaaccaagaatctacctgtttggaaagatcttttgcatctctgaaggtgcttaaagcatacttagtgcctttccttttaactgggaagataaaagaagtatctgtccaagatattaatatgtaagataacattgtagacatgttcttctgataatacaaggtttattctatttgcattaggatatttgtggacatgtccatctaatataaaggaaagttttttaatcattgaggcatgtagggctgagttatataatgtagaaacttctaaagataattggatgagaatatacatattgacctgtatattatgactaatcatgactcagatcttaatacagggatgatctcatagcatttagatatcagaaaaggttttgacctatatgtctttaatattgtttgaatacatgtataatctttatcattcctcagtgtttcatttctcaaattctgtaaaaggaatataagaggaaagacaattcacatacaaagacaacgagattaaaaatatgcagtaggaaaaataattacttaaggggagattttttttacatgaaatctgggctttggatgtgtgtgtgtgtgtgtgtgtgtgtgtgtgcacatatgcactgtggtgggagtggggcancttggggaatatgttacatgtgtgactttgttttgccctggcaaagttaatgttgttcagaaagggtaaatgtttggacacttgcaattgctcatggatgaatttatatgttttagtcatagaaaaattgtaccctttgatagaagcacattttctttccaaagttggttattaaccacagaattatagcaggtattcataacttaagtttgaaaatcaatagcgtctgcaaatggattaacagattagagaatcaacagcatcggaaaataggttaatgcatattgcttctaacaagtgcatgaagaaatagaagaagctatgtagctttcagttctgacagaaaagggtgaaggagggtatcatttcaagaaaaaaaatagctatcacgcaatggttatctctgaaaatatttgtattaagatgtgtatacatggccagggcatggtggctcatgcctgttaatcccagcactttgggaggcaggtggatcacgaggtcaggagatcaagaccatcctgggccaacatggtgaaaccttcatcttcttacttaaaaatacaaaaatgaggcggggtgtgggtggcccatgcctgttagtcccagctgctcgggngactgaatttctttgaggcccggtt

SEQ ID NO: 57492 - DNA, 1562 bp, Homo sapiens
taaagtcttaccaagatttaatgtacatttattcttaacacgtggaacatatagtataaagatttcatactgaataaatgatattcattaagccaaaaaaggaaaaaaaggaggaatttacatcaagttttagctacattgttgaaatacaaatatgcagattttatcactgaaaaaatctcaattgtgtttcttcatcagaacttcaactgaacctagaactttttcacacctcgattagaaagaaaacaaaacaaaacaaaaacccagaaaaaaataaactataagttgattggctgctgagacagcaaggactttttacagagacctgtacagcatcgcaccaagaggggcgatatctggcaagagattaaatagctgtgtctcgctttgtgcaggtcaccaacttgttaactcgtcatactataaaggggtagctgggaggaggaccaaactgtggggatccaagggtatgtgcaatgtacaacgtcatatatatacacacgtggcagcgtagacgctgcagctaaaggttaaaaccagttctaagaggtgatctcagggttattcatacaatcaaggaggagagaaagaggtcagggtgttgtaggttcacacatgatactttgggggaaaagccttttttttttttctcctcaacgtttaactaaaaacatttttaaaaactacagcttgctgctgacccagcgttttctgtttccatgtgagacattattattacagtatgtttacagtatcaggtgtacagtacagtacatgaaagggtctacactctactgcacaggcctctccagtgaacagggtctgttcacaactgcgaacttcttggctcctgcaagattgtgaatgtacaacaataaaccacacacagttcagcagtcaccttttttgtccttcagaatttttttttgtattttttttttttttttttaccattaaaaacagttatgaaatgtggcatcccgttgatgcaaggactgggaaagccatttttattttattttttttccccaaactcactgtaaacaacagtaactttggttaaaataaaaaaagtcttctatgtaggcagagctttgtcttttcaaagagggtggggtagggtcctgaggggagtaaggtgaggacaaggaacagaaaggcgtgaggtgatggatggtcgggaggtggaaggaggagagagaaacaggagagactttttcccaagggagaagctggacagcacagggtaaactggattctgaggtggttttgcataaataaagggcaacagtcagtttctaagttctccacacacgcacacacacacgggggggggaggtgtcccacggctgtcatgactggccaatcaaaaacagtacatcacaaatgacttgtgaaaccaatgagttcatcaacggtgataccgagatgtccaacagccgtgattcgtacagagtaaactctgagtggttctcgtccaccttggccaaggcaagcagcgcgcgggcagcccgccgcaatcatgtccacactagttggctcaaagggtgggttctgcc

SEQ ID NO: 57493 - DNA, 442 bp, Homo sapiens
  misc_feature (1)...(442): n = a,t,c or g
agcccgggagccgctttgcttaccgtcctgccggtcccagccgtcgctaggaggtccgcgggccctgcggcaaccctcgctacagacgctgggcgggcggcgacacctggctcatggcccccgcggcggctccgtcctccttggccgtcagggcctcaagccccgccgcgacacccacctcgtacggcgtcttctgcaaggggctctcccgcaccctgctcgccttcttcgagctggcctggcagctgcgcatgaacttcccgtacttctacgtcgcgggctcggtgatcctcaacatccgattgcaggtacatatttagagccatgactaagctaacggcctccggggccagcatgactcgtgccgaattcttggcctcgagggccaaattccctatagtgagtcgtattaaattcgtaatcatgtcataaangtntcaaa

SEQ ID NO: 57494 - DNA, 201 bp, Homo sapiens
gcccttcaaccccataatggcctaactactggtcaacatgatctcctggacctaaaggctggtaatactgtggattctatcatataagggcttttggttttgctctgtttttggtttacaaacacttgtctgtttgatagtcctttttatactgtatctatgtatgtgtatagctattttctgtggatttttttttttttt

SEQ ID NO: 57495 - DNA, 672 bp, Homo sapiens
gccaataggtacaatacggaatgaagaagaggggaaaatggggagaaagatggttaaaatacataataatccacgtttaaaaggagcgcacttgtggctgatctatgccagatcaccatcttcaaattggcacaactgaaatttccccactctgttggggcttccccaccacattcatgtccctctcccgtgtaggtttcacattatgtccaggtgcacataggtggtattgaatgctcagcagggtaggggctgaccactgtccctgattcccatcgttctcaggcggattttatatttttttaaagtctattttaatgattggatatgagcactgggaaggggacgctaactccccttgataaagtctcggttccatggaggacttgagtggcccaaaggctgccacggtgccctcaccccagcccatgtgctcccataagggctggttcctaaaggcaggggttgtggggcactcccagccacggcactgttaccttggtggtgggacttggaacccaaccctgagctcccgataaagctaaagtccatcatctggcaaattcagtaaattggagagtacttgcttctgtttgtatctgagaggaatttttaactgacggcttctgtctccatgaatcattatcagcatgatgaaaggtgtgtctaaaa

SEQ ID NO: 57496 - DNA, 565 bp, Homo sapiens
ggctccatggaagataaaggcagagatttacaagccaaggaatgtcaaagacggccagcacaccaccagaagctagcagagaggtatggaacagattcttcttcacaacctcagagggaaaaccctgctgatacctggatttcaaactcctggcctccagaacgaagtccctggagagaggacgtgatgtctgaagctatggcagccatcttgtaactatgaggccacaaacaagaaaagcaaaaaccagagtgaagcatggcagagcagaaagatggaaagaacctggatacataagagtgtcactgtgcagctgtacccaccctagactgcatatacctggactttaagtaaatgacaaatatcctttattctatctcaagccattgcttcttcatcttttttgtgtcatgacaatcacagtgggcggtaatatttgtactgccctctggggaacacagaggagactgctggcacctgaggtgaactatgctgggggcttcagctgccccaggactcctccctaccttgaagcctgaggggatacatatctctctggcacatc

SEQ ID NO: 57497 - DNA, 1001 bp, Homo sapiens
ccagggcggggtcttccctgctcgattttggacgaggcctaagtagaccccctatggccctgccccagccctggctctttcctaaccccctcaacggtgggaggaactggcagagggtgcgcctgggccacagcctccccgcatctaaaggccccttcagttcttgaccaaaggtgctacgagaacctgccgtggaaacttccagttgtgcgtctgccccactcgctgtgtttgtccgtgggttcatacatgcattgggtgctaggccccagggttgccgggtggcaccctttacagttcctttgaacaggggcattgaaggcctggactgcctctcgcctcagtaggcctggggaccaggcttgggtctggaggtttgctgtggaagtcaccaggcctcccctcctggcccaggtgtgctgggggcaccgtgccccccacccccctgccctcctcagggtggtcagcccaacctgtcggaccttcacttcacatcatggtggggaccgagatagagagggagaccccattccaagctccctcttcctcccggtgtttggggaggatgctgaagaatccattcccgagggcctcccggcttgtcccagcccctcttttgcttctgaccacggaggctttctcacagcccagcctgcctgaagcaaaggaggctcccgtgtcctgggcagcttctgtttccctctgctgcctgggagctgaggcacccgtgccagtggcagaggccacagccccagccttaggccaggccctgggagggcaggcaggcaaaggggagaccagagggtctgtgttctccaggagaatgagggtgttggtcccagaattgggaccggggccccgctggccagccctgggccacttcccgggtcttcattgtgcgtgggtggcgtgttccaggcgtggctggagctggcttcctggctgtgctgccatgggcccctcccttaaaagcacgttggcaggaggccgatcataaccct

SEQ ID NO: 57498 - DNA, 1525 bp, Homo sapiens
ctgttctaatagtccacctaaagtaaagaaagctccgagggtaggaccttccaatcagccatctacatcagctcgtgcccgtcttattgatcctggctttggaatatataagatacccagaaagcggtactctagaaatgaatgtcaaggatcttagaccacgagctagaaccattttgaaatggaatgaactaaatgttggtgatgtggtaatggttaattataatgtagaaagtcctggacaaagaggattctggtttgatgcagaaattaccacattgaagacaatctcaaggaccaaaaaagaacttcgtgtgaaaattttcctggggggttctgaaggaacattaaatgactgcaagataatatctgtagatgaaatcttcaagattgagagacctggagcccatcccctttcatttgcagatggaaagtttttaaggcgaaatgaccctgaatgtgacctgtgtggtggagacccagaaaagaaatgtcattcttgctcctgtcgtgtatgtggtgggaaacatgaacccaacatgcagcttctgtgtgatgaatgtaatgtggcttatcatatttactgtctgaatccacctttggataaagtcccagaagaggaatactggtattgtccttcttgtaaaactgattccagtgaagttgtaaaggctggtgaaagactcaagatgagtaaaaagaaagcaaagatgccgtcagctagtactgaaagccgaagagactggggcaggggaatggcttgtgttggtcgtacgagagaatgtactattgtcccttctaatcattatggacccattcctggtattcctgttggatcaacttggagatttagagttcaggtgagcgaagcaggtgttcacagaccccatgttggtggaattcatggtcgaagtaatgatggggcttattctcttgtactggctggtggatttgcggatgaagtcgaccgaggtgatgagttcacatacactggaagcggtggtaaaaatcttgctggtaacaaaagaattggtgcaccttcagctgatcaaacattaacaaacatgaacagggcattggccctaaactgtgatgctccattggatgataaaattggagcagagtctcggaattggagagctggtaagccagtcagagtgatacgcagttttaaagggaggaagatcagcaaatatgctcctgaagaaggcaacagatatgatggcatttataaggtggtgaaatactggccagagatttcatcaagccatggattcttggtttggcgctatcttttaagaagagatgatgttgaacctgctccttggacctctgaaggaatagaacggtcaaggagattatgtctacgtttacagtatccagcaggttacccttcagataaagaagggaagaagcctaaaggacagtcaaagaagcagcccagtggaaccacaaaaaggccaatttcagatgatgactgtccaagtgcctccaaagtgtcaaagcatcagattcagcagaagca

SEQ ID NO: 57499 - DNA, 1474 bp, Homo sapiens
  misc_feature (1)...(1474): n = a,t,c or g
ttccgttgagaaaagttttatatggaaacacatactgatcatgaacacaataaacagggagggaagctcgggctcagccaggaaacctgccacaaggaagatgtttggaactatccaggagtagtgtcaaacactaacaccatatttacaagtctaatttggaacctggccctttttaagtgcaggaggaagttggaggagaagccatgcatgaagtaaaaaatacatatacacagacataaacacccacattttcacacttcttttgcccatttgttccacaaggaacaaatgagagagagaagcccagcctctctccctggagtccgtatacttactacagatttgttagagaagccccagatggggtttggggattcaaggagcagacttcactcttactggccccactcacgtgacaattcaccaagggaatgcttgggacacaagcatgaatgtccggaagaggcaagaaaatatatggctcacttaacttacacattacacataagaggcctcagtttctccaagtactttcacatttgatctttagcagacttctaacctgcagagacagagctcagccaagctgtgagacacagaggaaagcagcattttgatccagtgtgcactgggtcagtcacttcatccgagacagtcacacatgccagccccaggtaagtccctgggggcttgcagctgttttctttgtggagtggaaatttgggttttttccttcagtggatttctccctgctgctgtcactgagctccacgctgctcgctctggacccgagacagctgctcggcnnnnnnnnnnnnnnnnnnnnnnnnnnnnnnnactgttctgctgctgctggcttgtccccggctgctggctcgtcctcggccactggcttctcaacctgtgactctggaggaatcagatactggacctcctctgtgctgacggctactttatctggctggagccacctcttgaaatgttccaaggtgctctcatcagaatcaagtccatccacaaagaactctgaagctaacttctcctggaggaaccgatcccagcattccttcttggcttgggccagagttcgaagcatgtccttggaagtcacttcctgatttaaacctttgattcttcttagcttcttctctagagatgctaaatacacttctgaatcctgcaagggagcccaaggctttacagctggctggacagcaaagtcagccacctccctctggccttcaccttcagggcaagaatccacaaaggagtctgagaatgcattgttggcaccatcttcttgttcaggatttggcagacaggaacaaatttcagcccagagatcctggccagatcttgtggctgtagagtcagcgctctcaaacattttcatttggaatctgagcgtaacagctgcccagtaaacgcttggctcagctctgtcgcctgtagcccggagcggacgcgtggg

SEQ ID NO: 57500 - DNA, 604 bp, Homo sapiens
caacagctatgacatgattacgaatttaatacgactcactatagggaatttggccctcgaggccaagaattcggcacgaggaagaagtaagagattcagtgacctgacctattttaaaagtactttgcgtacctgtagattttgagcattcatagcctgaagcagttttattgatataagatatttaactgtaataagattttacttttatttttttcttggtagaaaatcagacaagagcaaaagaatctgatttttcagatactctgagtccaagcaaggaaaaaagcagtgacgacactacagacgcccaaatggatgagcaagacctaaatgagcctcttgccaaagtgtcccttttaaaagatgacttgcagggtgcacagtcagaaattgaggcaaagcaagaaatacagcatcttcgaaaggaattgatcgaagcccaggagctagctagaacaagtaaacaaaaatgctttgaacttcaagctcttttggaagaagaaagaaaagcctatcgaaatcaagttgaggaatccactaaacaaatacaggttcttcaagcccaattgcagaggttacacatcgatactgagaatctccg

SEQ ID NO: 57501 - DNA, 2167 bp, Homo sapiens
taaatatgtctacaaggttttattaaaattcagtttaaaattaataacacactaatataaaggtaaaatttagcttatctggtataaaaatcatacaagaaacattattaaatataaaatggtgtttagctttctttggtctaaaaactaataaaaattggtgctaaaggaaacattcattttactagaggatcataaaagttaaagacttaaaacaaactttggcaattaagacagcacgccaagatgcaagtgcctggctgaaatggatcaaatattccatctgcactttaaacaaatgcaattgttatgcttgtgcacatggcaggccagagcgcatgattgtcccccttccactaaggtggtcctccagtcgaccaggcgtgggctgcatggtagctcttttccaggattctacagcctggagtaataagtcatgccaagctctctctgctatatcctgaagtccctgagggtcagcccccgaaggccatccagcttctgtctcccaacgctaagttcacttcttgtctctcgtggcagggaggagacttagcattccttggagacctgaagggatgcagtgagcttaagaattttcaagagcttatcaatcagtcagcccttgttcatccccgagcagatgtgtggtggtattgtggtggacctttactgggcactctgccgaataactggagtggcacttatactttagtccaattggctatccctttcaccctggcatttcatcaaccagaaggaaaaaaaataagacattgtaaagcgagagaagccccttatgggtctttcaactctcacatctatttagatgcaatcgaagccccgcaaggaataccagatcaatttaaagcttgaaatcaaatagttacaggatttaagtcaatattttggtagatgacagtcaataaaaatgtagattagataaactacatctattacaaccaacagcaatgagcttttcatgagttaaaagaaaaactcatgtcggccccagccctgaggctacctgacctgacaaaactctttacactctatgtgtcagaaagagaaaaaatggcagttggagttttaacccagactgtggggccctgaccaaggccagtggccttagctctcaaaacaactagacggggtttccaaaggctggcccccatgtccaagggtcctggcagcaactgccctgttagcacaagaagcaaataagctaactcttagacaaaacctaaacataaagtccccctatgctgtggtgattttaataaataccaaaggacaccattagctaatgaatgctagactagctagataccaaagcttgctatgtgaaaatccccacataaccactgaagtttgcaacaccctaaaccccaccaccttgctcctggtatcagagagcctagttgaacatactgtgtagaggtgttggactcagtttattctagcaggcccaacctccgagactatccttaaacatcagtagactgtgaggggtacgtggacgggagtagcttcgccaacccctgcaaagtgactctgaagaagacgacaagctctgctccagtcacacccggaagctgactggtccacgcacggccgaagcatgagaaaactcattgcggaactcattttccttaaaatttggacttataccatagggacttcaactgaccttcctcagactggggactgttcccagtgtattcatcaggtcactgaggtaggacagcaaattaaaacagtcctattattttatggttattataagtgtaccaggactctaaaagaaacttgtttgtataatgctattctatccaaggtatgtagcccaggaaataaccaacttgatgcgtgttatgacccattttaagcctcccatgatcacagtttttaaaatacaattaaggactggtccttttctaggtgacacaagaaaggtaatagctagaacagaagaaagaggggtccccaaaaatgtaaccttaaaatttgacacttgtgccactattgatagtaagcagcatggatgaggatgtggttctctaaattggaaaaaaaagttacacagtaaaaaaaaataagtatatctgtcaaaaatcatatttatgcgagatgtgtcaatactggtcttgtgtcatttgagctactt

SEQ ID NO: 57502 - DNA, 2048 bp, Homo sapiens
  misc_feature (1)...(2048): n = a,t,c or g
ggtcgacttttttttttttttaccaaaatactttctacagaattccaaaccaaaatgtactgtttaaggcatcttttttataacattttctcttcactcaaagatgatagtcatgcagcagtttaatgataaaaatatattaatattttactatacagcagcaagaagttagttgtcaattaaaagcacacaaacatctttaaaggaaaacctgtaaaagactatcgttacaaacaatttcagtttggaggacaccagcttggtaaagtgctctcctaaactttgcattttcataccctacaccttgaatatatgagttatagaacatacttttgatagaaggcttgtacacttggggaacacaaatacacttagcatataatgtagccagtaataactagcaccacagctacatggaaatcctttacatacaccaacttggctttcacttttaaaacaaaactcagaatccatggctcagtaggataactataattgtgttgctctgctttttaacaggtctacataagttaatagcactagcaaaaatccaagaatagcttcagacctcttacaagtttaggagatagtgctagtgaccacaaatagactcactacctgatgtccaagtacaggttcactggaaattgctgcacgttagttttttaaaatctttctacacataataaaaaaaatatattatgaacgatacaagtacatctcatatacacaataatgacaaaacgcctactcagtcaaagcaaacagatgcagaaaaatattatgggagatctcctttttctttctttttccttttactatttgaataactttggttccaaccataaaaatcacaacttagcaaatttcatttaaatgccttttttaataatttcttcatgttcacagaagtttcactgaccatttttataagtttaaggtccagatgcaatgcatattgtataaaagagagcacttattgtttaccttgcatgaattaaacctacgtacctttaactctacaaacttctgcataacatttagacaaagctcagacacacagcatgcctagccctcatatatatacacatctctaatcacaggtatatagggtgtcaaatatactataataacctccatgtaaggtttgaaatttggtaacaaaatgagaaaaactaaaaatattattttacgtgttctaaaatatctcttttttgtgctaaagtcaaatgttagctcaacatgaaaaggacttttatataattcagcaatattataatcttgaccattttgcaaacactttttaataataatagcttaaacgtgtacaaaagttcttggttaattagggaaataaacactcagttctttatattttttaatcaagtaggaaacacagttcatataatgttattactttttgtattttttttgtttttagcagctgcttactgttttatatggtggataaagtggacaacatccagcgatgggtggcaagtcaagaagagaaactgtcagttggtggaggttctgtgggtggtgctcccttggagttaacaggtttttttttttttttaactttttaactttttattttctctctttctttacagtatannnnnnnnnnnnnnnnnnnnnnnnnnnnnnnnnnnnnnnnnnnnnnnnnnnggggtttcattcagtttgatcaatcttcttctaaatgtggccattttggcattgaatcattccctcctcccttccttctctgccttcaatccagtggacaagtacaggcacgtgtaatgcttagagatggtcaaacaaattcctatgcaaaagtctttacagaagacaagttttcctacgaatttcaacacaaagtgtacaaaatatgctaattttactcctttgtcatacactggcaacctctttaacatctagagactagatgttgaaaaattaggactatttgtccattatatatactatatacagagcaaaacaaaatgcacaaaacatatagaaaaatggtgtctgaaaatgtcgtcgacgcggccgcgaat

SEQ ID NO: 57503 - DNA, 1427 bp, Homo sapiens
  misc_feature (1)...(1427): n = a,t,c or g
ctttgatttcctttttttaaatcgtgtggcatttgattcctgagcaaattccctcaaagtgaactcttgttcttaaattttgaattttatggtgagattgtaaagatagaggcaattgaaacattgttccttatttatgaactgcttgaagtgaatacttaatttaagtttgcactttaataccaaacttaaaaccaaacactcatttaaaagtaggttaagtgatcatggatcattgttattagctttgtggctttgtgaaattctaaaggaatcaaataattcatcatgatttaaattttctagagattttgatttttttataatgtttctttcctgtagatcagtgttctctctctctctctctctctctctctctccctctcccccccgttccccactctttctttctcctttgctttttcttctctttcatacatatatgcgtgcctagatctaggaggaaacgggttaaaaattgttttaaactacatcttgaaaatattgaagaatttgttttaggtagagtggtcagttgaaccttacagtaaagtatagaaatatatttaatgtggaatgtcaatgccaggatttctcattancaatattttatctcaactttggttcctgtgatacatttctgaatgggcaattccagaaatcttagtagcccatgttaagcttctattttttacttgttttcggggagaaataagaattagacatcttcagatttaagttaaataatcccattctttataatcctctgtaaaaagatccctgagattattccttcttctagttttatgcgacagcttttactttaaaattcaagttatacatcttgggagtacaatggcccgacatttcttcataggtagaaacaaatacttgactcagtgatactcatgaccattagaatagtcatacctggaatgtgtcaaattataagagacagacacttggttagtggctgcctcatatagcacttttgaagaggcctaagtcaaaacttgcaatataacattctattgactttcttaaaaatattttttctgtacctaacttgagcataagggttatttgagcaagtaacattaactcagtggaaggcattgtcctgtgaaatattcttaggcagatctgcccacatctttattgaacttgaaatctaatatttctagtatttgaacaaagcagaaggttaagtcagggaagagcagtgctgtccatgatgtaatggaagctaccaggggaggcagtgtctggatgatgctgtgctacctacccctgcacgaagccatgctggctcagtctgagctgtgggccacatcagctagtggctcttctcatgcatcagttaggtgggtctgggtgagagttatagtgagggaatggtcactaaagtatcctgacaagttcctagg

SEQ ID NO: 57504 - DNA, 2292 bp, Homo sapiens
tttttttttttttttttttacacagaatatatttaattccatcatataagctaggaacaatgttaaccaacagaaaatgtgatcacgagctacatacaatagatcaaatgaagcacacatccatgaaaaaatcatgccaattttaaatatactctggcatttccattaatattagtatgctattctttgatttttttgctgataagcagtcaaaacatttaaactcaaaattgacaaatcaactagcttgctttttgtcgtttggaagactaccattattcaaatttattatgtaatacactcatccagataatgaaacatctgcgaaaagaagtgtgggaatcacctcatctgtgcataaaatggctattatacatgaatgcagacgtttgaagttagaaaggaatataactcaaatagcaaaaggtcctaattacagagtttacaaataagcagttttattttcaaaagtacatagtaagtccagactgggctattgccaaagaactaatctttagtctacttcaacatgttacatggtattcctgactctacagactatcagcatctgtggaggttagctcctaaaggtcccaaagaacaggaaacatgcaggaataaaggactcctcatgaagagcaggtgggagcgagtgggcaggcctgtatcttctcagcaaagtaaggattgagtatagagagctgtttgtcttaactgggcttccctgaagaatctgagccaaactggaagaaaccagcctcatttccagtgttgagatgttagctgtacagtggctgtacaactgcagagtttatttatagaattagaaataattttttaaaattttaaaaggttttgtgtaatcattaaccagagatgatattcacaaattctggtaaaaatttgactctccaactatcaccatatcaacaggaaacagggcccatgcccaccagggaggactgtctcagctgcccatttagggagttgacccctttggctctctcgagaccagttcctgaaaggagggcctgttttgtacagatgtggccatggagctcatggggcccttgtatcacttataaaaatacatatctttggcaggcgaaacgttcattctgatttcactaattttcatgtatccatttcaaaggcctataacatacatagtaatttagttttctaggtgcataatttgaatctagggtgcttacagctaggagacaagatgaatagagctaattgtcaggcactcctattttaacatggctatttttttctgttagttcacatattaccagcaattagtatattttttgaagcttttgtgaaactatgccctgtgatgctcttccaactcagggataacaatacatatggctgtgtctgagatatacatttttctgaaatgtcaaaggtctacttctcaacattctaatggattcacacattacttattattattactgattcttaacgaccttggtacttcctgcagcagtcttctaagtgactggtctgggagtcccagtttttatgttctccattttgagtttaccctgcccatgttctcactgaacctctggtaataacggcttttagaaatcttgactgaaaaacaaacagggccatggtgctttcaggtgttggaactctttgagcaccaggaactgtgctaagtgtcttacatgtgttattcagagatcagagtgaggtaggtactatcatcgccactttaagggatgaagacagaggcttaaagcagtgaagtcacacagccagggactggccaacaaagatctgaacccaggtagataggactccagaactacaatcacccttgaaagaattacaaagcccaactctccactgctctctacttgtaacacaagccataaatctctaccctcaggggcctaaagccaacaaattaccacaaacttagtggctttaaactaagtttctgtaggtgagaagtgtggcatagcacagcaaatttatatgctcagggtctcaccaggctaaaatcaaggcatcaggtaaggccaagcttctcatctgtgcctcaaggtgctttcttccaagctcactggaaggattcacttccttctcttgatttccacatggcccctctatcttcaagtcagcaatagcaccttgggccttcctttgaatctgactcctgcatcctcttccatttttaagggttcatgtaattacactgggttcccccaggtaatccaggataatatctctattttagaaattttagttacatctgcaaagtccctt

SEQ ID NO: 57505 - DNA, 1045 bp, Homo sapiens
  misc_feature (1)...(1045): n = a,t,c or g
tcggangggatgggactggggagtcagctgctcatctgcaggctaatggcaggaaatggtcatatttggggtttttccctaatttttttaaacaaaaattacattacaagatccaggttcttcccccccacactcaatcaagccagccctctcctcttctgtcacgtaaaggatatttggcacactcatgcgtcattcattcacaaaacacaaacccaggactttctgcctaaggcagagcacaagactcacagcagcaccgaagcgcatctgccgtccgggccctgccaggcttgccaggctgccagtggtaactgtggacctactgcgtgccacgtgttttcatagactcatcccatggctgggcaacagccctgcaaagggctttgggctctgccacaagggaggaagaaggaaagttgtagcgcctagcgagagttccagccccagacgcccacctgtgcctcaggggaaccgcctgccgagcagagaaggcacagcagccgtcagagtccatgagaggtgaaaccacacagcagggatgtccaatatcagaactattaatatcaataaaagtataaccttcccaggtctatgcccaagagaattgaaaacatccatccacacaatacctgtgctcccgcgttcatagcagcattactcaaaagtcaaacggtagcaacaacccaaatgtccatccacagatgaattaagacatgaagtgtgttctgtccatacnaatggaatattatttgcccataaaaaggaaggaaatttctgacgcatgccacagcctgagtgaatcctacaaatattacgctaagtgaaagaagccaatcacgagnnnnnnnnnnnnnnnnnnnnnnnnnnnnnntgtgtatcagagacaaagcacattggtggttgccaggtactggaggaagagagaagaggcatgacagctaacagggacgggctttctttggaagatgatgaaattgtggaatgatggnnnnnnnnnnnnnnnnnnnnnnnnnnnnnnnnnnnnnaaaaactttggaagatg

SEQ ID NO: 57506 - DNA, 3358 bp, Homo sapiens
ttttttttttctttctttgtgaatcattattttattaatgatgtttaaaatttaggagcaaaaaaggcatttccaacaattcaattacagatgccattttattcagctttttctgtcaaactgaattgttcattccaaatccttgcttttagagaagagctgagtgtgtaggaaaaaaagagggaccacttgaagtctgttgcaagagaaatagagatcaaagttcacaacatacaaaggaatttatttatgcaatacaggccttttctcaaatatttttcacagaattccacacagtaatctactagaaaagtagaattatacaccaccaaataacattgtttcgtttcttagtacaaattgctaatcaaaaggaaggtggagatgatagtttaataacaaatagtaaaacaggtgttgctgaatacagcacccggtagcctctatttgcaaacccggggagggaagggggtgccccaacaacagtggctccgcctcattgtccaggcacaggcaaaccgcagtagtgagctttgggtacttgcatttactttaaaagaaaaacaaatgttgtgagctcaagagcatttccatcatttcgttttgttgtgctatgaagatgacagatcaggaaaaaatggtaactatttcacacttgctataaattagattccttgtgctaaccacacaataaaatagcctcccccaaaccatacttttctagggcctaaaacatgcttgaaggaccaatattgatagacagacttaattgagatgttttaaattacatttacccataatttaaacattactatttaaatcccagaaatattagtgctgaagaagcacagttgtttggaaaaatacaggacccaaattacagcatcaaattttcctattccaatattgtaacccacttccccactgtgaaaatcctatttctcaagcttgtagatgcatgggaaatgttcttcataatattatagctggaaataagtggttttacttgctccactgtatgtttccataattggtgaaaatagacttctcattatgactaaaaatatagattttttaaaactacagaacccagcagccagttttctgctttgctaatcccccccaaaaaagtcaagcaaagactacaaaaatagcaattattaataactttaaaaaatattttgcttctttgagcaaatttaagttacattcagatgtggtagaagagaatgatgctccaggtacttctgctcatcctaggggcagagttgatgtacagctgtcaccatcaagtagcgggtttggtattcatgatgccaccggttaaagtcgttgtaaaatagcacaatgcttcctgaagccatgccagaaatgatgcacctctggtcgtaagacagcgccatggcccggattccagcgtcacatcctggataggcaaagagctgcttgaggtccgacacctgccggaccacgaccactcctctgtctcctccctgtgagcaggtactgccccatctcggctcagctggatggctcttatgttatcatctgtttccatcgtggcctggagttttccattcacactgaatgtacagaagaggccgttttcatagaatatgacacaatgaccctctcttgaagcctgaatgagttttggtttcaggcagttttcaggaccctccaaggtcctcaacaagtctccattcatggaatgtatgagacatggtccttcttgtgaaccactcaacaccaggcctagctccgcacacaccgcagcacatgtgacctcatagtcatggccggtcaaaatggcccgaggagcagcagtctcactgcctgggttatctccaatcccactgcattttccattccaataccacagcaaaagagttgcatcacgtgaccctgagagaatgtagcaatttcccccaatatatgactcagaacgagcaaggcaagtgacgacatcccaatggccaaacaccacttggatcaatcttcctgtgtctgtagaatagactctgaaacttttatcccagaagccacagacgagaatatagcggttgtctgaagtgatgacaaagcactgggaatgcacttgaatactttggtctaaaaggtcagtgatttgcctcctgtgcattcctgtattgctggctatgagaggatcgatttccactggcagctggtatggctggtcttgtacagcaccttgatgagcaggaaggttgtgccatttgttcaccgcaaataacctgttagcagtgactgtgatcacagcgggagttgccaaaccaggctgggtgttggctgccacgtgagtaacaggggagttggagggaaacttgaggaccatgataacatcctgctgggctttgtctgtgaacatcaatggactcacttgcatggcagaacctctgggaggatggggctctatgagtagttgagaaggagtctgtccaaaacttcggatttgagcttcaacagcctctctcaacacaggatcagttattgaattcagattgacagctccttcataggtcaagtaatagaacacattgagggctcggacagcttctggtccttgctgtttatagccaaaaatgagatcaatccattggtgaagctggcaggaaacaaattcactctccagggccaatctgtttatgtgaacaaattcttctgaggttttggcccaaggaggaagttcgacatcagacactactgtcccatcatccatcactccaagattataattattgaagttgacaaacatctcagggagataataaaattcagggatcaactccttaatatcagaggtatcacgctgactgtttcgccaagctctggaaattgatgaaaaagttcgatctgcatgatcaaatttgcctccttgcaaatttaggaaataagttgtaaagggttctattcttagcagccatgcaagaacaaaacttgcagttgagtaatgagtaccatagtgaaactttggaacttgatcatcttcccatgattcataacgctcagcgaagaatgctgctctttttgggttcagagctcctattggcttggacaaatctctgaagttggtgggcaaggtaagatccagttcttctgattcataattagtgatgacccaaggaaacactggatactgatttaagtcattataactccgtcctgctatcgtgttgagaaacatcaagtactcaaaattagatatctctctgtgttgccatcgctgggtcatattagaagccttaaaaagctgacgtggactagctaatgaaatacgtctggtttgaggcaatccaaaacttgttccaacgccaacacgaggtagaaagtggaattc

SEQ ID NO: 57507 - DNA, 1988 bp, Homo sapiens
cgtcgacttttttttttttttttttaacacaaaatttgaattaactttatttcccctacagtcaacaacttctctgcattgaattttaaagcaacaaagtaaaataaaatcccccaaatgacaaggtatcagaaatccagacttcgttacactctatttgtgaaaatgttcagccattttattgttctgtaaaggaaccatcatctgggtcaaaaatgaattctataaatcaaagaatattctacaccttggaaaagaaaatcagcagtaacattctcactgaatattgtaaattacatttttcttcataaaaggtacatactattctgcacttttccaccaaaagcagtggtgtgttatgcttgttatataaaaaaaagttatatcctgtggcaggaaaaaccctttctctttcacttttactaaacaactggagaaaatgttcaagtctgtataaagttgcctataagctggaaagtgaacttgttcaatctccatttacattttagtgcattttttgacaattgtcacatttttaacaaaagtaagaaaatgcatatagcactaaagagtgtttcatcaaatgcttaagggattaaaaaatatggagcagagaacaaaatcattgtgaatggatgaactgttgtaaaatgaaaaaagtccaggcaaagttgttacaagtcttttgtcactttgatgagtcacagaaaatgaactttggatacctgtccactttaagggttttttccttaatcttttgcatgtaaacatagtgctaacttcagtactaagataccaaaactccgtcctggtaagcaacatcctgtgtagttgccatgatttccaaaaaatataaatttagcccttgaatgaatgatgtatgaaatctgctctgtaagtacctggtgaaaacgactgctaacagcagtaataatgtgtcaacataaaaaaactacttgaatcaattagctactcagaggtcccatctttgaaacagcagcttcttctcagagcaaacagtaagcaacagaaaatatacatttgatgaaacattctttgcattagagaaacatgaaaataaatataattcaaggaagtataatgattcttctaatatgtctttctcagacctgtactagtttaccggttcaagaagctctcatcacattttgtcacttgtattttacatattgctattcgggtaattcaaataaaatgcaggtcttgtaaaagaataaaaacattgacaagtatgcatgtgcccagggaccaaattagagggttctttggtgcagttagtccaaattctcagatttgaaggataatatgtaccaataaaaaaaaaaatctgctgctagacatttacagcagtgcccctgtcttgcttcacattagaaatcgaaaacagctgttctcaacaagccaattttatttttttaatcaggcattgcccagaaaattttgtacattaacctggaccagtgatggttctgtaccctctttgctgtgaaacacgacatgagctaaaggcaaagaccggttctcacaaggacaactgcttcaagttaggaaccagaacagtgcatttaaacagtcttcttagatattttcttgcctttcttaaaaaccagcttatttttaatgtagccacgcttccttttggtagtcttctttgacaaatacttctgttttgggaaaatgttggtgactcgaggtttgtgatctaatgtctccctgttatcaggtgcttttactttatatatcctaacaagccagtgttctgatgtaaaggcttcttccaaatgtttgaatttaatgtccttatttccaatctcagcattacgtgttcggtcaaaacctgggggtgtacgaaaatccagctgcatttctccaaatctgtagtatgacattttatacataaggcaattcaacaaagtaggggatcctgctttgtctacacggaattctccctgtggggtaaaatagtc

SEQ ID NO: 57508 - DNA, 1048 bp, Homo sapiens
ctcaggaccctcatcggggatgtctgtgtcctggaggacatgaccgtccacctcccgatcatcgagatccgcatcgtggagtgccgagatgatgggattgatgttcgtctccgaggggtcaagatcaagtcatctagacagcgggaactagggttgaatgcagacctgttccagccaactagtctggtgcgatatccacgcctagtaaggcaccgaccctgaagtactgtaccgcagagctgtcctcctgcagagattcatcaagatcctcgatagtgtcctgcaccacctggtacctgcctgggaccacacactgggcaccttcagtgagattaagcaagtgaagcagttcctactgctgtcccgccagcggccaggcctggtggctcagtgcctgcgtgactctgagagcagcaagcccagcttcatgccacgcctatacatcaaccgccgtcttgccatggaacaccgtgcctgcccctctcgagaccctgcctgcaagaatgcagtcttcacccaggtatatgaaggcctcaagccctctgacaaatatgaaaagcccctggactacaggtggcccatgcgctatgaccagtggtgggagtgtaaatttattgcagaaggcatcattgaccaagggggtggtttccgggacagcctggcagatatgtcagaagagctgtgccctagctcagcggatacccccgtgcccctgcccttctttgtacgcacagccaaccagggcaatggcactggtgaggctcgggacatgtatgtacccaacccctcctgccgagactttgccaagtatgaatggatcggacagctgatgggggctgcccttcggggtaaggagttcctggtcctggccctgcctggttttgtgtggaagcagctttctggtgaggaggtgagctggagcaaggacttcccagctgtggactgtgctggtgaagctcctggaagtgatggaaggaatggacaaggagacgtttgagttcaagttttggaaggaactaacattcaccactgtactgagtgaccaaca

SEQ ID NO: 57509 - DNA, 412 bp, Homo sapiens
  misc_feature (1)...(412): n = a,t,c or g
tnnnntttgaanatttgaataccagctatgacatgattacgaatttaatacgactcactatagggaatttggccctcgaggccaagaattcggcacgagcggcacgagcagtactgggagtaccagttccagcaccagcccagtcaggaggagtgtgaaggcagctccctgtcggctgtgtttgaacactttgccatgatgcagcgggacagctgggaggacatcttcgagcttctcttctggggcagaacctctgctggtaccagacagccccagttcattagccgggactggcacggtgtgccagggcaagtggacgcagccatggctggccgcatctacatctcaggnnnnnnnnnngcccctncttgccannaancanaggtttanncntnnnnnnccnnnnagctac

SEQ ID NO: 57510 - DNA, 962 bp, Homo sapiens
gtctcaactggcccgcgtgaggggccgccccggaaatgacgcgctgccccgctggccaagcggaagtggagatggcggagctgtacgtgaagccgggcaacaaggaacgcggctggaacgacccgccgcagttctcatacgggctgcagacccaggccggcggacccaggcgctcgctgcttaccaagagggtagccgcaccccaggatggatcccccagagtccccgcatcagagacttctcctgggcctcccccaatggggcctccacctccttcaagtaaggctcccaggtccccacctgtggggagtggtcctgcctctggcgtggagcccacaagtttcccagtcgagtctgaggctcgactgatggaggatgtgctgagacctttggaacaggcattggaagactgccgtggccacacaaggaagcaggtatgtgatgacatcagccgacgcctggcactgctgcaggaacagtgggctggaggaaagttgtcaatacctgtaaagaagagaatggctctactggtgcaagagctttcaagccaccggtgggacgcagcagatgacatccaccgctccctcatggttgaccatgtgactgaggtcagtcagtggatggtaggagttaaaagattaattgcagaaaagaggagtctgttttcagaggaggcagccaatgaagagaaatctgcagccacagctgagaagaaccataccataccaggcttccagcaggcttcataatcctcggttccccagactcaccggacaccatctcctatgccttggagaccttctgtcacttggctcccttcttaccaccaccaagactgtcccactgggcctgacccacctatgagggaagaagtcccacctgggccagagggagttcatgtgttactcataacatgcatttcaataaaaacatctctgcggtgaaaaaaaaaaaaaaaaaaa

SEQ ID NO: 57511 - DNA, 475 bp, Homo sapiens
caatagctatgacatgattacgaatttaatacgactcactatagggaatttggccctcgaggccaagaattcggcacgagcggcacgaggtcatggcgatgtttgagcagatgagagccaacgtgggcaagttgctcaagggtatcgacaggtacaatccttagaacctggccaccctggagcgctatgtagagacgcaggccaaggaaaatgcctatgatctggaagccaacctggctgtcctgaagctgtaccagttcaacccagccttctttcagaccacggtcaccgcccagatcctgctgaaggccctcaccaacttgccgcacacagacttcaccctgtgcaagtgcatgatcgaccaggcacatcaagaagaacggccaatccgacagattttgtacctcggggacctgctggagacctgcatttcaggccttctggcaagccctggatgaaaacatggacctcttgg

SEQ ID NO: 57512 - DNA, 2473 bp, Homo sapiens
gtgtgaggccatcacggaagatgctgctgcttctgctgcttctggggccaggctccgggcttggtgctgtcgtctctcaacatccgagctgggttatctgtaagagtggaacctctgtgaagatcgagtgccgttccctggactttcaggccacaactatgttttggtatcgtcagttcccgaaacagagtctcatgctgatggcaacttccaatgagggctccaaggccacatacgagcaaggcgtcgagaaggacaagtttctcatcaaccatgcaagcctgaccttgtccactctgacagtgaccagtgcccatcctgaagacagcagcttctacatctgcagtgctaaggacaggggcagatacgcagtattttggcccaggcaccgggctgacagtgctcgaggacctgaaaaacgtgttcccacccgaggtcgctgtgtttgagccatcagaagcagagatctcccacacccaaaaggccacactggtgtgcctggccacaggcttctaccccgaccacgtggagctgagctggtgggtgaatgggaaggaggtgcacagtggggtcagcacagacccacagcccctcaaggagcagcccgccctcaatgactccagatactgcctgagcagccgcctgagggtctcggccaccttctggcagaacccccgcaaccacttccgctgtcaagtccagttctacgggctctcggagaatgacgagtggacccaggatagggccaaacctgtcacccagatcgtcagcgccgaggcctggggtagagcaggtgagtggggcctggggagatgcctggaggagattaggtgagaccagctaccagggaaaatggaaagatccaggtagcggacaagactagatccagaagaaagccagagtggacaaggtgggatgatcaaggttcacagggtcagcaaagcacggtgtgcacttcccccaccaagaagcatagaggctgaatggagcacctcaagctcattcttccttcagatcctgacaccttagagctaagctttcaagtctccctgaggaccagccatacagctcagcatctgagtggtgtgcatcccattctcttctggggtcctggtttcctaagatcatagtgaccacttcgctggcactggagcagcatgagggagacagaaccagggctatcaaaggaggctgactttgtactatctgatatgcatgtgtttgtggcctgtgagtctgtgatgtaaggctcaatgtccttacaaagcagcattctctcatccatttttcttcccctgttttctttcagactgtggcttcacctccggtaagtgagtctctcctttttctctctatctttcgccgtctctgctctcgaaccagggcatggagaatccacggacacaggggcgtgagggaggccagagccacctgtgcacaggtacctacatgctctgttcttgtcaacagagtcttaccagcaaggggtcctgtctgccaccatcctctatgagatcttgctagggaaggccaccttgtatgccgtgctggtcagtgccctcgtgctgatggccatggtaaggaggagggtgggatagggcagatgatgggggcaggggatggaacatcacacatgggcataaaggaatctcagagccagagcacagcctaatatatcctatcacctcaatgaaaccataatgaagccagactggggagaaaatgcagggaatatcacagaatgcatcatgggaggatggagacaaccagcgagccctactcaaattaggcctcagagcccgcctcccctgccctactcctgctgtgccatagcccctgaaaccctgaaaatgttctctcttccacaggtcaagagaaaggattccagaggctagctccaaaaccatcccaggtcattcttcatcctcacccaggattctcctgtacctgctcccaatctgtgttcctaaaagtgattctcactctgcttctcatctcctacttacatgaatacttctctcttttttctgtttccctgaagattgagctcccaacccccaagtacgaaataggctaaaccaataaaaaattgtgtgttgggcctggttgcatttcaggagtgtctgtggagttctgctcatcactgacctatcttctgatttagggaaagcagcattcccttggacatctgaagtgacagccctctttctctccacccaatgctgctttctcctgttcatcctgatggaagtcctcaaacaccatttccatacccaggcattctgggtccccactggagggttagtctgaagggcaatggctgggctttggaaaaccagcaagatgaggacagagaggaaggcacacagcaaaccataagcccttacccagtgcaggacagaggatgcgggcagacctatgggttacaatgtctggtcatttcccaattccagattaaactgtcacctgtttt

SEQ ID NO: 57513 - DNA, 1373 bp, Homo sapiens
tttttttttttttttcacttgtagagcctgtttattgcataactagcaggcacaaattccaaaacgattttacaacacttaaagggcacaataattacaggaatagaatgtacaataaaaagtacagaataatgagtgacagggatcaaacacgttggaataaaaggcatctcagttttcctatgcagcattttcttttctaggaacacgttaccttcaaccaggacaaggaaagaaagaaaactatactattggaaagctcatgggtgccattgaggacaaaaacaggcgagttttgctcttggttctgcaactgaatcacttgagaagccgtgcacagctcccgagttgtgcgtttagaattctgattacatgaaatgctgtgtttgatctttgggcccaattcactgttctttggcaaataagaactatttgcattccaaggcagatgacgatttctgtgaaaggagcttagaggtacagctgtttccttctgttcagtcaagtgccagtttcataaagtgcacctctgccctatcagctttgggggaagggtggcatatggggaggaaagggatcattgagaatacagggtgaaaaaagaacgaacatttactgaaaggtagacattgctagtgcaaggtacggaatcccatgtgcaaaaaggtggctggaaacaaaatgttcaagataaggtgcgatttgcccaacaggagcagagaactctgacaccagatctcagatgaggccaaggaaatgcgcggggcacatacagagaggacgacatgcagccctccaatggccacgtcattccaccggggaacttgtttggagttttggcaccgtgggctaaccgagcactcttctgacatattcttacaactggaaatgctttgttggtccccatgttccttgactttctctagggccataaaggcaacatcttctattgcaggtcctcaaacattccaaggaaaacactgcttcacctcctgcagacagctcatttcccagaagcctctacagaagcccgtcctccctgggacagcaggggccaggggtttgcaagataaaggagggtcagctaaggacatgaagcctgcagaaaaggctatcagatggcgcctgaacttaaggtgggaggcccccttctagaaggcatcccgggagcatcccaacagcaatgtggcacttagggctgtgggacaaacaagtggaagagtcttttggagacgtggacccttttcccatgctactcacagtgaagcaaaatgcgacaaaagcatccacacacggtgacttagtaaagcaagcaccgtcggggtgctactttcatgacagcatatggtcaagctataaaggtgtgcatcgat

SEQ ID NO: 57514 - DNA, 1379 bp, Homo sapiens
ttttttttttttttttaaaccacagaatatatttaattcaaattaaacatgaaactagaataatgttcggtccttatcaagtagcaattacattgtttaaaaaaaaaaaaaagaacagtacatttctgtctacattccgacaatccaacgaggcggcatgggtcacatccagtttgatgaggtgacagagccagcagtcaccatccatgggcatggttctgaggggactggggagacacagaccatacatgatacaaaatgattctgcagcaagtctgaaggagcgcagcctccctcctaatacataagaatgaacgtccaggtagcagagagtaggcgacttgcataatgagcgcattttattaaatagatagttaacgcactgcttcttactcattccaagttgctgtaggtgctgcccgcattaacagcagggacaaaagcttcctatgcgcgtttcagcaggaatactctctccactccaggtacttctttgttttggatttttttggcatgatttccttcccatgtaaagaaagccaacttcttcaagacacaggtcattcagctttagtggtggcctccaggttctccttgggccgtgcagaaggccaggtcccgcacagtgaggccctcctttgtcctccactgaaagcttttcactgttcggtctgcaaagaaagaggttcgcctgcccctgctccactcgccagggtggaagtggtggagggctgggaaagggctttcttcacagggcagtgctctcggtatcattgtctatatccagcaggatgcggccaggcacgtctttgctggctgagtctgagtgcatttcaggaaagatgctgcgatgcggttctgaaaccctggaattggagtctgttactatcttggaagctgttggtgctgtgttggtgaggctgctgtccccagctgagtggacaccaggaggttgggggggtgggggcacgctgggccggttccttggctttggtactggtctcggtctcggtaaggttccagcatgtggctgtgcagtttcagggttaccccctgccagggtctgaggagctggcagactggggttctgttttcctaggggcggagtactggggggcgttggagtctggggaggggtgtgagatggctgctcaagtccatgctcactgggcaatgccatggggttgggagggccctggctattgggtttggtgtgcatcagtggcgtggcctgcgtagggggctgcggcggtgggtgattgggagcttggattggagacaagctgctggagtacctccggggtgctgagagctgggagggggcggagggctggcctggaggctggcccgtgtgctgggtgggaggagaggggcttcgg

SEQ ID NO: 57515 - DNA, 658 bp, Homo sapiens; identical to SEQ ID NO: 14098

SEQ ID NO: 57516 - DNA, 340 bp, Homo sapiens
ggcttaaagcatttataatggataaaactgccaatactgagtgcctgacataatatttgaaaggtggcaggcattcaaccatggtcactgaatgagagatgtagggaagatgatggcagggaggtttttagatatcaacaccctgatagttctcattttaaccacgcccggccttatttttatttttgagacagtctcactctgccgcccaggctggagtgcagtggtgcgatctcggcttaccgcaatctctgcctcccaggttcaagcgattctcatgcctccgtctcccaagtagctgggattacaggcacctgccaccatgcccggctaatttaac

SEQ ID NO: 57517 - DNA, 1980 bp, Homo sapiens
atatctcatcacagttttattttaaagaactatgatatccagtatttttccatgagagatattgatcgacttggtatccagaaggtcatggaacgaacatttgatctgctgattggcaagtaagtaactataactgatgtcagggcaaacccccaatgggcaacacacttttagcctgtttcttgaggacagcagctttacttttaaaatacaaagcaaaaacatacacataattttaaatagttcagaaaggcaaaatttgaaacacaggtcatattcttcctctggggtttttgggaggaggtttcctctaaatcattgcctagatcttctgtctcatgaatttttctttatctccatctttaatgcttatcttctgagatgacaagcatttattgtttcaactgtcccattcttcccagcctcacgattgtttcatctgagttttatattaagcaaatcttggcagtgtagaaagatggcagatgaatactaatcaaatggtaattttaagagcattttcccaataccaagtctttacttctgggtgattaatgtcagaattgttatctggtagtatgtcatttccataagctgttaagaaacttagttgttagcttcagcccttggggcactgggggctataatgaagttagaaatggaagatgttaaaactgcagacctaaaattagagttcacttcagctgctgttacgttcagagaataagagcaaccataacttacatcaagccaatttaaattagactaatttaaattgtctaattaaattgtctctagatgagagcccaatctcatctagaagtgaagaaatctctctattgacagttattagtataagaggttctaatacccagtgtaaggcagaaatatacattggagttagtctgtctgaggtatgcagaacaaatggcagtatcatgaagtggtatgtaggaagttaatattgccaatctcagtaacttccaagaataggaagcctggaaatgtattaacagctttattaacaaagtactaggactaatagcaacaaaatcaaggagttgcaaccataagaaggatgagtgtccaaggacaaccagttaagtattattttaagtattattttatcctcttcctttttaggagacaaagaccaatccatttgagttttgatattgatgcatttgaccctacactggctccagccacaggaactcctgttgtcgggggactaacctatcgagaaggcatgtatattgctgaggaaatacacaatacaggtatgtagcaaccaggtctgcagcctgttaactacataggtaaatatgctagagtctcttgcctgcaaagggatcttttctgctattccacatcattgcagagtttgtttttgcttaaacttttgtagctaaaaattatatggccatgctaataaaaaggatatagtcctttagagtcatgcttggacatggctcttaccaaattacactaaggtaataatgagtaaaaaattgtatatttaaacaattaaatacaagaataaattgtcaaactgatgcagttctttgagttatctaaaggcagattaagataagaaggcaagataagataagagtgcaaggctgtaatttgcactctaagagattggttcattgggagttgtgaatttggagctaaagctgatctcttgaagaaatctgcaaactggacaatatcttgggtcctttatgtagggtaggtcttgtactagagcctgaaaggatttctaataagggggatacagttagatgagaatggctgatggaaagagtactaagatgaattctacgttatcaagactggctacttttccaaaactcatacttgtttgcaaacagtttccatttctgtcagaaagcttctggttttaaagctacttcaaatgacctttcattccaaaatttaaagaactaccaaatcatactggttcaggaaaccctc

SEQ ID NO: 57518 - DNA, 2127 bp, Homo sapiens
ggagggctctggcgtcctggatggaggtgcgttcctttctgtggctggcgctggatccaccctgggtctccaaccagggctgcagagagggtagagccgtttcttaggccagagtggagtgggacaggaggtgccgagagaggactgaggtggcttgggacatggaagcgctgcagccttcgagcccggcatccagcattgcagccgccgcggcggcctaagagctcgaaccctttcacacgcgcgcaggaggaggagcggcggcggcagaacaagacgaccctcacttacgtggccgctgtcgccgtgggcatgctgggggcgtcctacgctgccgtacccctttatcggctctattgccagactactggacttggaggatcagcagttgcaggtcatgcctcagacaagattgaaaacatggtgcctgttaaagatcgaatcattaaaattagctttaatgcagatgtgcatgcaagtctccagtggaactttagacctcagcaaacagaaatatatgtggtgccaggagagactgcactggcgttttacagagctaagaatcctactgacaaaccagtaattggaatttctacatacaatattgttccatttgaagctggacagtatttcaataaaatacagtgcttctgttttgaagaacaaaggcttaatccccaagaggaagtagatatgccagtgtttttctacattgatcctgaatttgctgaagatccaagaatgattaaagttgatcttatcactctttcttacactttttttgaagcaaaggaagggcacaagttgccagttccaggatataattgaagtcagcaactaagtcttccttcaaagttgtgatttttgggaaaatcatatatcctatcttctcaaaggagaaatattgtacaataatatgaaggcttatattttaaataattattttttctcaactaatttttttcacttaaacttgagagaacaagttcagcttttatcataagaaactcatatgcctagctagaatatatgactgactattcaataccatactgaagagtttgatactattaaaataagccgctttgttttttaaatatgcaggcatgggttcagcttaattccataattcccttccagattattaactcttcatacttacagcaatgaatctgacaatgtttttcaaaaatgtatgctcagggttatttgtttcaagtcataggccagaacttctaaccatgtttattgtgtctaaaagagttggttgctattttccttcattatgaatagtcagtattttaaaagctcaaagtagaagaggagtcactaagccctaacagcttgtccaaagatttaaattcttatttcaaatttgatttgtcctttaaggtttagggctattttatattcagagttctgaataattactttgaaactgtagtatcataaaattgaaataaaatacatctactaggctgttagccaaagcatcaccattacaagtccatgaatgttaaaatgtacaggtgggattgtgaagatttactgacatcaaaagttcttctggaaacaaacctttgttaaaaaaaaaaagtattaaattgttttaatagtgatttatttgtcatcaaatgtacaacttattctaaatattttcattttctgtgttctaaatagaaatattaagttgcagtaaaaagagaaaaaaaggctatttagcattacaaagaatcatatttaaaggctgcccaatgtagagtctagtgacctgttcaggacacctgaaatataattaaatgacaattatcaaggttttaacaatttataattctaaaccagaggattataaagaagtgcaaattgacttttacattcaactttagttaaatgaaggcactcagtattcttcctgaataatacattcagtttctcacattttatgctttcatctattcagaattatttcatagtaaaataatctactcttatcacagctgtgtgacgatttctaaatgtaggaaggcctgtgaaacatgacactgcagttaaattggttggcctaaggactaagtaatttttcttctgctgaagttttaagtgagtatttgttccaaacaagttctg

SEQ ID NO: 57519 - DNA, 1670 bp, Homo sapiens
gtttttttttttttcaagtttaatttttaattgtattagaacccagtaaatgatgattttaaaagcagagtttccatcaaattaacacttaattcagggcaaaaatacatttaaaaaacctaaatcttaaggcagaagtaaaacattataaaaacagtatgtctaatacagactgtaaaatgtcagatttttaagagattcacatagtattttatagcactaaaatattaatacagtcagaaatattatcaattggtccaagatttctgtttataaaatgtctagactgctaattgaagaaatgttgctgtataagtaatagctacaatacaaccaaccaagtgattgtttttatgacaaaagaactaaggcaggtaattgcatggtttccatttgtaaagcttttgcagtattaaaatataaagcattactaggggtattttttgattcatctccctaccctaatgcccccgaaatgtacatcacttccctttaactctattttaaaattctgtgaaaccaccatacctattcattgtaggcctgaccctataaaggcatgaattgtttaatttgatatggtagaaaaacaattttagtaaactactacatcttttcctagtcattgagcaatttcaaacagaagtcttaagaatttttgcacctcagcaagtgaacaacctgtttctttaccactataagtttgaattttgcctagaatgtgttagtacacaggggaaaacacatttcatgtttatgtgcaattaacagtagcccttctgaaaaacagggttaacaatcttaaatttccccttgtgatcaaaaccttttgtttttagggggcaggataagatttaaaagtgctttaaatcagaaaacaagaattagcctagcttacacattccactgaatagtgtcaaaaaagataaatgcatttaaaataatttgtaagtctagcaaatataagcttgacgggttcttaactaacatattaagtaattacaaagattcatttttttacaaacttttaagctattttaataaaatggctatagacctcactgtacttctatttatctgtgcattaataaaaacctgttaaaattccttatttagtacttctgaaaaagtctaatcaaataagatcactaaaattaccagaaaagctttgaaatactgattgcagattcatttcaaagtagatttaacccctttcaggatctggtgtttaaatcatgaatgtcttcaccaacttcaactctgaaaatataaaaattttagccagttctggctatagttaaacagtactggtattacttgaaaaaataaaaattaaaaatatattgtcaatcatgcattccacaatttcaagaactaagatataactcataaatactgttatgtctttgcaggttatctcaatttccatcaggcctcagctgaaagctcatctgccaaaacacatcagcactcatgtaaaataaaaggagtagggaggtgactttctacacaatactgtacagtgtttggcttccagtttccctcttgtgtgtaactattctaggtatgactccttgagcgtgaaatgaggggtagatagaacagaacagctgttgggctaacaagaattagtgtgtagactgggcgcagtggctcatgcctggaattcc

SEQ ID NO: 57520 - DNA, 1428 bp, Homo sapiens
ggtcattatgattagctatccaaaaggaagagaaattttggagctggtgcaaaaaggaattccagtaacgatgaccataggggttggcacccggcatgtacaggagttcatcagcggtcagtctgtggtgtttgtggccattgccttcatcaccatgatgattatctcgttagcctggctaatattttactatatacagcgtttcctatatactggctctcagattggaagtcagagccatagaaaagaaactaagaaagttattggccagcttctacttcatactgtaaagcatggagaaaagggaattgatgttgatgctgaaaattgtgcagtgtgtattgaaaatttcaaagtaaaggatattattagaattctgccatgcaagcatatttttcatagaatatgcattgacccatggcttttggatcaccgaacatgtccaatgtgtaaacttgatgtcatcaaagccctaggatattggggagagcctggggatgtacaggagatgcctgctccagaatctcctcctgggaagggatccagctgcaaatttgagtctagctttaccagatgatgacggaagtgatgagagcagtccaccatcaagcctcccctgctgaatctgagccacagtgtgatcccagcttaaaggagatgcaggagaaaatacggcattgctagaagccggcaggagtgactctcggcatggaggacccatctcctagcacacgtgcccactgaagtggcaccaacagaagtttggcttgaactaaaggacattttattttttttactttagcacataatttgtatatttgaaaataatgtatattattttacctattagattctgatttgatatacaaaggactaagatattttcttcttgaagagacttttcgattagtcctcatatatttatctactaaaatagagtgtttaccatgaacagtgtgttgcttcagactattacaaagacaactggggcaggtactctaatataaaggacaggtggtgtttctaaataattggctgctatggttctgtaaaaaccagttaattctatttttcaaggtttttggcaaagcacatcaatgttagactagttgaagtggaattgtataattcaattcgataattgatctcatgggctttccctggaggaaaggttttttttgttgttttttttttaagaacttgaaacttgtaaactgagatgtctgtagcttttttgcccatctgtagtgtatgtgaagatttcaaaacctgagagcactttttctttgtttagaattatgagaaaggcactagatgactttaggatttgcatttttccctttattgcctcatttcttgtgacgccttgttggggagggaaatctgtttattttttcctacaaataaaaagctaagattctatatcgc

SEQ ID NO: 57521 - DNA, 1674 bp, Homo sapiens
caaagtgacaaatggcctacagctgtgagagcaaatggacatctcctcctgaactctgagaagatgtcaaaatccccaggcaacttcctcactttgacccaagctattgacaaattttcagcagatggaatgcgtttggctctggctgatgctggtgacactgtagaagatgccaactttgtggaagccatggcagatgcaggtattctccgtctgtacacctgggtagagtgggtgaaagaaatggttgccaactgggacagcctaagaagtggtcctgccagcactttcaatgatagagtttttgccagtgaattgaatgcaggaattataaaaacagatcaaaactatgaaaagatgatgtttaaagaagctttgaaaacagggttttttgagtttcaggccgcaaaagataagtaccgtgaattggctgtggaagggatgcacagagaacttgtgttccggtttattgaagttcagacacttctcctcgctccattctgtccacatttgtgtgaggcacatctgggacactcctgggaaagcctgactcaattatgaatgcttcatggcctgtggagggtcctgttaatgaagttttaatacactcctcacagtatcttatggaagtaacacatgaccttagactacgactcaagaactatatgatgccagctaaagggaagaagactgacaaacaacccctgcagaagccctcacattgcaccatctatgtgggcaaaggaactatccaccttgggcaacattaccaccctgtctgtttcttacggtaaaacactttgagggccaattaacgggaaaaactggcctggacaacaaagtcattgctagtgaactaggcagtatgccagaactgaagaaatacatgaagaaagtcatgccatttgttgccatgattaaggaaaatctggagaagatggggcctcgtattctggatttgcaattagaatttgatgaaaaggctgtgcttatggagaatatagtctatctgactaattcgcttgagctagaacacatagaagtcaagtttgcctccgaagcagaagataaaatcagggaagactgctgtcctgggaaaccacttaatgtttttagaatagaacctggtgtgtccgtttctctggtgaatccccagccatccaatggccacttctcaaccaaaattgaaatcaggcaaggagataactgtgattccataatcaggcgtttaatgaaaatgaatcgaggaattaaagacctttccaaagtgaaactgatgagatttgatgatccactgttggggcctcgacgagttcctgtcctgggaaaggagtacaccgagaagacccccatttctgagcatgctgttttcaatgtggacctcatgagcaagaaaattcatctgactgagaatgggataagggtggatattggcgatacaataatctatctggttcattaaactcatgcacattggagatttatcctggtttcttaggaatactactactctgattgtgtctactgattggctatcagaaccttaggctggacctaaatagattgatttcatttctaaccatccaattctgcatgtattcataattctatcaagtcatctttgattcctggacctaataaattttttttccctttcaaaaaaaaaaaaaaaaa

SEQ ID NO: 57522 - DNA, 444 bp, Homo sapiens
  misc_feature (1)...(444): n = a,t,c or g
tttgacccccnatnnaancncttnntaacatcattacgaatttaatacgactcactatagggaatttggccctcgaggccaagaattcggcacgagatttgatattcagagaatctaaagcactcgtctactgttttaatgagatttaacagcttttaacagtgagtttcgtttgtaaactgcttgaagtctgtggcattcaggcacacatctggctggccggctgggtctcctcccgggctcagtgggcctggggcctctctgacgtggtgcctgctggagggaggctcgtcgtcaccagctgactgctggtccggcttctgaccggcctttgtcctggctccgtagcagaacactgtaaaagtgcccgcgtctttgcagtagttgcagatttcagtcgtcgtgttacttgtgcacaaacagaagctgggtcttacccgcaca

SEQ ID NO: 57523 - DNA, 460 bp, Homo sapiens
  misc_feature (1)...(460): n = a,t,c or g
ttggnnnccatttgantcccaaagctatgacatgattacgaatttaatacgactcactatagggaatttggccctcgaggccaagaattcggcacgagggaagctcggttgatgtttctgcagaagttttcccccttggtcggtggcggagctgctgagcgcgatagtagcagctccggcggcagcaacattgactacgaggaatggcggcggctgccgcaggacctgcagcatcccagaggtttttccagagcttctcagatgctctaatcgaccaggacccccaggcggcgttagaggtgggagagccttttctgcttcctccactcccggctgacccgcctccttccagcaccgcctgattaggactcaggctctagtgatgctgcgtctcagnnnnnnnnntgagattctcggctcctttctctctcttacggtnccccggntacttanaattctg

SEQ ID NO: 57524 - DNA, 457 bp, Homo sapiens
  misc_feature (1)...(457): n = a,t,c or g
gnnnngnttnnnttnnnntctctgatannagtctcnntcagctatnacatgattacgaatttaatacgactcactatagggaatttggccctcgaggccaagaattcggcacgagcagccattcagttgtaaagttgggaagaagtttcttgacaagactctgcaattaaatgcttaaaatttggaggggatccttccttgattacatcaagtatgttggtacatgggtttatacaagttcctcttgagaaggcaaaaagaccaccatgtgtgagagctctttgacttggccaataggggcctatcttaatgcacttgtttggacacatttctgatcttatttgtaaaggctgcaaaaggagaggatgaaatgctgtaaaagtaggaaatgaagtggaagctggaagaaaatgtaattggtggtacagctatgggccagatggtggaggggagggtg

SEQ ID NO: 57525 - DNA, 2108 bp, Homo sapiens
ttttttagcagtttaatttggtcctgagaatgttgcagtctttattaccccttttgcattaatccacttttctaaccaccttttaagctttaatttttaacactatacaccaagtctttgaaatcagtgatctgttatttaactctaaagcatttgacacttcttgccttaacagttttaaaaaccacacacaaaaaaactctgtaagtaatacagtaggccaaaagtttcatcctatctatcttgcagtttacctatctgatctgatctctgtaattatagttctgtcatttaaaatatactatttaaatctaatttttacatttcaaaaattatcttcagtagtaactaagtatattttctgtggattctgagaatgttatttttcagaatgtgagaatacatatgtacatttataatcttgtgactttaaagtctgttttcagatacagtatgtaaatacttgtaaaaaaatttgtataattttgtgataatgtagtttcccaaaaaaattatttagaaggcattatgttattagtaaatgagagcactgtatagaactgttcctattttctgcacttgcccattccagctgcctccactgtccatacccacctcattcatcctgtcacagaaggcaggaaaactgggaactttaccaaagtagcactcagcctgagaggcctgtataatcatgcttttcaaactaaattcacttaaaaattaaaaagcagaattgaatattttaagcagcctcagtacctttggccaatgctgttttcatggtggattatgaacattatataatctttgggaaaagtgaaagtagtacaatttttagaataatgacaactgcctcactgcatctctccactcacacagcaaccgtgtagccccctaagctgcagtaccatgactaaccatgatgtcaatttcatatgctgatcctcacaacagcagtgcacaaacatgccccaaatattttaacagaatttagctcttccttaagctgtcttttcatagtaaaaacaaaacaaaaacacccaatgttaaaaccacataataaacttacaaacttgaaaaattagacacttcagatagataggcaataaaacttcatattatgaaagcaatatattccaagtttcaaagatttgacaagttctgtagagtatctttcatcagtacatgaaaacttccaaactgcatgatcttctgccaggcaggactgggtgctattcgctggtttgaggtcgaatccatttcaaggcatgtcgtggtgggacattaatggtgggatggtagaatgtgcagtccggtcttgtacattgagtgttaaacctacaatgttttggatgatagaagggacattccatcttcttacaagcagggaagtaacggcagagctgactactggaaggtggtgctggtggtgcaactgctggttttggagacagtactggaattcttctactcacatgagtgaagggacaatctggtttagtacactttgcatcatatttacaatttgggtgaacaaacaaacatttttcagcaaatttacaattggggaaggctttgcagggtgagatggggtgatggtaggcacactcatccccatttttacaagcaggccagtacttgcagcgctccaaaagtttttctggtttctgtgccacactcagttcactcatctcagcttgactcatctgcagagtttctgccattactgggtcgatttgcagtcgggataataattgcctctgttgagttccttgatttttttctacagaatctccttttgtttcctcttctttaatggggggacttattctgggggtcctactttgtccctggaccacttctgctagcaattcttcttgagaagttcgagttctgggagcaactggaagtgtctgtttctgtggaactgtagagtagttagttgtttttgttacggattcttgagcttcagatatagccttcaaaatcagattcttgttagcttgtttagaaggtggaagagaaggtctcctttcaggctttgcaggcacagacacactgctggagatgcttcctgttcgagacccgtaatcatcatcttcttc

SEQ ID NO: 57526 - DNA, 1366 bp, Homo sapiens
gcccgggagaaggagggccaagatggcggaagcggaggagtctccaggagacccggggacagcatcgcccaggcccctgtttgcaggcctttcagatatatccatctcacaagacatccccgtagaaggagaaatcaccattcctatgagatctcgcatccgggagtttgacagctccacattaaatgaatctgttcgcaataccatcatgcgtgatctaaaagctgttgggaaaaaattcatgcatgttttgtacccaaggaaaagtaatactcttttgagagattgggatttgtggggccctttgatcctttgtgttgacactcgcattaatgctggcaaagaggactctgccagatagttgaaaaagatggagggccccaatttgcagaggtgtttgtcattgtctggtttggtgcagttaccatcaccctcaactcaaaacttcttggagggaacatatctttttttcagagcctctgtgtgctgggttactgtatacttcccttgacagtagcaatgctgatttgccggctggtacttttggctgatccaggacctgtaaacttcatggttcggctttttgtggtgattgtgatgtttgcctggtctatagttgcctccacagctttcccttgctggatagccagcctccaaaccgcagagccctagctgtttatcctgttttcctgttttactttgtcatcagttgggatgattctcacctttactcctcagtaaatcaggaatgggaaattaaaaaccagtgaattgaaagcacatctgaaagatgcaattcaccatggagctttgtctctggcccttatttgtctaattttggaggtatttgataactgagtaggtgaggagattaaaagggagccatatagcactgtcaccccttatttgaggaactgatgtttgaaaggctgttcttttctctcttaatgtcatttctttaaaaatacatgtgcatactacacacagtatataatgcctccttaaggcatgatgggagtcaccgtggtccatttgggtgacaaccagtgacttggggaagcacatagatacatcttacaagttgaatagagttgataactattttcagttttgagaataccagttcaggtgcagctcttaaacacattgccttatgactattagaatatgcctctcttttcataaataaaaatacatggtctatatccattttcttttatttctctctcttaagcttaaaaaggcaatgagagaggttaggaagtgggttcatacacggagaatgagaaaacatgcattaaccaatattcagattttgatcaggggaaattctacacttgttgcaaaaaaaaaaaaaaaaagcgtt

SEQ ID NO: 57527 - DNA, 453 bp, Homo sapiens; identical to SEQ ID NO: 23624

SEQ ID NO: 57528 - DNA, 1749 bp, Homo sapiens
tttttttttttttttttttaaggttttgcatttcatatttattatcagtgcttcaatatagaatgttttgtaatgattagcaacattgtaaacaccaccaggtttttccaacactaactgctagtcttttccagtaaatattttttccccagacaaaataaccaaacctaacacaatttcaagagatggtgataccatcagcataataacccaaattacaaaaatgggcaatactttaaaatcatgcatattatttcaccatttcataaaaacttatttttaaaatttctacaaactttcccagtgttaaaggactcctcaaaagctgcatgataacattaaactacaaaattcactttggaaaagtagggagttatttttctaattttggctttaagatttttttttttaaatgggttaaaagatacggtgaggagtgtgttgagagaggtggagaaaaggagcttccagtcaatgcattcaccatatctgaaaatacttcagttatacaaagggaacacttcgagagtaaggatatattataaataagtctctcagcaagatgaacggatgaacagttcaattgcacccacaggagagaggtcttcttggagaatgcttgtttatagaatcttctgtaaaatagagttggctacttctaatgattcatcttgtactaaaacaatatcataagagtccatgtacttttctaaaagctcatccactctatcatttagatatccaattttcagaatgtgctcaacattggccactccatctgccattcttaagtctccttgggagtctccccagaagaattatgttactattgtcttttagttgattgaaatattctgtattcctcaaggcaccatcatgtttgttaaatacatgaattagttctcctttaaatcctttgagcaccccagtttcatcaaaatccataaaattggacacaactttgacattgggatgataaacaccagcttgacgaataacttcctctagtacatcgccgattccagccgaaaatatgaacacggggatgctatgttgttggagcttatcaaagaaattctcatatccttctttgagcataacgtcagattctgccacaatttctttaagtttagcttttggtaaagcttgctgaacaagcaaaccatgtgatttagtataccattccaccatataagggtacttctcttctacagtaagaacaggatcaacttcaatagcgtagtatttttcctttagttgcaataacttttttctacattcatctgtaaccagcttacagttgtcaatgatattatgacatgttgggcatcttttccctttatatgaaaatctactgagtgtcatatcaaagtccgttattatctgaagtttggcagctcctcctttgataagaccacagataatttcttctactcttgtagggttcttgattcgaactgaacttttctggaattctggcatcattttcacatgtacggcagactcttgattagtcatttcttggttatccaatcttcatctcgatgatcttggtcttccgccccgtcttcctcttcaaggtgaatatgtactgagccagcaccacccccgccaccagggcgcacacgctggcgctcgctaccgcgcccaccctcgccacggccgcgcggtccatggacggggccctcatgcgcgtccaagcaggaaaaaaacaggcagctcgcgtagactgcgagtctcggaagcgcg

SEQ ID NO: 57529 - DNA, 989 bp, Homo sapiens
gcgactcccatgcatcggctaatagcccggagacaagctgaagcaaataagcaacatgtaagatgtcagaaatgcttggaatttggacattggacttatgaatgcacaggaaaaagaaaatacctacataggccctcaaggacagcagaactaaagaaagctttaaaagaaaaagaaaacagattattattgcaacaaagcattggagaaaccaatgtagaaagaaaggccaagaaaaaaaggtctaagagtgtaaccagttccagtagcagtagcagtgacagttctgccagtgattcttcatcagagagtgaagaaacatctacctcttcctcctcagaggacagtgacactgatgaaagctcctctagttcctcatcctcagcctcctccacaacctcttcctcctcctctgattcagactcagattccagctcttccagtagcagtagcaccagcacagatagcagctctgacgatgaaccaccaaagaagaagaaaaagaaatagagttgctccattcatattggaccgatggactgaaaacattgatgtgattcttgaaagggaatttagaatatgttaaggccaagtaggttaactggtgaacatttctagaattcaaaagtttctaaatgttttacattgtaagagcatagagaatattaataatggcttatagagagagacttttatttgaagggtgaatcttgttttttttatctttaaaatatatctctagaacttaaagctgaaatctgcaaatctgtttgtgtgatgaaactatcttttctctctgtgaaataaatgccatactttgttatatatgttagtggtatgtatcagacatattttcaggatggtgcgtcaggatatctggcagtggatttctaatgcttttggctgtatgttatgtaagatttaatatgttgttactgtaagcttaggagttttcctactattaataaatgtgctctatttttacattt

SEQ ID NO: 57530 - DNA, 740 bp, Homo sapiens
  misc_feature (1)...(740): n = a,t,c or g
gcccagattcacagaagagtttcatacacctttcacccaggttcccctaatgttaacagcttacatataaccttggtacatttatcaaaactaaaggtgcaatcatactaatagctagagtttatttggattttaccatttttcccaatgtcccttttcctggctgcagcagcccaatccaggatgccatactgcacttagagctgttgctttcttttttcctaactttatattttgaaataatttcagatgataggaagttgtaaaggtaagggccccacgcacccttcatctagtttccctccatggttacatcttatatggttgtaatgcagtattccaacaaagactctgacactggtgcgatgtgggtggacagtccaaatcatttgtcacatgtacatctgtgtaactaccactgcaatcaggataaagaagtcccatccccacaaggatctccctccccaccttccctaactcctggtaaccactaatcgttcatctcttcttattttgtcatttcaagaatgttgtataaatgggagcatagtgtgtaagcattcgggattgtcttttttcactcggcgtcattctcgggagatcatccaggcattgcatgtgtcaacagtttgctcctttttattgctgagtggtattccgtggtgtatgcattggccccctgaaggacncctgggatgtttccagtttggggctattccaaataaagctgctacgactat

SEQ ID NO: 57531 - DNA, 2405 bp, Homo sapiens
ttttttttttttttatatcaaacacatttattcttaaagtgagaagctcatcaaggatagctagaggagagtgaaatatttacagtagaaaagtatggatgctagccaaacttcaaattctgtcactgcagagttattccgatagtacttttccaccatggcacatcacacatgttaaaattaactgcattcttgtaacacctctcaatgggttgtgcacaataatagaagcaacattctggggactctttttcttaagatcctacagaagtgaatttatgcacacacaaaaacaacgtataatacaaaacattcaaaacaaggtcacatccattttttttaaaaaaaagaaaacagcaagatgaaaataggcaagggatgggttgctacttctatgtgcaaggtactggattcttgcattgagaatcctagtgtcgggcctcacgtcaagcatcacatcaaaaaagtgtgcagaaaaatgagtcaccttcaatatgaaggatgtgagttgtgtacactgacaacggtctccaaagatacaacattattgcaggaggaatgcctgtgtacagagtggaccatcttatgaggccaaaaacccatgagttaccagatgaccattcagatatttgggttaaacgatgacagttttctggtttaatcaaggcacttgcaaagagctatctttgacatgacatgaagtccctacgtgttgttagccattaatgatggcatggtttttctataccaagcattctataacaagaacccaagcctgacagtttgatcacaaagtcacttataacatcaggactacaaagccagatttgcttaaactttccccaaattatgattttttatagatcacatctgaacagaaaggcttcacttaagatcttgattctccggagctataattcatcttctttctccaataccacccacattcttaaaggttatttagcttttctccacaaggatacgtagaatggatctttttcccctccagaaataatttccccaggaaagaattgtaaaaccaacttaaaaacacaaaataaccttacgtttttccaccaacaatgatcagacctcccactcctctgacttgagcttcagagccctttgtgtatacttttcacacattcctcataccattaacacagctttccatcaccatcagccatccttcctcaacttttccttgcccaacatgaaagctagtggattgagagggaaggaagaagggaactgaaaaagtattacctttataaaaatagttttcaacctgttacttgatccttcaaagccaaattggggtaggcatcatctgtacagaccccaacactaaattctcaagtgtctttcttttccatagccaggtctcaaaagctcaaatctaaacctactgatggagtaggcaaaggcttcctaaaattgagcaatacagacctaggattgcatgggggaatatgacaagtcaagaccagttacattgttgcttaattcatcgataaagccaagtctccatctcccccagctctgccactctgggaagagcccactagccagcctcggactgccaaagattgttgactctaactctgtcttaggagacgtctggtggaatgcacagtcctggggtgccatctgtgtctgcaccccatcaggcttccattgaacatgaacaatccaataattcttgaccatcattgttgtcccaaaagacttgcccattagcatggtaagaaatgcagaactcaattttctgctcagttggaatgacagggggtaagtcaatgccaaatgagaaggtatcactatctgtgccaccatacacatttttcatatagacacagtctacgtcagtgtagtttttccaagaatcgaaagtgataacggatctgaactttcttctcaaaactcacatttttgactttaacagtccctgtcactgttcgctcttgcaacgagcagttctccagacagacaaagttcttctgaaagtggctccggaaacttaagtaatcggttgaaggctgagggaaatctaaaatcaagtttttctcctcgtggtgttttaaggcagaggagatatcattaaggtccaagagatcaaactgcagatcccacgctggttcttctgggaggtcggagaagacatggatcgcagtgagagagaggcccttggagtcagcaaacacaacgcgcttcttggcttggttgtgtgagcacttccagtcattctgtgatttggctttgtgttttatattgagacatgatttcaggggctttaatttattcacaaaatgtcgtcgttgaaattcatcgtacgggcccaggaaactctttacaggtggtgaaagtgccaagcaaagcctcatggccacatccacgggcatgac

SEQ ID NO: 57532 - DNA, 3255 bp, Homo sapiens
tttttttttttttttaatagacagaagaatttaatacatgtgatgctttgccttccatttacactatcataaattacaaagtattgttcacttcacaaaataaaaccatttccagataattttttgacagtatcaagaagtacataaactacaacaaacaaatctgtacagttgggaggagggataatagcagggaagaggtcaaacctccctgtgccaatggagtccatctgcatagcccttgggactgtccaggtcaacagtcacacaatgatgctccacgtaaaatagtcattctcttctgctcactccaaagcaagactggtgagtttacacaaatcatctcaatcaaaggaaaagacattgcagttggattttttaaaaatctagatttacagtttttgatgttttaaatatttcacctatgttacaaaatatagaaatcttggtgtgaaaggctcatgctaagataaatataaccaagtgactggaactgtagtaataaaatcatattatccacacagagctacttttgtcaaggaggaacaaatatttggtaaaaaccaaccttattctcactttaaaaaatatgtttgtaaaacaagaatgaaaaacgttggcagttattctgcagattcgcttttcaccaatacagaaatgtggcaaaaataccaatttgatattaaccagatgaattcagagggcttggccaggaagaaaagagggtaagtgctaactttttacacagaccagatacatccagtgttctcaaataatttcaggtaaaatgaccgcattctgtatcttctgggatacacactcatgatacgaaaagactatgaccaattcccaaggcatactttgggaattcacaaaatttgtatgcaatagaaagtgtgtggacatttcagaccatcctacaattgctataaataccataacatacaatagaagaatgccaatgccttaagagcaaaaactatcccaaagcaggaacacaaggggcaggtgaaatttcattaaaaagcactgaggaggacagaggtatgtcaatgataatactgcatttgtggtcagctttttcagggtgtcacagcaaaatgagggacaaggtacacagggtaataagccaatgcatctgccattggagttctatttgctaaaaataacaacattctcgtgggtaaaataaaaatacattttacgatacaggtttcatttaacagaattgtcttctttttgtaagtggaaaatgtataactgtatcaagtacctgtatgaattaagttcccttttattcccaataagactgaagtttaaaggtctacattgttttttaataaattaaagatgtattaatcactcttccagcaaaccagacatacataggaggcacagcaaaagacccaacctgaggggcttccctcaccttcacccttgttctcacgtggaggtggcgcatgtctatgagacacagtaccccactcagcgatcctctgcagtccagcaaattctagcacttgcttggaaaacaaatcaagtggtaagaaatgttttatccttagctgtgtcaacttgatggtgctgggccattcagctcatttccctgatggattagaataaaacgtcttcgttttctattaaaatctgcacaatcagcttttggtaccgcatatcatgcagggtggtcagggtgctgtcctcagggggcctcatcagagtgggcccaaacacgatccccagattttctgcattcatgaaattgtctttttcattcatagtaacctttttgaggtggatcattaggtaccggagggtttcatagtgggcaggaggcagcagcatcagcacttcatggacggcttccagcctctcatctgcattggagatttttgctgcatctataaatttggaataggtatcatatgtgatgacagggatgggtaagtctctgaaatacagtttaagggctccagtgatgatgtttatgtctggatagacattggcagatatatcggccttttcaccatctctgtcaaatgccattttgacatcttcaatgtgttcagtgaacccagagactctgtaaaggccttccgattttaatcctcttgcttcaatttcccgaatgcatatgtctaccaccatgggtctctgagtgttgtgagccttcacaagtgttgtgaggtcacaacagtacactttcttgatcctcttgagatcaggttggcagtcattgggaacgtgcttggaacactgtttgtgtacgttcaatccacagtctgagcaccggaccccttgggcgatgagcccccacatgaaattggcacaatattcacaccagtgtgggcctcggaacgtgtggaccttaaagttgtgtgtcttctcataattgaagtggttgtcgttgtgtgtgagggcagcccttcgaaccagggaggagatcttttccaccgctgtgtgttcttcatgtgtgacgtttgtttttcttggttcatttttagacctgctcagccttctggatactttttctctgagtagggtggcatatccaatgtgttcatagatggggttagttgtcatttttgaaatgtactcggcagcttttgtttctatgtacagtgttatcaagccatctgtcaccagatcatgaatcgactcaaacctcttctcacccacaaagtgtttcccgtcgtggaagagcctgtagtttaaggtctggtttccaaacctgagagccagcgtgtagcatcctggttgccgctggctttctctaaggatgtaggcaccctccacgcctccaagaagctcatccgcctgctcccgagagatgatcccatgaaactctcttccataatattttggtctgttttccacctcccgaggacaaatgattctcttgggacgaggtgcctcttgctgtaactgatataagtatgatttccatataggaggctggtattcttcagcatcggaggacaccgacgagccggacaggctggagttgctggacgctgccatctccgcgcgcccctcgcgtcgctgctcgctcagccccggtggggacgccgccgccgctgccctcgcccggccgctcgcagcctccgcggcccccagcccatggcaaagtcctggggacgcgcagaaagcaccagcctccggactctgcctgcacttcctgctccaccagatgacgcgctgccgccgccgctatttatttgtggtttccgtcccgctccgcgcctttgcacgccc

SEQ ID NO: 57533 - DNA, 352 bp, Homo sapiens; identical to SEQ ID NO: 23638

SEQ ID NO: 57534 - DNA, 2246 bp, Homo sapiens
tttgattgtattcaaatttttattttttgaacaaaaatttaagacaatgattttaaataataaaacatggtatatattctagacactggttttttttaaagatttattaaatttagactcctatagttctgttgtgatgctttcttcaacatttatattatttcttaccattttatcatcactccaagcttgctaaacaaagaatctctctgttaagtgaagttttacattaaggaaatactccactagcacactgaacaaacctacagaactgtcctagtttatatttacaaaacacaagaagtctgtccagccattttggttttgttgttacactgtccatactgagatcagcagagagctaagtaatacacaagattacgcttcggcagtgcaaaggatggcatcaaccaaacttcattaaacagaccaacaagtacaaacatggtgagcaaagttcaactcaggtaatagtgattaaaaacaaaacatgtagtggggtcacaaccagactgggttttcactgtgcaactttcctcagggaataatacccattcacagaaagaaaggaatatgcatccaagcctttgttcataaagaaaatgcccttcaaacaaattcatcataaggctaaaaaaaaaaaaaaaagaaagaaaaaaggatgaagcagtttggcccagagaaaagcttaaatataatgtgtatacatacttatagatatgttgccatttaaaccatggatatagacatttgacaattaaatgaattggctcagtaaagtgaaaaagtgttttctataaatatgtagttattgctgatatgctacacattatgctttgacatggagactgtagtaactcagaatttaaagctgccatattgccagtgttagccctgcagtaggcattcctgtggacaacatgccatccaatcctgaagaaaaagcaaaacaccactacttaacaaagaaaaggcttatgcactgtcccttacatttttgttttttttttttaaaaaaacaaaacaaaacagaatcaagtccagttcaccacaagttaagcacaacctggcgagcaagtttagcggcatgatggggagaaaacagtgaggtacagcatgcatttacaaccagcgctgatctagtctattttgtcatataaacttgaatacaaaaatccaatttaaataagactagacttactataatagtaaacaaacaaaaacaaaaaacaaaaaaaaaaacacacacagtagacttagtttgatactgattaattttaagagtaaactcatcctgtcccctcttaatactctactgcaatttattgatggctagaatatttactgacttaaaaaaggtattaaatacttgtatcatgaaattacattcttattaacaataagacatactgtgtaagaaaatagctcatgtgtgaaatgtgtctgaaatgcattttttccttacaactatcaaaacatccactcacactaaaatgaaaccactcccaaccccccctgaaaaaatgttaagggaagacggggtgggctgggggaggagcaaggaaggaaaagatttagctatactaattacagcacagtgattaacaatggttcaagacagagccaacaagagttggtcaaaaagatgccttcaatacatggctacaattaaaaaccaaactcagccgcttttggttcattgcagtgagaccaaacacagtatctctcacagattcatataaatactagactccagctcttatatcatttttttttaagtttttctgtttgtttctgcaaggcctagctatcttattacaatttatatttgctctgcaacaactacaagaggtaggcataaagcatgaaaaagtttctcagttagtacctcgccatgtgttgttcactgcacaaaaccattcactttggacatgaatagtcattccttctattatcttctaaactctaaagcaaagctgctgccacccgtaaatgttctaaaagagtgtactcacaagtaagaaactttctctactgaaggatactgtcacagagtttgttgcagagcatctatatatatatttatttatttattttaaaaaaataaacaacaatgatgaacgaacccaggttcctagaaccaattctcttgattctctacttccacaaaataaagtgtatcatttggccaagactacagatgtgtttttttttttttttcacagatgcaagtgccatgcaaaaat

SEQ ID NO: 57535 - DNA, 537 bp, Homo sapiens
gagtgacctcgggcggcgggtcacgtcggccgggcatggctgcatggagcccggccgcggcagcgcctctcctccgcgggatccgcgggcttccacttcaccatcggatgtttgccactcagactgagggggagctcagagtgacccaaattctcaaaagaaaagtttcccacgagctacagctataaaagtcactgacatttcaggaggttgtggggcgatgtatgaaattaaaattgaatcagaagaatttaaggagaagagaactgtccagcagcaccagatggttaatcaggcactaaaagaagaaatcaaagagatgcatggattgcggatatttacctctgtccccaaacgctgaccacgccctggctgcatagatgctgctgcttaagaccttggatgaacttcactgacatcattcttccctaagcagtcaccaaaaaatttatatattttgctcatatacatttccatattataattatagaagatgtataatctatttagatgttaattaaaggaaacaaacaactg

SEQ ID NO: 57536 - DNA, 1895 bp, Homo sapiens
gtgactgcagccatgctgctacagtgctgcccagtgcttgcccggggccccacaagcctcctaggcaaggtggttaagactcaccagttcctgtttggtattggacgctgtcccatcctggctacccaaggaccaaactgttctcaaatccaccttaaggcaacaaaggctggaggagattctccatcttgggcgaagggccactgtcccttcatgctgtcggaactccaggatgggaagagcaagattgtgcagaaggcagccccagaagtccaggaagatgtgaaggctttcaagacagatctgcctagctccctggtctcagtcagcctaaggaagccattttccggtccccagggagcaggagcagatctctgggaaggtcacacacctgattcagaacaatatgcctggaaactatgtcttcagttatgaccagtttttcagggacaagatcatggagaagaaacaggatcacacctaccgtgtgttcaagactgtgaaccgctgggctgatgcatatccctttgcccaacatttctctgaggcatctgtggcctcaaaggatgtgtccgtctggtgtagtaatgattacctgggcatgagccgacaccctcaggtcttgcaagccacacaggagaccctgcagcgtcatggtgctggagctggtggcacccgcaacatctcaggcaccagtaagtttcatgtggagcttgagcaggagctggctgagctgcaccagaaggactcagccctgctcttctcctcctgctttgttgccaatgactctactctcttcaccttggccaagatcctgccagggtgcgagatttactcagacgcaggcaaccatgcttccatgatccaaggtatccgtaacagtggagcagccaagtttgtcttcaggcacaatgaccctgaccacctaaagaaacttctagagaagtctaaccctaagatacccaaaattgtggcctttgagactgtccactccatggatggtgccatctgtcccctcgaggagttgtgtgatgtgtcccaccagtatggggccctgaccttcgtggatgaggtccatgctgtaggactgtatgggtcccggggcgctgggattggggagcgtgatggaattatgcataagattgacatcatctctggaactcttgggcaaggcctttggctgtgtgggcggctacattgccagcacccgtgacttggtggacatggtgcgctcctatgctgcaggcttcatctttaccacttctctgccccccatggtgctctctggagctctagaatctgtgcggctgctcaagggagaggagggccaagccctgaggcgagcccaccagcgcaatgtcaagcacatgcgccagctactcatggacaggggccttcctgtcatcccctgccccagccacatcatccccatccgggtgggcaatgcagcactcaacagcaagctctgtgatctcctgctctccaagcatggcatctatgtgcaggccatcaactacccaactgtcccccggggtgaagagctcctgcgcttggcaccctccccccaccacagccctcagatgatggaagattttgtggagaagctgctgctggcttggactgcggtggggctgcccctccaggatgtgtctgtggctgcctgcaatttctgtcgccgtcctgtacactttgagctcatgagtgagtgggaacgttcctacttcgggaacatggggccccagtatgtcaccacctatgcctgagaagccagctgcctaggattcacaccccacctgcgcttcacttgggtccaggcctactcctgtcttctgctttgttgtgtgcctctagctgaattgagcctaaaaataaagcacaaaccacagcaaaaaaaa

SEQ ID NO: 57537 - DNA, 456 bp, Homo sapiens
  misc_feature (1)...(456): n = a,t,c or g
cacgagtccaagctgcagctggcagggattgcggggtgccggccgtctgagtttttttaaaactgctcgccgcgaagtctgtctgcagccaaaatgtccaacagaaacaacaacaagcttcccagcaacctgccgcagttacagaatctaatcaagcgagacccgccggcctacatcgaggagtttctacagcagtataatcactacaaatccaatgtggagattttcaaattgcaaccaaataaacccagcaaagaactagcagagctggtgatgtttatggcacagaacatcctaaatgtatgcatctgaattataggagagaaagagagcaacttcagaagagcctttgctttgttacagattagtcactgctacccagagtacctaagtaattttcctcaagaggtgaaagatcttctctcctgcaatcataccgnattggatccagatctg

SEQ ID NO: 57538 - DNA, 2301 bp, Homo sapiens
tttttttttttttttttcaaaataaatgtttaatataatttttagaccaaagaaaaactcaatcatacattgtctccagtggaccatatgtgccagaacaggaccaactcagtccagctttgaaggccctgattcagtcctactggtataatctcccttgatttattgatttgtgtatgcttcttatgcaatacaaggtgcattttactcttgaagtccctatcacctccaccatcgccatttaactggcaaaagcatggcttcctaatgggagggttttcttcccccttccctgcagagggttctggaaccttcaaggagtttgacaatcttatgaatctcttgaaccttctccccagaaaaatgtacatacaagtctacaaataatttcatggggttcatggaccccaaggcccacaatggtttctaaggccccaaattaaggaacctctgtgctagtgatttgagcaacgcaattgccctcagaagacactgacacagggcaggtgaaggactgggttaaccaaaatgacaggaggcaatctcataatttctgtttttattttggggcaaaatttagttctcagggcctccctacgtttaagagcagaactactcaagaacctaagcagctatcagcatagtttaagcgatttagaatagggctgtgcaaggggatgtacagggttcctcattcagctgaggacctcatttagctccttaactggaagctttacatttgatctgcagtgaggggacatttctaattttagtttgacccacatggaaaggtggatagctttttttttttgttttggtatagagagcacgtagaattggacaattaggtaaatccttggaatcccccaaacagccatttgctttataaatccagtatttcttacctctgaacgtcttaaagagctgcctcacaaattaatctaaccattgcttgcactaagaagtttgccaagagcctcttccagccttactggggggaaggaagagattactgaaaaccaacttgtaggaatgaaatgaggctgtcagttgtctaacctaacaaactgccaaattaggtttacattttttgttattagacttttgaatggccgaggcagagttaaatttaaaattttggattgtagccactttccactcgcctaaacactcaataccggtttgtttatttttccagcatcaagaaagaaaaccaaggcactagaaagcaagcacacttaagtattgaagataattacatcttaaattttgcctgaactgtatattgtagcatacttaaacccattcaaggaaaaaattggcaaattgaaaattctcccattaaagattgatatttttgcaaactgacaaatttaacgatttcggtacccctccccaaaaatgcagtcacataaaatatatcaatactattttgaattagctctagaaatcacactgaaactatgttacatttacaaatattaaatttattataactaaaatgaatttaattgttctcagatttggccaccttatagctccgtttaaggaggggatttgttaaaaacaaaaatgcattataacttggtcaaattactttcacattaaggaaaaaaacttctaaaaaggaaaacaagaaaagcaactcttcagtttcacataattaaaagaacaggagaaagcacgcaagctacatatagctaaatttacgaaaccaaccaaagccagggggatttctcttctgattatgtgtcataaaaaggtccactgtcttatatacacatgtatataatgttacattccatcactgtaaaaagtcccctttgccccctcccccaaaaaagtttcagtctagtctccaaacttggaaagcggcgctcgctcctgctgccggtgcagttcgttctcggtcagcagctggaggttctcggcgcgcagccggtccagctccagctccagctcccgcacacgcgcgtcgtcgccacccagccgcttgctctccagccgcagccggttgttctcgtcctccatgcgcgagaggcacttctccagttccaggtactccttgatgagctcctgcttgctcatgttctgcaggctctccgtgtggtaccgctcgtacgtctccgagaagtcccgctgcagaaactcgctgccgtcccctcccatcccatcgctgcccccatcctcctcacccccttcttccatgaagtcgtcatcgctggtgtcgtcggatttgggcggcggcccgcttggagtacaggccggttttgaggtccggctcctcctggtcgtgatcat

SEQ ID NO: 57539 - DNA, 940 bp, Homo sapiens
tccgggtccgctgcctggcgctgcgggcggcgggccatggtggtttggattgagccgggcccggccggggcgccgagtcggagggggtggcagtgagcggcggcagaggctacggggctcggtttggctgactggggagtcggcaggcggcaggaaccatgcgaggccagcggagctgctgctgggcccggcccgcctctgcctccgcctccttctgctgctgggttacaggcgccgctgtccacctctactccggggtctagtacagcgctggcgctacggcaaggtctgcctgcgctccctgctctacaactcctttgggggcagtgacaccgctgttgatgctgcctttgagcctgtctactggctggtagacaacgtgatccgctggtttggagtggtgttcgtggtcctggtgatcgtgctgacaggctccattgtagctatcgcctacctgtgtgtcctgcctctcatcctccgaacctactcagtgccacgactctgctggcatttcttctatagccactggaatctgatcctgattgtcttccactactaccaggccatcaccactccgcctgggtacccaccccagggcaggaatgatatcgccaccgtctccatctgtaagaagtgcatttaccccaagccagcccgaacacaccactgcagcatctgcaacaggtgtgtgctgaagatggatcaccactgcccctggctaaacaattgtgtgggccactataaccatcggtacttcttctctttctgctttttcatgactctgggctgtgtctactgcagctatggaagttgggaccttttccgggaggcttatgctgccattgagaaaatgaaacagctcgacaagaacaaactacaggcggttgccaaccagacttatcaccagaccccaccacccaccttctcctttcgagaaagg

SEQ ID NO: 57540 - DNA, 1995 bp, Homo sapiens
tatgacatgattacgaatttaatacgactcactatagggaatttggccctcgaggccaagaattcggcacgagcggagaaaagaggataaagccattcctccttccacctagatggattgccaatcttctgccatcaattttgggaaacctgcctttgtgcccccgaggctgcctttcctcagcatagctgacttgtcatagtggatgaggtctgggctggagcagtagaagccaaggccttttttctgcaagtaatgatgtaggttatttgcagtctctgtaaccaccatccaggccagtacgcagtatttagctggggaccaagggatgggattccctactctaagaaaatacctttattttaattattattattttttgagacggagtctcgctccagcctgggcgacagagtgagactccatctcaaaaaaataaaataatgaagtggaatcaaggtggcaagaaaatttagaatcgtttctgatagggactttcccttatcctaaatgtgttttgaaggcacacgttatttccattgtcattctgactttagaaaggcaggttggggcatgagtgggcattttcctaatgacttgctgctaggaggttataggcagggaacagtctgggagtctctaatccagagagactttcagattccctctcttcacatgaacctccattagttaggattttggggaaagtgagcatgaagaagggactcagagctgccaggtacccgagtctcaggtctgacatccttgggccccttctgccacaacttcttgccacttcacggacttgaattatgttgcttcttcctggaagtctggcctgcagcacaggcctttcctctccaaaaagctgctgctcatttctggccccatctgctgctatctttgccatcagccatcacagtttggcatcatcagagtctcagctagaggagctgtcattctgccttagtgtttgcctgcgacctgaccaggggcatgaccagctgggatgtcaagtgacatttgggaacttgtagaggccaaatgattgaaagtttaattcttctcaagacccactgatttgccagtgtgcatggaaataatagattagagcagaaactagcagggactgttgtataatcgtgatctactagcagaattgggcccaaagagaaagaatttctgaggctgggtttcttctgggagggtagcaggttggtcttggccagtgctctgtttcccaccagtgttgttcccttttccagcttgcctggcccggctctgtcttccagggtcctgctccagacccctctgcctggggtctcccctccatccagggggttctgggcatcacagctccttttttttcctttctcctcttccagatccagtttcagctggtttgcttcttccagcaggcacccttaggcccaggagcagctcccctgagagaatttgagtcactcatttccttgaacagcacccccctttatactagcagccatttgtgccattgcctgtgccctagggtttgtggggagagagcgagggatcactgagcagttttcccagagctccatgggaaggcaagctctccctcccaatgggagccccactgtcactaactgtaaactcaggctcaggcttcaactgcctacccccatcctcatatttctgtctgtcccagcacctcaggagcattctcattgtggccggctaactccgcctggatgtgaacaggcaagcacagtgggaaatgagtcacgtacttgtattgcacagtggacacctctagaggtccattggtttaaagggatagggaaggaggagggatgagaccatcaccccctcccagaagtaaatctagtatctgagttttctttatgcccttgagtcaaactaataactgtctagtacggaggtgtttgctggttttcttcggtgttttttctaatgcaataaactcatttctgcctgctgcaaaaaaaaaaaaaa

SEQ ID NO: 57541 - DNA, 425 bp, Homo sapiens
gaaaacaaacaaacaaacaaacaaaaagctgggcatgatgcacacctttagtttcagctgctaaggaggctgaggttggaggatcacttgagcctaggaggtcaacactgcagtgagctatgatcatgctactgcactccagcctgggcaacagagcaagaccctgtctccaaaaacataaataattaaatataaataaaaataaagcaaaatctgttgggaaacgagaaaaaggagaggaatttttcaggaataatcataaaaagaaatgatcatcagactgaaagtccagagcctgagaaatgaaaacatatttttaagcattggtgttgaccatgcagacaaacttttgttaattcagagcgatacaaaaggcactttgaatctataaaacttgaaaaagttaaaaattgtatgtcggataa

SEQ ID NO: 57542 - DNA, 1800 bp, Homo sapiens
ccaggaggaagatggcggcgtccgcagctgccgctgagctccaggcttctgggggtccgcggcacccagtgtgtctgttggtgttgggaatggcgggatccgggaaaaccacttttgtacagaggctcacaggacacctgcatgcccaaggcactccaccgtatgtgatcaacctggatccagcagtacatgaagttccctttcctgccaatattgatattcgtgatactgtaaagtataaagaagtaatgaaacaatatggacttggacccaatggcggcatagtgacctcactcaatctctttgctaccagatttgatcaggtgatgaaatttattgagaaggcccagaacatgtccaaatatgtgttgattgacacacctggacagattgaggtattcacctggtcagcttctgggacaattatcactgaagcccttgcatcctcatttccaacagttgtcatctatgtaatggacacatcgagaagtaccaacccagtgaccttcatgtccaacatgctctatgcctgcagcatcttatacaaaaccaagctgcctttcattgtggtcatgaataaaactgacatcattgaccacagctttgcagtggaatggatgcaggattttgaggctttccaagatgccttggaatcaaggggactacatacggtcagtaacctgactcgttcaatgagcctgggtgttagatgagttttacagctcactcagggtggtgggtgtctctgctgttctgggtactggattagatgaactctttgtgcaagttaccagtgctgccgaagaatatgaaagggagtatcgtcctgaatatgaacgtctgaaaaaatcactggccaacgcagagagccaacagcagagagaacaactggaacgccttcgaaaagatatgggttctgtagccttggatgcagggactgccaaaggtgttttcactgtagacagcttatctcctgtgctgcacccttctgatttgatcctgactcgaggaaccttggatgaagaggatgaggaagcagacagcgatactgatgacattgaccacagagttacagaggaaagccatgaagagccagcattccagaattttatgcaagaatcgatggcacaatactggaagagaaacaataaataggagactttagcacacttcacttgtttctagaagtccagaattttggacctccacgtgaaagaactgttcttacctctgaactgggggctcccataagggagtaattttcctcagagtagcaaagtttctcttattaggggaaatcttgtgactcagatgaagtcagggatagaagacccttgggacctggcaggttaatgctgattattccttggcctttcccttgtatttatgcaaggaaggatatactgagctgatactcttccaagcctacaacttcaagttttatcatttgaactcaagtacttttgctgctgaggaatggaatcaaaagaacgtagtctcctggtgaccacctcagatctctattattaggctagatgtatagcctctactcccccagcttcttgctcttgaccctgcactgtaagttgcccttctattagcagccaaggaaaagggaaacatgagcttatccagaacggtggcagagtctccttggcaatcaaccaacgttgctatgaaatatgcctcacactgtatagctcattataggacgtcaggtttgttgaaaaaagtgggcaagacatgattaatgaatcagaatcctgtttcattggtgacttggataaagactttttaatt

SEQ ID NO: 57543 - DNA, 440 bp, Homo sapiens
  misc_feature (1)...(440): n = a,t,c or g
tttgaanccctatcagctatgacatgattacgaatttaatacgactcactatagggaatttggccctcgaggccaagaattcggcacgagcaggagcagccgcgagggtggcatggcagcgagcacagacatggctgggctggaggagagcttccgcaagtttgccatccatggtgaccccaaggccagtgggcaagagatgaatggcaagaactgggccaagctgtgcaaggactgcaaggtggctgacggaaagtccgtgacagggaccgatgtggacatcgtcttctccaaagtcaaggggaagtctgctcgggtcatcaactatgaggagttcaagaaggccctggaagagctgnnnaccaagagattcaaggggaagagcaaggangangccttcnatgccatctgccnctggnggcangctnnnaccnccaatg

SEQ ID NO: 57544 - DNA, 2400 bp, Homo sapiens
  misc_feature (1)...(2400): n = a,t,c or g
tttttttttttttttagaggtgtcgtgtttactttttatttaggagtacaaactgagacaaaatcatccttccagttagtgaggttttgagggatcatactaaagagaagacaggaaaacaccagtaatggtgaaggtcttgagaaaaggacaggacccgcagatagcgagagatcagaggaggccctaatttctttcctcatttcctttccaaatatcccaaatgtgcaatgcatcacctgagacagaaggcagaaagcatcaagctctctgtttatcccaattcaatgacaaccagaacttattttttttgagatggggtctcgttcttgtccgcccaggctggaatttgcagttgggggcatttccatgggctcatcgcagcctcccaactctcagtctcaagcaaccctcctacggtcagtgtcctgagtagctgggaactacagggcattgcacccacccacacttgggctcatttttaaaaaatttcttgtaggagacagggtctttgcttcattgcccggggtttagttccgcggtgcattcacagctcacgcagggcaaaatcttggtctcaagcgatcctcctgcctcagccttctgagtggctgggactacaggcatacaccaccatgtctggctcatttcttaaactttttgtagagacagagtcttgttttgttgcctaggcttgtctcagactcctggcctcaagtgatcctcctgtcttggccctccccaaaaatgcctccgattaataggtgtgaagcccgtggtgccccagccgacaaccagaactttcccgcagaccttgtgcttttggaccttgggtatcttctgcaggtcaagccatcctgaccactctgagaacttacccagggtgactcagctgtcactcccaggtcactcataagcccaacgggtagctccacccgtggacagctggatacacttgtgtctgttctctaaagtcatggatgacctgacaagagggaaaggaaagagggaacctccacttccctgggcaagttggaaaagggtgaggtgagggcaggattccttctcattggagatggcacacagaggcttggcctagtccttcagctggagacctcatacaggtacgcggccagcatcttggttccctctatgtagttatacctgttgagcttttcattctgggagtgggctccgtcatccgctgaccccacaggcagcagcatgacgttcttgcccgtggcctcctgaaaggtcaaggtcacgggaatactgccgccttccctggtcaagtctggctcaacaccaaaaactgtcttcatggctcttctcccagccaggtaatgagggtgactgaagtcggagacccagggcttcccaccgtggcccatgtacaccttgaactcattggggctgcgtagttcagcaaacttcttagttaggtagcttgtgacctgctcgccgacgacttcaggagtcatgttcggcacgagcctgatggagaacttgccaaccaccttcctgggaatcacggtcttggccccagacccagagaaggcgccttcgatgccatggagggacagagacgggtaccgccatcggtgcatgaggatgtctttcttgtggctgtgcaggaggatctgcgcccccacatccttggcaaactcctctatgtcaaagtcgatgtcgtcgtacagcttgtgctcctcttccgtgacggcggccacggcctcgttaatgccggggatcaggatgttccccctcttgtccaccaaagagcccatcagcaaaatgagatcagtcatggcctcatgcaccgagcccccgtacaccccagaatggaggtctttgttgctgcactccacctcgatgaaaaagtagcaaatgcccctgaggccgtaggtgatgcagggcttcttctttcccagccagtaattgtcagaaatgcagacatagtccacatccttaaagaatgtgtctttccgggcaaaaatcagctcgtctaggccctcagagcctgactcctccatgccttcgaggcagaatcggacgttgacaggaatctcctggcctgttttctgatacgcttccagggcgtttatccagccggccaccgggcccttatcatcagtcgaacctctcccatacagcttgccgtctcgctccaccagggtgaagggcttcgctgtcccagccgtcctccagggctgcaggctgcacatccaggtgcccgtaaatgcacacggtcttcttctgtgggtcggagcccaggcctgccgagcagaatanggagggagcgggatctccgagccatcagggagcttttgttttccgatatccaccagttccacagagccccccaactgcttaacatctgcagcagcaacttccatcatcctc

SEQ ID NO: 57545 - DNA, 2481 bp, Homo sapiens
  misc_feature (1)...(2481): n = a,t,c or g
gcacgcggctntnggagggcgggtcgggctcgtgcacgtaggggggccggaanacgaggggcttccctcctgtccccaaagtcccccacgctctccgtgccccggggntgcagagaagacagctctcaccccgcgtgtgccaaggtggagtatgcctacagcgacaacagcctggacccctgggctttttgtagaaagcacccgcaaggggagtgtagtgtccagagctaatagcatcgggttccaccagtgcctcttctgtccccaacacagatgatgaggacagtgattaccaccaggaggcctacaaggagtcctacaaagaccggcggcggcgcgcacacactcaggctgagcagaagaggagggacgccatcaagagaggctatgatgaccttcagaccatcgtccccacttgccagcagcaggacttctccattggctcccaaaagctcagcaaagccatcgttctacaaaagaccattgactacattcagtttttgcacaaggagaagaaaaagcaggaggaggaggtgtccacgttacgcaaggatgtcaccgccctaaagatcatgaaagtgaactatgagcagattgtgaaggcacaccagggacaacccccatgaaggggaggaccaggtctctgaccaggtcaagttcaacgtgtttcaaggcatcatggattccctgttccagtccttcaatgcctccatctcagtggccagcttccaggagctgtcagcgtgtgtcttcagctggatcgaggagcactgtaagcctcagaccctgcgggagattgtgattggcgtcctgcaccaattgaaaaaccagctttactgaccggttcttggaaacctggagaacagccaacaagaggcccttgaatctctacgtggccactgaactgctgggcccgggagactggactacaacacctcacactggtcagctggtttctacttggtgtttggtttttcccagccccattttatcttcagcggagccgcggtgtttgttttgtgaaagcttctgattaatttattatattgacgataaaactcaaacctacccagccttccccccactccatggaagtccttgggatgggcatctgctctggacaccccaaagagctcctgccctctcagccctttattcaagcctcagatttctgctcatgatctacatagatttggaaactgttttcctctgttttggtctcttgggcaacatttttggcccaagtttgggatacatttggcccaagtttggggaattttgggcagtagctgtatgggagaaaaagagtaagaggaaatattcccacagccatgaagggtgaaagggcaccttgtgcctagactagggctgcctggtcagtcccaggtgaggccaagggctttctggccatctcagggaggggccaccaggttcctcccctcaccccatattccatcaccttcctcctctgctctgggtggtaagggaaagccctcccggttcccacaggctatgatgctgcatggcagaggcaggtataacacagcactacatattggaaattttttatttttctaaataccaatgcagttttgctacggttacaattttgaaatattaactgagcctcaaaaatcacccttttctgtcaagcatatcttggcctctcccatgtctcagtgttgcctgcatttctcccaggacttgggggtggggtgaaaagcgtacaaaagatacttaaaagggctcctggggtacacaagcccagcaggtcctgagtgaagccgtgggccctccaaatgctcgttttatagcaacctctctctaccctagttctccaaattcacttctgccttcctcaggtttgatatctggcaggtttgactatccagaggaaattaaatatttttatataaaattaaattataataaatattgccaaatgctttcctttagcattgttccaagtctaaatgttaacctcaagctactgcaatttagacaatgaaatgggctgggtctacccccagccaccagccctcatcctctctacccagtgctctggtttatgcttgtctcctgactgctctgcttaaaggtgaaagtagcaggaacaacaacaaaagccaaccaaaaacaaggtagccagtgcaagacatctcactcttctgacatcctgcagtccccaccagtcctgaccgtgggcccctcaggggtctgggagtgtgacgttgtaatcttcatccgtctctatcccaacttcctcctgtgagacagggagacaagtgaatgagatgtcaccaggataagaccacagggaagcaaagaaggaagagagctccacttacaaagaactgcttcttgctcttggggtatccttcaagtattgcatcagacagctctgtagcctgacaagaaataaaaccacccgttttcagatgggcagcacctggcactgcctgtcagtttatgatattgtgt

SEQ ID NO: 57546 - DNA, 572 bp, Homo sapiens
tcactcaacagagactgtactacgacaaaaattgtcgtttcttcaagcggaaaataatgatcaagcggcacgaggtggagcagcagaacattcgggaggaactaaataaaaagaggacccagaaggagatggagcatgccatgctaatccggcacgacgagtccacccgagagctagagtacaggcagctgcacacgttacagaagctacgcatggatctgatccgtttacagcaccagacggaactggaaaaccagctggagtacaataagaggcgagaaagagaactgcacagaaagcatgtcatggaacttcggcaacagccaaaaaacttaaaggccatggaaatgcaaattaaaaaacagtttcaggacacttgcaaagtacagaccaaacagtataaagcactcaagaatcaccagttggaagttactccaaagaatgagcacaaaacaatcttaaagacactgaaagatgagcagacaagaaaacttgccattttggcaggagcagtatgaacagagtataaatgaaatgatggcctctcaagcgttacggctagatgaggctca

SEQ ID NO: 57547 - DNA, 567 bp, Homo sapiens
gggaaaacacctcttatgatggctgcagaaaatggacaaacaaatacagttgagatgctggttagcagtgctagtgcagaactgactttacaagataacagtaaaaatactgccctccatttggcttgtagcaagggtcatgaaactagtgccttgttaatactggaaaagataacagatagaaacctcatcaatgcaaccaacgcagccttgcaaacacctctgcatgttgctgcccgaaatgggctaacaatggtggttcaggaacttttgggaaaaggagcaagtgtgcttgcagtagatgaaaatggctataccccagctttggcctgtgctcccaataaggatgtggctgattgcctggctctcattttggccaccatgatgcctgtctcatcaagtagtcctttatcatccttaacattcaatgccattaaccgttataccaacacctcaaaaacagtcagctttgaagctttgcccatcatgaggaatgaacctagctcctattgcagtttcaataacattggaggggaacaggagtacttatacactgacgtggatgaa

SEQ ID NO: 57548 - DNA, 463 bp, Homo sapiens
ggatagaactctggaaagaagtagggccagtgtcaaataggatggccagggaatgccacactgagaaggtgacaccaaagcaaagacctacaggaggtgaagtggtgagccattcaggtcactaaaggaggcatgttcccaggagaggggacgacaatgcaaaggcaagaaggagcaccagcctgtgtgttgagaaaagcatggggacccaagcagctaaagtggaacacatgtaagaagaataaccgtaatgaggtctgagagacaactgggtgggaagtgtcttaatctgtttgtgttactataaaggaatatctgagtctgggtgatttataaagaaaaggaggtttgtttaggtcacaattctataggctgtacaaaaatcagcaccagtatctacatcaggtaaaggctggaggttgcttccactcatggcaaaaggggaagaggagccagtgtgtgc

SEQ ID NO: 57549 - DNA, 2915 bp, Homo sapiens
aagcctctccctcttcctctgctcccgcggggtctgtgctgagaataatggcccggttggcccgggacgagtggaatgattaatgatgttttgcagcagttttctacgtctgaaattttttatgtctctggaacccagaatttgctaagagatggaggaacctcagaaaagctatgtgaacacaatggaccttgagagagatgaacctctcaaaagcaccggccctcagatttctgttagtgaattttcttgccactgctgctacgacatcctggttaaccccaccaccttgaactgtggggcacagcttctgccgtcactgccttgctttatggtgggcatcttcaaagaaaacagaatgtccagaatgcagagaaaaatgggaaggtttccccaaagtcagtattctcctcagggatgccattgaaaagttatttcctgatgccattagactgagatttgaagacattcagcagaataatgacatagtcaaaagtcttgcagcctttcagaaatatgggaatgatcagattcctttagctcctaacacaggccgagcgaatcagcagatgggagggggattcttttccggtgtgctcacagctttaactggagtggcagtggtcctgctcgtctatcactggagcagcagggaatctgaacacgacctcctggtcccacaaggctgtggccaaatggacggcggaagaagttgtcctctggctggagcagctgggcccttgggcatctctttacagggaaaggtttttatctgaacgagtaaatggaaggttgcttttaactttgacagaggaagaattttccaagacgccctataccatagaaaacagcagccacaggagagccatcctcatggagctagaacgtgtcaaagcattaggcgtgaagcccccccagaatctctgggaatataaggctgtgaacccaggcaggtccctgttcctgctatacgccctcaagagctcccccaggctgagtctgctctacctgtacctgtttgactacaccgacaccttcctacctttcatccacaccatctgccctctgcaagaagacagctctggggaggacatcgtcaccaagcttctggatcttaaggagcctacgtggaagcagtggagagagttcctggtcaaatactccttccttccataccagctgattgctgagtttgcttgggactggttggaggtccattactggacatcacggtttctcatcatcaatgctatgttactctcagttctggaattattctccttttggagaatctggtcgagaagtgaactgaagaccgtgcctcagaggatgtggagccatttctggaaagtatcaacgcaggggctttttgtggccatgttctggcccctcatccctcagtttgtttgcaactgtttgttttactgggccctgtactttaacccaattattaacattgatcttgtggtcaaggaactccggcggctggaaacccaggtgttgtgactggcactgcccaggctgagactcttcaagtcccgctgacgtctgagctttgatgcttaagaggggtgaggcagggagcggacttcctattttctaccctcagtaaaacaaggtgctgctttgtatatcaaaagctccaaccatgtcctctccccctcagcctgtgggtggcacgagcaaggactgacatccgcacagggaggattgtctgtttggctgacacagcagcagcccttcccacccagccaccttcctcacagggactaggaggctcagtccccaacggctggcaagactcagggtcctcagtggacatggtgtgggtgacatcagaagggtgccacatcagtcccctccccaacctcagtgactgacagaggatccggatctcagagcctgagaccaggtttattggggcctggcctgtcctctaagtcaagtttaggaaaacaaggataagattctgtcataggcatagagagttgcacataaaaaataccgaagaaaacccaaaattcaatcaacaattctgtcttattgaagagttgctaggattcagagtaaaactcaaaggattcagtttgagcctagaatgatggttagacttgtagtcactgggcttttgttttgctttatggaaatcattgaaggtctggatccctttctctgaatggagagattgagagggatgtcgggcagttcccattagatttagtggccttcatgttattcagaattgttttgggtgatacctcacccctgtaatcccagcacttttgggtgggtgaggcaggccggatcacttgaagccagggactttcaagaccagcttggcccaacatggtgaaacctcatctctactaataatacaacaattagccaagtgtgatggcacatacctgtaatcccagctacttggaattggaaatcgcctgaacccaggaggcggaggttgcagggaggagattcaccactcacttcagcctggtgacagagggagctctgtcttaaaaaaaaaaaaaaaatcatctgtaaaataaattccgggatagtcgttttgttcaaggaaatgttttgtaaattgagctcacactatataatctttattgtcctatcctgatgtataatacagcaggtataattacaccaagcgctatagttataaatatggcatgaagtgaactatggccttttatttccttccagtgtgaacacagcaggtgtgagatgtcatcttggaagacaggccttgcagaaataggcctacatccaaaatattatcttgtgactccatgaaccattcattaaccctttgtatctttgagtgaaaattttactcaaaagttgcatctggaagttcgaagaaattacttgaaataaaaataaagatttctatatagataaaacct

SEQ ID NO: 57550 - DNA, 1070 bp, Homo sapiens
ttttcaaggaaatcaaatcttcaatgaatgaaaaactcagtgccatctggggccagggggtcaccggaccaggtggaaagtcagccagtatatgatgaggggctggaaggctgcagctcccagagtcaggtagagctggagacgctgccgggggacggggccccccatgctgtcggggcccagggctgctgtccgcaaagagcgcacaatgaagtacatgagcgccgatgaggtccaggccagcgccacgtagtagccatcgctgccgaacagcagccccgtgagcacactgaggatcattcccacgtatttgtagccactgtaggccagcaggtgaaaggtgctcaggtcactgcgcacggtggccaggtagaggcccaggagcagggccagcacctccatcaccacccacaccagcgctgtgcttgcacacaggcccagcacctccggggagaaccttttctgaatgcccagtgccatcccagccaggagcacgtaagtaatgaaggccatcgtggggatatagaggtcaggggcgttgaggtcttgccgggggggcagaggagcatcacgactgtactgcacttcccagttctggtgtgtgtaggggaagaccagcagccctagcttcttggccacgtaggctgtgtccacagcaaaaaaatacttgagtttgctcacagacacaaaacggtgcagctccttgtgcaccatgtccttcccatgggatgcgatggagctgccataggccatagccacattggccattgggtccccaagcaagtggttgacactgaaggccacgtctgctcctgtggctgggtatcccccgggctggctggaataaccaccgcttgtgtcatcgaagaggggagggggatccggggctgcccgggccctgtgcttggagccgtgggctccgtagcccgagtgataagccatggcccgcgacgctcgctgtccccgagggcccgctgcgccgcctcgtgggtacgaatactaatgaggcagctgctccgcgcccagggtaccgacccgaggccacccggccgcgcgacacgtcccccacc

SEQ ID NO: 57551 - DNA, 2503 bp, Homo sapiens
catttatatttgaaccaaggctttctgaaaacagggccttaatccaaaggaatgtctcatgctaggaattaacaactccaaggcaagacaggcccctggaggcagatggatttgtgctactctcagattatgtagtagctacctggatccttaatgacaccggcttgggggatggtgttggtaagataaagagcatgagccaccgcacccagcctgcattcctgtttttttaatggttttggagggtagcagtagagatggggtctcactatgttgcccagtctagtcttgaactcctgggctacagttacctcctacctcggcttccaaagtgctcggagttacaggtgtgagccactgtgcctagcctataatgatcattttaatgtttcccatgcactcatttagtttgaaccttcacagcaacccaatgaggtaatactcccatttcacatataatactgagagatgagttgcacaagattatacactgttaagtagcagagccagaatggacttcagaatcccaactacaatacaaatgtttatttaaataaagaagaaagctattgtacaaatatcactcttcaggtttagcttacagagccatggctatggattcttagctctgtaaggaagtgcttctataaattcttaggtttagagatgataccatctgggtacctttgcttgaaccgtgcaaccacatctgggtctagtaggtggatcccatccagttggtttccaagggtgatccagttgggttgcacattgtgtggtcgtccaaataactcaatcttgcgagtgccaggagatagtctttcaatcatgccatagatttcatctggtttatgactggtggaacgaacctcagctacgatcacatcacaatccagaccctggttgaagccttggggatttcctttgacaccaaccaagcagtgttccttcccatggttcaaccagtgacctgtacggcctgtccgaatgatgcgttgcagttgatttgtcttcacccaaataatttcatctacccgttcatacccccagagatttagacattctctccccaactccatggccctgcctgtgacccagaggaagagaaagccatcatcctgtagtacgggtatgttgagcctgcgcatctcatcatctgtcagggtcccatagggcagttccatgtgaatatcccagggtgggtcagccatcacaactgcaaacttgcccaagatactgacgtccaggtagcggatatcacaacagatcccactgaggtgggaagagtcggtctgcactggaatcacctccgacactctgtgtaagagcaagctcctggcttggcgtgtggtctttgctgccaggggcctcagaatccatgcaagcatcaatttcatagtgaacatacttgcaggtatccatgtggaaacatgtattaaggaaagagcagtcacctaaagactcatcagtgtgtttattgataattcgtctgaagtgcagcttgcgacagggtcgatcagcatcactggctttcatgcactcctccttggttccatagtcacagaattcttgcacttgggcccgacctcgagagcgaatttcaacaatggattgttccttggctgttgtagtaattaatagctctaggatctcctgactgaccttcttgctctgttgttccttagtggactgttggttcagaaggctctctatctccagatcaacatctgaggcagcatgtttccttgatttcttggctggctcctttgctggttccgatgctgaagagttcagaccagagactaacgaactggcaaaggcagctactgtagtcgagtcctgttctgcacgccgcttctgccctgtgacagtccctgctacctccccagggcccttcttttctgccacagcacccatcatggcagagagcttggaatggtcagcataggttacaagagtaggatgtgcatcatcttgtaggagacctcgctttacctcaatcaactcctgagctgcaaacttctgcaggaggctttctaccccatcttgagtggcaggagcatctggcgtggagatggcaagacagatggacacagcatcagtgggcaatgttaaggccagatcagagaggtggtgtagcaacttcttctctaactcaggatctgtagctaattcaggaactgctgaagctgtgctgggcttagggccaccagaggtgggtgcagtaggcactgggctgtcactacggaaggttggagacaatgctgcctctggattccgtagatccaagtgccccgagtcctgcttccgcctccgctgcagcctctcccgcagagagtccagctgcttcttgtgggcctggatagagctccacgtgtccgacatcctagtctcccagccctgacacctctcgaataaggcgcggcggactagcacctcccagcactcgctccaggatatagccaattctcacgcggacaccccgaaggctaaccggaaaatg

SEQ ID NO: 57552 - DNA, 2023 bp, Homo sapiens
  misc_feature (1)...(2023): n = a,t,c or g
ccggggccgagacgatggctgaccacaaccctgacagcgactccacgccgcgcacgctgctgcgacgcgtgctggatacagcggacccggcaccccgcggcgaccccggagtgctcgggctggagccggagagccctgcttgaaacggcttcccccaggaagttgagtggccaaacaaggacgatagccagagggcgttcccatggagccaggtctgttggcagatcggcccatattcaggccagtgggcacttggaggaacagacacctcggacgctgctgaagaacatcctactaactgccccagaatcttccatcctgatgcctgagtcggtagtgaagccagtgccagcaccgcaggcggtccaaccctccagacaagagagcagttgcggcagcctggagctgcaacttcctgagctcgagccccccacaaccctggctccaggtctgctggcccctggcaggaggaaacagaggctgagactgtcagtgtttcagcagggagtggaccaggggctgtctctctcccaagagcctcaagggaatgctgatgcctcttccctcaccagatccctcaacctgacctttgccacacctcttcagccacagtcagtgcagaggcctggcttggcccgcagacctccagcccgccgagctgtagacgtgggtgcctttttgcgggatctgcgagatacttccctggctcctccaaacattgtgttggaggacacccagccgttctctcagcccatggttggctcccccaacgtgtatcactccctgccctgcacgcctcacactggggctgaagacgctgagcaggctgccggtcgcaagacacagagcagtgggcctgggctgcagaagaatagtgagtgtgtggcactggtggcctggagccaaatttagcttgggtgagagttgacaatggtagttttccttcctcaagcccctctgtgcccctagagcaccctgggctgtggctgcctccttcatccaagagcagagtccatctttacccttctctgagctatgcagccttggcctgctgcgtctccggcctgtattctctccccttcactcaggccctgggaaaccagcccagtttctggcaggagaggcagaggaggtcaatgcctttgctctgggcttcctgagcaccagcagtggtgtctctggagaagatgaagtagagcccttacacgatggagttgaagaggcagagaaaaagatggaagaagaaggtgtgagtgtgagtgaaatggaggcaacaggagcacaaggacccagcagggtagaagaggctgagggacacacagaggtgacagaagcagagggatcccaggggactgctgaggctgacgggccaggagcatcttcaggggatnaggatgcctctggaggngcagcaagtccagagtcggcctccagcacccctgagtctctccaggccaggcgacatcatcagtttcttgagccagccccagcgcctggtgctgcagtcttatcttcagagcctgcagagcctctgttggtcaggcatccccctaggccccggaccaccggccccaggccccggcaagatccccacaaggctggactgagccactatgtgaaactctttagcttctatgccaagatgcccatggagaggaaggctcttgagatggtggagaagtgcctagataaatatttccagcatctttgtgatgatctggaggtatttgctgctcatgctggccgcaagactgtgaagccagaggacctggagctgctgatgcggcggcagggcctggtcactgaccaagtctcactgcacgtgctagtggagcggcacctgcccctggagtaccggcagctgctcatcccctgtgcatacagtggcaactctgtcttccctgcccagtagtggccaggcttcaacactttccctgtccccacctggggactcttgcccccacatatttctccaggtctcctccccacccccccagcatcaataaagtgtcataaacagaaa

SEQ ID NO: 57553 - DNA, 614 bp, Homo sapiens
aagtgttggcagaaataagttgcaaaatcatcaggctgcaggctgctgatggtgagagtgaaatctgtcccagatccactgccactgaaccttgatgggaccccactgtgcaaactggatgcagcatagatcaggagtttaggggctttccctggtttctgctgataccaggccaaccacctattgatatgctgactggcccggcaagtgatggtgactctgtctcctacagatgcagacagggaggatggagactgggtcatctggatgtcacatctggcacctgggagccagagcagcaggagccccaggagctgagcggggaccctcatggtcgacgcggccgcgaattccagatctatgaatcgtagatactgaaaaaccccgcaagttcacttcaactgtgcatcgtgcaccatctcaatttctttcatttatacatcgttttgccttcttttatgtaactatactcctctaagtttcaatcttggccatgtaacctctgatctatagaattttttaaatgactagaattaatgcccatcttttttttggacctaaattcttcatgaaaatatattacgagggcttattcagaagctttggcttttcgc

SEQ ID NO: 57554 - DNA, 2446 bp, Homo sapiens
  misc_feature (1)...(2446): n = a,t,c or g
ttatgtttaaaattaatgactttattgacacaaactttgcaatgaaaagtggtatcctaataggatagtaaggattagtttctgtctcatacatacatgaaaaagtagccagatgcatttttagtcacatggtttaacttctggttgctgtctccgtgaaatccagattgttctggggagggccagatcatgtgccctgcatttccttctcccctgtaagtgagaaagtgtttctatataaaacagagacactttcttaaggtgataaattccaaacaacatgcagcagtgaactgatgcagaaacaaagctgtaaagagaagccacaaagcacatccccagggagaaagagcccttgaacttgcaggatcactgccaacctttggcagctgggggctcctgctgagtaatgccagtggggacatatgaatcacaggtttttcttttatcttattattgttaaaaacattttttagaacataaagttcctaaaagccctttctcaaagaatcacaaaatgatgaaggtttagaaaaactatagttgcgtgtatggtaaagtcttgtacattgattagaacacctagtttaagacacaaacctaccctgaatataaaagtttccattgcagagtgatttgcaacacacactataccttaagggtctaattcantctcctagttataagtcactgttagattcaggatagatagtcacgactaaccagaccccaaatccctcaacatctgcatagtacctggcacaggatggacatttaatgttttgtgaataaatatacaatctgccaatggaaggaaggaaggaaaaatgacactacccacttgtgtttgaagaataacagagttagcagataaggaggttgcgtatctgacttttgacctgcatgtcagttctctggactatgttacataaacataacaccaataggctgcctatttctgctaaacatgggaatttattgatatagtttggcacaactttagtcctatctttcccaatcccagggcatgttaacaatccttgaaaaatcatgctacattactttggaggaaaatacttccagatgaacatgtttcaagacatactagaaaattattcctatcaaaacatcctttttctgtgtcagctacctcatttctaatgcagtgcacatcaatctaatgtcagtatgaatacacatcaaccaggtgctggctttctaaagtgattcctttgcagatgccaaaatgacagtcctggggcagtgtacagagaggccaaggggaagccatgcctgctgccacatgtctctggatcatctccctctcctacgcagtgtttcaatctttggtttaacattggcaagtggaccccgataggaggaggggaaggacagttcaaggaaggacaagcaaagggaactgggaaaagctatgccaaaattgcaatgtcctagctggagccctgaggggtatcccttatttggatgcattggcccacaagcatggtgacatttaaggactggaggcccaacatggacactggaataggaggactttcccaggcagatgaggagcaggtatgactgccttccacagacacctccccaaagacatccatgggcagtgggttggtgccatgggaaactggatccgatctgtctcataccaagctaaggaaacaaggataacaaggagttttccctgtacccttggattttttccaatatgtgggttttagagttggatgaaagcccagcttttaagtgaaccctggtaagatttgtaatgacaatatttaaaatgaaaagaaggaaagaataagcttgccctgaaacagaatacactatccatgggcaggagagttaatagccactaaggtgtgaaccctttcaccccaggaaaatgccattccctacttttcctgtttccataaactgacctgtaagcttttaaactcaactacttttaacacccagacccgtaattaacgggagttgccaaaagagacaaactgaaactgcaacatttgcagtttattaaacatatgtaaagcactgtgcccaatacatttacatgaataaagtagaaggctccagaaggtccccaacaaatcaggcagcagtttgcctgcccaggtaagacagtcttgcccagggactcagtagaattcaggtccagcaaggggcagccacttcttcaaggttctttgatgggatccagtgccgtgaaggacactgaagaagtccatctgcccttctgcttggactctctgctagttgacacagttctttgtgattcttcgacttctgtccatctgttggatgctatctgttacattaatggtgacttcttttgcaggcattctcttagcatctcttttagcctctctggtccgaaggccactctgcttctgggccagagggcctcagctgcggctctggggat

SEQ ID NO: 57555 - DNA, 2320 bp, Homo sapiens
gtgttgcttttttcctttttttttttttttcttaaaggagtgagggcatggaaaatatacagcacaccaatgaaacaaaatgtcaaaaaaaaatacaaaaaaatagaaaatagaaaaatgtatttacaagtagtacgttactatgatgagaaagcacaaagacacctgctgctataatacatgcattggctcgagaagaaactacggaacaccctgcgagggagaagcctagaaaagaaagaaagggccaaaaggtttgaactcttcatccctaatttgctacactgatcaaaaccaagtaagggctcctgaagtccatgagtctatcatcaatcagcacaaatgctatactagtttgtaactgcggggtcagttgtgaaggggaaggacagcagcttatccatatacaaggaagccacagtaaactgctcgacatgctcaaaacgacagcaagcccctgtcagctacacagcgtgatcttagcaggatttcatttttgtttattcatatatatctatgtgtgtgtttatatatatatatgtacgtatgtataaaaaccgtgcccttgttcactgccaacacaacatctgggtggacatgaactcattacaacaaattcttatgtggatgttgtaagaagtcactcaatgtctgtggatttaataagtcacttcacaccacagaaaatatttaataaatccaaaaaaaggaaagaagaatataacgacagaagagcttctgtctcagttctctgaaactgagtcccccataggaaactggtcccaaagttctcgaggggtcattgaagaaacttcggtttgctaatttttttcatccttttagtgttcaaaagttctagaaagactcctcgctgttttcagtttttaaacagtcaaatctccatctcccccagaaggtaacagtctggtgcagatccataaaaacgtgggaggaaggcgcgctggggagaggcctgtccctcttggaaggggccccacctctacatccgcaggaagagaaggaaccaaacagggctccagcacctctctcctgcaaacgagctccctttaaatgccaaatccagtcacacggcagttccttaaacacaggtacatttctgagtaccaggccagctctaagaggaaacaaaccatgagttgagagaaaaggactatgacggccatctggtcacttttccacgtgatccatcatacttccaggaatcgggagctgctggacttggagtggaaaggctcagaccacatccgccggaggtcgccctttaaataggccatcgtgaggagtggcaataaagtaaatggcaccaaatagagaagggcgggctgggccggccccggtgaaatgcgagacgcccacagtagcagtgagcaggcctacaaagtatccgatgagggtgcagtgaaagtaggagaccttctgcatgcgcccggagatgttggcaggtccaggggccccacaggagtccccactggcttgctttttgtagttgtcatagcgaaggacaaagcatagtaggagaccaggcataacgatgtctccgatgcccaacatggagaagtggctgccagtggagcttgggaagaccagttttccaggcagagacaggcgaggaacatcacgcccaacattgggccccaggtggagcttccgggatagaacgtcaaggggattgtcagcccggctgagtggccaccttcacccatgacgttgcctattgaaagatgtaggctgagaaaaataccccaaaagacatccatagatgagaagccctgagagaaagcaggcaggagaccttgaggctcggcaggcggacaaaggcgatcatggcgacacagaagcccatggcccagtgccatcccatgagaagccaatggccagtgagaacccccagatgaggacgagcatgacagacagagagaatgacagcaactcagcagcagtgaaacgtcccacagcaaccaaaggaaatcttgttctgaggtgagcagggtcttgttaaatactggcacatcgggaggagaagaaaagcaaaagctatcgttgcaagaactgctgtacatattgtaaaaactacttgaactgagtcaaagaagaagaacattactaaaagagagacagatgctccaattggaaggaacagagcctgggtagagtcaattgtttggatgctattattggtgctgttgccattgaaagacccagaagaactattactgtctttctccttatcttgattttcaaagtccatattaagggacctgaaactaccatagactataagaagaatggaaatcagaat

SEQ ID NO: 57556 - DNA, 1814 bp, Homo sapiens
tttttttttttaacatctttacattttaatgaaaaagtagataatctatttgaaaagtacaaactcaattgcaatttcaagaaaaaaatatgtatttatataccataaataagcaaaattggactctgaagccctaatacttcaaaagcattcatcctattccataaaaacctagtattattcagcaacagtactactactgatttaaaaatagaaagcaagtctatcttcacatgtagttctttgtctttaatttgtacaactcaccaaggttattttcattcttagcacccggggttcaccagggtgtgatccaaagcaaaccagcataggtttttaacagaaaatctttgccaggaacttcatgacctgtattttcctcacctaggaagaagctgtccccactcgcatgattttgaacagtgtgttgatgttattgcttcgaattgcatcccgacaagcagtgatcacctggttctttggttttccaacccgcagacgacctgctctttgaattgcttgatttactgctttgaggtttcccaacagctctgtgtgattgttacagcgaattttatatccatttagcaagtctctattaaggtcatagagttccatataacgactcttcattgttttcatgtccctcatcagacgagcatcctcgagctccgaccagcaaacttcggatcaaattagaatgatcagccatatcagcactgagcttctgatgcactgaatgatattcatccaccttaactagcacctttcgtaattcctcaaaatagacaggaaaatccgcttctacttgaaggtcttcaatagcaaaaaatgatgccattgactggatgatatcaccagccaaatcaatatcatcagtatttatagtgatctctccactaagttttatttttatatgcaggtggccgccattccgtaaagatgtgaaaccacacttgaaatggagcattctgaatgtgagtgtcttctggtaacagaaagttctgaccgagccatacaacaaccctctgtgcccgttctgcaatggtaaagttaacataactgattggctcactggcagggtccaggctggtcagcgcatacatggagaatcgagggagctgtcttgtcgattcaaatacatgaaactgggtgctgcttctgtaacccacgaatgccttcaagtgcagatccacagggacatctttgggaggcacaatagggatgcagatggaactggagaggttgtgaatgctgggatgtaccacgtggctttcacctgtaaaaattccttctgcaaaaatcaatactgctcggatgatggtgtcattagaagtggaaatgcgtaattctgtatgagcagtttgggtctcattccccaggctgactgagagcgtggtgtggagcctggtattggctgggattatgccccgatgcccatcagcctcgttcagtggactggccaattcagccttggcattttcctcatagttacggagttccagcaacagattctgcttcttctgactcagctctcggatcaggtcctgctctgcactggtgtccatgaggttgcccctcatctcagccgtgccaggcaggtagccccggatttccccatccactgagcagcagattaactgtatgtggccatccatccggtaatctccctctaccacaccggcaattgcagaagaaaaattgtccttaaagatgacctccccagttcggtcacttcgagcatcaaccttcccattggaccaaccagttatcagttcattcactccatcagaattaaggtcaaaagcatgaat

SEQ ID NO: 57557 - DNA, 1366 bp, Homo sapiens; identical to SEQ ID NO: 14176

SEQ ID NO: 57558 - DNA, 1035 bp, Homo sapiens
tttttttttttctcagaaagaaacatttaataggaacttacaaacagaagcaatgtttctagcagccactaaatggcggcactcaccctcccaaaagtaccctttatataacaagcatttttggcaaaacgtgtagctagtcatatctcagactttcttgtgaaacacctgaacactggggaggttagataagcatctttatgaggggttatctgtactaccggcactgtttaaagacattgctgcagaatatcttggtatgcaggagtcaaacagcagtcatcatgccagctgctcttcaagatgacatcactcttacaatgcaacaggctgttttcctacactcgacccctcgaaaccagtccttaaaatcttacatgcctgcttcttctgtgatagtccctggacctagagggagggtgcttgatattgtatggctttagtagtattgcaatggaaatggaaaacagattgggtccagtggaattccacaagagggagatttgcaggcttggttgaatcatctatatagtcttcataataccatgaagaagtaaaacaatgagaaatacataacattaataattggagtagtagaaatctaaataaagtaatatgatgtttaagatatcccttgccttaatagcctataaatatgggaagagtgactatcatcttctgaatttcaagacccatatattccgacagtttcagtaatatgaagattttggaaattctaaaaggttttgagatcatttctaatcaagcatttagctcttatgttagcattaattgcagccccaacttttgcaacttattgacctgcacatttttctgagcacttactttccttatgtcagatgtagggaatcatgagatgaacaagttttggttcctgcactgtagcaaatgaatttaggcaaagatatgaaagatgaaaaaaccctatgactatatgacttttagtgtcatgaaactgattactatataatcttgttattcttcccattgcttgactttaaaatagggcaagtt

SEQ ID NO: 57559 - DNA, 1806 bp, Homo sapiens
tttttttttttttaatatcaaaatatattttattctggacctctttcagatctgattcaaattacagttgtcaaagcaatacaatgcaaaggggaactgcaacaacaacaacaacaagaaatgtgcctagaaaggataaaagggtcactggggacaaatcattgtgatgtggaactaaaatacgtcgtaagtgtaattaacatggtccaggacagcacagaacatctacatcagtcttccttacacaataatcatgaaaactgaacaatgaagttctttaacatgtacaaaaacctgtcatgggctgggtttacacttttacaacagttttaaagttaactggataactaaagaaatgatgcagacattttaatccagtgctataggtaggctcacagaattagacccaaaggatttgtaaaaacaaaaatggaaacagtatagctacaatgtcaaagtcaggaaagaagaaaatttacttccgtattcaaggattacagagctacaaatgcagtctgtgtgtttttgtttgtaatgagatggataagtacatcagactagatacaacatgcagaatgttttcctgaacttatccggaaattccaaagaaaacatcatgaaacagcttacaaaaaaaaaaaaaaatatatgccctagttattcaccctgcttcaacactgtcaacgtaaaggcagaaataaagcaagctatcaatacctcagaactactgatataagacatcaaatttctaaatcagtgtattaaaaaagtgaacacttcctctttcttctctcttctacatttaactagaatcatgtttaaaaaaaactgatattaaatgtgacacttcagagctactactggaaggagtaattcataacttccctaccctccttccatccctgctgattcaggagaagggggaaaaaacaaagaaaacaaaacgaaaaaccaaccagggtctcttgtagatttgctgctattccacaaaatgttggcatttgctgccatgccacaatgttggtccactgaaataggatttctgcggaaactgtcaacagtagtaattcaccatatgcaagtaccatccttatcatgcgagaataatcacaggttctgtagaaatgtacaatgtgcttaagataatgaaaattgtagcgctgcatttgagatttatttctctacttagctagtaaaacttgtcatttttgctcacttaagtatgatcatttgtgattcctttaaatagcaaaaatgcacagtcctctttaggcctctactcaataatagtttacattactcttaacaaaatcattctacataaacagatagctccttaaaaatagtactctctcattaaatctaatttgacagaaagaagtttaagggaaaaaggagtgctttgtaagtgaaaaagtacaaatctttggcctttctcttgacattttcgtatgtcaaaaagcaaaaaaccttcatgtatttcaatctagtgattactttttgcaccataatttgttttttacaccacaaaaggaggcactttcagtatctgtaaaaggtatttaatcctaaaacatacttacctagagaataattaaaacagaattcaatacaatctagtatctattaggaaattaagagttatcacttctaaaagtcatttgaaagtcaatgatgttatctggtcaatggcaggaaatgggaactggaacaaatataagaacttatgggatttcctacacggagacaaaaaaagatattcctttatgttgtttaaaagtggcagctgctctttctttattccat

SEQ ID NO: 57560 - DNA, 2282 bp, Homo sapiens
ggcacgagcccgtgcggaggcggtgcggagcatttcggctctgagcggctgggcgaccggcgcgtcgtgcggggctgcggcggagcctccttaaggaaggtgcaagaggttggcagcttcgattgaagcacatcgaccggcgacagcagccaggagtcatgagcgacagcggcgagcagaactacggcgagcgggttaatgttgaagaaggaaaatgcggaagtcgtcatttgacaagttttataaatgagtatttgaagctcaggaataagtgaagctgaaatttgaaaaaataaaagaaagaatgcatgctaattatcagaccagaagtcccacttgtagaatattgagcaatttgtgtgaagtggggaagatgaaagaagtcagaatttgaaacggaagaatgaagaaaagaaataaaaatgaagttaagataagaagtaatctggaatcagaaagcactacgctaagaatcccgttctgcttccagaagtggaagtgctcacggatcggggaaatctgcaaggcatacccctgcaaggtctcgctccaaggaagattccaggcgttccagatcaaagtccaggtcccgatctgaatctaggtctagatccagaagaagctcccgaaggcattatacccggtcacggtctcgctcccgctcccatagacgatcacgtagcaggtcttacagtcgagattatcgtagacggcacagccacagccattctcccatgtctactcgcaggcgtcatgttgggaatcgggcaaatcctgatcctaactgttgtcttggagtatttgggctgagcttgtacaccacagaaagagatctaagagaagtgttctctaaatatggtcccattgccgatgtgtctattgtatatgaccagcagtctaggcgttcaagaggatttgcctttgtatattttgaaaatgtagatgatgccaaggaagctaaagaacgtgccaatggaatggagcttgatgggcgtaggatcagagttgatttctctataacaaaaagaccacatacgccaacaccaggaatttacatggggagacctacctatggcagctctcgccgtcgggattactatgacagaggatatgatcggggctatgatgatcgggactactatagcagatcatacagaggaggaggtggaggaggaggaggatggagagctgcccaagacagggatcagatttatagaaggcggtcaccttctccttactatagtcgtggaggatacagatcacgttccagatctcgatcatactcacctcgtcgctattaaagcatgaagactttctgaaacctgccctagagctgggatattgtttgtgggcaatattttttattgtctcttgtttaaaaagtgaacagtgcctagtgaagttaggtgacttttacaccttttacgatgactacttttggtggagttgaaatgctgttttcattctgcatttgtgtagtttggtgctttgttccaagttaagtgttttcagaaaagtatgttttgcatgtatttttttacagtctaaattttgactgctgagaagtttctattgtacaaaacttcatttaaaaggtttttctactgaatccagggtattctgaagatcgaagcctgtgtaaaatgctaccaaatggcaaaaagcaacaataaacagtttgatttttacttttctttctaacatatcaatgcttagcagaactattcagattgtcagtagtaaatttaaagacaaatgcccgttttcctccagtccatgaaacataccatacttatatacctgcaactaagtgtttaaaattatgctctgtaactctgtactgctagtattagaactaaaaatcttaaaatacagccagtgcttaatgcttatatcaatgtggatttgtcggcttttatgtaatctgtaatatgtatagcaggaaatacgaagagttacacagtgtatgccttaaaaggctgtttcttaaaggtgttacaaggggataatggtatttcaactagttatcagcaagtgacaatacattccaccacaaatacactcttgttcttctagcttttagactatatgaaaaaaccgggtgcttcaaagtacatgataagggaacactatacctgtcatggatgaactgaagactttgcctgttcattttttaaatattattttcaggtcctttgcttaccaaaggaggcccaatttcactcaaatgttttgagaactgtgtttaaataaacgcaaatgaaaagaaaaaaaaaaaaaaa

SEQ ID NO: 57561 - DNA, 445 bp, Homo sapiens
  misc_feature (1)...(445): n = a,t,c or g
ttnnnnanccccttgacatgattacgaatttaatacgactcactatagggaatttggccctcgaggccaagaattcggcacgagcgtaactgccctgcattgtaaagtggtatgccttatccagaatggaagtttcaaggaagccttgaatgtcatcaatactcacaccaaagtgttagccaataactctctctcctttgaaaaggcatattgcgagtacaggctgaacagaattgagaatgccttgaagacaatagaaagtgccaaccagcagacagacaaactgaaggagctttatggacaagtgttataccgtttggaacgctatgatgaatgcttagcagtgtatagagatctcgtccgaaactcccaagatgattatgatgaggagaggaaaacaaacctttcagcagttgttgcagctcaaagcaattgggaaaaagtg

SEQ ID NO: 57562 - DNA, 1608 bp, Homo sapiens
  misc_feature (1)...(1608): n = a,t,c or g
ttttttttttttctcacttccctttttatttcctctaagacttgcaagcagcagcaccagagagggaacctgccctcctggccctggaaggggccgagcccccaacccctaacccaggacacagctggcacctcaggcccctttccttctgaaaggagggctgtgtctctctcacattcacacatacacagacacatgcatgtgtgcacactcatggcacatgggacctcaggggtagcctgtttgccgatccccccaagaggtaccaggaggcagaccgctagaaggagataagaggcaccctggtctcctccaacccaaggaggaagaaagctcaacccctctaggatagggactgtcttcagtcaatggagcgttgacttagggggcgtttttgaaggttttttttcctcctttttgcagtctttacaaaaatagaacttctcttggtatttataaatctacggccatggctctatgtgcatgttacaggtagaaaagccatatggggcactccttttggttgctcaggccttgattgcctgtcatccaggtcccttggtctgagaagtctatgcggtcacctcagagccgctaagcaccttcagtgggcccatcccattggcggcgtactcctgctggagccgggcacggtaatagaagaggtaggaaggcaacaggaatccccaggagtgagaatagcaggaggccccagattcacctttagggcaaggagagagaaacagagtcaagtaggtagtcatctgcccttagccctcccacagggagaagaaaggcggccatttttctccaggtcctgagccagaataaatacagctagtacttattatgtgtagtcattgttccaccagtatctcacttaatgttcagcaattctgcaaagtggctgagatgagacttctcaggtataacaagtggcagggcctggtgggtgcccacaccatatggcactcactaggtaggtatgaggaaggcacagcactgtaggagtctgggctggtcaggctgctcccgaaatggggccttctgggctcacccctctgacctttggagatgttaaccaatgggatcccgttcagggtggcgagaggaggctctcagacacagttcaaggaactgggatgcacagcctggtggacagaaggcttggaaggcccaggacacgcgggctctgactcggttcacatcccgactgctgcattactcactgtgtgactttgggcaaataatggcaattcttactgagtgcctccttctcantggctgntncagtacgnatatnnaanntancangnncgncngccntgngatgnctnncaaccgngtccncgcnatttntcacntanaangaacngatntcntnaccgttcannannanaannaatntaaacccnngtggccccacagggcagaatgaaagatcagcgtcagggaggcagatgagttcaatgtaaggaaaagacttactaacagcagcagggctgcctcgtgcaggagtgggtgccctaccactgagggtatctaagctaagagggaagggtcccctttcaggggtgctggagacaggatcccacactaggtagaact

SEQ ID NO: 57563 - DNA, 2035 bp, Homo sapiens
gtttttggggcttatatttttaaaacatagaaattgccttttgttcatttgaaaagtaagtatgttgtatctgaaaaagggctctgcctctgctctccctcgcttccttgtaaccaatctccaaacgaatctctcctggcaccgcccccttccttatatagggtcactgtccccggggccacctctgcctccaccctgctgtcaccactgccctgggccaaggcacccagggactcccagaaagcgcgagagccagcaataaggccccactcagccttgagactggtgggtcacaacttccctgtcagagtcgcctgctggggttgaagggggcaatggattgtcattgtttgaattgtttgggttaggttataaggaggaacttgggaagtagaaagtgacttgaccatgtgcatccttggtagcttcctgtaactaacaaatggaacagagagcacacccccgccccaccccaccccaagcagatgttcccgtcagcgctgccctgagtcagtcggtcccccgtttctgctctcctcccttttgtgttcctgctcacttcaagcttcttccatggactttccagggcacagtcatctctagcccccaaatcatctcttcatcctctgtgtgtgcatttttttaaccaaatgaaatagacaagaaagtcatactttggggcagcagaatttctaatttagtagaatcactgtatagagatagatgttgatatatatgtttgtgtatatatatcaaaccaaattggataggagaagtatagctttacagatgaggagaaggagctctttagaggtcggagtcaagactggtgtcttggacgtgcatgggctgtgtcccaggccactccgcacacatggggctgaggcgtggcgccgggcccttgtcatccacctcaccacggcagagccagcaggccctgtagggtggctgctgctgtctcactgggtcccagcttcaagcgcatcagtgggtgacgggggcaacaaatcagagtgactggaagtttccatcccgttttgctttgaccacgtgtactgagctgcagcctctgatactctgtcacgtttccaaaaatggtatccattaggatagaaagagaatggttctgcagaaatgtttacctttcaactgctcatgaattcaggacactggatagaaagactcactccccaaaatgagaacagggaagaggagacccggcgacactaagtcaccaggtccaaggaacgtggctccctccccagggtcatctcacctagatctttctctcccaggtcatctcagctcaatctcaataaccctatgaaagccctggtctgttgtgttccttcaccgtacggtttctgtaataaaaagtgttaatccatgttaatctgtgtgaaaattattgcgtgcaacagtattttctcgtgtacctctttttcctatgtgaattgtccctcttttttatttataaatgtctacttttgtttttttaaagacaaaccaatgtgttgtagacctatatgtaacctattccttagtctcatattataggtatgttataagaatggatattttacttggctttagaatgttttacaagaaaactaattccttaactgatcaagtccttgctactaaaatgcttgtgtttttcatcatgacgtcgtgtgcttctaaattaatcattttcgttgtagaaaaatggagtgaatttatattagtcttggaaactaataatagcattgtaaatttatgagatgattttaacagaaaaaatatagaagaatatagttattttaattgtaatattactaactgtagggtgagaaaaaggggggggggtccccattgtggtgaactatgttatagcttgttactcatagtttctttttgatcattttttcggtctccgaggtgaaatgacttattaattaaaatttgtaaactcacatatgcatattgtatatgtgtagaaatgtaatcacactttgtcttggaattacattaaactgtttgaaatcactgtaaa

SEQ ID NO: 57564 - DNA, 1649 bp, Homo sapiens
tctgaagttggggtttaagattcttgcccgtgagagcgaacgagcctgccgtgcttctgattttgaaacacctgggtctgggcttcccgggcgagcggtggaacctgtgagaagtttctacaatggtgggctcagctctcaggagaggtgcccatgcatatgtctacctggtgagtaaggccagtcacatctccagaggccatcagcaccaggcctggggatcgaggcctcctgcagcagagtgtgccacccaaagagctccaggcagtgtggtggagctgctgggcaaatcctaccctcaggacgaccacagcaacctcacccggaaggtcctcaccagagttggcaggaacctgcacaaccagcagcatcaccctctgtggctgatcaaggagagggtgaaggagcacttctacaagcagtatgtgggccgctttgggaccccgttgttctcggtctacgacaacctttctccagtggtcacgacctggcagaactttgacagcctgctcatcccagctgatcaccccagcaggaagaagggggacaactattacctgaatcggactcacatgctgagagcgcacacgtctgcacaccagtgggacttgctgcacgcgggactggatgccttcctggtggtgggtgatgtctacaggcgtgaccagatcgactcccagcactaccctattttccaccagctggaggccgtgcggctcttctccaagcatgagttatttgctggtataaaggatggagaaagcctgcagctctttgaacaaagttctcgctctgcgcataaacaagagacacacaccatggaggccgtgaagcttgtagagtttgatcttaagcaaacgcttaccaggctcatggcacatctttttggagatgagctggagataagatgggtagactgctacttcccttttacacatccttcctttgagatggagatcaactttcatggagaatggctggaagttcttggctgcggggtgatggaacaacaactggtcaattcagctggtgctcaagaccgaatcggctgggcttttggcctaggattagaaaggcttgccatgatcctctacgacatccctgatatccgtctcttctggtgtgaggacgagcgcttcctgaagcagttctgtgtatccaacattaatcagaaggtgaagtttcagcctcttagcaaatatccggctgtgatcaatgatatttcattctggttgccctctgagaattacgcagaaaatgatttcctatgacttagtcccgaaacaattggaggaagacctggtggaaaaggttgatcctccatagacaagtttgtacatcccaaagacgcacaagaccagccactgctaccgcatcacgtaccgccacatggaacggactctgtcccagagagaggtcaggcacatccaccaggccttgcaggaggctgcagtccagctgttgggtgtggagggcaggttctgatgtcaccacttcactccaggctgcagccctcttggggctccaggatttgctgaaagagaaaaagatatggtttgtgaactggggcatcaatcatcttttgataaatggatcagttttaggactttcagaaaataaaagatcgctcttgaaaagctaaaaaaaaa

SEQ ID NO: 57565 - DNA, 455 bp, Homo sapiens
ccccctatggaaaagcagtggcctgtgaagctgtttctttaaagtaaaaccccttttgaaggttagtctggggtgcactttactgttacatagggagtagattttgtttcttgatggttcgttgagtggtagagaggttaaaggtagaactaacaaatgtagaactaaaaagcatctgaaacttttagcaaaccagtaatatttagaggcttctgcccactctgggtaggcatttttatcttgtatacccataccagcttttcacatcctgtttcttgagaatacataaagagcacatttctccacattatcaggaaaacaatttgaagcacaggtcttgtgaattgggaagaccactagtattgccattagctgcttatttgtgtgtgtgttggaggatggattataatccaagtgtattcatattctcacactttaaccaaaaaaaaaaaaaa

SEQ ID NO: 57566 - DNA, 2843 bp, Homo sapiens
cggccactaggtactctgatattccgtactaaacacgtctgcaagtcaagatgtcgcacccgtccccccaagccaagccctccaaccccagtaaccctcgagtcttctttgacgtggacatcggaggggagcgagttggtcgaattgtcttagaattgtttgcagatatcgtacccaaaactgcggaaaattttcgtgcactgtgtacaggagaaaaaggcattggacacacgactggggaaacctctccatttcaaaggatgcccttttcatcgaattattaagaaatttatgattcagggtggagacttctcaaatcagaatgggacaggtggagaaagtatttatggtgaaaaatttgaagatgaaaatttccattacaagcatgatcgggagggtttactgagcatggcaaatgcaggccgcaacacaaacggttctcagttttttatcacaacagttccaactcctcatttggatgggaaacatgtggtgtttggccaagtaattaaaggaataggagtggcaaggatattggaaaatgtggaagtgaaaggtgaaaaacctgctaaattgtgcgttattgcagaatgtggagaattgaaggaaggagatgacgggggaatattcccaaaagatggctctggcgacagtcatccagatttccctgaggatgcggatatagatttaaaagatgtagataaaattttattaataacagaagacttaaaaaacattggaaatacttttttcaaatcccagaactgggagatggctattaaaaaatatgcagaagttttaagatacgtggacagttcaaaggctgttattgagacagcagatagagccaagctgcaacctatagctttaagctgtgtactgaatattggtgcttgtaaactgaagatgtcaaattggcagggagcaattgacagttgtttagaggctcttgaactagacccatcaaataccaaagcattgtaccgcagagctcaaggatggcaaggattaaaagaatatgatcaagcattggctgatcttaagaaagctcaggggatagcaccagaagataaagctatccaggcagaattgctgaaagtcaaacaaaagataaaggcacagaaagataaagagaaggcagtatatgcaaaaatgtttgcttagaaaggattcagttttgcttattgtgtgttgattgtataaatgcaataagaaaatgtaaaggtttttgtctatgaatatgatccctaatgtgtttcttttgacaccttagttccttactgtttacagtttaggagtactgataggggttcatgcttaataaacatgtcacaatacagtaagtaaagtggttttgtttggtttctttgagatggagtcttgctctggtcacccaggctggagtgcggtggcgcaatctcggctcactgcatcctctgcctcccgggttcaagcaattctcctgcctcagcttcccaagtggctgggattacaggcacgtgccgccacgcccagctaatttttgtatttttagtagagatggggtttcgccatattggtcacgtcacgttggtcttgaactcctgaccttgtgatccaccccgccttggcctcccaaagtgctgggattacaggtgtgagccaccgtgcccggccaagtaaaatgttttttaaaatggttatgtgcattattcataaaaaataatggtgtccagtctttttaaacttgtaaagacacatcttattgaataaagagatgagagcttaagtttgtatattgtttccttcgattctttgatgtatccatggtggatgatgctaggttttcatacttatagataatacacacacacacacacacacaatcttgttcagggatgggcatacttcttctgcaagggccagatcataaagtttttaggctttgtagaccatgtaatgtcacacccactcacctgcacagttgtaattcaaaattagccatagacaatgtgtaaccaatgggtattgctgtgtttcaataaaactttagtctagaatatatattcatttttatatttgattacttaactttggcaagtcaaatgtaaagtccagtagtgaattttgctcttggtactgaatctctgaagaactgaagaggtaggaagatgctgcattcttataaaggttatttaaaagcaatacccgtaatttctttatgggacaatcttacatatagtataaaatttttatttgataatcattttgtgactattctgttcagtaatatgcagaaagacattctgaaatctgttaatctctaaacattttaacgttagcttgccatacttgaaagaaactggctagctgcagtttacattccattgtaagcaggtcctcctccaccttcaggtaccacccagttaatattctgacttggatctttaatatcacatgttttacaatgtacacagttctgagcatttatctgtaaccgaaatccatcaccttgttccacaggtacaaattcataaactcctgaaaagtaaaaataaataatattgaagtgcctaactttaaaaaatttttaaattcaaaagtaaaaattaaggaaagagtagccacagaaaccttaaaggttgctttctgaatgcttacccatagagattatgaagaccttggtgcattgctattgatgtgagtgtaaattacatgtacataataaaaggaggtacagcggtattcaactgagttgtctcactatcaagggtactcgacactgagtgtttgagttccacacaacctcgaagtcctcccttattcacagtcatcctctcattcacaggggacaagttccaaga

SEQ ID NO: 57567 - DNA, 1388 bp, Homo sapiens
agctatgacatgattacgaatttaatacgactcactatagggaatttggccctcgaggccaagaattcggcacgagcggcacgagggccaatgttggcatgaggttcttgctctacttccagtgttttgattccactgggagaatttggcctagtgtgtggctttggatgaatccgtgtagagagaggtgagcttgtcctgttacagatgctgtcagacatagcgatagtaggcacctagggaggaagtggccgttagttttacactgactttttaagaatggagaatgcacgtgggtttctgttgcggatgattcatagtaagcaagcggttgatgctgttaataccggccccacccgattgacattaagtttattcagcttttaaaaagatgaagaactaaggggaacaaatttaagtttgttgcaacttagccacacatgcttccctggtaccagctggaatcagcagctcacaggcatcttcaggacacttcagtgtatatgacacagtactttgttagcgtctgcgtgtgtatggaaagttgacaaaaaatggcatgaaaagatcatgattggattttcttttaaacctgcccttctgtaaaaaatagtttatatatttttaaattagtaggtatgtgtggcttccttttttcctaacattcccagcaaatttttgctgctaagactatcactgttaaagtgaaaattacaggggaaaaatgtgatgaatataccgtaactcaaaatgtgatattttcttaaaatcactcttttatgctttaggaactggttggtctccactttgattattagtgtaaagagcctgagtatacgtggatttcattgtaaaatttaactccttgtcttttacttggggcacggggcccctggagggcttccctactttccccactatgttaacaggtaattctgatttatgcgtttagtttgacttatttttaacaaaatattagaagttatgctttaaaatgtttaatgtggactgaaattttcatcttttgtttgagaatctatgaagtgtatcatatacgtggcctaaagcaaggtgtgtattttgttattctgaaattgttttgcatctggacaaatactaaatatcccagtggcctttttttttttttttttaaacctgtgtatccatctcatccttttgcgcattcctagtaagcaaaaaaatttgttatgccatcttcattattcgaattacagactgaaaaaatatggccagtttttaaagaagtttagattatgttttccatggaaggacaagtctgactgttcataggctgattttctttaagaggattattctgttttacaatttcaattctagatcacattttatatatgctgcatgccaaa

SEQ ID NO: 57568 - DNA, 1282 bp, Homo sapiens
  misc_feature (1)...(1282): n = a,t,c or g
tctgcatcagcttcaagtacattattttgtttccctttcctgtttgagccgcttatgccatttctcacagaggggaagaaatacgtagttgctttcattactcttattgcttctttgctgttggggtgtgtgaagtgagcattgattttagtgctgagaatgtaaacggacttacaggatgcttggattagtcatcacaggttcttatgactttgctaccacagttgatatatttctcctcaaacctgttgccctaaggaatatataaaatattgttgatatttctaggtggtgttatcaaggagaagaaattcctgccttgaccagatgtgtggagcatctacaaatgaatgaatagttatttacacacaaaccactgtgtacaaaagcgtccatggagctgtcagtgtctcgagtggtattatgaggcctcaggtgccttggggtacattgtcatgctataagggatgtatatcataaggtatggtggaagaggggccttatgtgaatgattgccacatactgtttctgttgctgctttttttccgattcctttttgtcattggatttgggtgttttgtcatgtggtgattggtgtttanagttattgngttgctgccagaatcagaatccagttcttgttcttactgccttatagttattgtgttgccaccagaatcagaatccagttcttgttcatactgccttgtagtgagggcagtttaatatctacaaagaagcttttagaagctgaaaaagtcaatgtgattgtgcattctgcttttaagaagctgtttcagctatgaactgtgtatgtgctataagtgtgaggtaccataagttatttaatttttaaaagaggaaactcctgagtgagctgtttaagaaatctgagtgtgatctattgttacgttatttataactaggtaaaatgtctgtcgtgatagatttcttttaacgttcagatactgtggttgggttgtctatatttaatatgcagatttgcctgctggaatcataatccatttttaagtgaatgtaagaaatgaaaactactgcatttgtgtcttttgaaggcaaggatccttggattttaaaggaagagtatgtgctttgaaggcactcagagactagtaatagcatatggtttgaagggaaacccattctctttcaattacaagagagcatcacttagcgtgcagtacttctgttacagcatccgatgtgtcctttattttaaattgtaaccataacagccattaatggctttatttcttgtatc

SEQ ID NO: 57569 - DNA, 1377 bp, Homo sapiens
  misc_feature (1)...(1377): n = a,t,c or g
agatatgacctgctgattccccagtttagagggccacaagctctggggccagttcccactgccattggggtcagcatagctatagacaagatatctgctgctgtcctcaacatggaggaatctgttacaataagctcttgtgacctcctggttgtaagtgttggtcagatgtctatgtccagggccatcaacctaacccagaaactctggacagcaggcatcacagcagaaatcatgtacgactggtcacagtcccaagaggaattacaagagtactgcagacatcatgaaatcacctatgtggcccttgtctcggataaagaaggaagccatgtcaaggttaagtctttcgagaaggaaaggcagacagagaagcgtgtgctggagactgaacttgtggaccatgtactgcagaaactgaggactaaagtcactgatgaaaggaatggcagagaagcttccgataatcttgcagtgcaaaatctgaaggggtcattttctaatgcttcaggtttgtttgaaatccatggagcaacagtggttcccattgtgagtgtgctagccccggagaagctgtcagccagcactaggaggcgctatgaaactcaggtacaaactcgacttcagacctcccttgccaacttacatcagaaaagcagtgaaattgaaattctggctgtggatctacccaaagaaacaatattacagtttttatcattagagtgggatgctgatgaacaggcatttaacacaactgtgaagcagctgctgtcacgcctgccaaagcaaagatacctcaaattagtctgtgatgaaatttataacatcaaagtagaaaaaaaggtgtctgtgctatttctgtacagctatagagatgactactacagaatcttattttaaccctaaagaactgtcgttaacctcattcaaacagacagaggcttatactggaataatggaatgttgtacattcatcataatttaaaattaaattctaagaagaggctgggtgcagtggctcacacctttaatcccagcactttgggaagccaaggcaggaagactgcttgaaaccaggagtttgagaccagcctgagcaacaaagcaagaccccatctctataaaaactaaaaaaattagttgggcatgggtngcacatgcctgtattcccanctactccanaggnnnagatggngcncctgagncccacngggggtttggggngcangngccgttnnnngccnacggancccaatntnggggaaaaantncaagncccgtcctnaaanaaaaaagnaaaaaaaaaattttttctaagaagctgtcctacaaagttgagctttgttagtttccgggtgnancancntaaaantttcc

SEQ ID NO: 57570 - DNA, 421 bp, Homo sapiens
  misc_feature (1)...(421): n = a,t,c or g
tntatgacatgattacgaatttaatacgactcactatagggaatttggccctcgaggccaagaattcggcacgagccggccgctgcttcctgccgcctcactcagccaggtggagagcaccaatctgaaccagcaatgcctgcagcccagcccctcctctgaacactcagctattactgcgctttccctccccacggccccaactccagggcaggagcaactggacagtgggcctggcccgtggagctgccacgcaggtgcctgagggccaggtgccacgcaggtgtctgaggaccaggtgccacgcaggtggtgggggtacagacaagatgctgggatgtcccctgccccatggtcaagggtgtcctgcctgactgggtccagggcctgagggagccacatggatcccgagacttgtgtt

SEQ ID NO: 57571 - DNA, 450 bp, Homo sapiens
  misc_feature (1)...(450): n = a,t,c or g
atttganncccttaacagctatgacatgattacgaatttaatacgactcactatagggaatttggccctcgaggccaagaattcggcacgagaagaaacagaagaagagagactaaaggtctggtaaaggtagggctcaattgattgattttcaggagttgaagcctcaaagaccagggttgatgcaggtctgcaggtcttctgcacccccctcaatgaggagtccctcccagaaaggaaactgatctctgggatgtcagctgctgagaggagcaagcggtagtaccaccccttagttgagggagtcagcacagtcctttctgcagcttctaacccaggaccatgaactcaggtgcctagagaagccaggcagctaaaggacaaggaatgctgggggctgtgggaacaggaatgcagataccctttgaaggagcattcctgctaaaagaa

SEQ ID NO: 57572 - DNA, 1475 bp, Homo sapiens
cttcaatgatgcaattcgattagctgtgtcttacaaacagaactcccaggacttcatggatgagatttttcaggagctcgagaacttcagcttggagcaggaagaggaggacgtgccagaccaggaacagagcagcagcatcgagaccccatcagaggaggtggcctctccccacagctgaggggctggggctaggggtgggtggagcccttttaaaatacccttcccttcaacaactctccagctctgaatggagaaactctctaggccatcccctcttctacctcctgcaacccacccatcctattagcctcccacattcaaggcccgtgatacagggatgaggtcagcaccagcaaactctggactggtggaagaattccccaccagatctccttgaagcagaagtagggatcagcatcattaacaccttccccaccccctccccgcaggcagacagtgaagagaatcagaaaacatgattatgtgtcactttaatacaggaaatttaggtgttttttggtgtttttgtttttgtttttgttttctttccaaagctcacctcggggacaattccttgggcttctcctgaggtaatgatttacccccccacccacagctgagtctgtgaggccccatcctttccctacgttttctcccatcttttttcctcttcagtctcccagtcatctggtttgtttgtttctttgttcgttctgagacggagtctcgctctgtcgccaggctggagtgcagtggcgcagtctcggctcgctgcaacctctgactccctggttcaaacgattctcctggcctcagcctcccgagtggctgggcatcaccacgcccagctaatttttgtatttttagtagagacgggggtttcaccatgttgcccaggatggtctcgaatctcctcacctcgtgatccgcccgcctcggcctccaaagtgctgggattacagggatgaggcaacgcggcccgggccccaatcatctgtttttaaacaatcgtttttgagcagatagctattcattccagattttcgtgtacccattctgtttcaggagctcttctaggtaaagctgagatcacaggaacagcaggtgacaggcctagctatagttaggaatacacaagccgtaaaatcgagtccttacagccataccacaaggtacgtccatttggactacaagaagagcttcctttaaagttcctatttcagcataaagaggctgtccttttttttgaggaatagtttggaccttgtgcctcctgtgggaggctgaggactgcaagaggagagctagcagatatgcctgttcacccctctctggtacttgtggcttgctagtatgtttttatgataatctcgggcattgtttgcattgtgtttattaatagggttttgtttttgttgtttccttttttacagtaaaggctgaattacataaacaaaaaaaaaaaataaaaa

SEQ ID NO: 57573 - DNA, 468 bp, Homo sapiens
gggcgtgccgctgtaaactggcctctgggccgggggcgagccagcccccgggaggccgagtgcatctgttggaccgtgcgaggagaagaaaaaaaatatcggccagaggagaggaactaaccgaacattcttcctccctaccttatagaggggagtggtcatctacactaaagcaaagtgttaggcgcgtccgtgcgaagagaccaccaaagaggctttgtgttccttatcacaggaagaaaattttccttgacctttaggtgcttttatattcatctcaaaaacaaaattctgaactcaggacttggcaagtaagtaattgtgggctaatcgttccaaatactgtttaagtagcttgaaaacaggtacatagaagtggaacaataagccggttagcttcagcagaagacgaacatgaaaaatgactgtaagctattgaaatttaagttaaatcttttatttttcaac

SEQ ID NO: 57574 - DNA, 1303 bp, Homo sapiens
ctgcctcagcctcgcctgctcctacgtgggcagcctctacgtctggaagagcgaactgcccagggaccatcccgcggtcatcaagcgacgcttcaccagcgtcctggtggtgtccagtctctcacccctgtgcgtgctgctctggagggaactcacaggcatccagccaggcacatccctgctcaccctgatgggcttcaggctggagggcattttcccagcggcgctgctgcccctgttgctgaccatgattcttttcctgggcccactgatgcagctctctatggattgcccttgtgacctggcagatgggctgaaggttgtcctggccccccgctcctgggcccgctgcctcacagacatgcgttggctgcggaaccaagtgatcgccccgctgacagaggagctggtgttccgggcctgtatgctgcccatgttagcaccgtgcatgggcctgggccctgcatgtgttcacctgcccgctcttttttggagttgcccattttcaccatattattgagcagctgcgtttccgccagagcagcgtggggaacatcttcttgtctgctgcgttccagttctcctacacagctgtcttcggtgcctacactgctttcctcttcatccgcacaggacacctgattgggccggttctctgccattccttctgcaattacatgggtttcccagctgtttgcgcggccttggagcacccacagaggcggcccctgctggcaggctatgccctgggtgtgggactcttcctgcttctgctccagcccctcacggaccccaagctctacggcagccttcccctttgtgtgcttttggagcgggcaggggactcagaggctcccctgtgctcctgacctatgctcctggatacgctatgaactctcaccggctccccagccctccccaccaaggggttactgcaggggaagggctggctgggggtccccgagatctcaggaatttttgtaggggattgaagccagagctagttgcgtcccagggaccaagagaaagaagcagatatccaaagggtgcagccccttttgaaaggggtgtttacgagcagctgtgagtgaggggacaaggggcaggtcccaggagccacacactcccttcctcactttggactgctgcttctcttagctcctctgcctctgaaaagctgctcggggttttttatttataaaacctctccccaccccccaccccccaacttcctgggttttctcattgtctttttgcatcagtactttgtattgggatattaaagagatttaacttgggtaaa

SEQ ID NO: 57575 - DNA, 940 bp, Homo sapiens; identical to SEQ ID NO: 14213

SEQ ID NO: 57576 - DNA, 2063 bp, Homo sapiens
tttttttttgcagaaaagaactcaggtttatttgcaagtaaaaaccatggtctgaaaaaaacccattggcaaatgtacagtttgtgtccatttggggttcccgccagctgggggggcccccagatccctgacccacatgcatcgggctcccacatgttcacagctaatctcaggcccctgcagtttagccccctgcaggggacaccccgtctcctgctgaaaaccatcggactcccaggctgcacccagccctccaaccctcctgccttagtgcagtgcaaaaaccaaaccaaacacaaatctcaaaacaaagaaacacaaaacaaaaaaattcacaaaaaccagggttctaaattattttttctcagtgtccttcgtgatcatgatgacttatttgtcaacaaactaaaatatacatcattttcttgctattataaaatctcttattattcacagatatataacgggagatttggatgaaataattacaaacttttttccccttaaaaaacaaacaagccaaacaaaacacaaacaaaacaaaaaccccaaaaccaaaacacaagacctttctgacgacagtaaacacaggggctgctggcttcctccccgccatcctccgcgcctgctgggccgcaggtcgcaaagtgctgggtgtaccccgacacggaggccccagggtgctctctccaaggctgactcttcgcttcccctgccctgcctccacctcccctcatttcccaagcctttgtcgagggcccctctctccccctgccgctccccatccccatgactcctcccgcctcttccctacaccccagaggcatacagcccagaggccacaaggccaacctcagaaggagcccctaggtccccagcgccacccacagcagggaccagcttcccccacacccagcctgggccgggcacctcccacaggctgtgcagctggccagagggagaaggggctacaagaagcccaggtctcaacagaggctttggcaaggagctgggagggagacactgttaccaggtctcatgcaacatcagggtagagaaaccagggtctggctaacccagccagaagtcgaaggccaggagttgtggctgggggaggtaatggggtagagccacccccaagagcacttattttgagtcgcccgaggcccagtttgtaggctgcaggggcccttggaaggaagccctgccagggactggaaccaacctctcgtccaaggctgggcagaccctcagggaccacccttcaggagagcagaggggcctcctggagagggacctggcagggatctagagaggggaaatccctgttttcttccctgcccatttcagggtttttacaaaagatgtctgatctggcagcgcggccaggcagacaccttcccaggactccagaaagggcctctcagagagagggcaggaaacggtaccgctgaccgggcagcagggttggaatttcatcattccaaagccccctcccaagagaggggcctgccgtgtggggtccgggtgtgcccctggcaaggaggggagtgggggagtcagggaagtcttgggagccagagtggctgcagagggcgaccacagtgctctctcctcccgcgccctagcacagtggggcaagtgggcccacagtgaacagcctggctctggtcccgtctgcctcccgaggtctgacaccctccccctgggagcagcaggaaaagacaggcaaggctgagtccaggggctgagcagagggtgcgggggcaggtcccctccgatgtccctagcccttcctgggacagcatctgctgttcaaacctaggctcctgaaggccatctcagttggacaggggcaggcgatgggcctctggcctcagccactacccagagcctggctgcagcgctgtcggtgccccctcctctgcgctctgggtggggctagcccaggtttcctctatgtacaatagcatacccagtgatgggtccccgagggcaggctgacagtgaaacggttcgagtttaggattctcaacaccctccctatccctgtgggcagtgga

SEQ ID NO: 57577 - DNA, 1691 bp, Homo sapiens
  misc_feature (1)...(1691): n = a,t,c or g
ccaccgcggacccgccttctgccctcagcagcagacgctctgtcccgcccgggncagctctgcgaggcagcggctggaggagggaaccatggggactgtgcacgcccggagtttggagcctcttccatcaagtggacctgattttggaggattaggagaagaagctggaatttgttgaagttgagcctgaagctaaacagggaaattcttggaaaacaaaggatgtggttgttcaacatgttcattttgatggacttggaaggactaaagatgatatcatcatttgtgaaattggagatgttttcaaggccaaaaacctaatttgaggtaatgcgggaaatctccattgaagcccgtgaaaaattgctcccgtctttggaatttttagaccagtggatgtttttgattgacacatgtccaagtgatgacgcacttccaaatgggttagacgttacctttgaagtaactgaattgaggagattaacgggcagttataacaccatggttgggaacaatgaaggcagtatggtacttggcctcaagcttcctaatcttcttggtcgtgcagaaaaggtgacctttcagttttcctatggaacaaaagaaacttcgtatggcctgtccttcttcaaaccacggcccggaaacttcgaaagaaatttctctgtaaacttatataaagttactggacagttcccttggagctcactgcgggagacggacagaggaatgtcagctgagtacagttttcccatatggaagaccagccacactgtcaagtgggaaggcgtatggcgagaactgggctgcctctcaaggacggcgtcatttgctgttcgaaaagaaagcggacattcacctgaaatcatctctttcgcatgccatggtcatcggattctcgggaattcttccatcttaccaaggaggaggtgcctttgcttgaaagttaacccaggaacttggcaaggctacacttggccggggatgtgagctttcatcaaagaagattttgaacttcagttgaaccaggcaactcatattttggatttcaggtttttttcaagcggtctttcttgggggcgggaaatgttggtacccattggtgataagccgtcaagcattgctgataggttttaccttgggggacccacaagcatccgcggattcagcatgcacagcatcgggccacagagcgaaggagactacctaggtggagaagcgtactggggccggcggcctgcacctctacaccccattacctttccggccaggccagggtggctttgggagaactttttccgaacacacttcttttcttcaacgcaggaaacctcttgcaacctcaactatggggagggccccaaagctcatattcgtaagctggctgagtgcatccgctggtcgtacggggccgggattgtcctcaggcttggcaacatcgctcggttggaacttaattactgcgtccccatgggagtacagacaggcgacaggatatgtgatggcgtccagtttggagctgggataaggttcctgtagccgacacccctacaggagaagctctgggactggggcagcagcaaggcgcccatgccacacaccgtctctcgaggaaacgcggttcagcgattctttgactgcggaccctgtgggaaaccccgtcaataaatgttaaagacacactccaaaaa

SEQ ID NO: 57578 - DNA, 1321 bp, Homo sapiens
  misc_feature (1)...(1321): n = a,t,c or g
ttttaatagtggaaatttttattttacaaatgaaaagtcaaaatactgctttgaattgacccttaagtcacactctgaattcataccatgcagttaaaattttcccagttcatcaattaattccactgaaaacagactaagcttctgtctatggaagaagcacagaccagctttaaccatgatgacaatcactggtaagactaagcaaaggaagtgactgtatctctgtttcaaattctttttcttcttgggcacattctccatggccatgtgaaacttaaaacaaagattgcgactgtcctggccagagaagaaggttaaagctgtgtcatagagaattgcagattatagttctaccttcatcctgtgatatccatgtctctcagagaggtctggctacaccaggatgttctttgcgatagcattcaaagtccttactttggtcacatctgttacctttagggaatattctgagcaagaaagtgaggctccccatggcaacagatgaatttcgaaacttcattcccgagtctctagtagaccgagcagaacagtggaattctgtagcacctgaaccctcaaggatcctttgtagatttctgtctgttataccacctcctggcattaccacaatcctgccttttgcctgctcaatgagtcgctttattaggggtagcccttctaatgctgaactgtcacatccactggtcaacacgcgttcaaatcccaaggttaagagggtctccagagctgccattggatcatgaaccatgtcaaaggctcggtggaaagtgactggcagagggcggcaaatagccataagggacatacacagctctttgtcaatgtgtccatcttcagtcaatgccccaaaaaccaaaccatcagcaccataaagcttggcaagacgaatgtcagccttcatcacctcaatttcacgatctgaatacaaaaaatcacctccccgtggccgaatcatcacaaaaactgggatctgaacactctgcttcactacttgaaggacacccatgctgggtgtagttcccccctctgataaaccagaacataattcaatccgatcagcacctcctctttctgcattcacagctgattccactgaatcaacacaaacttccatgagaaatccatttgctgctccggccttcccggacggtatccgcgctcgttttcgctcagaggaggccccctgccttttcatgctccacgcgttcctccctcgtgcgcctgcagtttccacttggaatttgggctccggcgcgcaccagctaagaagcgcgtcaacantgcgcgcgcccgtgcg

SEQ ID NO: 57579 - DNA, 1160 bp, Homo sapiens
tttttttttttacttgtaatacgtattttaatttttgtttcatatgagtttaagtgttgtctaggtgacatcaaaatctaaggcaaacagacttgaccatcttcagacccactgcattctcaagctgaagtggtctgctcatagtttgtgtgccaggttgctcatcagtattgatactgtcccagaacaggttgtaggtataattcagagactgtcctttgcaaaggaaatgaccagcatttcaactgtatgtcttcctggaagggtagattctgctatatcttctttgtctgcatcaaaagactcaagaggaatgtggacacatttcatatcccatttgtagagtaaagcttcaagtgaccagtcagcactcctaacttgataagtagaccacaattggaccttgggattcttgtgcatcaaaaaatatattgtagccaaaatgtcttcaaaatcttctggttcaaagaacacatcagatgcaaggataatatcttgtggtggtagagccagaagatcccaagatatatgaccccatgttagtcctaccacctgcagatgtggcaggttattcatttggcagctttgcccgacagacttcccagacagtgaggcaggtcctgagctgtctggacagtattaccttctgcaccccacatttggcagcccaaaattccctggaaggctcactcccagctcccaatcctaataagttatgaaagatggcatttcacaattatacttggaactgcaaataattgggaatcttagtactttttcattatattcttgcatttttaaataagcatagagtcagtctttctggatttgtataaaatgtaccgtaactgaacattactataaacatgacaaaagtacattccttatgaatctactctgctaaaaggtaaaagcttaaccttcaatttcaatattaaagggccatgtatcgtaactggcagttaattgctatgcacacagaagtagttttggggcacttgattcctctgccatgattttcagttttgttttatttttttgagacggagtcttgctctgttctccaggctggagtgcagtggtgcaatatcggctcactgcaacctctgcttcccgggttccagtgattctcctgcctcagcctcctgagtaactggccc

SEQ ID NO: 57580 - DNA, 1098 bp, Homo sapiens
  misc_feature (1)...(1098): n = a,t,c or g
gtcctgggccatgtgggtggtgcttctggatgtgagtctcttatttatctgcagaaggaactttggggtgcagccaggacccaggtaggcctgagcctcaactcttcagaaaatagtgtttttaatattcctcttcagaaaatagtgtttttaatattccgagctagagctcttcttcctacgtttgtagtcagcacactgggaaaccgggccagcgtggggctccctgccttctggactcctgaaggtcgtggatggatggaaggcacacagccccgtgccggctgatgggacgagggtcaggcatcctgtctgtggccttctggggcaccgattctaccaggccctccaagctgcgtggtctccgcagaccaggctctgtgtgggctagaaggaatgtcgcccattactcctcagggcctggccctcgggcttccgtgatgggagccccccaggaggggtcaagatgctggaaggggccgctttctggggagtgaggtgagacatagcggcccaggcgctgccttcactcctggagtttccatttccaagctggaatctgcagccacccccatttcctgttttccattcccccgttctggccgcgccccactgcccacctgaaggggtggtttccagccctccggagagtgggctttgccctaggccctccagctcagccagaaaaagcccagaaacccaggtgctggaccagggccctcagggagggggaccctgcggctagaggtggctaggcccctgctttgcccgtcagatttgaacgaatgtgtgtcccttgagcccaaggagagcggcaggaggggtgggaccaggctgggaggacagagccagcagctgccatgccctcctgctccccccaccccagccctagccctttagcctttcaccctgtgctctggaaaggctaccaaatactggccaaggtcaggaggagcaaaaatgagccagcaccagcgccttggctttgtgttagcatttcctcctgaagtgttctgttggcaataaaatgcactttgactgttaaaaaaaaaaaaaataanntnnntnnnnctnaataaaacaaaaaaaaaaaaaaaa

SEQ ID NO: 57581 - DNA, 2299 bp, Homo sapiens
ttttttttttttttggtgcatatgcataagtggagcccagagggcctctcggctcactgggtccccggccccccgagctgaggaggcttcgcaaggccggctgctacaaagtgccgagcttggctgcatagattttaatgagagcgtcaggcagagctgtgctgttgctctccgggacttgcagatcattaccaaaccaactgtaggatgagaacatagcacatcgaaaccctaggaggtcactgagctaatgatctaatcctaccttccgcaggcagtgcccctccccacctcctcctgcccccagccctttccacgatggactcagtccattccagaagccaggccaacaccgcccccttcaaggtcagagcagaatgacagtgagtggctctagctctcccttttccgggcaaggaggatgggggtaatttagtcaaagccattaggcccaaaccctggcctggccaggccccaggtctcctatttgggagaaccactgccctctgcctgcctctccaactactgctgggctgcggcccaggcgccttcaacgaccattttagggttctgatgaaagcaccttcggcttctaaggtgcaggctgggaaacaaggtgggggcccacatagcctggtgtctcaagcatggagcttagtgccaagtcctgtgccagagacacctgatgtgtaaagagggaagagggcacactttgggagtggccacagcaagacggcatgctgtcccctacaggctcagtccccacaccctgagttccaggaaagaaggcagaggagaagcggccagcaagggcacagaggcagaacccatgactatacactctctcctcaagccggagggctttatgagggctttggcaattactacaaccatttgctgtgctgggtagggacagatcctgtttctctttgtttcagggctctgaaagccggagaagccagcagaagccgatttcagcataagaggctacacaatagttagggcagaagaaaagaaacctcactgttggctagagctgaccagtttttttctgaataatagcacctgtgtattagctctgggaaaagcgggaagggagggagggagggagcgagcttcaccatgtgcagtgaggggagctggaaacaggacctggagcccctctgcctttcagccctgcttcatggctgcccaggcaccccccacccccaggcaggctactgcatggctgccagcctgagggactgaagtttccacagttggcagaatctttgtttaaattggggaaataaaagggggaggagttgcagaggaattgaaagcagcacctgtcaaagctgcctatccccttccttctctcactactttctggtcccccagagaggctggtcccaaggctatgtggttggctggtgacagaaaaggggcaacaaagaatgacaagagaggctatgaaggtctgagcagcaccgacagggctggcacagaccctgagccttcctactgggaccccaacctatggtgaggtctggagtagcaatacaactgagaaagctctgcccggactccagcaggtgcccattctttggtcccagaaagcacaggtgacttggaatcaggaactctgcgctctagctatgtcactatccaattgtgtgaccttgagcaagtcacttcccatctctaggcctcagcatccttaaagggtgagacccacggggctccactgttcttccagtcctgcagctccaagtcttcaggctttgctcctgacagccagaagaggcccctgtcctcatgtgtcagggacagtttggtcatggatactagaggttaaaactgggctgtgttgcctgaaggtatctagaggtggtggtggtgcatcctgaacaccatactcaccaaaggataactgggagggaggcaacaacaccagcctacagaaaggcatcatttttgggcagaggaggtgagacattcttttagaggcttgatgcctcctggaataaagggcatcccaggcatagagatcgcttagcaaaaggcaggcccaccctgctgattagggcagagggtgaggcaagtctggcccttggaccttcggcctactctgccctttcagtgcgcgggaaaggggtcagctgtgttcattcagaccactccccgttttagaaccagaaggtggctggcattcgaagtggctgagggcacaggttttagaaggctgtagttgaatatggctcctaagggaagccccatctccaacagaaacccgatcaaaggaatctgctttgggatt

SEQ ID NO: 57582 - DNA, 1413 bp, Homo sapiens
aaacagccgattggagacgggagccaaccagggctgcattggaggttgaaatcacaaagattagacacctttttagataggtgttcttcagcaccactgacaacacggttctgacagtatttcatgacaatggatggtgacagttctacaacagatgcttctcaactaggaatctctgcagactatattggaggaagtcattatgttatacagcctcatgatgatactgaggacagcatgaatgatcatgaagacacaaatggttcaaaagaaagtttcagagaacaagatatatatcttccaatagcaaacgtggctaggataatgaaaaatgccatacctcaaacgggaaagattgcaaaagatgccaaagaatgtgttcaagaatgtgtaagtgagttcatcagttttataacatctgaagcaagtgaaaggtgccatcaagagaaacggaaaacaatcaatggagaagatattctctttgctatgtctactttaggctttgacagttatgtggaacctctgaaattataccttcagaaattcagagaggctatgaaaggagaaaagggaattggtggagcagtcacagctacagatggactaagtgaagagcttacagaggaggcatttactaaccagttaccagctggcttaataaccacagacggtcaacaacaaaatgttatggtttacacaacatcatatcaacagatttctggtgttcagcaaattcagttttcatgatctgaagaaatgatggaatggggagtgtagagaaatgagagtctgtatgattctggaacagagacatcagaaggaaagactggtgaaaagatgtatctttgtatattaatagctgtaatgtagcttcctgatgcttgactaattgaggtgttaattctgacttgagaatctttttcatgaatgattttaaagaaaaatttggattttaaaggtattaaaatatttttgttttgtacgagagtttgttgctctgtatgactcctgtatgcattgtatattgcaatttattactgtcagagatttgtagacagtttcttattttcatattgaatcatgttacttttgtaattcaagtaagcggctgggttaattcatgatgtttgcccttttaataaaatataagggtagagttcattttgaatgcaagttgcctttattataaatttgagtttgtcttggttataccttgcatgataacctagctagatttctagcatttgctgtatttattaaaattattatttttttggtaaaacattaatagtttaagcagcatcatttttttaaaaaatgtaattgaataagtgtgaatgcagaagcaaatattgtctgccctgttaaacttggtgcccattaacagtgtttacactgtttcatcgtgcctgt

SEQ ID NO: 57583 - DNA, 763 bp, Homo sapiens
cgcgccttccgtcggtcggtccttccttcctgcttcgcctccgcgcctcgcgctatgggacagagcccccgatccgccagcaccacctgaggatccagaaaccgccccagcgatggaagaggatcaggagctggagagaaaaatatctggattgaagacctcaatggctgaaggcgagaggaagacagccctggaaatggtccaggcagctggaacagatagacactgtgtgacatttgtattgcacgaggaagaccataccctaggaaattctctacgttacatgatcatgaagaacccggaagtggaattttgtggttacactacgacccatccttcagagagcaaaattaatttaccgcattcagactcgaggtacccttccagctgttgagcccatttcagagaggcctgaatgagctcatgaatgtctgccaacatgtgcttgacaagtttgaggccagcataaaggactataaggatcaaaaagcaagccagaaatgaatccacattctagtcctttatgcagtatacaaggagaactgtcctgtaggatattctcttcctgatggtgcagaacccagaattagaagtttgtggttacagcatactctgtccttcagaaaggcgtgattctagctgttgaccccttgcagctgttggaatctctgcaagaacctctgtattcttctaataaattccctcttttatttaaactagtttgactggtttctgttccatgcaaccaaatggtccttgagga

SEQ ID NO: 57584 - DNA, 1519 bp, Homo sapiens
tttttttttttccgaagtatcagaaacgtgtattctttttcttttaatagtaaacctctttacaacaaatatagtgaaagagttttcaaacaaaactcataagaatctcgaggactttgtcttttcttattgtgtagaatactaagaaagcatcaccatacagcacgaaaagaaatattgaaaacaaatcaacagcctcacacttgggactcgccctgccccagggacccaggaagagccccagggggtgtgggtgattgtcaggtgtgggggtggggcacctccatggcccatcctgcccctcccttcctcttcctcaccacctccctccctctggagaatggggaagaggagagaatccagattctccattccagcctccctccccccatacaaataccattccttctaccaactgctttaaggggtggggagaggcagcagaggggagaacaaggagttcccaggctccatgtctcctcccctccgcgaaagcctaaacttacccctcaccccaccccaggggattccaaagagtcagttaaaaatatatagagatatagatatttctagatacacttttacatttctgtctctccaaacaaataaataatcagcaagagaaggtgcattacttccttcctgtccaaggtagggagggctgggagggggtcaggggtcagtcttgctgcactgagtgtgctgttgagggggggagaatggtgtgttccactgaggtggtgggggggggtgtcctcttgcccactgtccctgaaagctgtgggaaacctggggagggggagggccattagatgactccagtggttactttggcaaatgcccagttcttcagagggagtgggtggaggcgaatttggcttgagaggaagaagacattaagtcctcatctgaggtctgggttcccagggacccattcatctggccgcccaggagcccctacccccaagagaaacttcggatactgaactgcagaaatgtcacatattcacagaccaccccatccccagggacagagaagaaaggacactgaaacatccacacatggtaatcaaaagccaggtttgcctttatgaggcagagggcaaaactggtgaatattgcaccgtgaattgcaggggcccctcacccccaccccgtgtttaatggtggccaagcccagcctagaaaggtgggcagactaatggtgggaatagcctgagaagggaaggccattcattcatttattgagcacctatcattcaactattcacccattcagcatttattgagtgcctactaatgtgcccaggcactgggcgaggctctggggacgcatgcatgaacaagattacaccctggcttctttcaagccctggatcgaggctcatcagtttttgaaactccgtctagaagcctgcaggagaggtgggaaggctggacgtgctgtccccacccagtcagcggattggggttaagagtgagtaagtgatcactgctcagctgagggagaagcttcacg

SEQ ID NO: 57585 - DNA, 2337 bp, Homo sapiens
  misc_feature (1)...(2337): n = a,t,c or g
tttggataatgaaactttttatatctgaattgcacaaatccccaccaagtaatttcagcataaagcaaaccaaatggcagacgcaaatgatgttagtaccttgtaggtttacttcataatacataacctctaatccatgtccatcttcttgtttctgcttttaattctgccatttcctcttaaaatttagggtttaacaaagacaacagggctgtttgccaaatcgcagctattaattcacagcatagaaaagtcaaaggctatagcaaaaaattgctaatctgcacaactttaaaaaatagttcagtacatttttgttataaaattcatttacaggaggttattcacatgtacttgtcaaatttactcctgataattcacaaaaacatacaactcaacaaactgtgcacaataaatccaaggcaaattatatacaaagaaacaaaacaagcttttaagtagcacatattcatttgaaataactaatattggaaagaagacagggaactttcttttaatgccatggcaaagacgaagcgaagagcccacacttcacaccttgtaaaaagaatagccctgttcaacaacgctgcgctgacagccacatcaggaggggccacggtgaacataggaaatggctttggcaaatacttgtaccaactggaacgagtgaagtttcaaaagtaatgtgaggtacaactgcattccgctgtgaaaggccgtcacaggacacaggctcgtctgttagaaaggatgatctagttctaccattaattcttgcagaatcagatctgctgagtggtgaaccaacaggtgaacacaacgtaagaacaggcatcaaacttcactggaaataatattgttcagtgtgtggcggcaaaatatgcattttagagaaaacttatttctcaaatcatgtgttaatagtattaacatgagcagcgtgagagacatcctgaccccaacgtttttgcccatgccctccctttagaagcttaggagtttgtacattccctaagtggtcagcactacaagtgtctgctaaaatgggcacttcatcaagataacaggaaagcaaacttaaagtaacgagatttcttcccaaaggcacatggaagaagctgatagagcccttgacccagacagaatgggacccatcccctacccgtccctgaactgtcgcacactgcatggcccaaagacaaactctccacccccacagaggaagcagtggctgactctggggacaaagcactcccaggaagtcacctgctccctgggtttcaggagtattcagttgaccgtctggacaccagtgagggagacacaggtaatgaaatcaaatgctcaaacttttggcaaccgaaagttgttttttaaagctctttataatctgctcaagtagaatttctaacacaaaacccttttttgcttaaaaagcagatgacaaaggaaatgtcaaataatgcacatgaatcttcagctattttcctacccccaaatgagatatggggctgcacagcattcactacagatccctagtttttacaactgtcaactgtacattctcatgtttaggatactccagttcactgcgtggatatttggaaaactggacaaaatcaggcagcccacccctcccttgtcccgagcttcctcgatctccattcaccatgaccaattttttcccccacaaaagcactatcacctctaatagtagctggaaacacctatcagatattctaaacagcatgtatttttaccaggtagatgatttctgaagatcacaggaagtctaccactctcttcccagttctgaactcctctggttacgcttcattttaaatcgggtgcttctttcccgcccaaaatattctatttggcctgccccagtggttcccaagctgcctggtgatcagaatcccttgggaaatgttgaacacacagcttcccaggctttctggaaaactagttagatctgtctgacaatctgtaagctgaggcgattcttccacagctgacccagcgctaatctagcatttggcaaccaaatgtctgtacctcaccagtcacacaaggctcacaatatgctgggagcatttgaatgatagctcaagaattattctttcactccatattcttctctctcaagaagattaggaattttagctagggaactatgtgcatactgaaacaggtaaatgaactcatcacagaaatataatacccctcgtgccgaattcttggcctcgagggccaaattccctatagtgagtcgtattaaattcgtaatcatgtcatagctgntggnantcatagggggnatncaaagggggg

SEQ ID NO: 57586 - DNA, 1558 bp, Homo sapiens
agatgaaaatgacaaaggagaaaaagtggcttctctgacagttagattaggttagattagttagattaagattaggattcttaaataaacagaaagctaattagtgatatgagccttctacattctgaaggatttgaacaagatcattagaattcaaaaaacaccagaaatgaaagatctttcctgaagctgtttaggaatattcatgatatacccttaactgttctagagaacaaaatgcgtctgtgctccttcacaaaagtccctatgaatttgtttctcaatgtgatccttcttaagttctataactttttgttttcattaattttaggaaaatcctgccttgcttcgttgggcctatgcaagaacaataaatgtctatcctaatttcagacccactcctaaaaactcactcatgggagctctgtgtggatttgggcccctcatcttcatttattatattatcaaaactgagagggtaagtattcagaccagatgtttagtatttgagtgataggttcactttctagggaccagctgcagctccttctcttgaagattgccaccagtgcccctcccaccttgggggctgtcctctgccttcccttcctctcttcttttatctttattcctttccagcaggagttaaaacagaaagttttcagtcacctttgtctatttttgttagttcatttgttttttaaaaagatgatgtttattgggttaagtattagcagaatacataaatcatttagtacgtttcctgtttgcgtgaattctatttatgttggtcacattttgcaaattaatgttaaaacctattaatactctacggacagagaagcacaagctgcctgtgtggggaatagctgccgtcagcagcctgggtatatgattggagagaaagtcaagctgatctttggcaccaaaccattccacatctggtactaaaccctgagctgcagcccccaggcttgtgttgccactggagcccactcgtctagctttgtctttaactggcccatctgcattcccattagagttcgtgtattttgattatctggtgaatgatctacttaacagaaaggtagtccacattttcccagaaagtgtttgcattttgctttcaatgtatggttttatgggataatatatttctaatgactaaaatgtgagtaagatgtttttgaataggagcattttcttactgtgtctttagttcctcggattactgtttcttcgcacactccctggggctttagacagtgggattgcaattaggtttggagtgtttcattctgtttgtcagttgtacggtgggttgtgccaaaatgcagttttccttaccttttttatttatttatttttatctaatatagccaactggcagaatatattgtctttaatgtactttttttctgtctttacaggataggaaagaaaaacttatccaggaaggaaaattggatcgaacatttcacctctcatattaagtctggcaatgatgactatatgtattcctgcctaaataaatcatctattaatcattaaaaaaaaa

SEQ ID NO: 57587 - DNA, 787 bp, Homo sapiens
acggctagagtagccacgaagagaacacttccggggcggggctatctggccctttcctttccgcgtgtagaatgtggggcgcctgtaaagttaaggttcacgattccttggccaccatttccatcactctgagacggtacctgagattgggggcgaccatggcaaaaagcaagttcgagtacgtgagggacttcgaggctgacgacacctgcctggcacactgctgggtggtagtgcggctggacggccggaatttccatcggtttgctgagaagcacaactttgcaaaacccaatgacagccgtgctctccagctgatgaccaaatgtgcgcagactgtgatggaagaactagaggatattgtgatcgcgtatggacagagtgatgagtacagctttgtgttcaagcggaaaaccaattggtttaaaagaagagccagtaagttcatgactcacgtggcctcccagtttgcctccagctatgtgttttattggcgggattactttgaggaccagccccttctgtatcccccaggctttgacggaagagtcgtggtgtatcccagcaaccagactttaaaggactacctcagctggcgacaagcagattgtcacatcaataatctttataatacagttttctgggcacttatacaacaatctggactaacaccagtacaagcccaagggagattacagggaactcttgcagcagacaagaatgagattttgttttctgaattcaacatcaactataataatgagccgccgatgtataggaaagggac

SEQ ID NO: 57588 - DNA, 430 bp, Homo sapiens; identical to SEQ ID NO: 23792

SEQ ID NO: 57589 - DNA, 366 bp, Homo sapiens
gaagatcctccacaggcatcaaggaaccaatatctcttaacaattccataaacacagcttccaggtatccacaagggatgtgtcaatttcaagagtcactacactcaggaaagcctaaagcttgaagactccatttatttatagtgcatcccaatccagatacgtaacaattaacgagttatttttactataagcaaagttgcctaaaatcatagttgatactaaccatggttaacagagctctaaagtttgacagaaagtgagattcaaatcctttcactctcatatgctaaaccttttgccttactctgggtcatcagagaaatttaggtgagaatgtatgatgaagtctgtgttttagattca

SEQ ID NO: 57590 - DNA, 684 bp, Homo sapiens
tttttttttttttcagagtgctagggctttattacaaatgactgctagagaggcccttctccaatctttcttctgtaccttcttccctcccaaagacatccctctagggaggtcagtaggccattaggtaggaggaaatctggagagtgaaaaggggccttgcttttgtcaaagtcctctgaaacaaccactgagtctgaaggctggctccagttgagaatcttctagtggaagaggtttagctctcatcttcaaggtccttcatttctacatcctggggggcttttgtcttcttttgccttttgagctgtgggttcactaagtcctggctggctttgaaggggcttccacttccatggctgtcttctctttctgggcaagccggatctgctggaggagttttctgcgcttcttccctgacagtgtaatgttggcacgtgcactggacgcccgcttcttgaggtggtgccgcgtgatcagcccttggtctatcacagccccgaccacccggtgcctcagacgccgctcccgattcaacacccgccggcgtttgaacagcttcttcttcagctcctgccggggagaaagatgcgaatcagatggagtgggctcgccgcgacccggggcccctccaccaggcagccccggcccctcactgatcccatctcgtgcgagataaaaggg

SEQ ID NO: 57591 - DNA, 484 bp, Homo sapiens
ctggcaggtcccagaaggtggcgagtttcgcggccagaggcttacaggtccaggtggagaggccgggctggccagggcttcggcctccggcgtcgggaaatggcggcggggggcaggatggaggacggttccttggatatcacccagagtattgaagacgacccacttctggatgcccagcttctcccacaccactcattacaagctcactttagaccccgattccatcctcttcctacagtcatcatagtgaatcttctgtggtttattcatctcgtgtttgttgttttagcatttttaacaggtgtgctttgttcttatcctaatccaaatgaggacaagtgcccaggaaattacacaaacccattgaaagttcagacggttataatccttggggaaagttattttgtggattctccatttactccttgaatgctacatccagtatcaccacagcaaaatcagaaaccgaggctataacttg

SEQ ID NO: 57592 - DNA, 1742 bp, Homo sapiens
ggctgctgaggctcctgttaaattttctgtggcatcttttatgccttggtaaaaactgcagtgtctttggacctgagagtggctactccgtggttttgtgacctgtaagcgtggggttcaggggtgtgtggccctgcagggtcccacgcctccctgagcactgactggaagtttcactggctggtggctgtcccttctcccatcagggtccccagcaaagttaactacacagaggacccaggggaaacgagctgtgtagccactgacttgctcgcgcggccgtggcctctgaggggcactcgccggttaagacagggtgggagtagtgctttccagttcagactctaacttctcccaaagtgtcctaagaaaatactggatcggctcatagatttatgctccttatgatgccctaacttggaaggttgttctagggacaggccgggcagtgttcccacaaacaactttagagttcgaaggccccagggccccgctgtcacttgcccaaaagatcccttccggcaggtaagggactaccaatgcttacgtcaaaacagcagaatcggctttgcagtgcactttggggagcagatattaacttatttttgtgttggacagtagtgaaatcttgtgatttttaatcgctttgataatacttccaaattttatgatttttctgaaggaaataatgcaaacattttaaatatgtttctccccctttccaaaaactgttaaactaatgagcaagtaacactaactttgaatgtctctacaatacccgttgataactcagtggagccaggctttggggtagcggccctgagcttgcagggtttctcgccactggggctgaccacgcccccagctgtgaccgtgggtgtggctggctctcggccctgcccagctttgttctgaggacgtggtgacttcctgaacatcagcttcaatcctccatcattaatgtgaagcaaaacacaaaaaccgccccaatccctcaggattccttggcatccgaaaccagcatctgcacctaaacccatacccacccgtgtgcgcccacagggggatgtgtccgaatgggcagcttaaaatgtggtcacctgtgggggaaactcttcaggcacctgaagtgagaacccagctgtccgtcctcaggccggcctttcttccggcgacacccgtccatggctggctgggtccccttcgcagtgtttgtctgtcttgacatctaaaccccggcgtgtgcagtgcccatcttccaggactaccttattttccagaattaaacctgttttataattcaagttaatgcaaatgactgtcagttgccaaatatcttgatcctatgagtgtagttgatgactgtttgttagtcagtagagtaaaatgctgtgtccacggggtgtcacagcctcaccataccctgttgaggtgtgaaatgccccccgtcagaaattaaatacaaaccttaaatgtgccctattggtgtctaaacttcatacaatgtaaggtcagattccttttaggaatactgggtgctgtcaccaggtttgatagttagacttaaaaacttgaaattcactttttggggggagggatatactgaaatagagagttgagacttgccagttgggggaaaatagcatttaaaatggaaagctgtgtttggaaaattgtgtatgagtatttttgtattaaaaacattttaaaggcttttttcttaaaaaaaaaaaaaaaaaaaa

SEQ ID NO: 57593 - DNA, 1285 bp, Homo sapiens
ttttttttttttttgggagttgagattttaatatcataaatcggtgtggggccacacctctcactgccaggcccgtgggcctcctatcttcatattgcctggaaggctgcctgcagccagggcttcccccatcccctaggaaggatccagcaccagcctgagaagggaggcaacagcagctaaaggggtgggaggaggaggagacagaagcatgtgctgcaggcgcatgtgtgtatgtacttacatgtgtgaacacatataaagtgtcaggtttacagaccctggctcaaggacagtctaggatgggaaaggaggtagggcgagaagaagcacatattttctccctggtgcttcagcctcaccctatccaagggacagacatatggggtgtgagaaacccatccccaggtcccagccttcaggactggagtccttttgagtctggtggagtcacagatccagtctttgggggacactgggtctgtctccttttgaaagccctggaaaggtgggaggtaagaagtaaagggagacaggtccctgctagaagaacttgacgcctcggccatcgctgacagtgatgatctcggccttgtgctcctgctgtagggcctgcagagcccgcagtagagtggcttcatccagcccgtggaactcctcatcctctgtgtcttccccattagtcagttcatacagggtaaagacggagttgttctggccactcctggaaacccactgatagatgagtttcccccattcttctggcctccgccacatgatcaggaagctggacttgctcttatccaaccactcgaggttccctttcttcctcagttcctctaatacaatctggatcgaattcccacaggaaaattttcgctgtagcttgaacgttgttgaaagagcgggctctccctgagcttcccatcaccgtcaatgctggactgtttgtgccaggcggcaagaaggacaggaccagcgagcacccaggcggccagctgcttctgccgagtgtccacattcggttgtaacctgccgggtgaagggagtggggcgcagaattagagggcgggaggcagcacttgcccgggacgcatttcaggaagaaagtaagggactgagggtgttggccgacgggtcttttctccccctccccatatgaagcatccaggctgagcccagggtccgggggaggggagggaggcacagcggtgcttcttggggtctgagcctcacgtaaagaagggtgggaagctgatactccacggccactcgaaactcatcg

SEQ ID NO: 57594 - DNA, 1576 bp, Homo sapiens
actggaggctctaagatggcggcagtggcaacctgcggtacgtgttgccgcgagtactgggtctgcagtggcgacagccagcaagagcaacgtcaccagtttccagaggaggggtcctagagccagcgtgaccaacgacagcggcccgtcgacctggtgtccattgcgggcacgcgaccgtcggtgcggaatggacagctgctggtatcaaccgggctcccagccttaggaccagctcttaggtggaggtttagccgttggaacagttcttctaattgaggaggataaatattaatattttactcaccttttgctctttcaagtatttccctggcagaaggaatttgtcaatgggcatactttgttggttgcatctgctaaagaaggatccctgccaacattttacaggaacttccaagcaccattacttgaatgaataaatgtaaaaaggaatttgaatgaagatgtatacaatcataaaacaccagaatctaatattaagatgaaaatagcttggcgttaccagttattacccaagatgggagattggaccagtatcatcttcaagatttggtcactattatgatgcatcaaaaagaatgccacaagaactaattgaggcttcaaattggcatggattttttcttccagagaaaatatcttcaactctcaaagtagaaccctgttctttgacccctgggctacacaaagctgcttcagtttatccagaacatcatttatgaggaaggatttgatggatccaatcctcagaaaaaacagagaaacattttaagaataggaattcagaatcttggctcacctttatggggagacgatatttgctgtgcagaaaatggtggcaacagtcacagccttaccaagttcctctatgttctccgtggtcttctgagaacctctctttcagcctgcatcatcacaatgccaacacatctgatccagaataaagccattattgcccgtgtcacaaccttgtcagatgtagtagttggtctggaatcatttattggttctgagagagaaactaacccattgtataaggattatcatggattgattcatatacggcagattcctcggcttaataacttgatctgtgatgaatcagatgtcaaagacttagcttttaaattaaaaaggaagctattcaccattgagcgactgcatttgcctccagacttgtcagacacagtgagccgctcaagcaaaatggatctggcagaatccgcccaagcggctgggcccaggctgtggcatgatggccggaggcaagaagcacctggacttctagggattcctccttagtcgctgcatgcagaattctatgacactctaattatgattgctaatagcttatgtaaatatttttcttaacaatttgaccctccactccttgaaaaacacaggattataaaatggtgccgccatttctcattttttaactttttacagaactagcacagcagaaatacttttaaatttttccttcatgctctagagaaaataattttatttttaaataaacgccaaaaaatgtcaaaatctcaaaaaaaaaaaa

SEQ ID NO: 57595 - DNA, 589 bp, Homo sapiens; identical to SEQ ID NO: 14252
  misc_feature (1)...(589): n = a,t,c or g

SEQ ID NO: 57596 - DNA, 3344 bp, Homo sapiens
  misc_feature (1)...(3344): n = a,t,c or g
ttttttttttttttacattgttgaaagttgttcatattttattttctaattgcagtagtttgtatctgatttctttacatcattccatatgatgggaaaggaaacctctaaatcagttagtactaattagctgtcatgaatctatagtaaaaggaatcactgaagatttaagaataaaatattatcagaggtatcaatattaataactataatctttttctaaagaaatatagaacagttggtattttgtaaaatatcttcaagcaaatgagagacttcatctgttagtcttatgccaaattaaatgagtttggtagcaatttcaaatactatgttgacatgaatgtacaaatatacattctacgtgttccttctattgtacgaatcaaagactgcacgcaaaagaaatgggaaatacagaatacagaagacatgcaccttctatcttacatagtactggatatcaagtgaaaagagcagacactgatctaagtacattacatgtataaacatctaaattatcaatcctcccaacaattctgcatgacaggtactgttttcatcatccccatcttagaggtgaagaacctgaagctgagacaagcaggagaatgtgccagtggtcacctgcaggtagagggccaagtaagggtggggcaaaggccctttgaccccaggatccatgctctcccctctccagtacactgcctcacaagtacctagcaacttgcagggctaggaggggggaataagagaggacaaagtccaatacattctccaaattgctcagttcattctatacctgagagtcttgtgtcgttttcacattttgctcttttctgaataggaagaaaaaaagcaaagataaaaaggatggtagtttagggtaaaccaaaaacacaaagcagtgtgcaaaagttcatgggagtccaaagagtataaataaaacttacccttacgaagtagaataaagataagcatttcataccaatacaaatcattttcatctttatgacagtcaggtaacatcaaaaaaaccttgctttcattctgatactttagctgtcaatccagtcaataccggttgttgttaagtctgtatacaagtaaagtataaatctagctattttactcaaaacatgcttttacctatttgattactcagagttactctgaaatcaataatgacagcagtttatacctatggaagatgttactgaacatcataatctaatatttacattagatgagattaagttaaattacaagtcacaaagagtttgtaagcaaacatttatagccatgattccacagatgtggtgagtaaaccaacagccattcctaaataaaatacaagaatttccatcatgcatagtttacaggcttggtaagaagcggtctctttaggggccagatgcttaagaaatattcaacaaacaatgaaatcttggcttttttttttttttacacaaatgtttggttatttagccacactagtgataaaacatattcatattctaactgcaagtggaataaacattgcaacaaaaatgcaacccaatcaaaatcattagtaataactattactccctcttagcagtaagaaccattattcttggatttcaaacattttattttctgtgcatagcttatagcactgtattataggaatcagagtgtataagcaaaaaaatgaaaaataaaacttcttggagaccatttccattatttatgattaaatcaatgaaactatacaatttccacattaaatacaaattagtagaagaattcctccaagtagtattgcatataagctacaactttaccccaactattttaatcactatgattcgagatttcctaggatttaacagcccaagattgggctgttactacctcagcaagaacaatcaccagtaaatacatgaactggggttatagctgaatttttagaaactctccagacaaaccacgtgttagaggaggtaagtagaaaaactaatgtttgagctgtgctattcctaccaggaactatatcaaatatgcaaagttcaaacattcttagtaaaataatatgaaaggatctatatatactgtaaatttagcaaaaacacttttatgtacagaagcctaaatatcttaggaggtttagaataccaatgaagagaattgttaattcttcaaggctggtttcttatgaggattaaaaaccagcccttagtctcagatgcattccacctagatgtgttcacgaactccatagaataagaaatataaaccatgaatacgtactcttaatttccattcttcaacttaatgttctatagtacttcagatttttaaatccagagtttggtgtacacttaggaaattatagtaagagtagattagagaagatttgcttgttttccttttgaagccatgtgaaggtttattaccctgtgtattttcatcactgaaaagttccccggtgactaataaaataaaagtgtcacaagctacatgatggatctcttcttttaatgttgcatagagtttcagtttggctagtgagggctaactagctcagccctagtttcattttattagagttgaccactaaaaactaaataaggaagttaccagtaaagctaattcccaatacaagcaaaaaacaaaaacaaaaaacaaaaacaaaaccattcacataataaaatatatccttaacacaaaataagggtataacatattctgcagcatgacattttattttatttctcagctgtagctttttcattcagaaactggagaccatcttttcactgagttgttattccttcctcttcccttagcttagggatatgttgaaaaaggcttttcaacaagtattttattttttacaagttgctatgaaattaaaatttatatatatatcttaagtgtttataaagcactcaaaattgtagcttacatgtatatgacttctgaaaataaaaatcacacttctaacataatctttctgctctgcaaaaatattctacatacatgcatatgatcaaaacaatcttttcatgtttggggtatttcttacacatagtaaaagaaaagtcaacaattgtatcagtacttcccctgttaagataactgagtgccacctagtggttcaatttctgcgactactaagcctacaaattcaatactgctattaaaccccaggttctgaaacgggcattttgggaaaccntttttttttttttangggttacggggggcaaaatacggcctntggaaagacctnggtatccaaatccggtttaaaatagcccaggggaccttaatntggcaaccaggcctatttttttctt

SEQ ID NO: 57597 - DNA, 2076 bp, Homo sapiens
ttttcaatagaaatgccataatttattccattgtataaaaaagtcatccttatgtaacaaaatgtcttcttagaagaagaaatatattatttcaggtcataaataatcagttcaggtcataaataatcagcaaacatacaactgttggcaactaaaaaaaaacccaacactggtattttccatcagtgctgaaaacaaacctgcttaagatatatttacaggatagtacagtactcaaaaacaaaaattgaggtatttggttcttctaggagtagacaatgacatttgtgaaggcagacacctacacaaaaataaataaggtatattctcatatgtatatgtgtcgtcgggaataatactggtaggtatgtcaagcatgaagagattctacaaaaaacaggggcgagcaaaaagaaaccggatcacacactgagtcctttctcttctgccccattttgtcagatggacttgatgtacccactatatattggtcccgaatgtgctgagttcagcaaatgtcttgacgctaagtcatcaccataactgcttagaaacccagaggaactcgggtgaagttaaataaataaggaccagccctctcgagcccctcccagagttattgcatttctcctctcaaggagcatggagtcccaatgggatgtgaagagcctcacctcccgtggcctttcagcagctgggagaggtcgtaatggggctctgaaggtagctcagcgcactgttcgtggagtggacagggatggagacggggaagttgaacacggtggtggtggaggtgcctcggtcgagcacagccatggcggggctcccagcctctgccgaacagtgcggagccagcacctgggactcaaactgcagcagctggcccatgaagctgaagttgggagagatgatgcttcgcctctgcttcacaaactcaaaggcctcgtccagcttgactcgattagtcctcataaggtaagcaaggcagatggtggctgaccgggaaatgcctgcctggcagtggacaaacacccttcctccagcattcttgatggagtctatgaagtcaatggcctcgttgaaccaggagctgatgtctgccttgtggttgtcctccacagggatgctcttgtactggtagtgaccctcaaaatggttgggacaattggctgagacgttgatcaaggcagttatgcccaaggcatccagcatgtccttgcgggaagcgtgatacgcactgcccaggtacagaaagggcaggatttccaccgggccaccctgatcgtagagtggggtactgcaggaactgcacccagattccgcgctgtcagggacgctagtactcaggggaaggctgagccccatggggcgtcgactgtttgctgcacagctccgggcaggaagccgaaaacgcttcgtatcctcctttgagggaagaagagcttgcgcggcgcgcgcctcgcggcagagcgcgccggccgccagggccagggtgccgtcgcgcttggcgccgtccagggcggcgctgcgctcgtccagcaacaccacggcgtggtaggcgccggccagcaggcggccgcggacgtcggcgttgggcacgatgtgctccaggcccatggcgcccttggcccggcgccgcacgatggtgctgaagcgcacgttgacagagccggcgatgtggccggcgttgaaagcgaagaaggagcggcagtccagcagcaggcattgcgccgctcgctcccccagcagcgcccgcaggcctccagcgtccagggtgcccacttccatgaccatggccggcctcagcgcccccagcgtgatcggccctgcggtgctctttgtctgttctcggggccaagggcagggcggcgcttttcgaggaaaagctagacccccgggtctctctgcgccgaaccaaaagccgcttttggactgagagaggagcgtcacgcggggctccgggctcctcggcttcttcgcggttcccccgactgcccctccgacccgcgtcgcacacacagcccaaatgtccttcgcagcgagcctggcccggggagcgcgtttatatgcggcctc

SEQ ID NO: 57598 - DNA, 651 bp, Homo sapiens
  misc_feature (1)...(651): n = a,t,c or g
ctgattacgaatttaatacgactcactatagggaatttggccctcgaggccaagaattcggcacgagcgcgcttggccatgaagttctttattaggtgattgtattagtccattttcatgctgctgatgaagacatacccaagactgggcaatttatacaggaaaaaggatttaatggactcacagttccatgtggctggggaggcctcacaatcatggtggaaggcaaaaggcacatcttacatggcagcagacaagagagaatgagagccaagcaaaagaggtttccccttataaaaccatcaggtctcatgagacttattcactaccacgagaacagtatgggggaaactgcccccgtgattcagtaatctcccaccaggtccatcctacagcacatgggaattatgctagctacaattcaaaatgagatttgggtggggacacagccaaaccatatcaatcatcacctaaatgggaatcaggtaccttttccaatcctgcagaacctcggagaaagaaattccattcagcatcagatagggttccttctcgtgccgaattcttggcctcgagggccaaattccctatagtgagtcgtattaaattcgtaancagtcaaagngtttnntnggtatcaanannnccccc

SEQ ID NO: 57599 - DNA, 544 bp, Homo sapiens
tggaatacccgttatgacatgattacgaatttaatacgactcactatagggaatttggccctcgaggccaagaattcggcacgagcggcacgaggctggccaagcatctaagaatataatccagccaccctcctgtgttttgcattattataatgttccattgtgtgtcacagaagagaccttcacaaagttgtgtaatgaccatgaagttcttacattcatcaaatataaagtgtttgatgcaaaacgtaagtgaacagtccctcttttaaagctttctggttaagttggtgataagcaagtaataataactgagtttgtgtttttttgttttagcttcagccaaaacactttctgggctattagaatgggagtgcaaaactgatgcagtagaagcccttacggcactgaatcactatcagataagagtgccgagtaagtaaaatgctttatttgtgttgtaattatgtagtggcagttaccatcacagaaacattcatggaatatataaataacacttaataggcttcttaaaaaatacaga

SEQ ID NO: 57600 - DNA, 2406 bp, Homo sapiens
  misc_feature (1)...(2406): n = a,t,c or g
tttttttttaaagttaaacttttaaagttaaaagtgaaatttattacaatacaataaatgcaagtgtcattattaaaaatgccggttaaaattataaagtatctaaataatttttctaatataaatattggaaatgacaactttaacaattctatatgtacacaggacactgaaaacataaaatcatgaacaaggccaaaaaataacgttgcacattaaccctttagttattactttctattttccagtcccagcatcatacctgctaattactcagatcacaagcctcaaggattaagtgttttgaatgtatttcagtttcatactttaacaatgcttaaagactattggttgtattctgatcaaatggttctccttcccatatttccctttctcaatagatcttagacaaaaaggtgagcagggaaaactgtgattacaggatccaacatgacaggtatacccaatgattcatttaagggtggcataaagttatatagaaaagacctacaggacggaagacaagtaccatccaacatgtagtgaaattaagcagtttcacccactgcgtgcttacatggctcctatatctcttcgggaagaagccagagccgtagagaagtcagggcaaaccagaactgttgaggagtaggggtggggggcagagggaaggagctggggagaagtgccagatcataaaggaaatgtaaaagagttacctatctgttctccccctcctgctaacgcaggggctggctcgagcccagcctccctgcccgcatctcagtggagctcttcccccagcattgtctttcagatgaaaagatacatctgttccccactgagatgtttttttgggggagagagtatgttttgttttttattttgattatatattgacaaattattgtatatttttatagggtacaatacggttttatgatttttgaatataaggtggaatgattacactaattaacatatgatctcaaatatttaacttttttatgagaacattagaaatttactctcttagcaatattgaaatatacattcaattattcctatatttagcatgctgtgcaagtgatctttaaaaaaaaatcacacttattcctcctaactgaggctttgtaccctttgactgtctcccaattctgagaacacttttcataaatttgaggaactgcctaaatattataggcttgaacatctgaacttgtcctcagcatgaaagcaggtgagactttttttttttttaaacaaatgagcaggtaacacccagagaggttaagtggtttagccactggaaagataaggaagttgggtgtgatgtttacttctctatgatgatgcttctcaaactttccatgtgcatacaactcctttggatctcatcaaaatgtcctgggtccagagtggggcttcagattctgcatttctaataaggctctaggaaatgttgaggctcttggtctgtgggccacacttttaatagcatggactacaacacaaagagggatccaccccggccttcctggggtcatgagaggcctgcttcagcgttatctgcctctccaagcacatccccaagcaaaaggtttcgatgcactgcataaaggtggcagctgcctacaagactgcgttaatatattttctgagagcaccgtgactacatgaacagccaaacaagtaacataatttgagtaacataatctaaatttgacaggtctatttgctgagaataaaactcatctcctacttatgaagtctttcttaaagtgaacatgatatataaaggtattaaaaaacccagcatattaaatttcatagtaaaatgccgcatgtgcacatgtatacagatagtatgagttctaagaaattcaatgcactgtaatcagaataaagtgctaccactgctcccagctaaaatcatctcctcttccaaatataaggaaaaacccttgaattgtaaggaaaatgactgcattgcctgccaacacaaggccgcaggctccccatttgatcacagccacacgagcaagaataacaggaaatccaaaggcagaaacaacaattccagtagtgaagaaatatgccagttcccgacaggcactactggttgcatctgagtcataggtgactcttttggcaatgaaatgggggatgggggagatggcgtggaaaatcaggacgaataagggccagtaaacgctgtcagttggacccaggccataatcctctaaggcacatcccagcataagaaaagtcagtccaatagccccactgaaggataatgccacgagagctttaacgcccgccatgtctcccgaactggggccgcggctgcttccggcttcctncacggccctgcagcctgcccaagccagaccgggatgtcccgcc

SEQ ID NO: 57601 - DNA, 1671 bp, Homo sapiens
tttttttttgacaatttactctttattgattaaaaatgaagaaaacatgcagtaaaatacaaagtccaaaaaaaggaggaaaaagttgaatattttacatcttccataacctagcatacatcataaggaggaatctccacttattggtacatcattattctctcctccagattattaaatattatcagctggctctaggatttggttcaaaacttaagcaaaaacccaacaaatcctttagtcgtttagaaagaccaaacatttcacaaatagcattggcacatattactttgtgctatagttagtccctactccagggacaaggggatcctgggacctagtcaaagaggtgcactctgaatcagcattcctagaaaggagtacagtcactcactaggttacgtgctgttccacctgggcagtttctgttcatgtattttctcagtatcactgcacaagccagcaaagggagtctaccacacatcatgcagaagaagtaacactgtcctgggacatggtgtctgtcttctaattcctagcagggcaaacaatgaactgaaaagaaggagaaaccccagcccaattctatttgccatgactgccccactgcagttcacaggtaatgatgggctagagaaagtgaacaggggatgggctgctgctcactcccagctaggcaccagaccatctccacaaagaatgctagaacagagtgatgctgccaccccttggattcataaataagtagattttgatgggtttgaaaaaaaaaaaacaaaactctaaggtaagcggtaagccactagtcttgtgccaaagaagatgctatctcttttctatacctcattcctacctccccatccttgttcctctccgtcccccctccacaaaaaaagaaaaagaaaagctaagtatttttctagcaagctggtcaatcttcttttctccctcctggctcagcaggctccctccttttaccaagactgctgggacgttgaactccggtgtctgatcatctcacctactctcctcctaactcccaactgaaatccatctcctctcttcctccccaacatccatctctttcccaacatgcctttgcacctagagcaggtgaagaaagcccatgactaaaactaaagactcagaatgaaacaaaaggtgtgacaagttatttgtggggaaggttttcagatatgttccaagagaaaataaggtaaaacaaccttgttcatcagaccaacagtgctggaaagggctcgagtgattctgtaaagggcaactctcccccctttccagggacccacagcccatctttgtgtatctttttaaggccagattgagtatcccactcatatataaaactcggtagggttactagcagttagacaaagactatgaaacggtaggaaaaaagaaaaatcaacctcactgattattcacatattgcattatgagtgctcttttttaaacctaaagaataatttatattatttctgtagaaaatcaaatgaacactgtctactcataaaacctaaaggtcacggcacatgtggtttcactttccatcttgagttagcttcagcacacagagaccccctccaaagggtcagtgcaggagagcaggcagaaggcagcctctctggcccagtgtgtgtctcctttattgct

SEQ ID NO: 57602 - DNA, 2217 bp, Homo sapiens
gtacaagacagcgacttacgtatcttttctcctcctccctagtgttcctccccattttttcagaaaacacttctgactcctgtcccttccccttctgcttttggtcagtccctgttcttgagcctcttttctcctctccccaggatgcagaaagtggtgaacccaggaactgaggaaggaggtttccagttcatttacattaagggccctgggggagaataaagctcagagcaggagggagtaaggaaacatttcctttttgtttttatttggttggagtttctcatatttgaaaacattgcggtatccatgatttgtccttgtggagggtgttcctaggtagaggtgagaatggggaggcaagatctcaggcaccaggcaggaggtgccttgtaagctaactgggcggaggtggaggtgcagtgtcaactgtggctctgtaactcttcaaaggcccagtttcccctcacgcagcctcttaggtagcgtttcccctaatcgtgggggttggaccccagagtcttccaaagaattttcactggttgcctgcatctttggctctgctgtgatctgattggaggagggacagtttctgggtacccatcctctgatttatacatatgcattttttcccctctggcctttagatggcctcagccccagccaccatatacccctgcagtttgcactttaattgatggtagttcagttggggtacttgttttatggaagttttgattgatttacttgccctcccaccttctttttaattcaatgaaatctgaggttaatgcgaggttcgaggagaggttatagataaaactaccagtggcagctactcaagtcctatctccactgttagcttcctccaactctaattattaacctatattcttgccaagctaactattgactataggtttgcctttcctggagaattaattgagcaattgaggagtgtctcaggatagcacaggccaaggtaggggagtaaaaaggaggtcaggcaaaagggaggagttttctgtcctttcccaggtttcacactcaatttgatatccattaccatgtcttttctacttccttgtaaataggtatgatctttattcccactgtacagtctgttctatcctctgcctcccatcaggccctgtttctttgttcctttgttaatatcttgaatttagtccctccatccttaatccccccatccctccccatcatgcaaccagtggtttaatccatgtaccaataggggctagtaccacagaggcctcctgtggtgccctcgtatcataccacctgttcctgtggagagggaatgaccggcactgaaggtaccttacaactggctcatattatcagaggaccttggtcctttctaaatctctagtctctcttcatatccttcatcaggtgttttaagatgtctctgagaagccatcaaggcaaaagagaactttaagttccttgttccagcccggagttttgggaaagaaagaaaggaaagggtcacagtgacctaggattggaaccttcctgcccttttggcttgcagactgccttctatcccagaacagctgagaaatctatgaagctgagattctgaaggacccagcttaggttcttccacttaggcctcaattcccttccttttccaggggcagccttagttcccatggccctgaaacacacacatttcccccttcctttcccagaagccactggccccccatagcacccagtgcatcctttttacaagtggaagaactaggatggctttccaaagtcttctagaaatgaagttctttctctgtgcagctttcccccttgggagcaggagtgaagatgtttcattatcttgggcctgggaaaccactttccccaggcttctccctccccccacccccataggaacaggatttggccttagcttctgggcctatcggctgccttccctctacttcctaccacctcttctgccttcctttgagctctgttgggcttggggatcttagttttcttttgtttatttcccagctcatttttttcttctggtcagtttttttaagggggggtgttgtggttttttgtttttgttttgcttctgagaaagcatttgcctttcttcctctcccaacataacaatcgtggtaacagaatgcgactgctgatttaccgatgtatttaatgtaagtaaaaaaaaaaaaaaaaaaa

SEQ ID NO: 57603 - DNA, 726 bp, Homo sapiens; identical to SEQ ID NO: 14268

SEQ ID NO: 57604 - DNA, 1812 bp, Homo sapiens
  misc_feature (1)...(1812): n = a,t,c or g
agcctatgaanatgattacggaattnaaaatagggcctaacctaatggggaaatttgggcccctnagagccaaagaattngggaacgagggaatttgcctccccagntgaatgtttcaagttctggtttctgtttagtcttcctttttttccttttttctttacttaaaattatttttccttttagaaagttcaccaggaaaccagctcccctcccaccacgccgggcaggccacagccatctttttaaaatccgcgctgattttccctcacacccccaaacaggaactcctcaggatggcctcagaaggctggagtctctccctgtctggcgggacaccctggtggcggtgaaggcccctctgccacaacggaggtttctgattgtggggacacagtctggtttttgttttcttcctgtcttctaattaaaaaagacattcctgggtgacaggcacagtgcaggagtgtgagctatcgaaacaacctggtgaagtctcgcaaggcccagcaaacttgtttacattccctcagcactagtgacttgcttgtggaagtctgtaagttgtttgtgtgtcactgtgacggctcccacggttgtttcctttggcaaaccttttaaggaattttctaaccatcgacaaaaagtcggtctgtcaacctgcatgatctcccagagcacttcagccacatctggtagggtatagggggggaggcaaaagcagcaggtgtgcagcagctggctgacaagctgctgtccaagctggttcatcacctgtccaatcagttctttccgtaattcaaagtcttcttcatgatcattggctacccctgtatgaatgaggtctccgtagaaacctcatgacactacaattggcatcccggtggtccccaggtaataagaggcaatggcccactgtaagatagggatgaccacttggctccgccagcaaaggtgaacagggctacgctgaaataaaccctggtggctagccggaacaggtcatcctaacagtgtcaagggtgattctggagaccattctgctgttctaggagctgaaaggtggggatgcacagtgcctggagcatgtcctaagcagtccctgccgacagccttcttccatgccatattcatccacaaggatactgccaaggtacaggaagcaggaatgctgatgtacgtggtacacattcaccatctgtgtgactagtggctcgagcagtgctgcagatcctttgcctacacagcgaacagcaaagcgcaggcacctgcaacaacgctctacaatccgattatcagctcggtgcttatttagagtctcggataaaactggccatatttcctgtatgactttctgacacggatgagtctgtccattttccacaatgggattggtatgcctaaatatcactgcaaggcgatctaagaacactgtgggatctgaggatatgccattgctgggctcttgagacaacagctttttcaatgccataacctgaacagaacatagttcactaagacattcggtaatcttatccaaaggtaatcgggctaggacaagtgctgtcccttttagcaagcccacagcagcttctggagacaacaggaaggaatcgagggagcgggcaatctccaggagtccattaaagtgctgagccatgtgatctcggcagacagagcaaatgttatgaatggctttggctgcagcagaagccaggggcttttcacacaggcctttcatcaaatagcccaacacagggtcaaggaactgaggatttcgatcaacgacttcactcatctctccaaccaatt

SEQ ID NO: 57605 - DNA, 2719 bp, Homo sapiens
gcttgaaaaatattttactactactaagtattcagaaatctttgttatcagtaggtggtggtagtgatagggaagggagctttgatcactaatctctcagactgtggccagaatggtgatgcttaagccaagtatgaatggctattaacatactgaggttagggaaggagtactgagaagtgctttgcagcaacactcgcagcttgtgtgatgatgcagaagaaaatctgatcatgttcaccctgctttgacaatgagccttgcccattggagaatgttcaatcaatagtagacctaaaaaaaatcaacttgttgctttcatctttttattgatagcacagccagagctaccaaaatgatttactggattctagcaaattaataaatacagtaatttgattgtaaaaggaaacattctacttggacattttagtagaaattgctagagggaaggagctcctggcatacattctacttggatagaagagaagatagcacaggaggagaactggacagtccaggtatagattgttgagattagggattcagcagaaagcaaagcaaatgttctcattgttcttttgaggtacgaactctgaagagtcaagacattaaaaataaaaagcaattgaaccgggtagccaaacttaggcaaaaggaataaatatttggcaacattttgactttaactgccaatctgagattagtttcttcagaaatttggaagctgcaaaacgttgcctttcttattccatgaaaggcagggcaggcaaaggtaagaaaactgctgagtgggctccttgtaccagcaccaaccagcagcccttgacagcatagatgggatgagtgtaagggctatccttagcataagggaaagacggttataagctgagaagattgaaagaagaatggagccacaaagagaatagcataaataacaagaaggaaacatgaagaacaagcacttaagatattaactttcagtctttctccatttcttgatgtctaatgaggcaaaataactgggcaaggaccaccaagatgaagaagttaaataaaatgtcacaatgaaattgagtgcaataatacaactgttgactgactttccaaaaccacggtgatcggtagagtatcatcaatgttaccgaggattttgtttctgcctcattataactcacttccatgtattttgtcagtatagtacgtatatttaagcactccagtgacaattatgacaatagtttctggaagaaatctatgactatagctttgggaagcacacaatatgaaaagggaatttcccctaaagacaaggaatgcagacaaattcaaacccttaagaacaacaacaaaaaagatttaaaaagactgatgactgtgaggcaggcacattttcctccttttgctgaactggggcatgaggcatttaggttaaccatggcttaactggtgttgggtaagctttatattataaaacatgaagatggcaaaggtttcacttaagtttttcttttactactttaatttgcttaaaagcacaaatgcttgtgcttgcagtaacttcctaaaagcagaagtaatgttcccttttactaccttaataaagcatttgcccctttgatacaaatgatttttttactgtgctaacagctgaaccagtggcacaaaattgagatggtatttactgcagcaaggtccctgtaaatcaaattctaagctttacataaaaatcttatttataaaaaatacaataccaagtacagtgagaatggagcatggagcagcagtgctccctgccagggccatgtggaagtggcttttgctacagtgcttgcttaatggcacaagtgaaaagctgaataaggcaaacacttgaagaggcagttttctgtaaacttctgggggtggggggaatttcctctcgggacagatactggtttgggatggctaagatcagaaggtgtgatatttggctgcacctgacacatcacagatttaagatagcttctgctggatgagaccagttaactcttttaggagagaggttatcactacagctttctgcctttactgttacaatgtgcagccgcccagatggtatcctcctatggaaaaaaatcacctccaaaatcttcctaagtgaaaagatacaaaataagctaagtcactaaaaggtttccttagcttaaagctccttaagaatcctacattgataactaagtaactttgttagcggtgtgtagctagacacaaatgctttaactagaatatgtattcccactcacttggtacctaatagtgatacatcgtaatgacacttggaaaacaaactggtcctgaggaattttggcctcttctcatgtcctcacttggaactttccagctttcgtgacgtatttgactcctttaaatggcttatatttctccccatacatgtccaaacggtttacttttaagcctgaaatagcaagctgctggatcttaaactgtatgttgaggctcggattctcttctggtttgggggctccagactgtaaatttaccagtcctttaagacttgggagcttttgtggagtaatttttcccacatcccatgttagtaccttggtgactggatcaaatgtatagctgccttgtgtgggtgtcaggttcatgttcagcacaacttttggcatgtgaactgtcactgtaattccttcaatagttttccccatattct

SEQ ID NO: 57606 - DNA, 2253 bp, Homo sapiens
  misc_feature (1)...(2253): n = a,t,c or g
agccaagttggaaagtttctaactaaagaaagtcccagagatcatatatcttgaatagaaaagggatcagatcttagaatgctgagaaaaactgggaaccattaattttggctcatttcctaaactctctggatttcatagagccacaattcttctcaacctgggggcactgcttctgtctctggagagatagaagtgcagcttccgtaattctcagggtatgagctgcctgggatcaggggaccttcatggaaacggccactacatggggaacccccttcagctttctgagacttctctggggaccaggaaccacacaatccccagggttcctgagaccccaggcataaacctgagacttcctctgcagctgatgtggtcctggatccagacaccgctcatcccgatctcttcctgtcagaggaccggagaagtgtgagaaggtgccccttcaggcacctaggggagagcgtgcctgacaacccagagagattcgacagtcagccttgtgtcctaggccgggagagcttcgcttcagggaaacattactgggaggtggaggtggaaaacgtgattgagtggactgtgggggtctgtagagacagtgttgagaggaaaggggaggtcctgctgattcctcagaatggcttctggaccttggagatgtttggaaaccaataccgggccctgtcctcccctgagaggattctccctttgaaggagtccctttgccgggtgggcgtcttcctggactatgaagctggagatgtctccttctacaacatgagggacagatcacacatctacacatgtccccgttcagcctttactgtgcctgtgaggcccttcttcaggttagggtctgatgacagccccatcttcatctgccctgcactcacaggagccagtggggtcatggtgcctgaagagggcctgaaacttcacagagtggggacccaccagagcctatagaatcaattccttggactcacagccatgcagataagccctggccatctcagcagccaccgcacaacccccctaatgaaagacacgccctcctcccctctggtcacgtaagagaacatcttccagctgcctttttcacacccactccagccctctgccccagttttctcctcctcactagtctgtggctttagtagttcctttgcttgtaattatgggatgggatccaggcatagggaactagttgtttcatagctcccagtcaaaaagaaagtgagagaagctgttgggcagtgaacctactgtttaaaatcaggataaccacattaagcccaatatgccagttggcaccagatgctgtggacttggaatgaggccaacagggttcaccaggatgagagaggagagaggaatccacaggaccaccagaagggagagggaaccagatatgcagatcagggatggagggaagtggaaccccagagagctgggaggggcccaggttgtaaggatgggctaagtcccccacccataaggagcctaaagggtcctgggagatgatggctcatttccacccaaccccaggatttccacagcacacacccacaggcctggacctgggatgaagatgaatgaagaacatggactcatgtggatgtggtttggctcagatgtccctgcaataaacaaggggtcagtacttagtccctgagtgtggttgaggtttgaggtcctggtcgagcagggcagtactggaccaggtctacgtcagcattcaggttcaatggggacaccagtggcttcaaacttcctgatctaattatgtttttagacacttagaagttattgaggactttaaagagcttttgtttatttgggttaatatttatgacatttgacattgaaacaaaaatttaaaatgttatcttttaatttatgttaaaatagcattaataaatcagttataggttaatgtagataggatgttttgtgaaaaagcaatctattgtgtccaaataaaaaaacaaaaagtgtgacactggttaactttttccagatctcatgtctggcttaataagagatatttgtattatcatatctgcctttgtattaaacctattggtatatcataggtcatgttagctcaaaaaaactttactgcacactactgagagaatgagatgaaaaacgattaatgtttcattattattattgtgaaaatattattaacactggggactccttaagagtacatcagagttctctcctaggaatccccntaac

SEQ ID NO: 57607 - DNA, 3291 bp, Homo sapiens
tttttttttttttttagagtttcaaaggatttatttgatttccccacatgatcacaaccatggttttacattgatagagtctgttgccactgacaaacagaatgcagatgaaaacaaacgcactcctttcctctcaaaggtacacagtgggggtgccaggcttcttgtgagggaggtgtcccttgaagtctctgaacagtctggggattcaggacctgattctaattgcttaaaacaactcggaggcaaaagatattttccaagaggagatgcatgctgtgtgcagtctcgatgtgactgcacacagaagggcgatgcagatgcatctgaatggagggcaggcctcctccctcttgtcctgtgctcagcacccccacctcaccctgctcagtgttgcaatgctgccttgactattgttgttacataaaatacaaatgtactcgtttctcaggcaggaagggtgatgatattttacaaggagaactgtaagactgtgcgtgcttacctgcgggcacagagcttcccgtggcgctgagtcaacaccccagcatcagctgtgaacatctgctgtcttttcagctcattaagaaaaacaagaggctcctgctgcatgcagtgtgtgagggaaagatcactgcactgggtgctgaagacatttttaagcaagatgtgcacagcatattaggatgaactttatttttacattgttgtacaattcattggtaaacttaaaaaaatacaaatacatgatttgattgttgtcccagaaaagacttttgtcacattgccagctgtttccctcagcgtctcctgctcctgtcagcaattctgtatgtaactgcaataatttgtgtgacttgagaaaggtgtgccaagggcgtcctcacagtgagaagggaccaggcagacatcctggggccctcggcctcctcctgcctcccctcccaggggatgtgatgacaggaccccgaagctgtggctctgacaggtgggatctctaaaggggacagtcccatgaaagacacacggggacaccagctcactgggagcttttgctttcccaaacaagatgtgggcagcatgactccagcctctggaacccaacaatgtatcttccacaaacttttgataagcttgcaaataaaacagaatgaaacctcactagcctgaaggaacacactgagtgcggccgggaaaccccgggaagggctcagtgggttccagcagttccttacgcgaggccctgctgcccagcacagctccaggacacaccgaggacagtgccacaggctggcagcccgaggctgtggagcttgcaggatggcgatggagagggagagtttcctgaaaggcccctcctggggttttctgtctgtccctaattcattactgctacccttcagaaagagcaattctgtgccaaacggcctgaatcttttctggaacaacctaaaggttacagttagactctccctccccagcaacagaagagggtgagaaaagctgacatactcaatatgtaatcgctttacttcaacgatgtgtttacagtcacgccaatacattttgcaaacgcacaacacgcagagcgcagcctcacagctgacgccagatgacatgcagcagtttaacgcttccaggtcggaacaacctcctcaaaattgcgagacaaagagtgctttggggagcctggcttttaaaaaagacccgagaattgatgagtcggagacaccagggcgcttccctgacagcccagcctggacccaatcacacgggtcccatgctgtttctttctgagcagacaccaaagaaatgccacgccaatggggaggacacaggtggggcggggttaaagtcacatttttaaaaagggctaaaactctaggattgcctgtattttctctctcttggagtttaacaaagtgcttggtttgcagatttgctggtacggtgatctcaatgatatgaccgagggtgggagggatgtgaggagggaaatcggcaaaaccttggccagccagccagccaaggtgacacacagccagaggggcttccctcctcctcctgcgtccggccacggctcaccacgctgtccactggaacgcggccccgcggcccgcagagtcaggcgtgacttcgccctttctgaaagggcctccgcctgggcaggcgccggggggcagtcctcgggtcccatggcttaggagcacagcactgacggctgcagtggctcgaaaggctgaaactacaaagtatggcccgtgggtgactcgggcacagacctgccgcgtgcaggtctggccctggggagcgcatggtgtcaccacaacacagaagcgacaagagcacagctgagagtcatgtgatgccctggcagctcactggaccatgggaaggcagcgggggctccgccgggcactcgtcggctggggtcacacgggccacggtgaggacacaggggttctgctagcacatggctacatggaattacggtgatcactgctaccactcagaaaacaaaacgggaaacacacacaccgccctgggttgctaaacgctaaagtcaaccttcaggttcgagagtggttcctgatgaaaacactctctgagggcttcggcctggtgtgggttggaggcgggatgaggacgttatggtgttggggagacgaggatgagagctggtcactttcatgttggagatgaacacttctgccgtgtatgggtgcccctctcggaggactctgaatgagtgtgcgtcaaatcatatgcgcataaaagaaacatggatcatggagagtcacagttatcgcagccattaaagtgtctaagaatccgtgtaaccaatgtcctaagacaaccagcttgtaaccagctgtcctgagttgctactgtagagtgtactgcaagtttagctatttgcttacctgaaataacagcattataatactatttatgatagtattctgttaataaaataaggattccatacaaagcaatactggactttttaaacagttagatgcctatgttacttggcacagttagtaatgattgtgtaaagattttagccagtcctagagggacttctttgtatgaaaatatgaagtatctgaatttgttcctagcatttagggtttggtctattgtctcacacacccagctaaggtactgtcttcctattaggtaagtggagctccttgtaaggtgggtattgctaatgtggactgaaacgcctgcctttcacacacaagtactacctatacagtatatatatatatatatttatatatt

SEQ ID NO: 57608 - DNA, 2127 bp, Homo sapiens
ggtataaatactttattaaagaaatattgtcattttcgttaaaaaatacattagagaagagagttttgggttaccagtctttcctcacagaatcacagtgtaagatattcatttcttgacgtctctaggaaccttcaggccacggatcagcagaacatacacgaacaagggaaaaaaaattcctcttaattttactgatggccccccgtctctcaggtgggtctgagagtggcacttggtaaacagtgtgtgtttaatccagcctctgcctctgactacctttaagaccaggactcgaagcagagtgagaggcctccctccacccacctcggggcgagtgaagacacagctttacagaggcgttcaaagtagtgacgcagtgaggtctgaatgaacacggaggattttattactcaccattaatggtagtgaaatgcccttcggtggataccatcaggtgaggtagggaagacattccagaggaaatctgttaatggggcaacgtttttatttctgtacatttacatacaaattttccccaaaggtacaacagatgcgacaccatgcagacacgcagctgtgaacgacagttcagaactcagcgtaagcttgtgctatgaacgagcaccgtcagagaattcccacccacacgtacagaaacacagtttttatattacaacctcaaggacagagggagggaagtgttcgccgctagacatgacacaccatactgcttttccaaaacacacgggacatgaaagcgaggtggtgccttctagacgagaggacagctgtagtgtggacctcccccgcacatgcgatacctcggggccgggcggtgtgaacgtcacaggcccactttatgggcactttgcagtttgggattgctcatttggctctaggaagtggtggtgtctgagtgcgatacttcccttacgaggtttgtttttgttttcctttcctgttcctgtagcccaaacccaatttaccagcccgtcttccagatgcaggtgatcttactctcagtaaacaaaaacatgtaacctttttcctgtttctcttgggtggtaataattttagggcatttgataagagtttgacttcagaaaaagaacaaagtgaagaaatgttcagctccatctcaggtgttcacatttgtgcataacttttattgaaaggctgacagggtaggctagcggaacggaggggtgtgtggaggagagtagcagggggtgggagggtcaagttgaaacagtgggtgcctgcgaagggtctccctattagccaggaagggaacagcacagaggggttcaagcctgacagacggtgctgggaagtgggcagccgtagcagcctcccctgctgagcccggcgggcccagatgcgtatcaggcttgggtgggtcctgccaccttgctcacttggtaccggatttcccggggctgtgcccacagggaagtgttgctgctctggcaacatttcataaaggtgttgctcaacagcttcaggtatccctaggctgaagctgccaccaaacaggcacccggcctcctcctcctcaggctgccctgggaggagagctgtgggaccgcctcgccggctgagagccattacctgccgaccgtcggcaagtcagcctcacacccactggactctgctcccaagagcccaggctgttttcctcaaagctagcctcttttccagtcatcgatggattagtcctgatggctgaagtgctgagcagtgtcttcgttggaccagttttttattgtcatttgaggtggagatcagagatcatgaccagaagagtgtgagtgctgtcccttgccaccaacttcctagagatttcgggcagcactctacagcttcaatttccaaaaaaaaaaaagtttaacacgacccagtgaagactgctcgcaactttccatcacttagcatatcccttcccacaacacagtaacagtaaagtggactgcagggtggccctggtgcctgagggtgatgggtgcagacgtaacacctgtcccaggtgcaggctcaggggcctcgctggatccttcccaccttccccaaactcctactggcctggctactggataggtcctattctgtacgtaatgggggttt

SEQ ID NO: 57609 - DNA, 1941 bp, Homo sapiens
ttttttttttttttttttctgcctttcccatctgactttatttcactttttttttctataaaactcctccataatttcacaatttaacaattagttttttatccaggaaagaaacaatcctgtaactcgttaacaaaacacgattctccttattccttttatccagggagttggtcctcgggcccgaatgaagtgtccctaagttccctagtgagacacgttctttgtaaaaacccttatgggcaagaaaggtattcgataccatttgctttccggcgtcggtttacatttttgttcaggagagagcaaaacacagagatttgcactgggggcaggcggcttaacaggaaacacgtggcaatcacaaagtgccaggcccctttcctatggaagtgtccccagaggccctcgtgggcccagccgccgggcagctggggtggggtgggagagcagctggggatgctgccttgggaagcccatgctgcccagcacgtccatcaggtggtcacggagccagccctgggcccagagcagctctggaggacaacgtgaggccttccggcccagaggaggtaactgaagaactgggttggtgcttccggaggccttggaaacggcaggaagggccagacgccaccaccgagagcaggcgggggagcccgaccctcctctggctgagtggaaggctgctcgagtcgctgtgtggattttgggggactcctgcgaaggaaaaaggccagcaccctgggctgaggttcctgtccgtgaccccggcggcctcttgtgcgtagagctcccagcagcacgggccccccggtcagcccccctcaggccagttccttcagtccaatgtcttagtttcccagagaagaaaggaagcgccccatggtggagtattgttggccgccctgggaaggggagagggggcacaggggcctgccctcttcctgatacctgaaggcagtggggccgggagagaaacagagcaggtggcgaaggagtccccggaggcttccctccgaaggtttctcgggcctttccccgagagttctggggagtttcccccaggacagctggcattgggggcagccttggaggcatgggtccccaccaaggagtgttcaggatctgctgacagaatcagagcagggacaagatgagggacctcagggagggacagatggagccccccaagtctgaactcataggctggggaggaggagacatctaggtgggttcgagggggtgcgagcccacctccaggccctcagccctcttttcctcataacttggtcagggcacaaggacttgaaaggacttgaaagtcagggggttgagaggactggaggcgcctcgagtcaatgtctgggaaacagaggctaaccaggcagcctccagcccctgggacccccagccacgattgggctgcgtccgcgggagcgtccctggccctggaagagtgggccgggaaggaggaccggcttggcccctgggagaattctcaggcataccaggagtggggctgcgggcgcggcaccagcatgaattgcggcggtggaggccggggcgggccaggccgcgaccagagagaaaggcagcctgggagggccagcccggccaacccaccgggcctgctgatggccgagcccacgctcgaggggctgaccagagttcaatgcgcctcagaaaactccataaactatcccgtcttatttggcaaaagctcatatttttttcaaagtttgaagacttgaatgaaagagaggaagaggagcctatgggaggaggccgagccccagggcggctgatgcgagtctgtccgcggagactgttggcgctagtctgagtagagcccgagagcagactggtggctcccgggcgccctgaggactcgctgccctttgtagtgttggctgacccccccgggagccccgggaggag

SEQ ID NO: 57610 - DNA, 350 bp, Homo sapiens
gggccaagatagccgactagaagcagctgcagtttgaggctcccactgagaagaactaaaagagtgtgcaaatcctgcaccagcaactgacatatccaggttctatgatcaggactgactaggtggttggcgtgacccacgaagggcgagaaaaagcagggtggagtgacagcctacccaggagccacccaaggcaaggggagccgtcaccctcagccagccaagggaggcagtgagtgagcatgctacccagcctgggaaactgctttttccatggatctttgcaatccacagatcataagatcccactcatgagaccacaccacgagggccttgggtgccaaccacag

SEQ ID NO: 57611 - DNA, 1131 bp, Homo sapiens
tttttttttttgttggttggcatattattattagtttattatttataccgtgctctgttccaaaaaggatgtaaggaggcagcatggcttgagtaccaccttacttgatgagttaaggagttcacatccatctagagacacttgtctgagagactgtattagaagactacgggatggtttaggggagggaagagtgctaagaaaagcagtggcatcttgtccaacctcatcttctctctcctcatttgcaaatcatatctcaggagtaagccaaaaactggtgggagggttgcagcaggaaaaaattagcagtaaagcaggagagggttaattcttagaaaggtacacaatcccaccatccttcccacctctggtgcctactgcaagtaaagagtctggtcttctcccgacaggctctggctgggcctgtggtctcatgtggagaatagccagcgtggtcagtctgtaggcaggggcccactgctagctgcaggctccaggctctgcccctccatcacccctttcctcctcttcatccgactgtgccaagggcgtatctgctccatcatcacttggatttgggctatgcaggttggtggaggagtcggaggaggaggaggaggaggtcctagatgtggtccctgtctgatgtaggcaccggcaggctcagctcctccaaatggttgtccaccccagacgactggggggttggtggaggatcttcgcaaggcaagaacacatctgctgcatccgggtccccaaggtcaataagttctacttgctccagtgtgtccacattcacttccatggatgagatactacctatggggggtctctgcgactcgagatgcagatgggacagaggaaagacaaactctgtctctggctgtaaaatgtcctcgaagaatttttgccgctcccgaaggcggaagctgctggcgctccagggcggcaccgaggatttgggtccatgtcagctcctgcgggtagaggagcaaaacaagtacagctgcaaagtcgaaagagaagacagaggggacctgggcttggggcgccccactgcagccagcatcccaacagtggggcccctggctccggcctggacacctctgcccttggtgacctctttcc

SEQ ID NO: 57612 - DNA, 1426 bp, Homo sapiens
tttttaacattgtcatatgtctctgtaatggggtggtgggacacatagtgtctaacacttcagtttctctgctgcttccctcccattgagaagccagtgccagggttgctgtgaagatgggagagcttctgaacccacctcattaaaggatgagaaacccagggtccgagagcaaagggacttgacggtggccacaagtgcttcaaagggcagagctgggattggaacccaggtgtcatctcgatgggaatgtccagcagtgatgtcccaagtgggaagtgaagacccgaaggctcaagggacacaggtggctgacagtggtcaaaggctagggggcaggattcaggcagaggagctctagggggtgtttgccaccctgtgtgaactcccgagactctaccaggggggccgaaaggagtaccccagaagggcccaaggggtcctcggggttgacctgactctctggagtcctggatgggtcagtggctgtgggtgtttggggagggcggttcctgctgccaggctggggcagcagaccctcaagacatagttacaaagcctttggtgtcactcagtgtctggcttgccctggggcccagaagggctggtcagtcctgcctctggcaggcaatctggtaggcccatgattcaaggaacagtgacattcagtggtccagtccactccctcagaggaggcgggtccagagggtgaaacaggctgtgttgatgacagactccaggtggtggtaggtggagaccagttgggcaggggggctctcgctgtcctggggctgtactgggaagggctctcggaaaaccactgtcagagacgtctttcctaagtgggagtccagaaacactagcacaaagcagtcagtgaacttctgattcagcacaaccaggtactgagttcccaagtctgggctttggaaatggcgacagctctgggggaagcggcttaggagaactttgatcaggctctggtaccaggagaccgtcatggataggaagcagtccagctgggggtcgatgtccccaatggatttggcatggactgcttctaggagttcctccagctctgccagggccaggcgcccccctagccgcagtcgatcaggccccggtggctccagcaagaagaggcgcttccaaagggtgtcccgacggcagtgccctccagccagccgcaccagctgagccagccgtgctcgtgccatgcccacctctgcagccagtggtgggaacagaggagccggtccaggcgctagaataagccctgaggcctccccagggctgccagctgaactcccaggagcctctggctcagggggcagtctgggtggcttccggaagcggcgcatgtcagcagtgagcctggggaagagctctcgctggctggtgagcaccacgaagaactgtagcctgc

SEQ ID NO: 57613 - DNA, 2145 bp, Homo sapiens
  misc_feature (1)...(2145): n = a,t,c or g
attttattttataatattgggtatgaattatatgtagccagagatgtcattaagctttactgttatagtaggtaatatggttagtttgtagggaaaagagcatatgagcacatgcttgtgtattttggcctttgccccagtagaacagaccaatggcattctagacttgatgatactaagttttagcagacactagtaagtggtttgtatttaaccatactgatgaagcagacagattgaggcacagattttagtggctttgtggcaataaatagggcatggtgtgccttaggaaaagaatgtttataaagggaattataactgaaattaaaggaggcggcagtgaagaggaaataattctcttctatctaaatgatatacatatgatattttgagatttttataacagcagtggaacacaattctaggtagagtagaaaaaggaaagttttaagacatataaaagattcttgttgacaaattatttttggtagcaaatctcaaatggttacctgctattaaggtctgccatattagagttttgcactattttgctaccaagtttgattcatacatctaaaacattttgtagttacttgtcaaggacttaatttgaaaatcatttgccaggccacatagttatcaatttttttttctatcagctattctgttgtatttctaaaacattttttagatgactttttaaagtatatttagcagtaaccttatgaggttcaaattggtaaatctcttgtaatttagccttcatcgaataataggtaccagtgtattaaaaatgtgtattttttgcagccccttgaaccagagtaggttcagagaaactcccaaagtttgtactttagacacatcatgcttgattggtaacttccctccttttttggggaacatgtttgtgtcctattaacttaattggatagatttttaaatatttcttatttttggcacacggaaagggtagttcgagtacagaactttgatttttggtgtagatgcagagggaatgatgggtaaatttcctaggtttatgtgaatttagggggtgtatgcattttgaaacaatctactaacagatggtgctgaaatctattacctacatgttttctagttgttcagcattatgttaatgaagcctccatataaggagtgtttctctggcacagttggtaagttgactgctaacttcatttaaatgtgttactggatatgcagtatactgaaattattaatcagtttgtgtataggaaaagagaactgggttaaaagcaaattaacttgttctgaaaagaaagtatagattaattttgttttctgtttaaattttatctccttggtaaagatttttttttcctgggcagaaaacttggcatttttaggcgtagataccttaccttacaatgccaaaatgaatttaattccagtactcaggtttttccctttaacagactctatgtgtatcagggctttctaatgggtttttcctcttcgtttttaaaatgtgagtagcatttgaccaatttccagtgctcttagcattttacttaaagaacaaccactacaaaagaaaatctttgtaatttgattgtcttttgctttgcttcattaatgcctaagaacttaagaatactcctacctcattagctactcaagatgctgtgacgatcaaatctattctacataatgcgtttagaaacaaagacttgggtgaaaaatgaaataagtatattctgacttggctattgaggggaaaattcagtattaagtgttcctcacaggagatatgttagcagaatactataaaagtttgaaatttttaaaaagtaaaagtacttaaatttaggtatctctcctgaaattctttgcagttcattttttatggcagttaatccagtgaaacactcaaaagtttttttttttttttaaaagtgtttttccagataaactgtagggtgaacattcacataatcacaaatatgtaattctgtaattgtggaatgcttgtatgctttgttttcgtacatcttccatggagatgtctgaatataatactccatctgtgaatattttaaatgttgaaataaaagtaagaaatgtgccctttgtgttatccccggcaaantnnccctg

SEQ ID NO: 57614 - DNA, 414 bp, Homo sapiens; identical to SEQ ID NO: 23850

SEQ ID NO: 57615 - DNA, 1434 bp, Homo sapiens
cggcacgaggcggcacgagggaagttggcgtgcactgggagagctagactaagttggtcatgatgcagaagctactcaaatgcagtcggcttgtcctgggctcttgccctcatcctggttctggaatcctcagttcaaggttatcctacgcagagagccaggtaccaatgggtgcgctgcaatccagacagtaattctgcaaactgccttgaagaaaaaggaccaatgttcgaactacttccaggtgaatccaacaagatcccccgtctgaggactgacctttttccaaagacgagaatccaggacttgaatcgtatcttcccactttctgaggactactctggatcaggcttcggctctggctccggctctggatcaggatctgggagtggcttcctaacggaaatggaacaggattaccaactagtagacgaaagtgatgctttccatgacaaccttaggtctcttgacaggaatctgccctcagacagccaggacttgggtcaacatggattagaagaggattttatgttataaaagaggattttcccaccttgacaccaggcaatgtagttagcatattttatgtaccatggttatatgattaatcttgggacaaagaattttatagaaatttttaaacatctgaaaaagaagcttaagttttatcatccttttttttctcatgaattcttaaaggattatgctttaatgctgttatctatcttattgttcttgaaaatacctgcattttttggtatcatgttcaaccaacatcattatgaaattaattagattcccatggccataaaatggctttaaagaatatatatatatttttaaagtagcttgagaagcaaattggcaggtaatatttcatacctaaattaagactctgacttggattgtgaattataatgatatgccccttttcttataaaaacaaaaaaaaaaataatgaaacacagtgaatttgtagagtgggggtatttgacatattttacagggtggagtgtactatatactattacctttgaatgtgtttgcagagctagtggatgtgtttgtctacaagtatgattgctgttacataacaccccaaattaactcccaaattaaaacacagttgtgctgtcaatacctcatactgctttacctttttttcctggatatctgtgtattttcaaatgttactatatattaaaggtcgacgcggccgcgaattccagatctatgaatcgtagatactgaaaaaccccgcaagttcacttcaactgtgcatcgtgcaccatctcaatttctttcatttatacatcgttttgccttcttttatgtaactatactcctctaagtttcaatcttggccatgtaacctctgatctatagaattttttaaatgactagaattaatgcccatcttttttttggacctaa

SEQ ID NO: 57616 - DNA, 1616 bp, Homo sapiens
aattatgagttttagcaggagggtatatgcatgtacacatatgcatatacatacaggtttatttaaatgattggatctacacttttggaggctatttgaagtatcttatccaaaattaaaccgcattttaggcaagaagttaaaaaagcttttcagacccgaaggccatttaatacagtaaatcttacttgggtagtttagcaaacattttttaaaacccacatccaacagattggttagtattagatacacagatttggtttcaaagctgaaatacccctggtggaataaatcttctcatgaaattcagttatattatgccacaaaacagggacacttatctattgacaacttaaatattaactcagtaggctacctggtgatataaatagggaaaaaaacagtggtcatggattaggagtgagaagactatgacaccagcctaccttggactgggaccgcaaaggatgttaaaatctatcctagaatttaaaacaggaaaaatgtcaaatattccactccccattcggcccaaaccatcccccaaggaatacacccccaccccacccccacatgaggtttactaaccagctgctacagatgttactatgtcactaattaacaatgatcacagaaaatgtgtcataccagagtttttgttatcatacacaatgcattagtggctgcaggaatcttcctccaaaagctaccgtcagaaggcaaactgacaaatgtccatgccgctggtccaagaaaccacagctaagagccatgaggcattcatttgtacattgagctctctctggcatgctccccactctagttagaggggctggggtatggagagaccgtcccagccgggcgctgcagcctcctactcctgggcctccttgcgggtcaacttgtagatctcagtgggtccgtccacatgggtgatagtggtggtgagctggagttcttccccactatggacacccagatcgccattggactggtcttctccatagtttttatgggatggtgcatacaagaacatcagagcaaagacatacagattccacatcccatagatgcctgtgaaaaaggcactgttcacttggactgtgacgccgccccatttccaatggccttccgttacctgactaacgatgaagaagatgacagtcatggcagcgcaggcccaaggtgataagcatgaggaacttgaacctaaaaattagcccctcatagtgtagccgccggactttgctcatagctggccaggctggactgcttcccactgatgttccgaaacacctgaaataccatgaagcatagaaacaggaagtagaggcagaggcagattccagccacgatgatgaaggccatggccagctctgttccaatgtctgtagtccagatactgtagaagggattcgtgagttgtacccctctctcacacatgtcaaatatgaagaggcagaaggaccaacggcaatgggtccgacttgcttccaataccctgcgatgtggttccgctcgtgctgatccatcatgtgctcgccacagaagatgatccagaaggacagaagcatcgcatagaagatgcctgtcggatgtcaccaaacagcagcatc

SEQ ID NO: 57617 - DNA, 1003 bp, Homo sapiens
ttttcacagtaatagactcgtttatttctcagaatttagtttgctgcttgatattacctgcaaatgtgaggcaatcacacaatgtccttgaggctctaatcccagacttgtctgagcaccgtccacaggcagctcggcccatcagaggtctgaaacaaacctcctaacttgggccaggtattttggtttcaaatagtcacccagctcatccttagtgacccacacatgatggcccttattcccagcctgggaaaagtctccagttaatagcagtgctttgaagaagaacaccttggctccgaggttactctctgtccgcattgcctgggggaacttgaatgtgtagtgcccacagggtgcatttcctaggaacttggcttccatgttgttttctgagagtgtggccagggttcgttcagcttgttcctcgaagggtctccccaggctgccactctgcctgggggaggtaatccaaacatcctggtctccaaacttctctctgactaacaggacaaggttcctgtctagcttcctgttcaagggaatgttcgggtcattcttttcatcagcttctgttattgcggagctccaagttttgaactgtagaaatttctgctcccacatatctttccaaatcttgcgccagcaatatatcctgttcatcttcttcatcatgaagggtcagctttcttctttgccagtcgctggttttcatccagagcacgaagctcgtggtctgaatacaggcttctctctatctcaatctgctgcagtagagacgccatctcttcctgcaatggggtcaacggcttggagactacaggtggccgctgcaggcacaacgcgcccaacaagcgccatggggatccgttgcttgagggtgcggctgcaagagccacggctgcgagagcttagactgccggcccagagcctctcgaaccgccgccaaccccccgccacccctaacagcgtccgccttacgggcgccgccatctttcgttcc

SEQ ID NO: 57618 - DNA, 1164 bp, Homo sapiens
gcgaccgcctcgccgcagaagtatctccgaatggagccatccccgttcggcgacgtctcctcccgcctcaccacagaacaaattctgtacaacataaaacaagagtataaacgaatgcagaagagaagacatttagaaacgagtttccaacagacagatccgtgttgtacttctgatgcacagccacatcgcatttctcctcagtggaccagcttcacccagggaccttcatctgcagcatcctcaccattaaaaaaagaacagcccttatttactctacggcaggttgggatgatctgtgaacgtttgttgaaagaacgtgaagagaaagttcgagaagaatatgaagaaatattgaacacaaaacttgcagaacaatatgatgcgtttgtgaagtttacgcatgatcaaataatgcgacgatatggagaacagcctgctagctatgtttcatgaatcacgtatcctgcatttgtgggctgccttgttccttgttgagttgttgcaagaggtcccaattatgacatgcagcaatgccaataccccttctgtgaatacaggttatttcaagctttcgtcagtggcaaccactcttaggcagcagcaactggttttggaaatttccctgatgtcagtaccacctggatgtggacctttgctacctgtattaataccagtggcctcattttgctgtatcattacaatttggcttcttatattaatgtttgaaaaggattaaagctggtattctagaacatgcccttcactggttgtgtaaataaaactgtagaatgacacttcagatgaagttagtgtgattttaattgtgcactacaaccgagctgtaaccagttactaattttagaatgtaatcccaggacaatattaagcaaatagcctgcagtgcttcctgtgaaatagtgaaggaggagggcatttctgtattccaggacttcttggggtttcagaatgggtttgtatgattttttttttttttgtagttttatttattctatcagtctttttaacaaatgtttattgctgcatttttttttttccagtgtatcattgttttactgcccttgtagtactggaatttagttggaagaataaaacatttacttctattttgcttgtttcttaatgtacagatggggttagtat

SEQ ID NO: 57619 - DNA, 1414 bp, Homo sapiens
tgatctgggtcaccctggtctcctgatcttggagaagtcaagttgttatcccagacttgagaggttacaagcctccaggtctctggcaaagtgtggagatgatggacagccatttgtacacacaccagccagtcccttagcatatctctcttggttttgtctcaggtctgcctcagccacctccctgacgctgtcccactgtgtggatgtggtgaaggggcttctggattttaagaagaggagaggtcactcaattgggggagcccctgagcagcgataccagatcatccctgtgtgtgtggctgcccgacttcctacccgggctcaggatgtgctgcagcctcctggccactggaggggctgaccgcctgatccacctctggaatgttgtgggaagtcgcctggaggccaaccagaccctggagggagctggtggcagcatcaccagtgtggactttgacccctcgggctaccaggttttagcagcaacttacaaccaggctgcccagctctggaaggtgggggaggcacagtccaaggagacactgtctggacacaaggataaggtgacagctgccaaattcaagctaacgaggcaccaggcagtgactgggagccgcgaccggacagtgaaggagtgggacctcggccgtgcctattgctccaggaccatcaatgtcctttcctactgtaatgacgtggtgtgtggggaccatatcatcattagtggccacaatgaccagaagatccggttctgggacagcagggggccccactgcacccaggtcatccctgtgcagggccgggtcacctccctgagcctcagccacgaccaactgcacctgctcagctgttcccgagacaacacactcaaggtcatcgacctgcgtgtcagcaacatccgccaggggtttcagggccgatggtttcaagtgtggttctgactggaccaaagctgtgttcagcccggacagaagctatgcactggcaggctcctgtgatggggccctttacatctgggatgtggacaccgggaaactggagagcagactacagggaccccattgcgctgccgtcaacgccgtggcctggtgctactccgggagccacatggtgagcgtggaccagggcaggaaaggttgtgctctggcagtagggccacgacctgcctgccctgggctggagctcttgcccgaagcctgaagcttccttcggcgccatgccaggggttggggttgggactggagctggccttgggatttaatggggaagaaggcctggcaggacctggcctgtttgtttaaaaatgaagtatgggttgggggattacgctagtttttctttgtatttttatctctatctcctcactttttctcccaaagtagaaaaaaatgatatctgaaaaaaaaaaaaa

SEQ ID NO: 57620 - DNA, 602 bp, Homo sapiens
cacagccacctccggagggatctggctgaggaggaagtggaggtgtcactggccccggcctttgccccaatcttgtgtgggcactgaagggggactacaggttcgagagttatgggtgctacatgtgtgctttcagagcagtagtgtgaggaagcttggagtgggatggcaggacggcctcatccctatgatggtaactccagtgatccagagaattgggatcggaaattgcatagtagacctcgtaaactttataaacattcaagtacttcctcgcgtattgctaaaggaggagttgaccacaccaaaatgagtctacatggtgctagtgggggacatgagagatcaagagatagacgaaggtcaagtgacagatcacgagattcatctcatgaaagaacggagtctcagctcactccttgtattagaaatgtgacttctccaacacgacagcaccatgttgaacgagaaaaagatcacagttcctctcgtccaagcagtccgcgtcctcaaaaagcatccccaaatggttccattagcagtgctgggaacagcagcagaaacagtagtcagtcaagttcagatggtagctgtaagacagt

SEQ ID NO: 57621 - DNA, 1069 bp, Homo sapiens
ttttttttttttttttaccagaaaataaacaccaactttattaatataatagcaacagaaagagtttccaatttctcaaaaggaaaataatatgagactagtgggctatgatgatgcctgtgaatagccagctactgtaccccactgtagctggacaagtgttaaacaagtaaatgcctttcaagagggcagagctgttccccccaccctgcccccccaaaaaaacgggaaatgcctacatttcttgttctgatagcttcccaccacacaccaaaggttcctcaaggacagctgccaccagagctgctgcaagaacatgtttttcactgggcgtcgcttcacagtcagttcctcaagtagaagactaaaatattatttctttttagaagatcttggttgagggagaacataccaatatggagaacagatctatgcttctcgaattcaagaaaaaccattaactaatctatcaagttttctccgatatggtgtgccagagtgctctgtgaagaatccttttccatccctaccacgtgtctgggtgaagggagaggagggggtggcaagctgccagtacactagcaggcactcctggtgatgctctgggctctgctccctttctgctggtagtagtaggcatgttttctggcagctgcagcagactgatgttggggggaggaaggggccacccaccaatcacctcttcttgaagccgtattttttgcgttcatagaagaggtctgtcttagagctccccagattgacaatctttgggcagccatctctgtccttctcctggatggtgcactccttacaataataggcatcagagaccccaggtcctccacagatcacacagcgcccctggtaagatccatagttacactcatcacatatgcgcaccagagtgcagggacgcacataggagtcacaaatcacacacttgccatcacatttttcacacagtcttccgatggcaacaccagcctgcttgcggcaaaagatcaaatcaggatgatgtttagccatagctcctaactaagccggccaccggaagcttcgggaactt

SEQ ID NO: 57622 - DNA, 2117 bp, Homo sapiens
gccttcgcgcgtgaggctgcggctctgacgccccataggctccttcaatttccgtgatcctcggagtccccaggagaccaggtgatggcagcagccagactcctgccagtgccggcaggaccccaggccaagctgaccttcgaggatgtggctgtgctcctctcccaggatgaatgggaccgcctgtgccctgctcagaggggcctctacagaaatgtgatgatggaaacctatgggaatgtagtctcattgggacttccaggatccaagcctgacataatctcccagctggagcgaggggaagatccctgggtcctggacaggaagggggctaagaagagccagggcctgtggagtgactactcagacaacctcaaatatgaccacactacagcctgtacacaacaagacagtttatcttgtccatgggaatgtgaaaccaagggagagagtcaaaatacagacttgagtccgaagccattaatttcagagcaaacagtgattctggggaaaacacccttggggaggattgatcaagaaaataatgaaacaaagcaaagcttctgtctgagtccaaactctgttgaccaccgtgaagttcaggtcttaagccaaagcatgccactcactccgcaccaggcagtgctacgtggagagaggccctacatgtgtgttgagtgtgggaagtgctttggccggagttcccacctccttcagcatcagcgtaaccacactggagagaagccctatgtgtgcagtgtatgtgggaaggccttcagccagagctcagtccttagtaaacacaggagaattcacacaggtgagaagccctatgagtgtaatgagtgtggaaaagcctttagagtgagctcagatcttgctcagcatcacaagatacatacaggagagaagcctcacgaatgtcttgagtgtcggaaagccttcactcaactctcacatctcattcagcaccagcggatccacacgggagaaaggccatatgtgtgtccgttgtgtgggaaagccttcaaccatagcactgttctgcggagccaccagagggtacacactggggagaagcctcacaggtgcaatgagtgtgggaaaaccttcagtgtgaagaggacactgctgcagcaccagaggatccacaccggggagaagccctacacgtgcagcgagtgtgggaaggccttcagcgaccgctcagtcctcattcagcaccacaacgtgcacaccggggagaagccctatgagtgcagtgagtgtgggaagaccttcagccaccgctccacactgatgaatcacgagcggatccacaccgaggaaaagccctatgcatgctacgaatgtgggaaggccttcgttcagcactcacacctgatccagcaccagagagtccacactggggagaagccctatgtgtgtggtgaatgtgggcacgccttcagtgcacgccggtctctgatccagcatgagagaatccacacaggtgaaaagcccttccagtgcacagaatgtggcaaagcttcagcctgaaagcaactctgattgtgcacctgaggacccacacgggcgagaagccatatgagtgcaatagctgcgggaaggccttcagccagtactcagttgctcatccagcaccagcggatccacacaggcgagaagccctatgagtgcggggagtgtgggcgtgccttcaaccagcatggccacctaatccagcaccagaaagtgcacagaaagttgtgacccatggctgacacaagaatccattctcacagaaactgcatgtggaaccacaagcagccttcagcccaagagaagtctctgttaactctataggaagcttttctttggcgattcagtgtcacaaaataactccagaaagaagcacttagcgtgctgttcctgtggaaaaacttcagagactacctgttttattttcctcaacatcttgaagttatgttggagagtaatcatacaattgtagagaattttggtaaaaaacagccataattctttaacattagtttatttgaactaagggaatttaaggcataagaaccattatcccaataaaatcttacattccaaataaagttctttttctaaga

SEQ ID NO: 57623 - DNA, 1096 bp, Homo sapiens
ggatccctggctccaaacataggaggacacatctgtgctacagtgcgcacatgcctggatgtacactctgtctttggagacactggctaagattctctgctccatgtttggacagggtcgtgcctgatctgagataaatggacaagaacaactgaagcctgtcttctggtgcatgtgtcacctgcccgataactgcatcttgtgataaagttgggtgatttacagtctccaccaaatgctaaactctggggtcttacgcctttataactccatgggccccagcaaaggttcaggctcaaaacaggtgtcaaatagataactgttgaatgattgttccccagttgcaggctctgccacctggcgttcatactgtctgtgaaaggacccagctcacgctttccctctttatctcccagtccttcccaacagcgccgacacctcatggaaactgattgcaaatgtgctacttctcacttctgtgtggcccgaggaggctgggttaatgctgggcttggtaccttaagcaccctttctcccttccccatcttcattctcagaattacacctgtctgaagcaggcattttccaatgccctagatgggaatataagtgtaaggagatgtgaagcatttgcctgtgtgtcagaacattcactgaggatcctcataggcacttctagaaaccaaatccttgaagatgactaaccagaaatgcccgtcatagcactgtttacagttgcaaaaactgaagccaattgaaatgtccatcaggaggggattaaatgaattatggtacagttacaccgttgaatattttacagccattgaagatgatatatagctatattcattgacaaggaaaactcatattttttagtgaaaaaagcaggttatagaattgcatgatattcacatttatataaaactttatatatgggaaggatgttgattgaattgttaataactatggtcacctctagagatggaagtttgcattacctttaatttttaataccattttgtattgcttaaaatttgtatgtattatcgttaaaataagaaaaatcaaataaagctattttcattatgggaaaaca

SEQ ID NO: 57624 - DNA, 5953 bp, Homo sapiens
  misc_feature (1)...(5953): n = a,t,c or g
ccaactcctggagtcccctgggagctgccgctgcaggcccccgagccgctaggccccgccgccaggccaccgctgctgcggcagccatggcggaagttcatagacgtcagcatgctcgggttaaaggagaagcccccgcgaaatcctccacactccgagatgaggaggagctggggatggcgtcggccgaaacgctgaccgtgtttctgaagctgctggccgccggcttttacggcgtgagctccttcctgatcgtggtggtgaataagagcgtgctcaccaattacagatttccctcctcactatgtgttggacttggccagatggtggccacagtggcagttctctgggtgggaaaggcgctcagagtagtcaagtttcctgaccttgacagaaatgtacctcgaaagacgtttccactacctctactatattttgggaaccaaatcacgggactgttcagcacaaagaaactgaacttgccaatgtttacagttctgagaaggttctccatcctgtttacaatgtttgctgaaggagttttactcaagaagactttttcttggggtattaaaatgactgtatttgcaatgattattggagcctttgtagctgccagctctgacttggcatttgatctggaaggatatgcttttattctgataaacgatgtcctaacagcagcaaatggtgcatacgtaaaacaaaaattagattcaaaagagctgggaaaatatggactgctctattacaatgcactgttcatgattctgcccaccctggccattgcgtatttcacaggagatgcacaaaaggctgtggagtttgaaggctgggctgacaccctctttcttctgcagttcaccctctcctgtgtgatggggtttatcttaatgtacgccacagtactctgcacgcagtataattctgctcttacaactacaatagttggctgtattaagaatatattaataacttatattggaatggtctttggtggagattatattttcacgtggacaaacttcattggtttaaatatcagcattgctgggagcctggtatattcctatatcactttcactgaagagcagctgagcaaacagtcagaggctaataacaagctggacattaaggggaaaggagcagtgtgaccagaggattgcttcatctgatacgtaggcctaagtttttaatcaactcagaacactggcagttcctacagagacactgaggtgtcttgattatggaggaaataaccattcctttgcacttgtacaatctgaggattgattgctgccttttaaaattttatgaagagagaaacttataattgactctattttaaatatgttgtttgaattaatttatatcagactggaaaaggtactgggctttttaatttatttttcttatatgccgacagtgaaacatcagtgttttgaaagtattttatttcataatttgatatccaggtgtccctgagagctgcatatgtaatgtttgccaactggagcttcatcattcaaattgttgctgcatctggaggcagtttagcctttcctctgctggaaatgcagacgaatatgtgaaatttctcttctttgaatcttatttcttatgattgcattgtcttcatcatatcatcattccatttgccaaggaaaacaactttggcactataaaaatatgtggggctttgaagtgtattgctatctatgttggcttccctgactttcataggatgagcagagtgcattccttgaaaacatgttctttttttgttgtgtagaatggggataatgaagggggtgagaaagtaggccttttactaatttttcatctatttgacttattgattcaactaaaatgttttaagtatatgtgccaggcattgtgctaaatgctggggatacagagatgtttgcagaggtagttgaaacatctcactcctgccatagtgactcaggtaaggttgagaatttagctctgttaatctattcagaagatgtcactaagagtaagttgtttcagcactcaaaagccgcaaatctgtaaattggattaagaacacctgccctacctacccggcaatagtgtgaatccaaatgctgcaatgtgagatgaggtacaagtaaagagctgtgttttgtaaaccagtgcagctcagcattgactccctctctaagtgaaaattgcagacaggcaagtctgttttcccttgccaccttcctttgggtttggttgctctttggatgaatatgatgaggtcccacatttctgaatttattggtttgaggggaaaggctggttagacgtctttgtattgtcaatggttggtttttctctggcagtgtcagtgttagagctatcatcttccttcttaaatggcatgagcaatgagcaaacttccctcctttcaacattctcacctacatcatgtgccccttggctcacctactgagcttgccaacttctctcaaaaccaatgctgcattttgggagagcagctgtgaatgggcactgcctaaattgcctcttggggtaatctggagggtggaggtgttaactcaaacataaccctatgacttgactcagagatatccattgactttgaggattagtgtgtttgctcaggccagttgtacagccagtgtgcaagagatttggtacctttgcactaatgcacacaccagtgtctatttcattgggtttggaatccactggactctgttgacctaaacagttagggttttgattttttttgatatgcaaatttatattgagatcattttcatattcctgtcttttggtttgtctttactaaagcttgggctggtggtgctgtgtccctagaattatccctgcaaccaactcccaagttacaagcttcattaagagccttagactcacttttttctagcatcttctgacctgagaaaattccactgggagtaaaggatagtatcttgtgtcatatgggtcttactctccctattttaccaatgagaaaacaaaactcagagaaagatgacttgctaatacatcaaacccatgtcctttttattgaactatgctgccatttaattaaccgcccttcccctctgagggagtaaggaaacagatcctgagttcacttgagcactttcaaaaaagcaagcagttgattgaatttggtgtcagagaggagcatactttgcaaatcaggaagagtgacagcttaccctgtcctggaacccttatcccacttccaggctgactttagttgataatgcacttctggctgtaaatgttgccaacacttcctggttttgcttaggtacagtgaaagggcatagtgagagctatttttagtgattctgttctttctgtcagcaacatgaaggagggacgtttgaataatttttgttgtagaatatttcttcatgaaaggcttttgggtgtctttaacaggtgttgggctagagccccaccaggagttgaactgcctcttgggggtcaggttccctaggagatctgtcacctcttcaggagtatttgagaacattgtgtagttacagcttcactaaatgcacgtgacaggcttctgtgccttgggagccctggcttatgctgaaacttctggctgaccagagcagtacagcaactttgccctgtctgtgttctgcttcctggatgcatccttcagccactaaccagcattgcaagatggagcagggtgaacaagctggagactgaatagtcttttggagtttgcgttttgattattgcaggcgtgttacaatatactggtgatttacctggtactgtggcacctcccagaaagtctggtttttgccccatgtttgatatttactaggcagaaattctttgtcctgttaactgcctcctgggagaaaaagaggcaatacagagttaaatccttaatttgcccactgagacagatgagctgtggtattccaaaagacaaattctatgactagtgtctcctgttcaatgtaagtgagaccctctttggccaatctgcttctagtcaaggctaaatggattggaataaccctagttggccaggctacacattgccagcatgtcccgttgagttttaattgcctcatgtggctgtggactttatgagtcaatcatttgtaggctccagtttgcacctagtttttttttttaaaaagtgcatttacacgcttttggtagtcctgttttatcaagaatccatggagggttttggtcagtacagctggtgcaggatcctcacggagaaacagtggagtttcacattgagttggtttgaaatggcaccccaggactttgggcctgccttacttgatagcctcgttcagtgagcaaagacttagtgagcagctcttgtatgccaagtattttgctaagctctggaaaaaagataaacaagacatggttcttgctttcaaggagtgtgtaattctttagccagatatggaaacctggaccctgagtgggagaaaggagacagatgaaaggagtccgtgattttgtaaccaagagctgcctgcatggttatgagtatcactgattttagggacgccccacagagctaaagcatttttttaatccgagaggacttttgtaactcatattagttaatcttctagctctgagatagcaacacagctcttagaattctgtaagtagcttgaggcctcctcctctactgtacatgttcttgctttcccaaaattgtaagtttggtttttcctatgaacaagactgtaattgatttttctctccctgaggaaaaaagttcggaataaatgagacatggatatgaaactacttagcacaatgcctggtacatattaggccctcagcaaatgtggctaccgtgtcattatttcatggtgagactcaaggcaaaacaagattcttaatttatgctccgtaaatgctagaggcttgggcaatacggtctgtcctgaaaaacaggactctgtgtctcattgcctctagaatccttaggtagcagtttctgttcactgtcttttcttttttaaaaatatctgctggacacaattacggccattacatgatgcaggtgattctacctattttttaaaaagaacaaaatttcttttatattgtgacagtacattttaataaaggaaaattattttcttccccctactccccctccnnnnnnnnnnnnnnnnnnnnnnnnnnnnnnnnnnnnnnnnnnnnnnnnnnnnnnnnnnnnnnnnnnnnnnnnnnnnnnnnnnnnnnnnnnnnnnnnnnnnnnnnnnnnnnnnnnnnnnnnnnnnnnnnncaggaaaattattttctatcttaaagaaacatagttacattttagaatgtcaattcagttaaatctttctcagtttttacctttagatggctcctggaaaggccagcgttccttttcccctctctgaattgaaagcacttgaccccatgctgcccctgcttccaggcctgtctcagttgtcatatattgtgagtccctggcaccattactgttttctaagccagtcttctaggtcttactttcaggatgctgcttcatggcatgaggatatagtttacagtgttgtagtttttttttttttaaagctttgttctttaaaaatactttttaaaaagaaatctactggttagatttattgtctcacaaaaatgtttttagagattatttttttcacaaatgttttctttctcatgctgatgatcaactgatttttgtctacaggtgttagcttctcacagtattttttcattttagagtctatttaccaaatgaccatttttagtgttaaaaggtactgaggaattgaggtatgtaaatcaggtgacataaacatgaaaattatgtgcctaaatatttttgtaatggtgtaaaataaatactttttcctgaaaacaagtattaaaattcctttgtaactgcaaa

SEQ ID NO: 57625 - DNA, 3480 bp, Homo sapiens
  misc_feature (1)...(3480): n = a,t,c or g
ctgggattgcaggtgtgagccaccacacctggcctcgtttcatcttcatatcagcactgatgtagatggtcttatcctcattttataaatgaagaaatgaaggcttacatagtatgattggtgaaaggcacaaggctgaatggcaccaccaaatgtgctattgtgcctgtgtccctggctctaggaatactcctagacctgcctcaaagctgccgtctagttcttgaggcactttgtgatcagtaggttaatccttctgacttaacccaaaagctttggggctccactttcttttcctctctgaagactgacacagctcccagataacccctccccactttgaggacttgatgctgtagatggttttaatgaagccatggccttctctggcaatactgtaggccatcggtgctcggaacttgctcaaatctatagcaaagcagagagaagctcaacagcagcaacttcaagccctaatagcagaaaagaaaatgcagctagaaaggtaagaagtcatgatgtaaagcaagttctttacacagctgaatttccactcttccttctggaatgatcacttcttgtccttatttctttcatccattgttttcccaggaatagcatctcacttgtcatcctgatttgaagattttaaaaaataaaattacatttgatgggaaggaaatagaaaacttgttaatatcaaaccacctctagtagtttgagcatgaaagggtccacgaagttggctggctctctgaaggaagactttcctagggctggagatttctcatgggtggctcctgggtagggctttgctctttctttcttcattctgaactcacaccatttcttgaaatcatttaaacctctatatccttctctagaagaattaggtctgtggtttacttcatctttttttcagggcctctaacaattttgtttttccaggtatcgggttgaatatgaagctttgtgtaaagtagaagcagaacaaaatgaatttattgaccaatttatttttcagaaatgaactgaaaatttcgcttttatagtaggaaggcaaaacaaaaaaaagcctctcaaaaccaaaaaaacctctgtagcattccagcggcttgaccaatgacctatgtcacaagaggtggcgtgtaaggaatgcagccccctgaagacagcactacaagtctgggggagccagttttaacatcagtgcacagctgctgctggtggccctgcagtgtacgttctcacctcttatgcttagttggaactaagcagtttgtaaactttcatccttttttttgtaaattcacaaagctttggaaggagaagcaataaatttttgttttcaaatggcttgatgtaccttttttcctgttgctcttgaaatatgtttaactcctcatgagagaaccctggattctctatcccctagtccacaaaacaaaccaggcagtggtcagcagctacctttatttggatcacacacgtgagtcagacagtaccactaatcgggccaatatggcttgtgagcaaaatgggtgaaaatagagggaactgactgggacctgttgtctaacatcattttaaggttgaacttgagcaaagacttagagaaagctgatggaatgccaagcatcaacgtgaagagaccctctatgcacacagtggatatgttatgcctggctgtagccaccttctcttctgaaaacaagatgggaatgacggaactgtattaaaagattaagttatccactagggagcatactagcacacttccagatcagccttgagatgctagacttcagatacagggacttgtgtcaggtggcctctagaaatgtggaagactaagatttagaaataaactaatttaaaagcaaacaaacaaaaaaaactttcgcctaggatgatctgtttacaacagaaacaaaaacattttccagtttaatccatttgactgaaagtcattgttgggctgacccttaaggaaaacttaagtttaaacttcctttgcatagtatgttttctcttttttccttgggttagaggtgggaacaagaaaacattgatatagttttgaattaacattaaagaggcaaaatttcacatttaaaatggcccaaaatatcccactattcattttgctgacaggtgatacactcttgagaatcaggagtggagggtttagtcataagcatatatgctgtgggtcaggtgactcatgaacatgtcaaacaggccatgttctttagcagtttctggtctggtcctgcttttagtaatcttgcggtggaactcaggcacacagttatttggtaccacttccttataacctagcccacacccctttgcccaccctcaagccgatcggtctgttcatcccagtgcccttagaaggtgaaggtttnnnnnnnnnnnnnnnnnnnnnnnnnnnnnnnnnnnnnnnnnnnnnnnnnnnnnnnnnnnnnnnnnnnnnnnnnnnnnnnnnnnnnnnnnnnnnnnnnnnnnnnnnnnnnnnnnnnnnnnnnnnnnnnnnnnnnnnnnnnnnnnnnnnnnnnnnnnnnnnnnnnnnnnnnnnnnnnnnnnnnnnnnnnnnnnnnnnnnnnnnnnnnnnnnnnnnnnnnnnnnnnnnnnnnnnnnnnnnnnnnnnnnnnnnnnnnnnnntactccagcctnnnnnnnnnnnnnnnnnnnnnnnnnnnnnnnnnnnnnntggaagaaggtgagggtttgacatggttcctgacaccatcttgctcttgtgcattgctgccagtgtttcaaatgctgctgaagacgtgggttctgagcagtgttcctgtatgtatccaacaagcaaccaccctgtaggcatctctaccctgggccagtggttgtttccttcattttttttttcttttctcttcatacttgtagtaggggctccgcaacatgaaaattaaaagtatgaatgggatgagtaagtagggggcatagacagacacaagggttaaccgttcatgcaaagtctcaggtctttgtcccttgaaaccactggctttggagaaatcctcaaacagaaatgtggagagtatcggaattaaggttgtcatggtgtgaacagagtagatgattgcaggagttcgaatccacttgcagcttcctttgaggaaggcatacgttgcaatgggaaagaaaggcagctgaaacacaagctcgcaaaacagaaaggacttaaaccaggctgggggctcctgtagcagtgggtctttgaactccttagcataccacttcagcaggtttctaaactcgactgggtagagctcgcgcgggcaggcaccgcctgcaggtccatgaacagggtgatggggatgtggctgaggaagtagaggcccagcagccactccacgcagcgcctggttgccggagcccccatagtctgtcggttgggcctggacccactgatgtgagaagaggggccaaatccgcgcgccttcc

SEQ ID NO: 57626 - DNA, 1297 bp, Homo sapiens
ggccgcctcgcacccggaacaacaaagcaaggaagacggagtccgagcctcgggggctcctagcaacgggccggggcgggagttccatggagactggggagcgcgcccgtctcatcctcatccttgtcctccagcttctccttcgcatccgacgcaaccggcagcagcgctgccgccgcgtcctcagccaccgctccctcttcccacggatgtgatcttcgtggtggaaagctaaattttaaaaccaccccaatggatgcagacagtgatgttgcattggacattctaattacaaatgtagtctgtgtttttagaacaagatgtcatttaaacttaaggaagattgctttgggaaggagcaaatgtaattttattaaacgtgatgtttggaaaagtaattaatggaagcttaggaaaaaccttagaatttacagcttacaatttggtcctcaggaaaaattatttgcactggagcaacaagtgaagaagaagctaaatttggtgccagacgcttagcccgtagtctgcagaaactaggttttcaggtaatatttacagattttaaggttgttaacgttctggcagtgtgtaacatgccatttgaaatccgtttgccagaattcacaaagaacaatagacctcatgccagttacgaacctgaacttcatcctgctgtgtgctatcggataaaatctctaagagctacattacagattttttcaacaggaagtatcacagtaacagggcccaatgtaaaggctgttgctactgctgtggaacagatttacccatttgtgtttgaaagcaggaaagaaattttataattcaccacgtaattggttagaatctctaactgagcaccttttaaacctgctgcacattggactcaaaaggaaaactggaccaacaataattgaggaaatagactcttttattcattcacggctacagtgtaagctcccagtccctttggattttattccaaaccttgctgtaatataaaaggaagtttacaagacatgatattgctgcttttacaaaaggacattctatttattttcgcagtaattctcatgtccccataagcagagctgtcacagtgtgcactaccttagattgttttattgtcgtcattgttatttttttccattttgagctaatgtgttttatttgtgaatagtcttttacatttttgtatgctgaatatgggcaccaaagaacctgtaaaagttatctttttcaattgaatgtgcacaaataaaagtttggaaaagataaaaaaaaaaaaaaaaaaaaa

SEQ ID NO: 57627 - DNA, 1927 bp, Homo sapiens
ctcacgcttggtgcgtcgcggcgactgcgacgggcagtggcagtcatggcggctcagtgcgtgaggttggcgcggcgcagtcttcctgctttggcgttgtctctcaggccatctccccggttgttgtgcacagccacgaaacaaaagaacagtggccagaacctggaagaggacatgggtcagagtgaacagaaggcagatcctcctgctacagagaagaccctcctggaagagaaggtcaagttggaggaacagctgaaggagactgtggaaaaatataaacgagctttggcagacactgagaacttacggcagaggagccagaaattggtggaggaggcaaaattatacggcattcaagccttctgcaaggacttgttggaggtggcagacgttctggagaaggcaacacagtgtgttccaaaagaagaaattaaagacgataaccctcacctgaagaacctctatgaggggctggtcatgactgaagtccagatccagaaggtgttcacaaagcatggcttgctcaagttgaaccctgtcggagccaagttcgacccttatgaacatgaggccttgttccacacaccggttgaggggaaggagccaggcacagtggccctagttagcaaagtggggtacaagctgcatgggcgcactctgagacccgccctggtgggggtggtgaaggaagcttagctgctgttgatggggtgggtgtttttaaactcacttgatgtaactctcaaggctggttcattgtttctcatctatgagtacgtgtgaccttttcccaaaccttattggaaaccttaagtaaccagtggctaaacagaaaagccggttgcccaactgcattaatgaactctaattcgggagtctgttcccttttagtgccacgcgttgaatagttccacatactttcagaagagctcagcagggccctgcctggtctcccgagcatcatgagtaacgtgtctgctcagactctgctgacaccaaagtattttaaacaaataaaaggtcttggggaattctgtttggctacctgggcacgccagtctgcaccatgtgtccctgcggcgcatgagtgactggcgtatttagcccgtcacatttcattcgctgaaggaaaggcaagagagttgaaacatttttcttacttaaaaaaaaatgatctttgtgaagaacatagtgagttcgtttgtcttcagtcaacagcggctgaaactgaccactgagaaatgggtgtgggcactgacagttctcccccattatttggccaggaattgagcttggcttggcaaagttccttttaccctgttctgttcatctaaatgcagacatatttaaatcatattcaactagttactaatgacctcaagttgtattccctggcaaaatggactttctcaaaataggactgcacgcttggtgtactttaaatgttaatgtttaatttaaaatttttatttaagaggattaaagccctaatgtttattttcctactttctgaaaacaattttgtgtcctctcatggagatccttgccgctgaggcaagcatggcttagccttcccattctctactccagcccagaagctgtcagcttgacacgtgcgtgcgtgcacattcacgtacacacatatacaggcttctacacagaaagggagagccacactcccccagtgcagctgcagcccgtccggtaagaatacgaaacacccaggagccacagcaagggcacaggatttgcaaaatcatcttgccaaagggctgttcctcatttacacggtcatccagggcttagaaaaaggctgaatgattggcgtctgttacaaaaaagagaaaagaacctttcgctgcctttgcttctagaatggaagatacttgtgaaagccatttgctgcacaggaaagatggggcag

SEQ ID NO: 57628 - DNA, 1470 bp, Homo sapiens
ttttttttttgagagttacacaataggacatttattcacttcaacatcacaatttcacacggaagttgggaggaagcccttccctaacaaaacaagcattcgcattaggggaaggaggctgacctgctctagggatgaaatacatctaccaagaatatagataaaaacaaaaacaaaacaggatggtaggagccaaaaaacagaggacatttaaagggaaatggaaaaacgttattaccaaggtaatgtttattaaatccagatcataagtgaacgtaggttacaaaaatgggaagttgttaaggtattgttattcttgttacttttgcacacaaacagaatttttaggaaaagcttaagggtcaggggagtgctagagagtttctgtatggcaggcaagaattcttccttttgaacaagaccgaaaaacctcaggacaaagagaaagtatatcttttaaaaactgatttcatagtaatgtttctacatagatggtagagccaaaaaacagagacattaaaggaaatgaaaaacgttataccaagtaatatttcaaatatagctgcttcagcaggacagcttttcagtatcacagtaagtacagcccaatacaggatcatccaaaaacacgttgacacttccaagacactggcacggggtccacggagttttgcgcgtaaaattttaaaaacccttcctacggtgatgtttaaggccaggagcattcatttctcaaccttgtatcaatccaggatccatcggactaggtttcattaggcaagagagtagttcgttcctcctctgtgctgaggatgttttgagatttagacctttttctccttgaatactccagtagataaaacaagcccatggctaatccacttatcagagcccatagaccttgtatagctgctgcccattcaaaaccaattttctcatacagaaatccacccagcgttggtcccataaaagcaccaattgaccacattgcactaaaaagacctgatacaagtcccaatgtacttaatccctcttcaaacccattttcatgtgcacaactgagaatttccgggaaagttggaattatactcattccagcagagaggccacttacaactaatatcagcaccagcagccagagctgacttttaatatgcaagattgggacaggccctaagagcatgtagcacccggctgtgattaagttgccaaacaccagaagccatttccttagaggtggccttttatcacttaggagaccaaatagtggtgaagagatggcataggacagtgccatacccaggaatactagtcccacatatccagctggtaaattgaacttctccaaaacaaagagagacagagtaggatcgaggaagccaaaacacgagctgagtgagttgatgacgaaggctataaggccaactttgggtaaagcgatcagtttccagaatgagtgttcacctggat

SEQ ID NO: 57629 - DNA, 1953 bp, Homo sapiens
tttttttccactgcaaaatgaaaactttcagtgttttatttttgactgcagctgtttacagaaatatagttgcgagtatacaaatgttccaatagaagcaaaatatctttttaatatttaacaagttatcacagatagctaaaaacatagatgcaaatgaaattcccccagagaacaaactgaaaatatctggtatcagtgctctgaaatcccaactatgaaagccatatacacaaaaatgtaacccttatatcattgcaggacaatggaagaaggcagttcagtggttgatcagtgtgctcaagcaaataaaattaaataaaaattaaaaatggcagaatggtagctaaaccacttgagaacaggttaatgaaattattggtactatacttaaaacattaagtaaaagaagtgaatgaaactcatttaaagttgtcaaaaaattagcaactacttggagcttatcaattaaaaggaaacaaggtaagcagacacattcattagatccaaaagaaattagatcaagttcactggaatcagtctgtaactactcaagtcacaatgacttcagtgcaggagttttttactggacacagaagtctgattccaagcccactcttcaacagctgagattttgtgtgcgtgtatgtatgtgtgtgtgtgtagacattgtcctgaggttcatcagctaaaataatataataagcaatccctacaaaatatttcaaaccaggcaaatgacttctggaagagagagaaaggaaggggagagggagggagaatatgagtaagccaagcagggtcatatggttaaacatggaattttttaaaggagttattacaagtgggagtcaaatagaactgtggtagaatgctttgggtacaggaatatgttatgcaataaagtgaggaagagaaaaagggaataagaagggaggaatgtaactagagcagctccccaaccagtttgcctatgtactttgccagcaccaaaatttgtagagtaagccacttacatttccactgctagtattaaggaaagacagcagtggtgatttttataaagtgagtatacatttatttttattctgatatgtgaatttttctttcacgagttaattaactggtaatttgtaaacagtgggaagaagattagaacaattatggaggtactgaattacacaaggagattaaaatgaaatgaatcaatctacctatcttgtggttagtttatatttaccatgatgcatacacttgagaaacgagaaatgcccaaattgtataatgcattatcttgtttattatttattttagtaaataattcttgtctgaaacataagctccaaggatagctatatctatactgatagcttagttcttatacaaagcaagctacttttgaagaagttttacctattaaaaaaataagttaaggtgccatgttgacctggccagccatcttgtttactatctcagatacaaatataaatacaaggaatgatgattttgttctgagggttggtctagccagggcaaaactgtggtctgctggtaaagtactaggcaatgaaaagaaagcttgtattacactgcccataatgtacccattttatggataaacaggagactttagcaccggtcaattatattagctacttaaatgtcataacaattaaaataaacatagaacattgcacctatatatttaaatcagtcatttaatgtaaaccttttagtaagtggtaggaaaatgccaaactaaattaactgaattatcaagaattagactaattgtgtatgtacataaaatacactgtatctctataggcagtactgagaattaacttttgccaataaaagattatagataaccaggttaagctgaatttacatgaagaacaatgtataactatatcagtctgagtggaagaaaaactctatatctcaacagag

SEQ ID NO: 57630 - DNA, 3689 bp, Homo sapiens
  misc_feature (1)...(3689): n = a,t,c or g
aactaatgcccttgacagtccaaataattactttctttcattagaagaacttgcttataaaatatatacgggctgagaggacgcaggctcttctgaactctggctctnccagcctctccaagtcctcccccaccatgccaagacctggggaatggcagacatggttagctgggaagctagaaagctaagacattcctgtttaaaaagaaagctcttacatattaatacctttttttcccaaaaattttattgggggaaaactacaaaacatttacagtacaatgtttacagtcacaatttgtagtgagctgattccccaaaatatattacaactcaagttgacttatcttgttacattcaaaaacctacttctgtccaaagtagtccagagagtacatatagtgctccaactgtacctacgtacaaactaaagctaccgctcattcatctgctgtccaggaaagcttaggagacattcctgcctttctacatggaaaaaaaaatagtacaagttttggaattttctgtaattaaacaaggcatattcatgtactacatatttcagcactaaggcgggttgcttcactttatatctatataaaaaaagtggtaaaaatcttttccttttgtgcagttgaacccatcctacattcagattctctcaagcactaataaaatacttatttggttgaggaagatttaaggcaagttcgggcccttccaaaggcactgtgagactccccccccactccccgttattgctacatgtctttatactcgagtatgtcacagtagaactggtggaataagcaacacttttttgctagtttataaagttggaattagaaaagcatgccacatttcagcctgattgcaaagtatgtggtcatttttttctttgaagttggatgggctacaacctttatacattctaagaaaactcataggatgttcctcaaactacttccacagcatcaagatcgatttctgtcaagaaatcatgcaatctttcaaaatttacgtaaacaaggaaagaaattaatgaaataaatattacatacaatctcttaaattaagaattttgtactcatttacaataaaataaccaagtgaagttacaaaaggcatatattactgtgaaaagaacatacactccacattttgccgattaataatggcaatcataatttaacataataaaagaatatatatctattgcttttcatcatacttgataaatacagtatgaacaaaattttcattgtatacttttcacaagataataaataagttaaatagttttcatattgagttgtggtgcagtggtgcgaatcaactcaaaacagctaaaaattcagcagttattctccaacaattacaaagtaagctctgcgcaaggcttccagagggagcagacaaaatggttctaaactgaacatccactaagtggtggcaatgaaaccaagtaaccagtatggacctttggaatgcaagggttttttcacccccagacatatataattctgttaaaaaacaaaaaacacctatgggctgagggctaactatcaaggcatattcttggcagaatatattggattttaaaaagcttataggtttagcaaggtggcggctggctggtttgtttacaccggtctgagacacaattaggaacttcttccaagagaagggttcccacatctggacttaactaatgctgttcaagtgaagagatggaatggtggttggtagctgctggtgctgggttgatttttcctgaagtcccaaactcatcggagtcctaacaaagtttaagtgtttttttttttttttttgttctattcgtatcacaactgccctgttgtgaatattttgttcaacagaaaaagttcgacttttttgctcaaaaagaatgaaacttcgtaataaaaataaaaaaaaaaagacaagaggaaaccgaaaaaggaggggtgggggcccctcccggcacagagttcgagtccaagtgctcggtcgggcttgcagtctgcctagggcccatgtcaccccccccactcccgtgcccccagcaagggcgagatggcgaggggtgtcctccaacatctctgaaccgccttcccttcctcctcactggcgccctcttgcctcagtcgtcggagatggagaggcggctgaagattggcaggcggcggccagggtcgaggctgggagactcagagccgctgaggctgccggagctcagggagccgcttaggtagctgtcgcggtccgacagcgagtccggggggctggggggcgcgtcgaacacgggcgagtcggacaggcggcgcggcagctggaagctgaagggcggcgagggaggtgcggcggccccggcggggagggtcgcgctgggcggcgccggcggctgcgcggggggcgccaggccctgctgctgctgctgctgctgactgcggtagtaggcggcggcggccacggcggcaaagttgtgggtctggatggcgagcggcgtgatgaggctgctgagctccggaccgaaggcgaaggcgttgttggcgcacgaggccgacgagcaggccgcgcacggggcccccggcgccagcaggtcctcggcgcccccggtgccgtacagcagacgcagcgcggccgccgcggaggcgcagcatgtcggggtccccgagggcgtggaggccgcggaggccgaggaacaggaggaggcggaggaggagcaggacgaggccgaagagcaggagggcggcggcggcgtgcgcgacgtggggctgtcgagcagcagcggcgactcgaggccgcccgggggctgatggtggcccgacgggaagcccgagaagctgaggctgtggtgcaacttgggccgcggctcccgcgggaagcccaggtgcaacgcatcgcgcgtgccaaaggcacgcaggtccccggaggcgccccccgacggcgcgggccgccgctcgtccgcgttgtggatgaagtggcagcgcggcccataggggcagaagccgatggtatgaaaggtgcggcacagctcggtcttgtacttcggatggcgagtcaggctgcgcagctcgtggaagccatgcgcgaactggcacttttcgccgtacttgcacgtgccgctctcctcgaagggccggcacagctcggtcttgtagcgcgtggagttgatctgggagccgccgccccccttctgctgctgctgcaggtgcaggaggtgctggctgcgatcgccgttctcgctaaacgagcggtcccggaatttgttctccttgttgagcagggctgtgccgccgccccccgacggctccttaagggtgccgtaggaggtccggaccgccggccgccgcgctgccgcagctgctgccgttagcggcgcccgggaacttgggcgagcagctgccggggctgggcgcggggtgggcgagtgcatgcaggttgctggccgagtgccgtcggaggaatcccggcgcgaagcccgagctgggggcggcggccacaggcgtccccaccgccttcttgtccagcatgttgttcaggttgaggttggccagggatttctctgtcttgcacaagaagtcgacatcgtagaaggcggacagaagtgtggtcgacatgtttctggatcccgcagtggccggagcggcaggccgggaggtcgggaggagcccttggggcggccc

SEQ ID NO: 57631 - DNA, 892 bp, Homo sapiens
ctgcgtccttacgggggttgcaaggcgtccgaagtatgagtccactaacaaaagtccagaaactcgccagttaatagtattgtggtgagtgatgagcctcacgttggctagagaagtggccgttagcgaggctgcacactttgggatcgcgtggcctgagtcgggggagtaaccggcctgtattccatttttctctctccagtctcttcaaaatatcggagaataatttctttctcgctgatcgcctaacttctactgacgaagctagggaagttgcagaagatggagttcgctcttgttgcccaggctggaatgcaatggcatgaccttggctcactgcaacctctgcctccccagttcaagtggttctcctggcctcggcctcccgagtagctgagattacaggtactggctcctgtatcacccagctctggagttgaaagagctcttcattcctgagtctcctgtaccactgagaataggaaatacaaaaaaaattctaaaacttgtatggaactacaaaagacattaaataatcaaagtaatcttgagcaacaaggacacagctggaggcatcactctacctgattttgtaatccattatcaaaaaactgtggtaccagcataaaaacagattcactgaccagtggaacaggaaagcccagacataactcatacatttccatccaattgatttttgacaaaagtggcacacagaatggggagaggacaaataaataaataaattgttttgagatatctgtatatctatatgtgaaattgaaccattttctcatagcatatagaaaaatcaactcaaaatggattaaagcctgaaatgttgcctttgaaactgtaaaactactagtagaaaatataggggaaaagctct

SEQ ID NO: 57632 - DNA, 1697 bp, Homo sapiens
  misc_feature (1)...(1697): n = a,t,c or g
ctctatctagacttaattttagcataacaagtgacagggttagttagcctgttgtccttacaccattttctggctaatacagctattaactattgatctgtctattcacgtgccagttcctaatggttttacatagtgtaatctgcacttcaaaatagcgaagggaagccctacctcattattctacttttccagaattctcctggctattccaggctgcatgtttaccttaaccttccctgtgatgtcttcatgccgttgtcttcttatgcaagaataaggtacgtctttccatccactcacgtctatttaatttgactttgcattacacagaaagctggtcttggtctgtctacctcggcatctagttgtcctcactgccccctagccgaccccaccccatctgactgactaccccatcacagagtacttttatttacgttttgctctgcctaatggttacttgatactgtcacgccgacagtgtccagttcagtggtctttgcagttgaaatgctcccgtacacactgtcttgttaaaaatgccagtaagttcatacaaacccagcttgcacccaaggtcacattcagagagcgtagggctgggatgggttgttttccaagcttctgccactgtgtggctagctcttcccactgggaagttctgtgtacccggaatgtctgagtggagtcctgttctagtgtccagcacctgaccctgtgcccaacccctcaacagcctattcctgctgtccacagcctgctggaactttttacaaaatatgttgccatgctggaccctgggcactggacataagccccctggcagcctttttcatgtcacccaaaggggtaattgtcctactggtggtctgtaagatgagttagggtgacttgctaatagacattgtaaatcttaatatttatgtatgtattttattattaccggttttccatttatgatggtaatattgtttcttctaagaatatttatttttccttctaaatattgagataaaattcatgccttttgaaaatgttcctattcagtggcttttagtatatttgctatgttgtgcaaccatcgacactatccatttctagaactttttcgtcatcccaaacagacgctctgtattcataaaaaaataacttcctacctgtctctccccctagtctttggtaacctttgttatactggtaaactttgttgtgctctctgtctgtgtgaatttgcctattctangggcctcatataagtgtaatcatacagtatttgtctttttgggtctgtctgatttcacttancgggttttcagggttcattcatgttgcagcatataacagtactgcgttcctttttctggctgaataatattccactgtatgggataggaccccattttgtttattcacacatcatttgggacatttgggattatttctgggtttttgggctattatgaacaatggtgctatgaacagttgcgtacaagtttttgtgtgaacatatgttttcaattctctcattanatacctangagtanaattacngggtcatatggtaactgtatatttttgangaacgccaaactatttccacgtccaagcacatttcacattcccaacagttagtaaaaggtccaattctgcgcatcctgcacaacaattnnanccgacntccggtannacaatcc

SEQ ID NO: 57633 - DNA, 1606 bp, Homo sapiens
  misc_feature (1)...(1606): n = a,t,c or g
agtcactggagcatctccggaagcagatgcaggatgcgtttgctgttccaagcccaggcggatgagacctgcgtcttgtggcagaagatggtggagagccagcgcagnaacgtgctgggtgagttcgagcgtcttcgccgtttgctggcagaggaggagcagcagctgctcagnaggctggaggaggaggagctggaggtgctgccccggctgcgggaagggcgcacaccctagggccaagcagagcgcccacctagctgagctcatcgccgagctcgagggccgctgcaagcttgcctgctcttggggctgcttgcagggacatcaaggacgccctgcgcagggtcccaggatgttgaagcttggcagcccccagaagtttgttgccctattggaagctgaaggaccgtgttgcagggtcccgggactggtagagacactgcggaggtttcgaggggacgtgaccttggacccggacaccgccaaccctgagctgatcctgtctgaaaacaagcgnagttgcagcgtgggggacttacgcaagccctgccggacagccccagagcgctttgaccccggcccctgcgtgctgggccaggagcngcttcaccttcaggccgccactactgggaggtggaggttggggaccgcaccagctgggccctgggggtgtgcagggagaacgtgaacaggaaggagaagggcgagctgtccgcgggcaacggcttctggatcctggtcttcctggggagctattacaattcctcggaacgggccttggctccactccgggacccacccaggcgcgtggggatctttctggactacgaggctggacatctctctttctacagtgccaccgatgggtcactgctattcatctttcccgagatccccttctcggggacgctgcggcccctcttctcacccctgtccagcagcccgaccccgatgactatctgccggccgaaaggtgggtccggggacaccctgggttccccagtgactcgggccctcctggaggagtcctgttgcctctcctgcccctccaggccactgagtgttttggccacttggaggacctgggaggagggagtgtgtcctttgagcaagaggaggaactccctggtgcctttctgagcctgcgtgggagaaccccaattctagcactccaggaaactgtgggagagtgtggggcaggctccgtcctccctgggagacccctccagccaccgggtgccacttaatgccaacagcccttaccaaagctgggagccccattgccccggcagctctggcctgtggttccagaagctgagaaaactccactggggcttgcagaatccagggttcacctaagctgcacagttcctgcagctttgccagccccctgaaagtcttgtgtaccccacctctgaagatgctgggggaggcagctgggatgggagccagccccatgcctgtctgtgaccccacagtgggtgagagcccgtcacagtcctgggtgtgggctgctctgggaagaattagggaggcagccataataagagtctttcagagagatgattggggaagggggcccttgaaggaccagggaccagagaat

SEQ ID NO: 57634 - DNA, 551 bp, Homo sapiens
gttttgtcccactttaaattgttttttcttcttaacattgaattttaagaattcattgtatcttttaatattctgaatgctagttatttgtcagatacatgttttgcaaaccatttatctgtatttggtttctttttgttatcttagcagtgtatcctgaagaatagttttaaattttgatgtaatccaaaatatttcggttgtttgtgttctttgttatcctgtctatttttgttgttgttgttttatagatatgggggtctcactacgttgcccaggctggtcttgatctcctgaactcaagtgatcctcccacctcagcctcccatccttgtctacctaattaggctttgtgtaactcagtgttgcaaagctttgacatctgtttgagttaatgtttatatatgttgttacttaagggtttcacattaaatttaaacatacttatattttataaccaaacaagtcatgttggggcatactcattaggattgagtgctttcttacaccaaaatacatgtatacaaagatttaaaacactttcggccggg

SEQ ID NO: 57635 - DNA, 4912 bp, Homo sapiens
gatgcggaggcgctgtcgcggggccatgcagcaggcgccgcagccttacgagttcttcagcgaggagaacagtccgaaatggcggggactgttggtctcggccctgcggaaggttcaggaacaagtgcatcccactctctcagctaatgaagagtctctctattatattgaagagctgatttttcagctgcttaataaattatgcatggcccagccaaggactggttcaagatgtagaggagcgagttcagaagacctttcctcacccaattgataaatgggccattgctgatgcacaatctgctatagaaaaacgaaaacgaagaaatcctcttttactgcctgtggacaaaatccatccttcgttgaaggaagtattagggtacaaagtggactaccatgtatccctatatattgtggctgtactagagtatatctcagctgatattttaaaattggctggtaattatgtttttaatatccggcattatgaaatatctcagcaggacattaaagtgtcaatgtgtgcggataaggttttgatggacatgtttgatcaggatgacataggtttggtttctctctgtgaagatgaaccctgttcttctggtgaattaaactactatgatcttgtcagaactgaaatcgcagaagaaagacagtatctacgggaattaaatatgatcataaaagtgtttcgagaagcctttctttctgatagaaagctgtttaaaccttctgtatacgaaaagatttttagtaacatttcagatatacatgaattgactgtgaaacttttaggtttgattgaagacacagttgaaatgactgatgaaagcagtcctcatcccttagctggcagctgttttgaagatttggcagaagagcaagcatttgatccttatgaaacattatcacaggacattctttcaccagagtttcatgaacatttcaataaattgatggccagacctgcagttgctctacactttcagtccattgctgatggttttaaagaggcagttcgttatgtccttccacgtcttatgctggtgccagtgtatcactgttggcactactttgagttactaaagcaattgaaagcatgtagtgaagaacaagaagacagagaatgtttgaaccaagctattactgctctcatgaatcaccaaggtagcatggaccgaatttacaagcagtattcacctagacgtcgacctggagatcctgtttgccctttttatagtcaccaattaagaagcaaacacctggctatcaaaaaaatgaatgaaattcagaaaaatatcgatggatgggaaggcaaagatattggacagtgttgtaatgaattcattatggagggaccattgacaagaatcggtgccaaacatgaacggcatatttttctgtttgatggcttaatgatcagttgtaaacctaatcatggccagactcggcttccaggttacactagtgcagaatacaggttaaaagaaaaatttgtcatgaggaaaatacaaatttgtgataaagaagatacttgtgagcacaagcatgcatttgaattagtatccaaagatgagaacagcataatatttgctgctaagtctgctgaagaaaaaaacaactggatggcagcccttatttctcttcattatcgtagtactctagatcgaatgttagattcagtattattgaaagaagaaaatgagcaaccactgagattaccaagtcctgaagtatatcgttttgtagtaaaagactctgaggaaaacattgtttttgaagacaacttgcaaagtagaagtggcatccccattattaaaggaggaactgtagtgaaattaattgaaaggttaacatatcatatgtatgcagatcccaattttgttcgtacttttcttaccacatatcgttcattttgtaaaccacaggaattgctgagcttactgattgaacggtttgaaattccagagccagaacctactgacgcagacaaattggcaatagagaaaggcgagcagccaatcagtgcagaccttaaaagatttcgcaaggaatatgtccaaccagtacaacttagggtacttaatgtattccgccattgggttgaccatcattattatgactttgaaagagacctggaattgctggaaagactagaatccttcatttcaagtgtaagagggaaagctatgaaaaaatgggtagagtcaattgctaagatcatcaggaggaagaagcaagctcaggcaaatggagtaagccataatattacctttgaaagtccacctccaccaattgaatggcatatcagcaaaccaggacagtttgaaacatttgatctcatgacacttgatccaatagaaattgcacgtcagctgacacttttggagtctgatctttacaggaaagttcaaccgtctgaacttgtagggagtgtgtggaccaaagaagataaagaaataaattctccaaatttattaaaaatgattcgccataccacaaatctcaccctctggtttgaaaaatgcattgtggaagccagaaaattttgaagaacgggtggcagtactaagtagaattatagaaattctgcaagtttttcaagatttgaataatttcaatggcgtattggagatagtcagtgcagtaaattcagtgtcagtatacagactagaccatacctttgaggcactgcaggaaaggaaaaggaaaattttggacgaagctgtggaattaagtcaagatcactttaaaaaatacctagtaaaacttaagtcaatcaatccaccttgtgtgcctttttttggaatatatttaacaaatattctgaagaccgaagaagggaataatgatttttttaaaaaagaaagggaaagatttaatcaatttcagtaagaggaggaaagtagctgaaattactggagaaattcagcagtatcagaatcagccttactgtttacggatagaaccagatatgaggagattctttgaaaaccttaaccccatgggaagtgcatctgaaaaagagtttacagattatttgttcaacaagtcactagaaattgaacctcgaaactgcaaacagccacctcgatttcctaggaaatcaactttttccttaaaatctcctggaataaggcctaacacaggccgacatggctctacctcaggtactttacgaggtcacccaacaccattagaaagagaaccatgtaaaataagctttagtcggattgctgaaactgagctggaatcaacagtgtcagcaccaacctctccaaatacaccatctactccaccagtatctgcttcttcagaccttagtgtatttttagatgtggatctcaacagctcctgtggcagcaatagcatctttgctccagtgcttttgccacattcaaagtctttctttagttcatgtggtagtttacataaactaagtgaagagcccctgattcctcctcctcttcctcctcgaaaaaagtttgatcatggatgcttcaaattccaagggaaatatgaaatctgatgatgatcctcctgctattccaccgagacagcctcctcctccaaaggtaaaacccaggagttcctgttcctactgggtggcatttgatggggcctctggcatagtccacctccgccaccaccaagagatcctcttcctgtataccctccaccagtttccctttcggcctccagaacactttataaactgtccatttaatcttcagccacctccactggggcatcttcacagagattcagactggctcagagacattagtacgtgtccaaattcgccaagcactcctcctagcacaccctctccaagggtaccgcgtcgatgctatgtgctcagttctagtcagaataatcttgctcatcctccagctccccctgttccaccaaggcagaattcaagccctcatctgccaaaactgccaccaaagacttacaaacgggagctttcgcaccccccattgtacagactgcctttgctagaaaatgcagaaactccccaatgaccttagccatatgtagtcattgacactggaatggtatttgtaaagttttttttttaatttattcaaaaaaagacatagtattttagtactttttacaaataatgctcttacaaaaatgctactgatcaaataagcttttaagaattggaaaaataaaaatacaaaagtccttcaccattatcctcaggtgatcagtagcattgccttgtcttggatcctcagtgctgccaaaaggccagtataaagaatttatatttgcactgtaaactctgcaaaaatatggtttaaagtgacatgattgcactgaaaagggatagtgcttttgtgaaatttttcaaatttgagtaatagatgcctttttaaggcagtgaatttacacaaatatgggaggggtatatggtgttactgatttttaaacctctttgaccatcttctagtttttacttctagtttttacatctaggagaattgtgaataacaccaactgttcttaaactctttaatgccatgtcttaaatgccggtatttgctgctgaagacaaaaatgaaaagtaggatgaaaataatagaatggcactgtaagtgtttattattttgtcaaaatgtaaacaaagactacataacccaatgatgggagggaaaaagggcatgtatctcattcagatgtgccttttgtttttgcagactatgacgtctttagctaatgaattgcctattgttatggaaaacagttaatatgccatgtatgtacagttttgtttatattgtatatttaaagatactgctaataacctatataaatttaagtgacttgaggcctataatacaatctgctactttactaattcataaattcaaaaaaaattctatggcatagg

SEQ ID NO: 57636 - DNA, 577 bp, Homo sapiens
ggtactgggattacaggtacgagccactgccactggccctggaaactcctataattctgatatgacttaatgtacattatcggtaataattataactgttatgttaaattattatgtgccacagaggtaacaaatttccttgtcagttttgtctttgactatagctgggattgcaggcgcccaccaccacgcccggctaattttttgtatttttagtagagacggggtttcaccgtgttggccaggatggtctcgatctcctgacctcgtgatccgcctgcctcggcctcccaaagtgctgggattacaggcgtgagccaccatgcccagccaaatctagggcaggaacatggctgcagcatataaaaagaattgaattccatacttttgttaaccctgttttttgtttgtttgtagttgttgctgttgttgagacagagtctcgctctgtcgcctaggctggagtgcagtggtgcaatctcggctcactgcagactctgcctcccgggttcaaactattctcctgcctcagcctcccaagtaggtgggactacaggcgcccaccaccacacccggg

SEQ ID NO: 57637 - DNA, 1579 bp, Homo sapiens
gttttaaatcatctttaatgtatttttaataatttttttgcctcatttaccagataaatcatctaaataaatagatgctatacagtctcttaccaatgtcagtacaaaaataaaaccgcgctctacatccactctgactctcccagcacacacacactcagcaaaggcatgtgcttggaatcaactcgtgcccccgacccctcccagatacattcatttagtctgaacaaagctcgaagctcattctgtgcaaaggaagcgctcttgtgctgagacctggtggccgcagctggccacttcgaaagcaaaagctaaaccacctcacagaagcacagcgcctgcccccagaacaaggggacaggaggagcttggcaacgaggtcatcacccgaacagcagtgacagtcctgcattccaggcggctgtgcaagggggttggggggtacctcctccgcaccccccaccacaaaggaaaagtgcccacgggtctctacattcaaagcgggtgggggctgggggaaagaaaggcagatgggcaaatgctttctaaaccctccccccacccccaagagtactggccttttaagagggctgcgggggtggaggtcactgtctgccttgctctactgggccactctgggctggaaggaggcctgcacggccacagccgtaggtgacctcatagaggtcacctgtcctggaggatggtcctaacggcccacagccttttcccccagggagctggctcactacagcccatgagccacctggctgccctgagctgggcacctcaggcccacctgtcccaggtcacacccctggagttcagctctccctgagccacggagttccccatgggccataaagggctgagtaagaggaaagatgtgtcctgctgctgcagacaaaagcaactgcagcacccacacagaaagccccgtgaatccacagacccacagattgcgcaaatagttctttgaaagtgaccaggaagcaggaaaaaggtcccatgtcccctgggggatggggagcttgacttctgctggaagctgccagccatgttccaaagtcatgggccaaaacattcaactagagaccccccacaaccctctatcatctttacctccgctgggcacccctctcctggaagagtcccctctgaaccccaagcttccccttcccctccacagggctccacagctggagatgggtggtgattcctgccgctccttgtccagaccccacccccacgtattcctctagattccattccctgggctggaggtgaatcaggtcatcccggaggggactgtcccccaatggaagcactgaattgaccgtggacaactaaagatcgaggaggaaggaaagagagactcagggatctgggaagcctgtcaacagagcaccccatgcagaaagggctgcaggctgtctttggtttgggaaccagggaagaagggatttggggaaagaatcaccctctccttgcctcagtagactctgtgacttcctgaggacacagagcagagctgcgaggagggcgggcaggtctcaaacttgctggccgcactccactc

SEQ ID NO: 57638 - DNA, 2927 bp, Homo sapiens
ttttttttttttttttccagaaaacagcgattttaatttgaaagcgattttatgtatgagaggggaaaggagccccaaagagaagggacgcagggcaaaaatcatgcagccccagcaccccacctctgcgggctggccacctcccctcaattctcaggccaggatcctgtgtccccagcctatgctatgtgcccagggctggaggagagctgtaaagggaaggcctccgggactacactcgtgaaaccatcccctgtgggggccctgtcctcacagcccaggccccttccccaagttagacaggaagagatggggggggcggcgggaagctgggaaggctagtgcttggagagccctagggacaggccatttcagggccctgcctttcccaaacacccacctccaccactggcatttcttagtcaacctgggaaagtacagtacttctttgagtctaactgcaagtctctatcctcacaggaaattaaaaatagcagatcggttcctacatctccaccagccccttcaccaccaccaccaccttttttatatttcagtctgactgcaagaaggaggtgaaagtgttaaaaaagagactctggacagtgaacagggcccctcccctcttcccagaagaggccccccatctgcccaggtttgaagaggaggaaaggcctgtcagggccctactctcatgtccatcagcttgggaggcctgccccccagtatcccacctctgggggagttccccatttccactcttcagatgggaagcaaaatgaggcaagatgagaaggaagcaaggtcctggaggcaaggccagtgctttgtgctgggggaaggacagagggtgagaaatcaccccaaatcatgggagaacccgacaaattcagagactcaaggccaccgaagagagacaaccagtcctcacaggtatctggggtcccttccaacttgggatatcaagcagatcccttggagggtttatgttcttggttctgccctgtacttctcaccccatcaaggttctgggaacatggccccccaccctgccccagggcttggagtccctcttggagtccctcttggatgtgtgctcctccagtgtgagaagcaccacgtctgggtctgagctcaggccagttgatggggagcctcaagcatctccatgaggaaggtgtcgatgggggtgtcaccaatgagcttgaagaaaaacagatgctctagacacttaaggccaatggaccggagggcaggaagacgtagcagcagcttggcaaaccgtccctgctgctcagggtacttctgtttgcagtaggtctccagtgatgcatacactttctcccgcaggacctccacctcactagggttggagaggcccttggcatctggattaaacagaatgattgccctcaggcagccaagctctgtcttgtccatcctcatgtcacgcattttggacactagctctgtcagcaccctggagagggaccgatcaaagatggctcctactcctgctgaatgggctgagttgcggtgcacgtgaagacctgtggcaaggaggatgccatctcgaacatcaatggatcggtgtgaaaaggaggcaatgaggagttcattccagcctgcccgcagcaatatgacctgatcatccagaggcaaggaggaaaagtgtgggatcctcttcgcccactcaacaagcgtgaatagctgtttgtcagctgcctgacagatgttagtcacagggtcatttgggctcgtgccgctacccccggttcccccaggaccctcaacgccctggtcactcttctgttccacagcaagctctgcctccaggatcctgtccacaggcatctcctcgggggctcccccagccccctccccatccccatccttgtcctttccccgctgacgctcctcctgtaccgcctccctcttcatgccagtggccaggcacttctgatagcggcagtactgacagcggttccgctggcgcttgtccactgtgcagtctttgttgtcccggcaagagtatgtaaggtctttgcggatggtgcgtttgaagaagcccttgcaaccctcacagctgtaaaccccgtagtgtttgcctgagcttctgtccccgcagattgcacatagccgtttgccagccccagggccacctggagggggtggacagtgcaggccccggacccctaagactggtggcttcacatcttcaggggggccagacccacccccagggagtgacactgttgagttaatctgggggctgctgacaggcccggagaatcctgggggagctggagggggcagaccaggggaccccatggaagaactgatgactggaaagggagagcccagtgggggtggtggcatcgggggtgggggtggggccccagagcctccaagggtaggagctgttgaagggggtaggggtggcccaggaggagaagggggagggactccctggggaaggggatttggggaggagctgtctgggcttcgggagtcccgcccgctgtcgcccatcccgtcccgtccagcctcccctggctccggctccggggtttgttgttctccgcctgccaccgccgccgccgccgccgctgcgggatccagccagggccgtcgccgccgccaccgggacgcgaccccacaatgcatttcttttcgcacccccaccggcccacactgccctgcggcatgccgctgagggaggaagggcgggcgagcggcccaagacatgatccctggctgagagtagggataccgaagaggtcccagggattcccaaggattgatcggaggattagctgagcacgaggaagcccctgagagaaagactctggcctggattgggtcgaattaagcccgtcgctctgctcagtaccaaaatgacagcgccaatgtggcagccggaattc

SEQ ID NO: 57639 - DNA, 1513 bp, Homo sapiens
ggttctgtcacctccaggctgagccgggctggcggaagaggcacgtgcgctgctgaatggagctggtcgctggttgctacgagcaggtcctctttgggttcgctgtacacccggagcccgaggcttgcggcgaccacgagcagcaatggactcttgtggctgacttcactcaccatgctcacactgcctccttgtcagcagtagctgtaaatagtcgttttgtggtcactgggagcaaagatgaaacaattcacatttatgacatgaaaaagaagattgagcatggggctctagtgcatcacagtggtacaataacttgcctgaaattctatggcaacaggcatttaatcagtggagcggaagatggactcatctgtatctgggatgcaaagaaatgggaatgcctgaagtcaattaaagctcacaaaggacaggtgaccttcctttctattcacccatctggcaagttggccctgtcggttggtacagataaaactttaagaacgtggaatcttgtagaaggaagatcagcattcataaaaaatataaaacaaaatgctcacatagtagaatggtccccaagaggagagcagtatgtagttatcatacagaataaaatagacatctatcagcttgacactgcatccattagtggcaccatcacaaatgaaaagagaatttcctctgttaaatttctttcagagtctgtccttgcagtggctggagatgaagaagttataaggttttttgactgtgattcactagtgtgcctctgcgaatttaaagctcatgaaaacagggtaaaggacatgttcagttttgaaattccagagcatcatgttattgtttcagcatcgagtgatggtttcatcaaaatgtggaagcttaagcaggataagaaagttcccccatctttactctgtgaaataaacactaatgccaggctgacgtgtcttggagtgtggctagacaaagtggcagacatgaaagaaagccttcctccagctgcagagcccttctcctgtaagtaaagaacagtccaaaattggcaaaaaggagcctggtgacacagtgcacaaagaagaaaagcggtcaaaacctaacacaaagaaacgcggtttaacaggtgacagtaagaaagcaacaaaagaaagtggcctgatatcaaccaagaagaggaaaatggtagaaatgttggaaaagaagaggaaaaagaagaaaataaaaacaatgcagtgaatcacagatgtctcctgaaagaactcttttagatgaaatcattctactcaaatgtaccttaattttttttttttccctgagtaaaagcaagaaatttcttcctttggaaaaaatatatatattaaaaaaccacttttagatggttttttttaaagaaaagaaagaaactggtaaaattactgttggcagacagtgttttatgagttatggatcatgttgatatatgatatggtaatgtgtcatgtaatttttactttgtacaaagcagataaag

SEQ ID NO: 57640 - DNA, 1087 bp, Homo sapiens
ggtttcgggttcggggtttcctggtgggcgtcaggggcaggcaacagagtggcggccgctacggccctgtaacagggccatggagaagctgcggcgagtcctgagcggccaggacgacgaggagcagggcctgactgcgcaggattcacagattaatctcttgaggtcctggatgcctcatcccttagtttcaacaccagattgaaatggtttgccatctgcttcgtatgtggcgttttcttttctattcttggaactggattgctgtggcttcccgggcggcataaagctttttgccagtgttttataccctcggcaatcttgctgcgttagcccagtacatgctttttaatgggacctgtgaagcaactgaagaaaatgtttgaagcaacaagattgcttgcaacaattgttatgcttttgtgtttcatatttaccctgtgtgctgctctttggtggcataagaagggactggctgtgttattctgcatattgcagttcttgtcaatgacctggtatagcctgtcgtacatcccatatgcaagggatgcagttattaaatgctgttcttctctcctaagttgaaaatcagaaacttgtggaaaagagcacttgaatgttggtactctatgtttggtgaagtttgcttttccccataaaacactccaggaacaactgacgtgacagttgaagaccgttttgtactaagtctcattttgtatactggtaaaaactacatgcttgattaaaccattaaatgcttgtaactttaaattcattatgtgtcattaatatacttttccaaagataagatttttaatcactgccagttgtaaattatttttagccaatttttaaatcttttcaaagcagctttgaaatgtgaatatttaaaggtagacctgtgctgcaagataattaaacttttttgcttttaaaaaatgtctgcatttttaagattttttttactttaaatgtgaaacttattttaagctaaaaattgcttattatatgtaataaaaataatatataaatctttacaattttgaaataaacccatccttggaaaaataacattttctgaatc

SEQ ID NO: 57641 - DNA, 423 bp, Homo sapiens
  misc_feature (1)...(423): n = a,t,c or g
attgacnacatctatgacatgattacgaatttaatacgactcactatagggaatttggccctcgaggccaagaattcggcacgagtcagcatgctgtgtctagctcaagattttctccatccccttattttgggccagtggctgtcattacatatgagatgagtctcttgaagactacagatgagagcagtcatgatggcctgcactccacacaatgcaacagagtgaaggagcaggttctggttctttggtgtagtcctgaagcttcctaagaaagttcacatcaggtgatggataggagcaaccctgtaaaaccagccttagactatttttcaaacaggctggtgaattaccagatctccgtcaagtgcagtaaccagttcaagttggaagtgngtcttttgaatgcagaaaacaaagtcg

SEQ ID NO: 57642 - DNA, 1834 bp, Homo sapiens
gccgactgtcagcgtgaagcgtgatctgctcttccaagccctgggccgcacctacactgacgaagaatttgatgaactatgttttgaatttggtctggagcttgatgaaattacatctgagaaggaaataataagtaaagaacaaggtaatgtaaaggcagcaggagcctctgatgttgttctttacaaaattgacgtccctgccaatagatatgatctcctgtgtctggaaggattggttcgaggacttcaggtcttcaaagaaaggataaaggctccagtgtataaacgggtaatgcctgatggaaaaatccagaaattgattatcacagaagagacagctaagatacgtccttttgcggtagcagcagttctccgtaatataaagtttactaaagatcgatatgacagcttcattgaacttcaggagaaattacatcagaatatttgcaggaaaagagcactggttgccattggtacccatgatttggacactttttcgggcccatttacttatactgcaaagcgtccttcagatatcaaattcaagcctctaaataagaccaaggagtatacagcctgtgaactgatgaacatatacaagactgacaatcacctgaaacattatttacatatcattgaaaacaaacccctgtatccagttatctatgatagcaatggtgtcgtcctttcaatgcctcccatcatcaatggggatcattccagaataacagtaaatactagaaatatttttattgaatgcacgggaactgactttactaaggcaaaaatagttcttgatattattgtcaccatgttcagtgaatattgtgagaatcaatttacggtcgaagctgctgaagtggtttttcctaatggaaaatcacatacctttccagaattagcttaccgaaaggagatggtgagagctgacctaattaacaaaaaagttggaatcagagaaactccagaaaatcttgccaaacttctgaccaggatgtatttaaaatcagaagtcataggtgatgggaatcagattgagattgaaatccctccaaccagagctgacattatccatgcatgtgatattgtaggaagatgcagctattgcttatgggatataacaacattgcagatgcactctcccgaaaactttacaccataggctaatcaatttcctcttaataagctcactgaacttctccgacatgacatgggcagccgctggcttcactgaagcacttacctttgccctgtgctcccaagaagatattgctgataaactaggtgtggatatctctgcaacaaaggcagtccacataagtaatcctaaaacagctgaatttcaggtggcacgcactacccttcttcctggcctcctgaagaccatagcagcaaatcgtaagatgccccttccactgaaactgtttgaaatctctgacattgtaataaaagattctaatacagatgtaggtgcaaaaaactacagacatctctgtgctgtttattacaacaagaatcctgggtttgagatcattcatgggctgctggacagaattatgcagttgctcgatgtgcctcctggtgaagacaaggggggatatgtgatcaaagcgtcgggaagcttggggtccttcatcctgacgttatcaccaaatttgagctgaccatgccctgctcctccctagaaatcaatattggaccctttttgtgaagattggtctctgtggtgtgattctcttcccaggtgtccctttctcctcccctagtgtccttaagtcctcctccacagggaacatctatttgggctttgatgtttaataaagtagaaagc

SEQ ID NO: 57643 - DNA, 523 bp, Homo sapiens
gaaactctctgttcctgtcacatgcaaaatccgtgtcttcccggagattgacaagaccgtgaggtacgcccagatgctggagaaggccggctgccagttgctgacggtgcacggacgcaccaaggagcagaaggggcccctgtcgggtgcagcgtcctgggagcatatcaaggctgtgcggaaggctgtggccatccctgtgtttgctaacgggaacatccagtgcctgcaggacgtggagcgctgcctccgggacacgggtgtgcagggcgtcatgagcgcagagggcaacctgcacaaccccgccctgttcgagggccgggagccctgccgtgtgggagctggccgaggagtatctggacatcgtgcgggagcacccctgccccctgtcctacgtccgggcccacctcttcaagctgtggcaccacacgctgcaggtgcaccaggagctgcgagaggagctggccaaggtgaaaaccctggagggcatcgcttgctgtgagccaggagctgaagctgcggg

SEQ ID NO: 57644 - DNA, 1126 bp, Homo sapiens
ttttttttttttttttttcccattgggtgacagcgtttattgaaaggaaatcttgctttatccaggaattcactcacatggaggtagctgcaaggagaatgtctctttctcatgacaaccaaagcgaccaaaccataccctaaagcagagacgcaatcggaataagtcaacgggcattgtagaacgacactcagaagcaggaaaaaccataaaagatacaggatgattgtctcttcagtattgcatttggccatgtatgtgtttttacataaaatatatgttttctttttaagctagctaaagaaaatactcttgatcggggttagttcttaaagcaaaaaacagaagaaaagtatgtatatataataaaattaaagaacgatagcatgttatacctggaaaggaccgtgggcactaatctgcactttgttccaggtaatccatggctctgagagtgagcacactgtcaaggtcactggggtgagatgagccgggacttgaaaacccttctcttaactttcagtctcaactcttcccactccactataccgcatgcgttgccaactccctcagagtgtaggatagcgcaattgtcaaaacgcataacagcctatttttagggtaatgatgcaagtgttttgaaaagtgacctgtgttctctttgcatgggccagttttgcttcttgtagcccagccccatggctactggaaagaactggccagaatgaggggcagctactttctcacaaaccaaaacagacacacactcccaaagttcttgggtgtgctgaccttccccagcagcgtctctaggtatgagtgggctgaggcttctctcagcaggcttactggcagatgtctaacgatgggagaagcagcagggaaattatgaacatattgagggtcaaagtgagctctagggaaccaggcttgttgcgtcctcagaaggacagacagagggctgagtacagaggtgctcaacctccatgtcgatttgattgtcatttatcaccccctttcctgacactgagctccaggaggggaggaatttttgcctgtttaattcactgctgtattctgtgtgccaaggactgtgcctgacacatcaccgatgcccaataaatat

SEQ ID NO: 57645 - DNA, 1564 bp, Homo sapiens
tttagattagtaaaccacagcaaagtttattcatgtgccagggacataaagatacattaattgtttgtttttctaggctgccagtataagcttttcaaaatgtttaaagtaaataaaaccaataatacagctagataccacattgcaaagaaccctaatgctatttatcagctttaaaatactttcaactgaaatcaattacattttaatatacacatattatacagaaattacctatagctcttttaaaaatcctatgacattaacatgaaactttattagaatttaagattctatatgcagacctgataaagccttaaatttaattattttggagtaatgtcttcttaagaaatggtagataggataaaataatttacagatttatctgcctttgaactggaaggaattttaggtaatcacctggttcaacctactccctaaagtcacacagctctataatttccccctcactcagctacttttttctgtctaaagatatgtcaaagcgatttcatatgtaatcatgagacattcaagtgcaagataatttaccaagaaatcccactccaagatccactgtacttatttaacaagacaaattaagtttgtgtaatgaaaatacacaacaaacattgcatttagcgttttgactccacttttaattaatgaatcatagctcctatgctgaggaaacatattatgtatagattaatataaataaattactggattggctaaatgaaatgcatccagttcaatggaaaatgtgcattctattcagagccatactttagaaaaaaagaaaagaaatataaataagcaaaatataattcagagaaggttggtatatttgcagttggagcatcttggcttgaatgtctttatatatgactcagaagcctatcaaaagggctctgagcctcagacacaagatcaatgccttctttgtaagtgttccttacccaaaaatggctctgcaggagtgtccttgggcagccaggacacatagacagcctctgcaggaacacttggctctagaatttgggactgagggagatgcagcgagcccatcatgacgagtgcaaccagatgtggaagaagccaatgtgggcatgtcacgatctcatcagcatgccagtgtaggagaagcagaggctccggggtctccctgctgatctggaagatcttgtctgctgcttctgtacacctggtgctgtctgagtaagacaggtcttccagatatttggtagtgattaagtgaaacatatgttccaagaaaatgtttactatgccaggaagaaagcaatcgctggcctctcactggaacatgatgagagggacctttgtgatgacgggtccatcagtcagaagagggtacgatggctgaagtaaaattaagatgcctggtctccagttttctgccacacaacatgcttgtagaacagaaatttgggaacactgcataacaaatggtggatgtagatgtttcaaacaacatctaatctagttagacgtgcacctggccagagtaactacggttcactaaaactattctggatta

SEQ ID NO: 57646 - DNA, 2029 bp, Homo sapiens
  misc_feature (1)...(2029): n = a,t,c or g
aaaaaccactctatatttattcattatagaacacacttttcttcccagaaagaaaacaaacagtctgaggtatcccacattaataaatcccattctgtggctttacatcctgaatttctgttattaatcaaggttcagtatcattatacacagtgattaaaatttttccctgagatcatcaaggctgtgcctttgacatagaaataccttaccctaccaaaattcaggagaaagcatagaaaactaaaagtctttttggtggtagaaaaggcagacaacttaggcagaattcctgagaaaaaggtgcagagtcattaagccaccagttaaattttacctggctgtgaactgttatcccttctacatttctaaatattctgggaggaaaattcatcttattgcatagaaagatactttttcacaaggctatgcacaaagcatctttgcttttgctagctgccacagccatcttgacgcctcagtttccagtaaaatgcaaagcttgagaggtacaggcagcctttcccccagtgacatatggaaaagagaaatcatccatttcctcatggatgatgaggaaaaatgtggttgtcgtattatgtgtccggtcaggcctctgatacttctccaaatggtctggcatcataacagctactgatcctccacaagtaggaacgaggaaagacttactggattatcacctcaaatcccagcctaatcagctccacaaagcataaggcaaatggacattggcacgtcatccagtttgggtgcactgaaagtcagctctgaacgaaatgccacttccagcagcccctcccaagctggaagaaatcacaagctgcaaaagagccagcccgcccaaatagtcattcttaaattttgttgtgtccctccgcccacccatccccgtaaaattgcacaatggaatgatcgtgttccctactgaagacttcccctcctaatagtaagcaagcaaaggtttccctagtctgccccatattgaactgtagaagaaggcagcccagccccaggatggggggagcgagaaaggaagcagacgagtgagctggatgtcaggcaaacatgcttagaaaggatgtggtagtgtgtaggcctctgaagacagaaacagcaggggaaggctgaacagtggtgggtgctcttccagagacacttccaggtggcacttccaggtggcacttccagagacattgggtggttgcacttccagagacatcaacccatggatgcaatgttcccagttctctttcttaggttttcttgaggtagttctgacaggctcttgccatgtctttcaagaagttaggaactccattcttggcggcccagttaatgagccaggacggaatttggccacccgggttatcgaagtaatacatgaaaactttgctccccttcttgccgtcactctcgatcgccaggctctgcttgtattgcttcacccggatcaccccagacctctcgccaagctgaggcatggaggtgctccgggccaggatcacatggatcttcctcccttccatgtccaggtctcgccgctgccgaaggtagacatagtctctgttggacatgggaaaagggtacttcacttcccagtagaccacagtctctccgttgcattcttgttcatagagttctttaacatactggtcccattgttttctgtaatctgagtccatatagatgtctgccagtagagttggtgagcagtcctccagaacaccaaagactttatactcataaagtccagtcttcttgtccagcagccggtagatgctgatgcccgaggtctccactaggagctgccagtcggccccggccagagcgggctgctggagctcggcgcaggcctcccagaactgctcctccgagaagcttccggcggccagctccatccttccgcagtccgggctcctccgcctggagggcaggccgcggacacccttagtgtgggcctgggggcggggtgaccgggctgccccggctgcnnccggctgccccagcg

SEQ ID NO: 57647 - DNA, 546 bp, Homo sapiens
gccccctcttcgtgctctgtaactaccagccccgggtccacctgaagactgtggtcttccagtccgatgtgtaccccgcactcctcagctccctgctggggctcagcaacggctacctcagcaccctggccctcctctacgggcctaagattgtgcccagggagctggctgaggccacgggagtggtgatgtccttttatgtgtgcttgggcttaacactgggctcagcctgctctaccctcctggtgcacctcatctagaagggaggacacaaggacattggtgcttcagagcctttgaagatgagaagagagtgcaggagggctgggggccatggaggaaaggcctaaagtttcacttggggacagagagcagagcacactcgggcctcatccctcccaagatgccagtgagccacgtccatgcccattccgtgcaaggcagatattccagtcatattaacagaacactcctgagacagttgaagaagaaatagcacaaatcaggggtactcccttcacagctgatggtaacattcaccttctt

SEQ ID NO: 57648 - DNA, 712 bp, Homo sapiens
  misc_feature (1)...(712): n = a,t,c or g
attttaggggaagggatttatcagatttggattttagggccagagaacagtcccgttctgattttaggaatagagatgtatctgatttggactttagagacaaagacggaacacaagtagactttagaggccgaggttcaggtactactgatctagactttagggacagggatacgccacattcagatttcagaggtagacaccgatctaggactgatcaggattttaggggcagagagatgggatcttgtatggaatttaaagatagggagatgccccctgtggatccaaatattttggattacattcagccctctacacaagatagagaacattctggtatgaatgtgaacaggagagaagaatccacacatgaccatacgatagaaaggcctgcttttggcattcagaagggagaatttgagcattcagaaacaagagaaggagaaacacaaggtgtagcctttgaacatgagtctccagcagactttcagaacagccaaagtccagttcaagaccaagataagtcacagctttctggacgtgaagagcagagttcagatgctggtctgtttaaagaagaaggcggtctggactttcttgggcggcaagacaccgattacagaagcatggagtaccgtgatgtggatcataggctgccaggaagccagatgtttggctatggcctnagccaagtctttttcanagggcc

SEQ ID NO: 57649 - DNA, 487 bp, Homo sapiens; identical to SEQ ID NO: 14369
  misc_feature (1)...(487): n = a,t,c or g

SEQ ID NO: 57650 - DNA, 5457 bp, Homo sapiens
  misc_feature (1)...(5457): n = a,t,c or g
ggcgcccgcagctgctccggagatacggaattgcattttgtgaaaaaagaacaagaattttctgcaaggatcatatctaagtgcactttttgctgatacttcatttctaatcttgtagaaaatttcagctgtagcccttggactagaagctgaaataacagaagctgtgtacgatgcattagggtattgaagaaaattaacttttgaattaaatatttggaatataaggaaataaggaaagttgactgaaaatggggcggaagaaaatacaaatcacacgcataatggatgaaaggaaccgacaggtcacttttacaaagagaaagtttggattaatgaagaaagcctatgaacttagtgtgctctgtgactgtgaaatagcactcatcattttcaacagctctaacaaactgtttcaatatgctagcactgatatggacaaagttcttctcaagtatacagaatataatgaacctcatgaaagcagaaccaactcggatattgttgaggctctgaacaagaaggaacacagagggtgcgacagcccagaccctgatacttcatatgtgctaactccacatacagaagaaaaatataaaaaaattaatgaggaatttgataatatgatgcggaatcataaaatcgcacctggtctgccacctcagaacttttcaatgtctgtcacagttccagtgaccagccccaatgctttgtcctacactaacccagggagttcactggtgtccccatctttggcagccagctcaacgttaacagattcaagcatgctctctccacctcaaaccacattacatagaaatgtgtctcctggagctcctcagagaccaccaagtactggcaatgcaggtgggatgttgagcactacagacctcacagtgccaaatggagctggaagcagtccagtggggaatggatttgtaaactcaagagcttctccaaatttgattggagctactggtgcaaatagcttaggcaaagtcatgcctacaaagtctccccctccaccaggtggtggtaatcttggaatgaacagtaggaaaccagatcttcgagttgtcatccccccttcaagcaagggcatgatgcctccactatcggaggaagaggaattggagttgaacacccaaaggatcagtagttctcaagccactcaacctcttgctaccccagtcgtgtctgtgacaaccccaagcttgcctccgcaaggacttgtgtactcagcaatgccgactgcctacaacactgattattcactgaccagcgctgacctgtcagcccttcaaggcttcaactcgccaggaatgctgtcgctgggacaggtgtcggcctggcagcagcaccacctaggacaagcagccctcagctctcttgttgctggagggcagttatctcagggttccaatttatccattaataccaaccaaaacatcagcatcaagtccgaaccgatttcacctcctcgggatcgtatgaccccatcgggcttccagcagcagcagcagcagcagcagcagcagcagccgccgccaccaccgcagccccagccacaacccccgcagccccagccccgacaggaaatggggcgctcccctgtggacagtctgagcagctctagtagctcctatgatggcagtgatcgggaggatccacggggcgacttccattctccaattgtgcttggccgacccccaaacactgaggacagagaaagcccttctgtaaagcgaatgaggatggacgcgtgggtgacctaaggcttccaagctgatgtttgtacttttgtgttactgcagtgacctgccctacatatctaaatcggtaaataaggacatgagttaaatatatttatatgtacatacatatatatatccctttacatatatatgtatgtgggtgtgagtgtgtgtgtatgtgtgggtgtgtgttacatacacagaatcaggccacttacctgccaaactccttgtaggtctgcagatgtgtgtcccatggcagacaaagcaccctgtaggcacagacaagtctggcacttccttggactacttgtttcgtaaagataaccagtttttgcagagaaacgtgtacccatatataattctcccacactagcttgcagaaacctagagggccccctacttgttttatttaactgtgcagtgactgtagttacttaagagaaaatgctttgtagaacagagcagtagaaaagcaggaaccaagaaagcaatactgtacataaaatgtcatttatattttccaacctggcatgggtgtctgttgcaaaggggtgcatgggaaagggctgttgatattaaaaacaaacaaaacaaaaaagccccacacataactgttttgcacgtgcaaaaatgtattgggtcaagaagtgatctttagctaataaagaaagagaatagaaaacacgcatgagatattcagaaaatactagcctagaaatatagagcattaacaaagtaaaattaatatattaagttataattggaatatgtcagaagtttctttttacattcatatcttaaaaattaaagaaactgattttagctcatgtatattttatatgaaagaaaacacccttatgaattgatgactatatataaaattatattcactacttttgaacacattctgctatgaattatttatataagccaaagctatatgttgtaacttttttttagagaatagctttatcttggtttaactctttagttttattttaagaggggaaaacaaaaatatcttgcaagcagaaccttggaaaaaaaaagccatgaacacttattctaaatgtaaattaaaagttgagccaaactctttgtgtatatagcatcttaaatatattatcacctttgatgtaagtacctatgtattgtatggtcaccagattaaaaagtatatttttgtggattgccgccaatctggggggaaaaggcgaggtcctttattaagtattcactgtttaatatttactattttgttaaatatactgtactttggattttaattattagcccagttttttcagaggattgtataaaggggtttctcccctcactggtggtgaatgtgtgatgttacattgtaatctttgtgctgtatgggttgagcatcattatatattttgtatgtgtacataaatagcaaagtggcaaaaaaaattggtgttaagttcatcctgcataagaataaaatgtgtttgtaacaagatttaataagccattatttaaaacttcccttttgtgaggaaaactgtagaaganaaacctgacctaatttaattaatattagagaaaatgccaaaatagtagatgagcacaaaggttttataagtggtaaatgattaggggaaaataatcatggggaaagggatcttttttccttgaccctctgaaaacagaacgatgcagctggttacaaaatcctaccgttatcagctcttctgcacattgcagtgatgctttggtatgcggggagaaacactcttagggtgctggtccttggcatgactcttgccattctaattggaattagtgccaccctcagcttggattttgaacaaggccttattctttcaggaagacaactaatggatgatagcaagttcatccacttactgggcttgtgccatgagcaaaattcaaagtcctgtatatctttcattgtagatttttaaatactccttttcctaaaaaactcaagggtttaaaaattgctattttatattttaaatgatattgaggcagctacctacaatttctatgtacattttgttccccccccaccacccccccccaaattacgttccttttgacattttcctcatctgctgtttgtggacaagtcatcagccagatttcctgactgacacataggtatgatcagtgcaggagagacctgcgcaccacaggctgcaaactggaggttctgttctcatggcagtttgggcagtaacttttgagagaggccaaaaaaaggaggatgacatgctgtctcctctcttcagtatagacattaggctcttattcagaaaggatttttctttaaaaatgtacttactttactgaactacttacaggcacatttcttcataaggccacacctaatccaaacaagacagtctcccaacactgaagttccaaaataatccttaccactttgtaaaccatttatagctttgaaagtgttaagtgattccttcgttattatttatgcatgttcatgaacttctgctgtacattggaataggagttaacacattcacatttactgtctattttcttgtgtgccttatgagatggcttttctgactgtatctcaatagtctttctttctatgcaggtttataatcagtacaactactgttttctaaaatactactactcaaggctcggagtttgtatttaaattacactgaccaagtaacaatgtattccatttcaggaactgaatatttgactgttaacctttttcccatacgtccagtgtggcatggagcatatggacttgacagacatctctcacccagacgcccacgtgtgaacacacccacatccacatctctgggtggaaaccagcctagagtggggacgacgctaatggtgttgctttagaaccgtcttttcttacccttttagactcgtgttttgtatgagacaccattgcaagaaaattttatccctccagaagtattttattactaaagaacaaaagcaaaaaaagcttaaattgcactggttaaagtacagtttccaacagctgtccttcctcagtactctaatggccactccaccgcgagtggaagtcactgttgtgtgtacacaggtggtcccaatcaaaactccatcttttgagcccaattatgtccattttgttatagactaaatcaggggtttgttctacaagaacaatacatgttttaccctttcctttaactagaaggataactagtaatgcatcaacataatttctgtattaaccatcatgcgcacaagaaatacatagtaaataaggaagctgaaaactcctggcattggatcttaagctagatgattagaatgtgaaaaagattttacaaatgtaaaacttctatttctctgtagaaactttcttcactttgctgtgcaagaagacactgctttgcctatatttaaaatggcttttttaaaagagatttatgtatttggtaaatgtttgtagtcaacagttcacacaagaagctgtacacggtttgatcatgtaaaaccgtttggcggcacaagctggactttgttgccatccttgagatgaaccttttaagaaaaataagttaatctcaatttttccctgaatgtgttgtttttcttcattatacaataaatataatagtgaactttttatcaaatggtgaagacaatgctaaaggttgttgtaaactgtttg

SEQ ID NO: 57651 - DNA, 509 bp, Homo sapiens
cgccgccgctgtcgccgccacctcctctgatctacgaaagtcatgttacccaacaccgggaggctggcaggatgtacagtttttatcacaggtgcaagccgtggcattggcaaagctattgcattgaaagcagcaaaggatggagcaaatattgttattgctgcaaagaccgcccagccacatccaaaacttctaggcacaatctatactgctgctgaagaaattgaagcagttggaggaaaggccttgccatgtattgttgatgtgagagatgaacagcagatcagtgctgcagtggagaaagccatcaagaaatttggaggaattgatattctggtaaataatgccagtgccattagtttgaccaatacattggacacacctaccaagagattggatctgatgatgaacgtgaacaccagaggcacctaccttgcatctaaagcatgtattccttatttgaaaaagagcaaagttgctcatatcctcaatatcagtccaccactgac

SEQ ID NO: 57652 - DNA, 2227 bp, Homo sapiens
cagaataccatttgatcctattaagaattgtccaaatgttggagcatttgattgaaaaatccttcttagccattttaaagatagctttccaatgattagacgaattgattctttctgtgactcatcagttcctttcctgtaaaattcatgtcttgctgttgatttgtgaataagaaccagagcttgtagaaaccactttaatcatatccaggagtttgcaagaaacaggtgcttaacactaattcacctcctgaacaagaaaaatgggctgtgaccggaactgtgggctcatcgctggggctgtcattggtgctgtcctggctgtgtttggaggtattctaatgccagttggagacctgcttatccagaagacaattaaaaagcaagttgtcctcgaagaaggtacaattgcttttaaaaattgggttaaaacaggcacagaagtttacagacagttttggatctttgatgtgcaaaatccacaggaagtgatgatgaacagcagcaacattcaagttaagcaaagaggtccttatacgtacagagttcgttttctagccaaggaaaatgtaacccaggacgctgaggacaacacagtctctttcctgcagcccaatggtgccatcttcgaaccttcactatcagttggaacagaggctgacaacttcacagttctcaatctggctgtggcagctgcatcccatatctatcaaaatcaatttgttcaaatgatcctcaattcacttattaacaagtcaaaatcttctatgttccaagtcagaactttgagagaactgttatggggctatagggatccatttttgagtttggttccgtaccctgttactaccacagttggtctgttttatccttacaacaatactgcagatggagtttataaagttttcaatggaaaagataacataagtaaagttgccataatcgacacatataaaggtaaaaggaatctgtcctattgggaaagtcactgcgacatgattaatggtacagatgcagcctcatttccaccttttgttgagaaaagccaggtattgcagttcttttcttctgatatttgcaggtcaatctatgctgtatttgaatccgacgttaatctgaaaggaatccctgtgtatagatttgttcttccatccaaggcctttgcctctccagttgaaaacccagacaactattgtttctgcacagaaaaaattatctcaaaaaattgtacatcatatggtgtgctagacatcagcaaatgcaaagaagggagacctgtgtacatttcacttcctcattttctgtatgcaagtcctgatgtttcagaacctattgatggattaaacccaaatgaagaagaacataggacatacttggatattgaacctataactggattcactttacaatttgcaaaacggctgcaggtcaacctattggtcaagccatcagaaaaaattcaagtattaaagaatctgaagaggaactatattgtgcctattctttggcttaatgagactgggaccattggtgatgagaaggcaaacatgttcagaagtcaagtaactggaaaaataaacctccttggcctgatagaaatgatcttactcagtgttggtgtggtgatgtttgttgcttttatgatttcatattgtgcatgcagatcgaaaacaataaaataaacctgggctcaagcacaaaccaatttgtgttgttctgattcaataattggtttctgggtggccaattcagaaggaagagtgtacatgctcaacagtctccaggaccatcagtatactgcatttcatgtgcaccaaatattttgaaagacatttataaataattggcttatgactcatatttctctatgaataccttcatacagcaggtataactcttttctttatgggcttaaatattttgtcactgatcctgcaaatggacatcattttagcacactagcggtttatattttaaggaccttcattctctgttctgcacctcttctggaaattgagtaaattttgctttttttttttactcagttgcaacttacgcttggcatcttcagaatgcttttctagcattaagagatgtaaatgataaaggaattattgtatgaaatattacaaagcgtagactatgcattgttattcattataatattttttgctgtcataatcgcctcataaagacaggtttcaaccattaaaatatgttcttcctt

SEQ ID NO: 57653 - DNA, 8190 bp, Homo sapiens
acggtggaaacacccaactcgatttattgaaaaactgttacagttaattattcctttggttacacaagtttagaatattttaagatatcctttcctgggcattacagttaaaacttatgacatgtcctagcggattttttgaaaacgtacaatgtgtcatttgacattgtatttcaaaaggcctgatgtcctcgaaactttatcttgggttttttgcttaccatttttttctttttgccagcgtttgtccaattatatatattgagaggaaaaaataaaattacaccaaaagaatttctgcaaatataagaagtaattttattgcaatatactgtggctagagtggtctggggagaacgggacacattttgaagttcagtacaaattataacaactttgaagggaccacagaggaagaaaatgacaggagaaaaggacaaattggatgggatgagaaatgaaaacagaatcacatgacctagacgcagtccacgggggtcgcgggacagtcctcggctatggcttttcttttgaagagatgaaggtgacagtcattggcacatgctggcatcctgggctccagagactctccaagccagacttttctttggcaagagcgagacttactttccagggaaatttggaaaatccacgctggcggtgttttgttcctcctgggtggcttgtttgtggcttcctaagctggaactgcattctggtggtggtgggggtcggggacagcaccagagccccggcaggctcaccccaagggcccagcctgcatttcccatggtagaaggaaaaggcgctgcacccgggcaacttttcacagtgaagagattcgcctttccttggcttgcccctcgggtccttcctgcccacagacggcagccccccgacctcgatggccaggaaagggttcccccaaaggggacctcacccgccccgagctctggagccgctgacgctcgcatccaggacatttgagatgggaatccaaataggctacttggaaaagacgtgctgcaggcagccctggagagactcatggagttcattgtacattactccatctaccgaggcagcgcatggcatgactgaacggcttggaacaaacacagaaattagcaccacaaacattcaggaaccaaatataatctgctatggtcacaccacagacaatgcaggaagaggctttttattgcttgtgtgtgttttcaaatcaagtaggcacaacccagtcctcataacagccctcgggagtggacgcaccggggcgggagagcgcaggagggagtgtgcttggctatcctgcccagtggaaaggaaagtgacgtgcattgatcttagagtccttggcaacagactgtggaggcaataacaggataaagaaagcagggagaacgaggcatggccagggaccccagtgcgccttcaaggagaccttaaaacagatagatagcaccacaagagagccacaagagagaagtgtaaaaaataagcaccaattttcattgagttatcacctacaaaaaatgtggtttccctgccctggacattctcccatcaggctctgcgggaagaaaagcggaaaaaggaagcaaataaaattaatccaaacctgtgttttagtcttaagtgccatgtagaaacaagaaaattatcaaattttttccctattaaaaaaaaaaaagtctagagcgaatcaaaaactgtctgaaaaggggcacctggtacctgcttttcaatggcagcataaattcttgctgccccggggcaaacttccaatttattgcacgttcttggccagggcgggggtggggagacttcctatttctaatcagaacggtactgcaacccagaatccatgcctcgcccattctgtccgtgggactgagactgggtttccgtgcatgattgaaagccaggcacacttaacatttataacaatacaatacaaatatttacttaaaactcacaaaaacataagcacctttaatccatcgggaaggcacctgcagaatgacatttggcctctaaatggatcgtgttggaggttgttaaaaacggaggctttggtgatggtgggatgacctttacgaggcttaccttggaacattttttgaaggtcaggggaaatacacatcttcaagttgaatttagaaaaaaatatagtgtccaaatctggcagtccctcccccaacccctgagacctattcacgaacaggatgggtcgggcgagctggggggctggaggcatggccccgctcccggggcgccgtgggtgtggacagagcgtggggcgggcccaggcgctggggtgcagctaggtcatgtgattcagctccaggtgggggcgcggctccttccctctgttctctccgggctggggtcccacaccccgtggtgccgaggcgtagatgaagtcaggtgggaggggagggagaagccttcactgtccaggatcaggacgtgcacgggacactcacgaacgaatggcatgctgaggtcacgaggttgctctcgggagcccgggctcggcggctcctagcccatgaagcaagccggccccacttcaaatccaaatttctgtgacgcttcaccgaagtcattgaacatgatgtccacgatgggcacctgctccactttgggggtgtcgatctccagaaccgtcttctggtagcctttcttggtagcacagccgtccaccagggcgcggatgtaggggttgttgtcataggacatctcctcgtcgttggagcccaggaagcggagggccttgtcgtagctgcccgtggctgcgtcctgccaggccactgactggtagcagtggtaggtgacgttctggtgggcagaggcgctcagcagccgcaggaaggtcatctgtaccacacccacagggttgccctcggcgtccacataggagagcagtttcccacgcttgaattcactgaaccaggagcccgggttttctttgggccaagaagtgattctggccccttcggacttcttgtcagggaagacgcatgtcgaccccccggctgtgaagttgcagtaaaccttgaaggaatccctggagcatccttggttaggatcgacccagtattcaccatctgggaagtcggggtggcagagctgcaggtccttgcaggtgcgggcggggttctgctgcgtgcccaggggccgtttcatctgctcaatctccagcttcagagagttgagagagccgaagatctcttccatgccgtccgcgtagtccacgtagttctcgccattcccgtcgtccagcagctggctggcgtcgatgttccgccgcgtcctggatgcctggattggcaggggctggatgacctctcccggggggcccggggggcctgggggtcctgggtggcctgcctcacccctcgggccagttggacccgaggagcccttagcaccttttggaccaggcggacccggcaggccagggggcccaggaggcccaatcgggccagaaggaccagtgataccctgttctcccttaggaccggaggagccctgggggccagggagaccacggtcgcccttctcaccctgttcacccggaggaccgatgagcccgatcaggcctggatgacccttttcacctttgggaccagaatctcctttgaggccgggaagtcctgggggacccatggggccggggggaccgtccgggcctggggatcctgggagaccttgttctcccacagggccagggatccctcgaaggccatccggtccgggcttcccaggggccccctgggggccgatggggccagtcttcccaggagggccttccaagccggcttctcccttggcccctttctctccctgtctgccttcggggcctgcggggcctgggggacccctttttcctggaggccccgatggacctggttcaccagtagggccgggggatcccgtctgcccgggttcaccatcatctcctttgtcaccagggggaccatcttgacccgcggggccaggctctccgggggggccaggatctccaggaaaacccactgggccagggctgcctttgggaccatcatctccgggagggcctttgggtccagggggtccggcagcacctgaagggcctgactcgcccttctctcccctttctcctttgggtcccggggggccgcttctcccggaagggccaggctcacctgcttcgccaggctcgcccttctctcccactgcaccagggtttcctattccacctgggggaccttgtgggccatcagcacctggagctccggagggtcctcgggggccagggggacccggggggcccatctggcccacgtctcctgtctcacccttctcgcctggaggtcctggcaaaccctgcagccccactggcccagggggtccaggaaagcctctgggaccttcatcacctttctgcccgaaaaggccctgctggccccgaggccccggctcgccgtcagctccagaggggcctggctgtccgatggggccttgaggacctgtaggcccaggaggaccctgttctcctttgtcccccttgcttcctttctgccccggctccccgatctctcccttatctccgtcttctccagggggacccacagggccagctggacccgggagccccacaggcccctggagaccgtctcggccagctgggccttgtgggcctttctcgccaggagcccctttctctcctgccggccctgggggtccctggggcccaggtctccctggaattccgatgggcccagcggctccagctggacctctctcccctggagatcccgcagggcctggtgggccagggggcccttcattgcctttcagtccaagagctcccactggaccaggaagccctcggtccccagggaaaccacgtaatcctggagggccatctttcccagggaggcctgcagggcctgggtcacccttcgtcccttcttttccagcaaggcccggaagcccctgttcaccggggggtccagggggcccagggtggccacgctcacccattgggcccgtttctcccgtgggaccctgagggccgaccacgccgggggggcctggagggccggtcttgccttggaaaccagtctcgcctctctgtccagggtgtcctgggagtccatccttgcctggagggccaggggggccctttggtccaggaaatcctgtgggtccttggggtccattgggtccccgttcaccaggagggccagctgggccgtcacctccggagttgcccttggggccaggcttcccagtgatgccccgggggcctctttcacccctcggacccgttgggcctcgctgcccccgcggtcctggctttccaggggtccccctgccgcccttctctccattggcgccaggaaatccagggaatccaatagagccctttggtccttgtcttcctggataccctggtaaccctgggactccgagttttcccttctccccagggggtcccagaggaccggggtcaccattgggacctccgcgaccctttgggccttcagggccatcttctcccctgggaccgggtgggccgatctccccccgatcacccttgatgcccatgtctcctttaaacccaggaaagccgtcttcacccttctcgccctttgtgcccttcagaccacggatgccatcggcccccttgactcctcgaggacctgggtagccaatcggaccctgggggccaggtggaccctgacctcctttctctcctggagggccttctttgccagggtgtcccgggggtccgtcagcaccgggcattcctggaaggcctggtttccccaagggacccttttctcctggaggaccaattgcaccctgggggcctggaagaccctgggcgcctggattaccctgctgtcctggggggccaggctctccctggggacccacatttccttttggccccggctggccgtccatacccgtgacaccgggaggtccgggaggacctgggggccctttcggcccaagcagaccacgtggcccgggcttcccaggcagccccctgggcccaacttctccgtcgtcacccctttctccatcgtctcccggaggtcctggtgggccggaaggaccagggtcacccctgtggcccttctcgcctggcaacccagccaggccgtcgaaaccccggtcacccttggggccagtttgtccaggcattcctctggctccatcactcccagcccgaccccgtcttccgggcttcccggccggaccaggcgggccttgcacacctcgaggaccctgaggccccacgtctcccggctcgcccttcaaacctccgctcccagggggacccacagggccaggtctccctgtgagacccatcgggccagctggtcccctcagtgccaacctggcctgctggagaatggcttgcgcctgggactcctgggctgagaccatggggcctttggagcccgcatcgccgccacctccaaaccggaagggcagcatgagcatggttcctggaggaccgggcaggccatcggccccaggaaggcctgggcgtccaggggggcccctttctccagggtccccgacttggccagtgggacccatggttcctggaggtccgggaagacccgcggggccttctgggccaggcgggccctcgatgagcatgcccggctcgataatcgctggttctcccttttggcctttctcgccccgaggtcctccaatcccttcatagatggtatcctggttcgccggcattcccggcccgatctccgacggggagctggtggggtcgtagtaggggtcgtagtagttctcgtcaaggttccggatcgtttcctcagtgaactccccctccaagtcatccgcaccttcccctggaggcggagctggattggaggagttggaggtgtcggcggtgctggtgggaatttcggccccagcgcctgggtctgtgggctggtcagggttctcctccccctcgccataggtgaggtcatcatacggtgagggcgtgtagtagtcctcactgggcacgtagtcatagtccccgatgccgacgtcctcttccttcccagccccttcactggtttcaggcatgggagcagcttccgtgggggtcggggtcagctcctcggggacctctgtggtttctttggcagcttccacgggcttcttgctgggggtgggctccttccctaggtcttcggggtcttcgtagtaggggtattcgtagtaataggtctcaccctcgccgtctccttccgtgtaatattcatctggattggggtcctgcgactgtggggtgtcaggtactgcggtgtcacagtcagggctgtagtgctcacagtaatcataagctgcccggtggtccgagacaaagagcagctgctggatgtcaccctcaaacacctcctcatccaggatccgggtgccaaacacgatgatgccattgatgtcgatcatggggtggtcgctgcggtcgaggaatttggtggtcttctttttacagtcgaggatcaaggtgacatttttcttgtggacgctgagagcaattctgtgccacttgccatctgacaggttgatgccccggaagagggggtagtcttccgggccaggcttccccgtgtggtcctcgtagaggaagacgggagagcggcccagctccagcccaatctgctggataccctgctcgttgtagatggagaccaggaaggcctggctgcctttcttggctttcacagttgttaggatggagaagtcctcgggaaatgcagacgcagggtacagctgcttggtgggtgcgctgagctgcgcgtctttggtgactctgtaagcgacatccgggcctttggaagatcgccgcgtggcgcaaaagcctgttgtctttgttattccatcaggcaagttgtgaaaatctagaaccttcaggagatctgctggctgagctgcgcggctcggaggcggcgcccacagcagcagcagcagcagcgggggcagcagcggggcgcccgggcggagcgcgctgcgcgctttccagcgggtatggacgtccatgccggcggggcgcgggccggggcgcacaggggcgctcggaggcgcgcggggacgcacaggggcgcgggtcacggcccgggcagcgcactcagcagggaccgcaccactttaggaggtcatggggac

SEQ ID NO: 57654 - DNA, 724 bp, Homo sapiens
  misc_feature (1)...(724): n = a,t,c or g
gcttctgcatctcctaggaacctcgggagcggcagctccggcgcctggtagcgagaggcgggttccggagatcccggcctcacttcgtcccactgtggttaggggtgagtcctgcaaatgttaagtgatttgctcaaggtgcccatttcgcaggaattggagcccaggccagttctctgagcctatcattagggctaaaggagtgcgtgatcagaatggtgtctggacggttctacttgtcctgcctgctgctggggtccctgggctctatgtgcatcctcttcactatctactggatgcagtactggcgtggtggctttgcctggaatggcagcatctacatgttcaactggcacccagtgcttatggttgctggcatggtggtattctatggaggtgcgtcactggtgtaccgcctgccccagtcgtgggtggggcccaaactgccctggaaactcctccatgcagcgctgcacctgatggccttcgtcctcactgttgtggggctggttgctgtctttacgtttcacaaccatggaaggactgccaacctctactcccttcacagctggctgggcatcaccactgtcttcctcttcgcctgccagtggttcctgggctttgctgtcttcctcctgccctgggcgtccatgtggctgcgcanctcctaaaacctatccacgtcttttttggagccgccatcctctctctgtccatcgcatcc

SEQ ID NO: 57655 - DNA, 357 bp, Homo sapiens; identical to SEQ ID NO: 23983

SEQ ID NO: 57656 - DNA, 2242 bp, Homo sapiens
agaatgacatcacaggcctttcccggcaggtgaagcatgttatgaacttcacaaattgggcaattgcaagtggcagcagcacagcactactatacagcaagcgactgattactttccagttgcgtcatattttgaaagcacggtgtgatcctgtccctgctgctaatggagcaatacgtttcccattggtgatcccaccttcctgggcaaaggaatggtagtcaatttagggtaatctagtaatagagagtaaaccagctcctggttatactcctaatgttgtagttgggcaagttcctccagggacaaaccacattagtaaaacccctggacagattaacttagcacagcttcggactccagcacatgcaacaacaagtatatgcacagaaacatcagcagttgcaacagatgaggatgcagcaaccaccagcacctgtaccaactacaacaacaacaacacaacagcatcctagacaagcagcccctcagatgttacaacaacagcctcctcgattgatcagtgtgcaaacaatgcaaagaggcaacatgaactgtggagcttttcaagcccatcagatgagactggctcagaatgctgccagaataccagggatacccagggcacagcggccctcaatattccatgatgcagccacacctccaaagacaacactcaaacccaggggcatgctggaccctttcccgtagtatcggtacacaacaccacaatcaacccaacgagccctactacagcaactatggcaaatgcaaaccgaggtcccaccagcccatctgttacagcaatagagctaatcccctcagttaccaatccagaaaaccttccatcgctggccagatattccacccatacagttggaagatgctggctcaagtagtttagataatctactaagtagatacatctcaggcagtcacctacccccacagcctacaagcaccatgaatccttctccaggtccctctgccctttctccgggatcatcaggtttatccaattctcacacacctgtgagacccccaagtacttctagtactggcagtcgaggcagctgtgggtcatcaggaagaactgctgagaagacaagtcttagtttcaaatctgatcaggtgaaggtcaagcaagaacctgggactgaagatgaaatatgtagcttttcaggaggtgtaaaacaagaaaaaacagaggatggcaggaggagtgcttgcatgttgagcagtcctgagagtagcttgacaccacctctctcaaccaacctgcatctagaaagtgaattggatgcattggcaagcctggaaaaccatgtgaaaactgaacctgcagatatgaatgaaagctgcaaacagtcagggctcagcagccttgttaatggaaagtccccaattcgaagcctcatgcacaggtcggcaaggattggaggagatggcaacaataaagatgatgacccaaatgaagactggtgtgctgtctgccaaaacggaggagatctctttgtgctgcgaaaaatgtccaaaggtctttcatctaacttgtcatgttccaacactacttagctttccaagtggggactggatatgcacattttgtagagatattggaaagccagaagttgaatatgattgtgataatttgcaacatagtaagaaggggaaaactgcgcaggggttaagccccgtggaccaaaggaaatgtgaacgtcttctgctttacctctattgccatgaattaagtattgaattccaggagcctgttcctgcttcgataccaaactactataaaattataaagaaaccaatggatttatccaccgtgaaaaagaagcttcagaaaaaacattcccaacactaccaaatcccggatgactttgtggccgatgtccgtttgatcttcaagaactgtgaaaggtttaatgaaatgatgaaagttgttcaagtttatgcagacacacaagagattaatttgaaggctgattcagaagtagctcaggcagggaaagcagttgcattgtactttgaagataaactcacagagatctactcagacaggaccttcgcacctttgccagagtttgagcaggaagaggatgatggtgaggtaactgaggactctgatgaagactttatacagccccgcagaaaacgcctaaagtcagatgagagaccagtacatataaagtaaaatgacatggatttaaatcaattgtttaaaaaaaaaaaaacg

SEQ ID NO: 57657 - DNA, 676 bp, Homo sapiens
  misc_feature (1)...(676): n = a,t,c or g
gctcatggttgcagacctaggcgatgtgaatgtcaatctttacaaccttcaggacagctgccggcaaattcaagaggcctatgagaaaattgtagcagctggctgaattcctctgaccttgggtggagatcacacaatcacatatcccatattgcaagcgatggcaaaaaagcatggcccagtggggctgctgcacgtggatgcgcacacggacacgactgacaaggccctaggagagaagctctaccacggggcgcccttccgccggtgtgtggatgagggtctcctggactgtaagcgtgtggtgcagattggcatccggggctcttccacgaccttggatccctacagatacaaccggagccagggcttccgggtagtcctggctgaagactgctggatgaagtcactggttcctctgatgggggaagtcaggcagcagatgggaggcaaacccatttatatcagctttgatattgacgctctggatcctgcctatgcgccagggacagggacaccctgaaattgctggtctcaattcctagtcangcntntggaaaaannttncnggggttgtaaagggccctgaaccnnaanngggctgggaaaannnttttncnaatttnnccacccggnntnaaacttttctngggaacacaagncctttnttgggggg

SEQ ID NO: 57658 - DNA, 2146 bp, Homo sapiens
gcgacaaccaccagttaagcgtttgagacttcgtggtgattggtcatatactgttacccagagcaaggccggagagtgaacgagaacgagatggagagcagagtcccaatgtgtcattgatgcagagaatgtctgatatgttatcaagatggtttgaagaagcaagtgaggttgcacaaagcaatagaggacgaggaagatctcgacccagaggtggaacaagtcaatcagatatttcaactcttcctacggtcccatcaagtcctgatttggaagtgagtgaaactgcaatggaagtagatactccagctgaacaatttcttcagccttctacatcctctacaatgtcagctcaggctcattcgacatcatctcccacagaaagccctcattctactcctttgctatcttctccagacagtgaacaaaggcagtctgttgaggcatctggacaccacacacatcatcagtctgattctccttcttctgtggttaacaaacagctcggatccatgtcacttgacgagcaacaggataacaataatgaaaagctgagccccaaaccagggacaggtgaaccagttttaagtttgcactacagcacagaaggaacaactacaagcacaataaaactgaactttacagatgaatggagcagtatagcatcaagttctagaggaattgggagccattgcaaatctgagggtcaggaggaatctttcgtcccacagagctcagtgcaaccaccagaaggagacagtgaaacaaaagctcctgaagaatcatcagaggatgtgacaaaatatcaggaaggagtatctgcagaaaacccagttgagaaccatatcaatataacacaatcagataagttcacagccaagccattggattccaactcaggagaaagaaatgacctcaatcttgatcgctcttgtggggttccagaagaatctgcttcatctgaaaaagccaaggaaccagaaacttcagatcagactagcactgagagtgctaccaatgaaaataacaccaatcctgagcctcagttccaaacagaagccactgggccttcagctcatgaagaaacatccaccagggactctgctcttcaggacacagatgacagtgatgatgacccagtcctgatcccaggtgcaaggtatcgagcaggacctggtgatagacgctctgctgttgcccgtattcaggagttcttcagacggagaaaagaaaggaaagaaatggaagaattggatactttgaacattagaaggccgctagtaaaaatggtttataaaggccatcgcaactccaggacaatgataaaagaagccaatttctggggtgctaactttgtaatgagtggttctgactgtggccacattttcatctgggatcggcacactgctgagcatttgatgcttctggaagctgataatcatgtggtaaactgcctgcagccacatccgtttgacccaattttagcctcatctggcatagattatgacataaagatctggtcaccattagaagagtcaaggatttttaaccgaaaacttgctgatgaagttataactcgaaacgaactcatgctggaagaaactagaaacaccattacagttccagcctctttcatgttgaggatgttggcttcacttaatcatatcccgagctgaccggttggagggtgacagatcagaaggctctggtcaagagaatgaaaatgaggatgaggaataataaactctttttggcaagcacttaaatgttctgaaatttgtataagacatttattatatttttttctttacagagctttagtgcaattttaaggttatggtttttggagtttttccctttttttgggataacctaacattggtttggaatgattgtgtgcatgaatttgggagattgtataaaacaaaactagcagaatgtttttaaaactttttgccgtgtatgaggagtgctagaaaatgcaaagtgcaatattttccctaaccttcaaatgtgggagcttggatcaatgttgaagaataattttcatcatagtgaaaatgttggttcaaataaatttctacacttgccatttgcatgtttgttgctttctaattaaagaaactggttgttttaagataccctg

SEQ ID NO: 57659 - DNA, 1130 bp, Homo sapiens
ttttttttttttttggagcctgtagcctttattcatgcccccctgaccaaatgcagtgagagacaaggcccctgccgaaaacaactccaggggcctgggactctgggtcccctactgcagacactttcctgtgagccagaagtgtataaagtgctggtgtgtgaccatcctttggggaaggtcaaagggggcaagatccccaggggccctgaggaagggcagggcataggcgtggctcccagagcgctgggagggagggcccgtgccaccacctcggggctagaaaacaatgcagtcctgggcaggagggaactgaaaatgggagccttcagcatggagccctcaggaggctggggttgtagggggataatttctgtacccctgtgaagggagggggcatgtaggaaaggccttggggatctcagagaatgggacagcccctccgacgcttgttcttgcggacctggaggccagcccgagtggccatctcaaacacctcccgcactccctccttggtcttggctgagcactcaaggtagccaaaggcactgatccggttcgccatgtcccggccttcctcagaccgaacgggctcctgcttcatcttggccagctctctcctggtgtgctcgtcttgccctcaggtccttcttattccccaaccaggatgatgggcacgttggggcagaagtgcttcaccttctggggtccacttctcaggaatgttttcccaggctgtcagggctgtcgatggagaagcacatgaggatgacatcagtgtccgggtaggagagaggccgcagtcgatcatagtcttcctgcccttgctgtgtcccacagagccagctccacctgcttgccgtccacctcaatgtccgcaatatagttctcaaagacagtagggacgtagacctccggaaactgatccttgctgaagacgatgaggaggcaggtcttcccacaggcaccatccccaacgatcaccagcttctttcggattgcagccatggtggggctccagccggctgaagttcccaggctgcaggaagagagggcgggctctggagctgagatgaagtcaaggcttccgctccgccgcctccagctgcgcggccggtcgcggaggctca

SEQ ID NO: 57660 - DNA, 1498 bp, Homo sapiens
gcagcctgtcaggatactgacgaggaggaggaagaggaagatgatgatcaggctgaatacgacgccatgttgctggagcacgctggagaggccatccctgccctggcagccgcggctgggggagactcctttgccccattctttgccggtttcctgccattattggtgtgcaagacaaaacagggctgcacagtggcagagaagtcctttgcagtggggaccttggcagagactattcagggcctgggtgctgcctcagcccagtttgtgtctcggctgctccctgtgctgttgagcaccgcccaagaggcagaccccgaggtgcgaagcaatgccatcttcgggatgggcgtgctggcagagcatgggggccaccctgcccaggaacacttccccaagctgctggggctcctttttcccctcctggcgcgggagcgacatgatcgtgtccgtgacaacatctgtggggcacttgcccgcctgttgatggccagtcccaccaggaaaccagagccccaggtgctggctgccctactgcatgccctgccactgaaggaggacttggaggagtgggtcaccattgggcgcctcttcagcttcctgtaccagagcagccctgaccaggttatagatgtggctcccgagcttctgcgtatctgcagcctcattctggctgacaacaagatcccaccagacaccaaggccgcactgttgctgctcctgacgttcctggccaaacagcacaccgacagctttcaagcagctctgggctcactgcctgttgacaaggctcaggagctccaggctgtactgggcctctcctagactgcaggctgcagccagtccagagagaatagagcctgcccaggccttaagaccacctctcagcccagttcagttctgccttaccaaagattctgagactcatacccatttggagccagccccacttgctgccttacagggctgtccctgaggctggatctgttacaaatgagtcatgacatcatactgtaataaaagcagcttgttttctgcttgaacaatagctctgagagcaagaaggctggaaatgcacattcagaaatgaggtaagcaggacccagtgaggcacgacgtggtttactagaagtggccggtttcctggcagctttgtaaatggactctaacctcagtggaatctgggccccggctggatcaggaggcgaccatatggcttttcttgtttcacgtgaagaatctgttgcgctgagagcaccaggagcaggtagaagacccgggcagccatcctgcgggggctgagaggtgacaccaggctgctgaagtcgggctccctgttagcctgcagctccagtgccactgccctgtgcactgcttccagtgagagcagctcgagctctgggggcagcaccaaaggcatctccatgggcacctcagggagttcaggcaccacgggcaatgcaggagcttctggcgcctccacctcaggccaggccca

SEQ ID NO: 57661 - DNA, 2180 bp, Homo sapiens
  misc_feature (1)...(2180): n = a,t,c or g
cgataatactaagaaggcaaataactctcaggagccttctccgcagttggcttcctcggtagcttccacacggagcatgcccgagagcctggacagcccaacctctggcagaccaggggttaccagcctcacaactgcagctgccttcaagcctgtaggatccactggcgtcatcaagtcaccaagctggcaacggccaaaccaaggagtacccttccactggaagaatctcaaacagcgctgcttactcaggatcagtggcaccagccaactcagctttgggacaaacccagccaagtgaccaggacactttagtgcaaagagctgagcacattccagcagggaaacgaactccgatgtgcgcccattgtaaccaggtcatcagaggaccattcttagtggcactggggaaatcttggcacccagaagaattcaactgcgctcactgcaaaaatacaatggcctacattggatttgtagaggagaaaggagccctgtattgtgagctgtgctatgagaaattctttgcccctgaatgtggtcgatgccaaaggaagatccttggagaagtcatcaatgcgttgaaacaaacttggcatgtttcctgttttgtgtgtgtagcctgtggaaagcccattcggaacaatgtttttcacttggaggatggtgaaccctactgtgagactgattattatgccctctttggtactatatgccatggatgtgaatttcccatagaagctggtgacatgttcctggaagctctgggctacacctggcatgacacttgctttgtatgctcagtgtgttgtgaaagtttggaaggtcagacctttttctccaagaaggacaagcccctgtgtaagaaacatgctcattctgtgaatttttgaaagtcagcagttcaggagaagagaaggaatttgaagagaaaaaggaaaattaaaattactaattaatttttagattcaatatttatatggagttttgaaaaataatagtggccctgaaggaataaattccagctttaaaaaccaagtctgaggaaatatttggcttcataaagtaaagagacggtttggcatttattattactttttcctgtattttatgcccataaaataagctttataaaaaccaatttcctgatggactattaaattcatcttagaataaattagtgaagaatttaattttagaataaataatccaatctgaaataattataccttctttccttgttaggtagttatgagtaaatctgcaaaaggcaatgaaaatgccttaaattttatcaataacagaattattgtatttaaaaaaaaactaatacttatctttaaaatagtaaataggattttaaacagagaattttatcagtaataggtgtcagtttttaaaaaattgcttgtannnnnnnnnnnnnnnnnnnnnnnnnnnnnnnnnnnnnnnnnnnnnnnnnnnnnnnnnnnnnnnnnnnnnnnnnnnnnnnnnnnnnnnnnnnnnnnnnnnnnnnnnnnnnnnnnnnnnnnnnnnnnnnnnnnnnnnnnnnnnnnnnnnnnnnnnnnnnctttgcttgtatattatttttgccttacagtggatcattctagtaggaaaggacaataagattttttatcaaaatgtgtcatgccagtaagagatgttatattcttttctcatttcttccccacccaaaaataagctaccatatagcttataagtctcaaatttttgccttttactaaaatgtgattgtttctgttcattgtgtatgcttcatcacctatattaggcaaattccattttttcccttgcgctaaggtaaagatttaattaaataattttggcctctcatagttttctctctctttaaagagaataaataggaggggccagggtgtgggtgggctcacgcctgtggatccccagcactttggggagggccaagacggggcgggatccatgagggtcaagagatccaaggatccatccgggggccaacatgggtggaaacccctgttctctnacttaaaaattacaaaaatgaggctgggggcatgggtnggggccttgccgttaggtcccctgttactttggggaggctgagggcagggaanttctttgnaccccggggggacggnagtttgccagtngagctngagatcacaccactggca

SEQ ID NO: 57662 - DNA, 371 bp, Homo sapiens
gacactgtttccagcaagttgcaaaacaacaatgtttatactattgccaagaggaatgtggaagggcaggacatgctgtaccaatccctgaagctcactaatggcatttggattttggccgaactacgtatccagccaggaaaacccaattacacgaaatacagtgagctcttcctgtaagtgacctgagatgatctctgctcagttggcctagaaaacccccaaaatcatacaaagcaagagattcaaatcttcatgtttactttaagaacacccgtggaagtgcccaggccatcaaagctgtcactgaagtgtagagctcctgaagtctctcaatacatctatcaggtctacgacagcattttgaaaaa

SEQ ID NO: 57663 - DNA, 4339 bp, Homo sapiens
aaagcacgtttaggtgcaatcattctgctgtttgctccttgccaggttcaacatgggattgtcacgcaaatcatcagatgcatctgcttgctcctcttcagaaatatctgtgaaagagtttctagccaaagccaaagaagactttttgaaaaaatgggagaatccaactcagaataatgccggacttgaagattttgaaaggaaaaaaacccttggaacaggttcatttggaagagtcatgttggtaaaacacaaagccactgaacagtattatgccatgaagatcttagataagcagaaggttgttaaactgaagcaaatagagcatactttgaatgagaaaagaatattacaggcagtgaattttcctttccttgttcgactggagtatgcttttaaggataattctaatttatacatggttatggaatatgtccctgggggtgaaatgttttcacatctaagaagaattggaaggttcagtgagccccatgcacggttctatgcagctcagatagtgctaacattcgagtacctccattcactagacctcatctacagagatctaaaacctgaaaatctcttaattgaccatcaaggctatatccaggtcacagactttgggtttgccaaaagagttaaaggcagaacttggacattatgtggaactccagagtatttggctccagaaataattctcagcaagggctacaataaggcagtggattggtgggcattaggagtgctaatctatgaaatggcagctggctatcccccattctttgcagaccaaccaattcagatttatgaaaagattgtttctggaaaggtccgattcccatcccacttcagttcagatctcaaggaccttctacggaacctgctgcaggtggatttgaccaagagatttggaaatctaaagaatggtgtcagtgatataaaaactcacaagtggtttgccacgacagattggattgctatttaccagaggaaggttgaagctccattcataccaaagtttagaggctctggagataccagcaactttgatgactatgaagaagaagatatccgtgtctctataacagaaaaatgtgcaaaagaatttggtgaattttaaagaggaacaagatgacatctgagctcacactcagtgtttgcactctgttgagagataaggtagagctgagaccgtccttgttgaagcagttacctagttccttcattccaacgactgagtgaggtctttattgccatcatccgtgtgcgcactctgcatccacctatgtaacaaggcaccgctaagcaagcattgtctgtgccataacacagtactagaccactttcttacttctctttgggttgtctttctcctctcctacatccatttcttccttttccaatttcattggttttctctaaacagtgctccattttattttgttggtgtttcagatgggcagtgttatggctacgtgatatttgaagggaaggataagtgttgctttcagtagttattgccaatattgttgttggtcaatggcttgaagataaactttctaataattattatttctttgagtagctcagacttggttttgccaaaactcttggtaatttttgaagatagactgtcttatcaccaaggaaatttatacaaattaagactaacctttctttgggaattcactattctgggcaaataaattttgggtaggcctaatacaggtacagctagacccagaaatttggaaggctgtagatcagaggttctagttccctttccctccttttatatcctcctctccttgagtaatgaagtgaccagcctgtgtagtgtgacaaacgtgtctcattcagcaggaaaaactaatgatatggatcatcacccagattctctcacttggtaccagcatttctgtaggtattagagaagagttctaagttttctaaaccttaactgttccttaaggattttagccagtattttaatagaacatgattaatgaaagtgacaaattttaaattttctctaatagtcctcatcataaactttttaaaggaaaataagcaaactaaaaagaacattggtttagataaatacttatactttgcaaagtcaaaaatggcttgatttttggaaacaatatagaggtattcatatttaaatgagggtttacatttgttttgttttgtaaccgttaaaaagaagttgtttccagctaattattgtggtgtactatatttgtgagcctagggtaggggcactgctgcaacttctgctttcatcccatgcctcatcaatgaggaaagggaacaaagtgtataaaacctgccacaattgtattttaattttgaggtatgatattttcagatatttcataatttctaacctctgttctctcagtaaacagaatgtctgatcgatcatgcagatacaatgttggtatttgagaggttagtttttttcctacacttttttttgccaactgacttaacaacattgctgtcaggtggaaatttcaagcacttttgcacatttagttcagtgtttgttgagaatccatggcttaacccacttgttttgctatttttttctttgcttttaattttccccatctgattttatctctgcgtttcagtgacctaccttaaaacaacacacgagaagagttaaactgggttcattttaatgatcaatttacctgcatataaaatttatttttaatcaagctgatcttaatgtatataatcattctatttgctttattatcggtgcaggtaggtcattaacaccacttcttttcatctgtaccacaccctggtgaaacctttgaagacataaaaaaaacctgtctgagatgttctttctaccaatctatatgtctttcggttatcaagtgtttctgcatggtaatgtcatgtaaatgctgatattgatttcactggtccatctatatttaaaacgtgcaagaaaaaaataaaatactctgctctagcaagttttgtgtaacaaaggcatatcgtcatgttaataaatttaaaacatcattcgtataaaatattttaattttcttgtatttcatttagacccaagaacatgctgaccaatgtgttctatatgtaaactacaaattctatggtagctttgttgtatattattgtaaaattattttaataagtcatggggatgacaatttgattattacaatttagttttcagtaatcaaaaagatttctatgaattctaaaaaatatttttttctatgaaattactagtgcccagctgtagaatctaccttaggtagatgatccctagacatacgttggttttgagggctattcagccattccattttactctctatttaaaggccggtgagcaagcttgtcatgagcaaatatgtcaagggagtcaatttctgaccaatcaagtacactaaattagaatatttttaaagtatgtaacattcccagtttcagccacaatttagccaagaataagataaaaacttggaataagaaggtaagtagcataaatcagtatttaaccctaaaattacatatttgaaacagaagatattatgttatgctcagtaaataattaagagatggcattgtgtaagaaggagccctagactgaaagtcaagacatctgaatttcaggctggaaaactatcagtatgatctcagcctcagttctcttgtctgtaaaatggaagaactggattaggcagtttgtaagattcctcctaactttcacagtccgatgacaagattgtctttttatctgatattttgaagggtatattgctttgaagtaagtctcaataagggcaatatattttagggcatctttcttcttatctctgacagtgttcttaaaattatttgaatatcataagagccttggtgtctgtcctaattcctttctcactcacccgatgctgaatacccagttgaatcaaactgtcaacctaccaaaaacgatattgtggcttatgggtattgctgtctcattcttggtatattcttgtgttaactgcccattggcctgaaaatactcattgtaagcctgaaaaaaaaaatctttcccactgttttttctgcttgttgtaagaatcaaatgaaataatgtatgtgaaagcaccttgtaaactgtaacctatcaatgtaaaatgttaaggtgtgttgttatttcattaattacttctttgtttagaatggaatttcctatgcactactgtagctaggaaatgctgaaaacaactgtgttttttaattaatcaataactgcaaaattaaagtaccttcaatggataagacaaaaaaaaaaaaa

SEQ ID NO: 57664 - DNA, 496 bp, Homo sapiens
ggtctcctgccagtccccatcccccacccttcacacatagaaatgctgcttttaaccagctgcctcatttggcgaataatcttaacaaacccccctctccgtggagcagctaccagagtccgtcaccaacaccctcctcttcctggagcccgggcggtggtggatatggtggctggggaggttcccaaggccgagatcaccgcagagggctgaatggtggaataacgcccctgaactccatctcgcctttgaagaaaaattttgcaagcaatcatattcagctccagaagtatgctcgccccagctctgcctttgcacctaaatcctggatggaagatagcttgaacagggctgacaacatttttccttttccggatcgccccaggacattcgacatgcactcactggagagttcactcattgacataatgagagctgaaaatgataccattaaaggtcagtcttcactgtttccaatggaagatggattcttgga

SEQ ID NO: 57665 - DNA, 1103 bp, Homo sapiens
tttttttttaatgacttttggtttttgtctttgtttttaatcatggtcccaaaggcagaaggcagtattttatctactaagtcacacagcttgtgagaggaaaggatgtctgtgtcaggcatgttaacttcaaacaaaatctgagatcggctttttccattgacattcttagcacagcacccaaagaagtataatctagccacagtgtggctataatgaggcacggcttattgcagctggaaatcaattatcctcacgctgaggtggggattctagtgttcctttgactctgtggatactccccaaatggtgtctgtcattcctgtgccacgacctcagcttgcatcctatcagtcttggggaaggaaaagggagtacagactagtgttacaagaatctaaaggtacccaagattttacacgtagtctaatatttgagaactgagggctatctaaatacctggaagcactttccttggaatgctaagacggagcagcaagattttctagccccggggggctggggaaaagggaagtttggttggttggttggttggttattatttactgggagttaaatactgagaagagtaatatgccaaaggctgagggcacccatgcccatccttcacagaacaagacccctaacagctacctgacatacaagaaactgcaagttatactgtaagaacacatgttaaggaccgaggaaagtctgctaaggtgctacgtctaaactaagttaacttgtcatgtttaacctccctgatcagtcatcatccagggcctctgtcttgatttcgttggctccttgtcgggccaatgccaagatagtgtggttgactgctgccatttccacagctaatgagatggggtcttggtggtcactatggctcgtactgtcatcctagaactagtgtgaagctgtcctccccgcgcagctcaatgtgttaaacaataaagctgtgaaggaagctggcattgcaggatgtacgtcaggcactgaagatggtgttacaaataaggggtatgtttctcacctgtcatcttcaggggaactccgtatcaaagagctttggaaagggtaagtccttgtttggatca

SEQ ID NO: 57666 - DNA, 635 bp, Homo sapiens
  misc_feature (1)...(635): n = a,t,c or g
ggcagagctggaacccacgcggaggaaggaagagacgcaggcaggctgcggcntacccaagcggccacccgggcctcagggaccccttccccgagagacggcaccatgacccagggaaagctctccgtggctaacaaggcccctgggaccgaggggcagcagcaggtgcatggcgagaagaaggaggctccagcagtgccctcagccccaccctcctatgaggaagccacctctggggaggggatgaaggcaggggccttccccccagcccccacagcggtgcctctccaccctagctgggcctatgtggaccccagcagcagctccagctatgacaacgggttttccccaccgggagaccatgagctcttcaccactttcagctggggattgaccagaaagtttcgtcgagtctttgtcagaaaggtctacaccatcctggttgattcagctgctggtgaccttggctgtcgtggctctctttactttctgtgaccctgtcaaggactatgtccaggccaacccaggctggtactgggcatcctatgctgtgttctttgcaacctacctgaccctggcttgctgttctggacccaggaggcatttcccctgggaacctgattctcctgaccgtc

SEQ ID NO: 57667 - DNA, 424 bp, Homo sapiens
gctatcggggatgtctgctttctccctgttctaaagctttggtactagaatagtagagtgattaagagtagaggctttgagataaataaaactggcttcaagtctctgctttacaacttactatctgggtcatcttaggaaaatctctgagcttcagtgctttgaatgataaaatacagacaatgataaatgtagggttaggagtagtcattgagataatgtatgcagtgggcagagcacagtgcttggaacatagtaggtgctcagtaaatggcaatgattattgcagttagtacaaattcctctccagtcttctctgcttctccaaatcttgtccaatgtggacccagatcaagctacatctttaccctgaaggtttctctgtcccctgaagctcatggtggtgatccctttctgagttctc

SEQ ID NO: 57668 - DNA, 360 bp, Homo sapiens
gcactgggaaagatgaggatttccctctttccacttgtgttccattacatacacacacagttacagcataattttgtcaagattaatagcattggcatcattataaatatttaaattgtagtcatataatttatatgtcatagctgacccacatagaattctgttttctttttccttccttgctcagttttaaaaatcttccctggagttattaattgtcatttcatttgctttttatttttgttcttatcactaatttatctaaataatatcttccaagtgtgttcagacacattggaattcaatcagtatcatcttgcagaggtcagaagtctctcctggagctttttgacttactta

SEQ ID NO: 57669 - DNA, 1558 bp, Homo sapiens; identical to SEQ ID NO: 14392

SEQ ID NO: 57670 - DNA, 7331 bp, Homo sapiens
caaggccagcccttcctcagctaataagcggaaaaacaaacccctttcagacatggagctgaattctagctcagaggactccaaagggagcaagcgtgtccgtactaattccatgggctcagccactggcccccttcctgggacaaaggtagaacccactgttctggacagaaactgcccctcccccgtcctaattgactgtccccacccaaactgcaacaagaagtacaagcacatcaatggacttaagtaccaccaagctcatgcccatacagatgatgacagcaagccggaagcggatggggacagtgagtacggagaggaacctattctccatgcagatcttgggagctgcaacggtgcatctgtctcacaaaaaggttccttgtcccctgcccgctcagctacccccaaagttcgacttgtagagccccatagcccttctccttcaagcaaattcagcacaaaaggcctctgtaagaaaaagttgagtggggaaggggacacagaccttggggccttatccaatgatggctctgatgatggaccctcagtgatggatgaaacaagcaatgatgcctttgattctttagaaaggaagtgtatggaaaaagaaaaatgtaaaaaaccctctagtttaaaacctgaaaagattccttccaagagcctaaagtcagcccgtcccattgcccctgccatccccccacagcaaatctacaccttccagacagccaccttcacagcagcgagcccaggctcttcctcaggcttgaccgccacagtggcacaagccatgcccaacagtccccaactcaagcccattcagcccaagcccactgttatgggagaacctttcacagtcaaccctgccttgactccagccaaggacaagaaaaagaaagacaaaaaaaagaaggaatcttcaaaggaacttgaaagtcctctgacccctgggaaggtgtgtcgagcagaggaaggcaaaagcccattcagggaatcttcaggaaatgggatgaaaatggaggggctcctaaatggctcatcagacccccaccaaagccgactggctagcatcaaggctgaagccgacaagatctacagtttcacggacaatgcccccagcccttccattggaggcagtagccgccttgaaaacactacccctactcagcccctgactcccttacatgtggtgacccagaatggagctgaagccagctcagtcaaaaccaacagccctgcatactctgacatctctgatgctggggaggatggggagggcaaggtagacagtgtcaaatcaaaggacgccgaacagttggttaaagaaggggctaagaaaactctttttccccctcagcctcagagcaaagactcaccatattaccaaggctttgagagttactattctccaagttatgcacagtccagccctggggctctgaaccccagcagccaggcaggagtggagagccaggccctgaagacaaaaagggatgaggaacctgagagcatagaagggaaagtgaagaacgatatctgtgaagaaaagaagcccgagctgagcagttccagtcagcagccctcggtcatccagcagcgtcccaatatgtacatgcagtccctgtactacaaccagtatgcctatgtacccccctatggctacagcgaccagagttaccacacccaccttctgagcactaacacggcttaccggcagcagtacgaagaacagcagaaacgccagagcttagagcagcagcagcggggagtggacaagaaggcagagatgggcctgaaggagcgggaggcagcactcaaggaagagtggaagcaaaagccgtcaattccaccaactctcaccaaggcccccagcctgacagacctggtgaaatcaggacctggcaaggccaaggagccaggggctgacccagccaaatcagtcatcattcccaagttagatgactcttcaaaactcccgggccaggcccctgaaggccttaaagtgaagctgagtgatgccagccacctaagcaaggaggcctctgaggccaagacaggtgctgagtgtggtcgacaggcagagatggatccaatactctggtaccgacaggaggcagagccccggatgtggacatatgtttatcctgccaagtactcagacatcaagtcagaggatgagcggtggaaggaggagcgggaccgcaaattgaaggaggaaaggagtcggagtaaggactctgtccccaaggaagatgggaaggaaagcacaagtagtgactgcaagctgcccacgtcagaggagtctcgccttgggagcaaggagccccggccaagtgtccatgtgcctgtgtcctccccacttacccagcaccagtcctacatcccctacatgcacggctattcctacagtcagtcctacgaccccaaccaccccagctaccggagcatgcctgctgtgatgatgcagaactacccaggttcctacctgccttccagctactctttttccccatatggcagcaaggtctcaggtggtgaagatgctgacaaggcacgagccagccccagtgtgacttgtaaatccagctcagagtccaaagccctggacatcttgcagcagcatgccagtcactacaagagcaagtctcccacgataagtgataaaacttctcaggagagagatcgaggaggctgtggggtggttgggggtggtggcagctgtagcagcgtcgggggagcaagtgggggtgaacggagtgttgaccggccccgcacctctccttcccagcgcctgatgtccacacaccaccaccaccaccacttggggtactcattgctcccagcacagtacaacttaccctatgcagcagggctttcttctacagccattgttgccagccaacaaggctcaactccctcactctacccaccccccaggaggtgagaatgacaccaagtgcccggataaagtcagcttcacgggcccggactggcttacccaaggaggtgctgaaggtgccgtttagacatcagttaaatggtgttgatcatcctgtttgccgtttccaccatgactgaaggcagacccttggctatctcacctccaccagacctccggactacctgaccctacctcttcctcaggagctggagagctggtacttagcaaaaatatttattctctcagccacagttatgactattgtggcctctgtggagatgaaggcacgggaagcaaccaggggaacatggcctcagcccagagaagccactgctctgttccccaagcccttggtctgctgctggagcagtaccagcccccccgcccaccagggagggacccccacccccaagcactgggtaaggtctgaagacagcacagcagccatacccctcaccatcattaccaccatcaccagattctgcatctccctagtgctttgcaccctgggaattggcagcatgtggaggaactagaatctcaggaaagaaattgggggttgttttctacataattgtgaaaacaaggtcttcaaatgtggagacttctccccatttacatgagcacatataaacgctcacaacctagcctggaaaggaagaccaaggcatctgccccaacatggccttgagctgcctgtgaggcagggggcaggggttccaacaccagcacagggctccccagggacactgggagtaagctggtgctggagcatgaatgacgtctgtgaagtagaacctgcgtccccactaagtcctgctgcttcttattccccaactccttgcccttttcccttccctcctaaccccttggtgcctttcccagggggatccccacactggtcttgcctcttcttttccactgcttggctcttaagcctcaggcagataaactagtattccccccagcttggggaaccttggagtctgccaggtcaccttagggcaaggcccagaaggcagcccctgggagcacccagcagttcttggagatgtcctgtcatctagccatctgatatcttcctcatttgaggccacagatatatacagcccaattcctctgtctacaagtacatgattttatatagctcagtctataacctccatgtgggccaatataagctgtgtttcttggtaacacatattttgtttgaggggccactggccatgggaggttatttgttccttagaccctggaataacacatccaagccattacttattagagtctcagaatgtactcagtggagctgtgctttgaggcagccaacatttctctgctctccttagaaatgcagtctcccaatggaagctttatactctttgtactgggaaagtgaggatgatttggtagctttattggggtcatgtcttccccaaggtgtggggagcttagcttacttggcttttgaggtatcatccctctgttctcccctcctatctttccatgaccctctggattgagagagagagataaagactgacagacaccagtgtaggctggaaaagggagtgtgtgaccagagtgccaaaagtgactaggagcaggaacttggctccgactcagtttggaaaatgggaaataggggacagtaagcacaatgcccagtagtagttgatttccaaggaccctggaaccctacacttgagaggcttagggtcaccatctgctcaagaggatcccctctgatctacaggccttttccctaggtttctgcctcctcgtttttgttcaagttgggttctgagtcctccccaaaaaccattgttttagacctcttggcagggccccaaaacagcctccctcatacccatcattccgtctgccttctgctgccctcatgggcagtgctctgagcagtgacctccctttcctccgtggaagtagctagtgcagacaccgtcatcccaccccacctgagtcaccccaaccaagagggtgactgaatttcagcctgattatgccctcctggggctcctgtgaggtggagccaaggttccctctctgttcctgtttgtttttaaatattgttgtgtgttttgtatctgtggcactggcctgcagcatactctgtatatattgtaaaaggaaaccgttaggagtaattttcttttgcattgggcaggcatggccctgcattcctgccctttccactcattctgtaacacagaggacgaacttctgtattagctgggcagccttgggttctccagaagagaacaggtttttcttttcctttttaatttttcttcttaaacatttggctctttgatcctcatatccaagtctcccctgaagagtaggagctgctcagaagagcaggtgaaagccaccatggcagatcctgatgcctgccgggcctagtcttccctctgaaataacatgaagcagcagctgtggagattcttgacaagtgctgagtgaaagatttgctgcccacctctacatggggaggagaaacacaggtgggagctacctgtggcatccatgacctagtcagagggatgagatgctcagcaggggtccccatcctatcccaccccacaaacaaaggctggaaaaatttgctaccaagggccaagaccaccagaccaagcctgtttatgagccacccctgcccaggccctcacagacattgctcacggggcttcccatagaggagaagctaaagagggagggggcctcatccccagatagatcaggcaaggcttgggagagctgctctttaggatccacatcaactacttcctcattttaaaggtatgggcagttccctttcatccccttttcctgccttgtacatgtacatgtatgaaatttccttctcttaccgaactctctccacacatcacaaggtcaaagaaccacacgcttagaagggtaagaggggcaccctatgaaatgaaatggtgatttcttgagtctcttttttccacgtttaaggggccatggcaggacttagagttgcgagttaagactgcagagggctagagaattatttcatacaggctttgaggccacccatgtcacttatcccgtataccctctcaccatccccttgtctactctgatgcccccaagatgcaactgggcagctagttggccccataattctgggcctttgttgtttgttttaattacttgggcatcccaggaagctttccagtgatctcctaccatgggcccccctcctgggatcaagcccctcccaggccctgtccccagcccctcctgccccagcccacccgcttgccttggtgctcagccctcccattgggagcaggttggggcgagctggaggcccgggctggaggggcagtgttgctgttcatagattttgttccattggcgttgctctgttgaatttaatttcagtcttcctgattcttcccttctgtaaagtgtacattaccaagttccttgtttttttatatatatatataaatatatatatatacaaactgtactctttttgcctttgtacattcaggcaagaagagaaaataaatctttttaagagacaatcacaaatctgtgagggctgctggttatttctcctggagtttgctgctgagctgcctcttccttcctcccaattttcctgttctccctcagctctcctgatcttcctggccctgctccatatgcatcctcagcttcactttccctggctgatggcaagctgttgaatccagtgtccagactacctgccttgtaaccctttctgcccagcattgtttctggcttggccactggcttagcccaggagctttactctgtgccctggcctcccctctcttcacctttagatttccattcaccgaagtggctttggacccctgggtactctgggacctgtttcctggaggccctggcttgggacactcacctgtgaaactatgcagctgggagctctctgcctaagagtttgcactatttaaacctgcctgggagttaggacggatggttttaggaatgaccggaaaactacccctaaaactcccccgacattccagcctctagaatgctctgatccagagctcagtggatgattcccagctggtggactcctgtggctaccccatcagaacaagggctaagggtttatgggtcaagagtatttgatcagaattttaaagggtggtatactctgaaacacagcccaaccaaaccattgtttggccgctttctcttttcctctaccttcctcatccccacttttttccctttctctctacttcctcttcttaattggctttggaattgaaatatatttttaaattatttgttgtatttattgaataaagtttttaatgtccctgttctt

SEQ ID NO: 57671 - DNA, 1690 bp, Homo sapiens
cctgttcagtactgcgcccagcccaccaatggcatggtgtatttccgggccttctccagcctgaacacactccccgaggagcttgaggccctatgtgcccctcttctgcagcgtcctcaccaagctgggctgcggccttcttgactaccgggagcaggctcagcagatagaattgaagaccggagggatgagtgcttctccccacgtgctccccgacgactcacacatggacacctacgagcagggtgtgcttttctcctctctctgcctggatcgaaacctgccagacatgatgcagctatggagtgaaatatttaacaacccgtgctttgaagaagaggagcacttcaaggtgctggtgaagatgaccgcccaggagctcgccaatggaattcctgactctgggcacctgtacgcatccatcagggcaggccggaccctcacgcccgcaggggacctgcaggagaccttcagcgggatggatcaggtgcggctgatgaagaggattgcagaaatgacagatatcaaacccatcctgaggaagctcccacgtatcaagaaacacttgttaaatggtgataatatgaggtgttcagtgaatgcgactcctcagcagatgcctcagacagaaaaagcggtcgaagacttccttagaagcatcggtcggagtaaaaaggaacggaggcctgtgcgcccacacacggtcgagaaacctgtgcccagcagctctggtggagatgcccacgttccccatggctcccaggtcattaggaagctggtcatggaacccaccttcaagccctggcagatgaagactcacttcctgatgcccttcccggtgaattacgtgggtgaatgcatccgaactgtcccctacacggacccagatcatgccagtcttaaaatccttgcacgtttgatgactgccaaattcttgcatacagaaattcgagaaaaaggcggtgcttatgggtgggagggcgcaaaacttcagccacaatggggatttttcaccctttactctttacaggggacccaaattacaataggaggacggttccagtcttttgggaaggctgtcgactgggctaagtctggaaaattcacacagcaagacatcgacgaagccaaactttctgtcttctcaaccgtagatgctcctgtcgctccttcagacaaaggaatggaccacttcttgtacggcctctcggatgagatgaagcaggcccacagagagcagctctttgctgtcagccacgacaagctcctggccgtgagcgataggtacctcggcactgggaagagcacacacggcctggccatcctcggacccgagaacccggaaaattgccaaggacccatcctggatcatcccgatgagcagccgtggcgctcgactgcacaggagcccgagacaatacacctccgagctgaatatgaaaagtcagaaatgctactgctttttccaagaatattatgtcattgagtgtcgccaaagcccttgactggcgagtcaaaaactcagatctatcttaagagtgaccaggaagaggttcattgaaataatcatgcatgaagcgccaaagatgcaccatgtagaattttcactttgtactggcaggctcgttttacctcattctagaatatttaagaatctaaaaataaagggcaactctgacttaaaaaaaaa

SEQ ID NO: 57672 - DNA, 1146 bp, Homo sapiens
tgtcactgttaatttctgggctgctgaggttctagaatagaagggctgccaaatgaggtttgctgcaggaggaaagtttaatcccccattccaaaagtccaggccaaatggtgggcttagcctctttgaaaagttctgccttgcccccacaggtgggcacatcctgtgtctcattcaccatgatgcttcctgagggtgttctagaagcccgttccccagtggctgtatccagcctttccttgcatcatcttcctcttgaaggtgaggaagtgaaaactacagacctcccccggacagcccactctctatcacgagcctaacccgcgggaggcggaagagacatccattcgagaactgaagcggcctccgggatgaggtcagaggccccacctgattttcctggtggtggtatccaaaatcttcagtaactaggaaggaaaccagggtctcatggtttaaaagactttgaagcaggaatgttgcatttgacgcctttaaaactacctttttgctgttgggaggagtcgggggcgagccttagcagctgcaccgccatccccatgctggttggtgctgccctgcctctcgtgccgggtgttgcttcagcccagagccagagggctgggtcccgggtcctccacaggtgaccccggtggacacacgcgttcccatcctggcctccgtctctgcttttccacttctacctgcgtgtgggtttgccgccttgtcatcggttgtgtgagtgtcgcagacctttccagagctccggttcactctttccaaacaggcctccctgtcggtgggcactgcactcctagaaccttcagtttctacgatggtttgtttggtccttttgaaccaccccaaagaactcaacatggcaaagcaaatggtaaaagcttcccgactgttctactttgggtccgcgcgaagcccactcacgtgtgatttgtgttgcccctctcggtggtcccaggcgatccagccatgccccctgcccctctgcccagatgcttcaggggcccggcttttcaggcttgccctcaccagcggccgtcagccgacactcagggatgtagctaacaccactccgcagtgctttcagtaggaagagctgaggctgctgggaggcccggggcgaccgga

SEQ ID NO: 57673 - DNA, 317 bp, Homo sapiens; identical to SEQ ID NO: 24032

SEQ ID NO: 57674 - DNA, 2571 bp, Homo sapiens
  misc_feature (1)...(2571): n = a,t,c or g
ttttttttttttaaagaaataaaaatcattttattaataaataagccttagaccagaatgtgatgggaaatagaggaaaagagctaagagtttgaaatcagatgcttcagtgttctatacaacccattaaggacatgttttcaagataaacactaatcagtcctcagggaagaggacacatagttgaacagtcacacatagttcatcctgactctacttggtaatggaggtgaccatctgtgtcagctaactagcgtcatcctgagggagggggagaaaccctaacccacaacttttggcaagtgtgagttttacaacatggcgacaggggccctctctggtgaggctcctacaatccgacagaaactgatgtcagcagtaaataataaaatttagaatatatgattaagtacagaatttatttgaaggcaaagcttggaaatagccacgtggaaacatcaactctaaatgaatgggatcagcgttcccaagtagagacgttaagatttcacacacagggaaagacagagaagctttagcagaatcaccacgttttttattctgggccagtgcataggctgcagcaacttgattgattacggatagatacacttcaaggaaggttactttatcactacataagaagggacaatgatccgaggaggtcttatctctggggctacttagtcttcttaattacttacaggaaaactcttagaagttgcacctgcattccactggactcaggttgcctgaccacattcctctcaaggctcagaattatctcaaagtccatagccttaaattgaagttatttgatgtttgaattatttaatttcctactgagataaaggtactgtttcccttgttgtttgcctttcaaagagagctcccaagtccttcaaaaatacacccctgggtcattaagctgaaaaaaggtttaattnnnnnnnnnnnnnnnnnnnnnnnnnnnnnnnnnnnnnnnnnnnnnnnnnnnnnnnnnnnnnnnnnnnnnnnnnnnnnnnnnnnnnnnnnnnnnnnnnnnnnnnnnnnnnnnnnnnnnnnnnnnnnnnnnnnnnnnnnnnnnnnnnnnnnnnnnnnnnnnnnnnnnnnnnnnnnnnnnnnnnnnnnnnnnnnnnnnnnnnnnnnnnnnnnnnnnnnnnnnnnnnnnnnnnnnnnnnnnnnnnnnnnnnnngagtttatttccatgaaatatgaaattatcctccactcctgggagtaataggcagttttgcacgtcacctttcagtttccattatccactcaaacaacccaggaccttgcttagtttaataatcccttctaattgccagtgcccgcggcaaccagcgcgccactccacccctttaccgaggtccctgcccctctcccccaccctgccccagacagaggggagctcgccccgcctgccggatgcgtgactctacctgctcaaaaaaaggcgctttgcattaaaaccattttcaacttaagaggaaaaacgattcagcgttcagtacaggtggcccaacacaatatgttgttttaccttcgattgtttgaaatattaacttaggggccgggcgcggtgctcgcgcctgtaatcccacctggcccaatcttcttaacataaacactttaatctcaactaatacttgaactcaatgttaagtcaactcaatctcaagtcaatgcctatttggctctaatgtcaattaatgcttgatggtttgctatactcattgcatttggaacagttatctcaaaaatgaattttctgatgttctgcaaggagtgcccacagactgaagaccttgccacacttaagacatttgtaagatttctgtctagtatggattctctgatgtctaatgaggtgtgaacgtgaagtcaagactttgccacaatcatcacacttgtgaggtttctctcctgtatgaattctcctatgttttgcataggatgaagcttgactgaagaccttgccacagtcatgatatttgtaaggtttctctccagtatgagttcgctgataaactgcaagatatgattgatgtctgaaaatttttacacatttattacacttgtaagatctgtcttcattacggaatctccagtgattggcaatggttgtagcattactgaagactttgtgacaatcattacatttgcaaagtttccctacaccatggattgcttgatgataaaaaagtgacgacttcccacttaaggctttgccccactcattacacttgtaaggtttctctccagtataaactctctgatgttgtgcaaggtttgattgttgattagaaaccttagacagtatgaagtctatgatgacatgcaaggtgtgcttttctactaaaaaccttgccacattcattacatgtgtaaggtttctctccagtatgaattgccttatgacttacagggttgaattgtgatggaaggtcttgccacactcattacactattaaggcttctctccactatgaagcctatgatggtatacaagggatgacatctgactgaaggtcttgccacactcattacacttgtaaggtttcc

SEQ ID NO: 57675 - DNA, 1088 bp, Homo sapiens
atcagaaccaatgatcccttggcctacttagttaaaaccagttcatacatcccttagggtttttattattattattattattattacagttgttattgttgtttttgttgttattattatttggggtttcttgtgttttttctttgcgactctccacactaaacttgcaatattgtggggagaagctgtgactaaactctacgctgcggtgagatgtagcagtaatcagctcccagcgacgtgtgtagctggggctgccgctcgcaataatcactattgatttaaagctttacttagccttgatctgtaccctcgtagtcaataaggtcttgccacattttattagtgaggtggagaaacgtattatttgtttgttgtttttgcccttcccccaccccccaatattaaactgtgaaatttgtgatttgtttaaactctgggtgaatcatagcttagtttgcatgtccagctaatttgtttctatacattttgtttgattctctttctccttctctcaggggcttttacaaaaaaatatatatatatggatcttctgaaaagttttttgagggtgcaagttttttctcttgtttttttttttttttttttctcattgattaatgggacatgatgctgaggattcaatcactacatgaaacacctggctgtgaaaacaaaacaacccagagggctgtgttccaagcagcgctggggaagctacgtaacagtcggatgccagttttggaagattcaccatgcgttctgaccctctgttcgtctctttcctctcctctttcttcaagaaggaaattgatcctagtgatttcagcccatgcattaaacaggaaacaataataaatttgtagaattcatatttttctaaagggaacttaaaaactgctgctacatgttatgtacaaaactggtttatgccacatgaacagagaatcacaagtttggttttggtactttttgttcctctttgtattcagttgtatagaacttccaaattcagaatgagaagaaagctgttctgtatcaaaccatttaagcaataaatgttatattttaaaagctgcaaaaaaaaa

SEQ ID NO: 57676 - DNA, 1529 bp, Homo sapiens
ggaggatggagccgctgaaggtggaaaagttcgcaaccgccaacaggggaaacgggctgcgcgccgtgaccccgctgcgccccggagagctactcttccgctcggatcccttggcgtacacggtgtgcaaggggagtcgtggcgtcgtctgcgaccgctgccttctcgggaaggaaaagctgatgcgatgctctcagtgccgcgtcgccaaatactgtagtgctaagtgtcagaaaaaagcttggccagaccacaagcgggaatgcaaatgccttaaaagctgcaaacccagatatcctccagactccgttcgacttcttggcagagttgtcttcaaacttatggatggagcaccttcagaatcagagaagctttactcattttatgatctggagtcaaatattaacaaactgactgaagataagaaagagggcctcaggcaactcgtaatgacatttcaacatttcatgagagaagaaatacaggatgcctctcagctgccacctgcctttgacctttttgaagcctttgcaaaagtgatctgcaactctttcaccatctgtaatgcggagatgcaggaagttggtgttggcctatatcccagtatctctttgctcaatcacagctgtgaccccaactgttcgattgtgttcaatgggccccacctcttactgcgagcagtccgagacatcgaggtgggagaggagctcaccatctgctacctggatatgctgatgaccagtggaggagcgccggaagcagctgagggaccagtactgctttgaatgtgactgtttccgttgccaaacccaggacaaggatgctgatatgctaactggtgatgagcaagtatggaaggaagttcaagaatccctgaaaaaaattgaagaactgaaggcacactggaagtgggagcaggttctggccatgtgccaggccgatcataagcagcaattctgaacggcttcccgatatcaacatctaccagctgaaggtgctcgactgcgccatggatgcctgcatcaacctcggcctgttggaggaagccttgttctatggtactcggaccatggagccatacaggatttttttcccaggaagccatcccgtcagaggggttcaagtgatggaaagttggcaaactgccagcctacatccaaggccatgtttccccccaagcaatgaagaatcctgagactggcttttgatattattgagagtgacacatggcagagaacacagcctgattgaagatttgattctacttttagaagaatgccgacgccaacatcagagcatcctaagggaacgcagtcagagggaaatacggcgtgtgtctttgttgaatgccttattgaggtcacacactctatgctttgttagctgtgtgaacctctcctattggaaattctgttccgtgtttgtgtaggtaaataaaggcagacatggtttgcaaaccacaagaatcattagttgtagagaagcacgattataataaattcaaaacatttggttgaggaaaaaaaaaa

SEQ ID NO: 57677 - DNA, 1975 bp, Homo sapiens
tttttttgtgtataattgtacaacctttgaaagttacataagttgtaatgatctaatactattaatagccattcagaaaacactttccctccctcccaacaaccatccagggggaaataaaagtcctgaaaagaggccagttcaacatggcctctaccctggtagaaacaaaaagtgaaaagagaagaaaacagaaatcaactaagaggtgttgccagtgtctctcaggagtggggccctggctgttgcctggggtcatgaaaggcagagcctgcagcatgcagtatggcagccgggagaccttgcagccacatcttcctcaccccggcacatccacatcccaacttaggtgtcatggaaatctttcagcagggttctcctccgctgctccgctatatgcatctggttctccaagtcccctctgtcatagctgtctgcacgctccactttccatgagaggttttcgatctcagcctccagctgagcctgctggtattcaaacagcttcttcctgggtccggactccatgtaatatgcatatgggtaggtgtattgcagggtgtatcgacacttggccaagagcttggcagcattctgtaggtactgccagtcgatccatgtccccagattgttcatgaccctctcctgaatcttctcgtgaatccgctggtatgtctgtgcctctagctgcaagcttttattgtggttttcccacctctcaaagtagaataagtacttcttgagggcttccctcgcctgggcttgttggctctggttcacgatgtcaggattctccttgtaacgactgcactcatagtattcactgccatgagtcttccaatctcctagacacatccagcagaagtcgtgtttacatttggagcattgcatgtgattgcagcctccattcttctcaatgcagatgttgcacttgggacagtctttagtgtgagcacttaatgtagttggctgtttcagagtcgtctgcacacttcgtgagccatttccggattgtggcacagtctgtgggtgcgtgatacatctgacgacacttgaaacagaagacctcgttgcaccgattgcactgtactcggcgagctctaggctcctgtacccgaataacccatggggcagtctgcaccagggcacagctggagctggtaatgactctccacatagtccctgaagaggtagcgcctgtatttctctctcaattcttcattgggaagcaatggaaacacaaagtcctctggtgtacggagtggacagtcctgagccatgcaagagactcccacgcccacgccgtccttgacgagaactgagcagtgctgctcccagcagctgcggcaaaactggtgctgacaggccagagagagtaggttttcctttcgcacaaactgcatacacactgcacagtggtgagggggatgggatgtgggaacatgttttgatggattaggctgaactcgagcctcaacaagcagttgagcagaattggacttgtatctgtccaatatctctgaaacttgccagtggaaattaactaatataagtttagcaactgaatgagatacctttaggacagaagctaagctggtcatgtgctcattgagggcaccctcagattccttgtaggtcaagcaagtgaactggtactcctcgggatcaaaggcatcagccccctgctgctccacatcgctggctactcccacgtaatagtcctctatgtccccaggggtcgtcttcttcttcttcttcctcttcctcacaatttgggtcatagtcctcttcattgctgtcagacccctgggctattcatgtccactgacatcttagcatccagccaagttgcagatcaggaaagcagttgctttttccccctccccccaaaactaccgctttctcaaatgcattagtatttttgtcttctgtaattcttggagatctctcaggcagatgtcacccaagtattcta

SEQ ID NO: 57678 - DNA, 929 bp, Homo sapiens
  misc_feature (1)...(929): n = a,t,c or g
cctcaaggcgcctgcaccgtgaaaccccaattgccctttagcccctgctttgtgtgccttcaactcccaacacccagtggttcccctcagggcatactttgctggtgaacggggctgtagagtcttgagtatgttattggcctaaagtggccatgaggccccagcatccgactccatcctncccaggctgcagggcacagcagcactggcatagacaggcacggctctgtcttccaacgtgcaccagccttttcttacatattttgcctgtttttaaaaaatacgaggagagggtgcagatggatactgtgccctcaccctcctaagccaggtaatatattgatgtgcagacttttaagaaatcttagtcttatcacaaatatcaagtaatttattttttccattttcaaatgcaaaagttagcctaggaagcctcccagtcatcctgaaggaccttttgactttgcttttataattctgttaaaaattgaggaggggattaatgagtacaatgaaaacaaaacaaaacaaaaaattaagaagaggaaagctcaaaagaggataagagactgaaaaggcacctcagaatggctgctgtgggcagagtctgtgacatgactttccccgccctgcccctctgttcagagcagctggaaagatgggatcagtaagattaaaaaacttttgttcggccaggcgtggtggctcacacctgtaatcccagcactttgggaggctgaggcggacggatcatgaggtcaggagttcaagaccagcctggccaatatggtgaaaccccgtctctactaaaaatacaaaaattagccgggtgttgtggctcaccctctattcccagctactcgggaggcagagacaggagaatcgcctgaacccaggaggcagaggttgcagtgagctgagatcgtgcc

SEQ ID NO: 57679 - DNA, 2524 bp, Homo sapiens
tttttttttttagaatacaatcagattttatttaagttcttttttattttcctccacactggcaaaagttccgagggagcctaaagttttgtaaacattttaactatccctcttacccacccccaacttttgaatttacaaagcaaaggagagtaggagccccaatttttaatggtttcctctcccctcatgctatttgatccaaaaactatatacaattttgtagcagtctctgtatagttattacacatgtttagaagggagggaggcaagaagggatagggagaatggtgatccaaaataataaaaatagaagccaaatataatactccaaacccaaactgctctcagagcaactccagccttcttcaggcaacaatgacaggcagcaaaggtgcttttccaggggctgcccagaccacagcacctctcgcacaggcacagctgcccaatgactccaacccagtgtgagtggcaattccaggtgatgttctgtaggggtttggtggaggcaggaaaagtatttgtttataaatagggcttgagtacatttctacttgaagtttaaggttttaggaggccatgaccagaagcccaggcccaggcttcctggctcccattttcgcccatcccctccagcccactgcatcctcctgtatagtagattccatggatgaaggtcttaaagatggacaggttctgtatgttctcttttcagaaaaggcaaacaacttgccatcccagaatctttacacaaaaccttttccgggctacagcaagacacacacgcaatgctctgaggaccagatgaaattccaggcttttatcagaagcaaaagtttatccctatccaaaaatgaaattatacaaattcatacatatggtaaagattctagctgcctcttaaacgagacaaattttcagcagaagggcccaaaacaaaatggtcctagtcctctgaagtaaaaatatttatgggaaaaatcagtttttgtaagaaagaaaaattaagaatagtctctctcccaggccatagagcttcctttgtccaatcaggttggagcatgccaggggagatcagcttgctcagaagtcactatctaacgaagaaaaacataaatcctttcagagaaaggacactcagaaagaacaggtgaggagtgtgtaacatcaaaccaaaccaacctcatctcaaccccactcagggcctctctgatgcaatcccaaagttagcagtggcaatgcaactttcagaccgggagagctctgactgcctgttggatactcgagtcacagtccatggggtgttttgttattggccaatgtctgttaaccattaactctcttcatgattgcaccagttagaccatttgccctgatggggggaaaaagaagaagaaaaaacaaaatagaagaaaaaaagtgacaagagaaagcaagctgctaatggccgatcccaacacactttctgggagacagtagatgaaatcacagcacagtgaacacatgctgcctaaaatcagccttgttggggagtaatcccaactgccacccccaagacacagggtccagtccacttatctatagtctgagatgttcaccaacaaaaatggattaaagaatcttggacacaaagggccagaagaaaaagcctgagatgatcggttctgtgatttgttgcagagtgataaagagtaaatggtgagtaagtgttgtgtccaaaggtggagactccatagtcggcagacaggagagggatggccagtccactggcaggtgctcagtagtcatccaacgtctcgatttcacccatgttgagtcgctccgatgatgcattgactgaaaatcctaataaactgggatctgctcggaccatcttctgctttttcttcttcttgccactctgcacagcctcaaaattggattgttggttgttgctttgattggtctgaaatactgaatggagtgtactgtggttcatcccccacacagagtcctgctgttgtggctgctgtggcggctgctgtggcggctgctgctgctgctgcggcagctgctgctgctgacgctgctggttggctttctgtttggcacggcgctcaaggaactgcttggcaaactccttggcctcagaagtatctcctaaataggccctgatataatcatggacctcataaggagattctacttctttcaggaaagaaacaaatgtgggaacatccaagttatttgccgtattaagggcatgaagcatctgttcacaccactgcgtaaatccatcttgggctttatttactccctgaaagagcttcagcaacttttcttcttcttctactttcttattctgccggttagacacacctacagatttactgagactggcgttgtttttatttttatttgttgaattcctaggtcccacctctttcactgcatcatcccagaatcccatgttggagttccttagtgtcagcattactaaaaatactactgactaggtcagatgcccactggttaggaggac

SEQ ID NO: 57680 - DNA, 13799 bp, Homo sapiens
  misc_feature (1)...(13799): n = a,t,c or g
cgcaaggacttctaagaagccatcccaatgaccttttggctttgagaagagcagtcctcataccagagtgtttggggttttggcctctttcagtgtttattcattcttacgtgggaaagttgtattccgaggtttctgtggtgcatgaagcttttgccttcaccatctgttcccgtgtcttcctcgggtgacatcagagtacagcagtattttcccttgccatctaatggggtttgggctgtttgactcaaccgtgtgtgttcctcaatgccaggggaataatcctaccctaagtcagctgaacagaagccaggatctaactgcaaacaagagacccagcttgcttaacagcatggaagagaaccagtttccttgccagctacctgggaagacggttgctaattagcctgcaacaaagagttccttgctcatctaaaagaggcaatcaccgttcaggtgaagctttgttctaagaatatttgtttcatctagtttatgagtccaaatgatatagactgtaaatgtcacagcagtggtgaaagactgctcggtcatgagcaccgacagtaactcactggcacgtgaatttctgaccgatgtcaaccggctttgcaatgcagtggtccagagggtggaggccagggaggaagaagaggaggagacgcacatggcaacccttggacagtaccttgtccatggtcgaggatttctattacttaccaagctaaattctataattgatcaggcattgacatgtagagaagaactcctgactcttcttctgtctctccttccactggtatggaagatacctgtccaagaagaaaaggcaacagattttaacctaccgctctcagcagatataatcctgaccaaagaaaagaactcaagttcacaaagatccactcaggaaaaattacatttagaaggaagtgccctgtctagtcaggtttctgcaaaagtaaatgtttttcgaaaaagcagacgacagcgtaaaattacccatcgctattctgtaagagatgcaagaaagacacagctctccacctcagattcagaagccaattcagatgaaaaaggcatagcaatgaataagcatagaaggccccatctgctgcatcattttttaacatcgtttcctaaacaagaccaccccaaagctaaacttgaccgcttagcaaccaaagaacagactcctccagatgctatggctttggaaaattccagagagattattccaagacaggggtcaaacactgacattttaagtgagccagctgccttgtctgttatcagtaacatgaacaattctccatttgacttatgtcatgttttgttatctttattagaaaaagtttgtaagtttgacgttaccttgaatcataattctcctttagcagccagtgtagtgcccacactaactgaattcctagcaggctttggggactgctgcagtctgagcgacaacttggagagtcgagtagtttctgcaggttggaccgaagaaccggtggctttgattcaaaggatgctctttcgaacagtgttgcatcttctgtcagtagatgttagtactgcagagatgatgccagaaaatcttaggaaaaatttaactgaattgcttagagcagctttaaaaattagaatatgcctagaaaagcagcctgacccttttgcaccaagacaaaagaaaacactgcaggaggttcaggaagattttgtgttttcaaagtatcgtcatagagcccttcttttacctgagcttttggaaggagttcttcagattctgatctgttgtcttcagagtgcagcttcaaatcccttctacttcagtcaagccatggatttggttcaagaattcattcagcatcatggatttaatttatttgaaacagcagttcttcaaatggaatggctggttttaagagatggagttcctcccgaggcctcagagcatttgaaagccctaataaatagtgtgatgaaaataatgagcactgtcaaaaaagtgaaatcagagcaacttcatcattcgatgtgtacaagaaaaaggcacagacgatgtgaatattctcattttatgcatcatcaccgagatctctcaggtcttctggtttcggcttttaaaaaccaggtttccaaaaacccatttgaagagactgcagatggagatgtttattatcctgagcggtgctgttgcattgcagtgtgtgcccatcagtgcttgcgcttactacagcaggcttccttgagcagcacttgtgtccagatcctatcgggtgttcataacattggaatatgctgttgtatggatcccaaatctgtaatcattcctttgctccatgcttttaaattgccagcactgaaaaattttcagcagcatatattgaatatccttaacaaacttattttggatcagttaggaggagcagagatatcaccaaaaattaaaaaagcagcttgtaatatttgtactgttgactctgaccaactagcccaattagaagagacactgcagggaaacttatgtgatgctgaactctcctcaagtttatccagtccttcttacagatttcaagggatcctgcccagcagtggatctgaagatttgttgtggaaatgggatgctttaaaggcttatcagaactttgtttttggagaagacagattacatagtatacagattgcaaatcacatttgcaatttaatccagaaaggcaatatagttgttcagtggaaattatataattacatatttaatcctgtgctccaaagaggagttgaattagcacatcattgtcaacacctaagcgttacttcagctcaaagtcatgtatgtagccatcataaccagtgcttgcctcaggacgtgcttcagatttatgtaaaaactctgcctatcctgcttaaatccagggtaataagagatttgtttttgagttgtaatggagtaagtcaaataatcgaattaaattgcttaaatggtattcgaagtcattctctaaaagcatttgaaactctgataatcagcctaggggagcaacagaaagatgcctcagttccagatattgatgggatagacattgaacagaaggagttgtcctctgtacatgtgggtacttcttttcatcatcagcaagcttattcagattctcctcagagtctcagcaaattttatgctggcctcaaagaagcttatccaaagagacggaagactgttaaccaagatgttcatatcaacacaataaacctattcctctgtgtggcttttttatgcgtaagtaaagaagcagagtctgacagggagtcggccaatgactcagaagatacttctggctatgacagcacagccagcgagcctttaagtcatatgctgccatgtatatctctcgagagccttgtcttgccttctcctgaacatatgcaccaagcagcagacatttggtctatgtgtcgttggatctacatgttgagttcagtgttccagaaacagttttataggcttggtggtttccgagtatgccataagttaatatttatgataatacagaaactgttcagaagtcacaaagaggagcaaggaaaaaaggagggagatacaagtgtaaatgaaaaccaggatttaaacagaatttctcaacctaagagaactatgaaggaagatttattatctttggctataaaaagtgaccccataccatcagaactaggtagtctaaaaaagagtgctgacagtttaggtaaattagagttacagcatatttcttccataaatgtggaagaagtttcagctactgaagccgctcccgaggaagcaaagctatttacaagtcaagaaagtgagacctcacttcaaagtatacgacttttggaagcccttctggccatttgtcttcatggtgccagaactagtcaacagaagatggaattggagttacctaatcagaacttgtctgtggaaagtatattatttgaaatgagggaccatctttcccagtcaaaggtgattgaaacacaactagcaaagcctttatttgatgccctgcttcgagttgccctcgggaattattcagcagattttgaacataatgatgctatgactgagaagagtcatcaatctgcagaagaattgtcatcccagcctggtgatttttcagaagaagctgaggattctcagtgttgtagttttaaacttttagttgaagaagaaggttacgaagcagatagtgaaagcaatcctgaagatggcgaaacccaggatgatggggtagacttaaagtctgaaacagaaggtttcagtgcatcaagcagtccaaatgacttactcgaaaacctcactcaaggggaaataatttatcctgagatttgtatgctggaattaaatttgctttctgctagtaaagccaaacttgatgtgcttgcccatgtatttgagagttttttgaaaattattaggcagaaagaaaagaatgtttttctgctcatgcaacagggaactgtgaaaaatcttttaggagggttcttgagtattttaacacaggatgattctgattttcaagcatgccagagagtattggtggatcttttggtatctttgatgagttcaagaacatgttcagaagagctaacccttcttttgagaatatttctggagaaatctccttgtacaaaaattcttcttctgggtattctgaaaattattgaaagtgatactactatgagcccttcacagtatctaaccttccctttactgcacgctccaaatttaagcaacggtgtttcatcacaaaagtatcctgggattttaaacagtaaggccatgggtttattgagaagagcacgagtttcacggagcaagaaagaggctgatagagagagttttccccatcggctgctttcatcttggcacatagccccagtccacctgccgttgctggggcaaaactgctggccacacctatcagaaggtttcagtgtttccctgtggtttaatgtggagtgtatccatgaagctgagagtactacagaaaaaggaaagaagataaagaaaagaaacaaatcattaattttaccagatagcagttttgatggtacagagagcgacagaccagaaggtgcagagtacataaatcctggtgaaagactcatagaagaaggatgtattcatataatttcactgggatccaaagcgttgatgatccaagtgtgggctgatccccacaatgccactcttatctttcgtgtgtgcatggattcaaatgatgacatgaaagctgttttactagcacaggttgaatcacaggagaatattttcctcccaagcaaatggcaacatttagtactcacctacttacagcagccccaagggaaaaggaggattcatgggaaaatctccatatgggtctctggacagaggaagcctgatgttactttggattttatgcttccaagaaaaacaagtttgtcatctgatagcaataaaacattttgcatgattggccattgtttatcatcccaagaagagtttttgcagttggctggaaaatgggacctgggaaatttgcttctcttcaacggagctaaggttggttcacaagaggccttttatctgtatgcttgtggacccaaccatacatctgtaatgccatgtaagtatggcaagccagtcaatgactactccaaatatattaataaagaaattttgcgatgtgaacaaatcagagaactttttatgaccaagaaagatgtggatattggtctcttaattgaaagtctttcagttgtttatacaacttactgtcctgctcagtataccatctatgaaccagtgattagacttaaaggtcaaatgaaaacccaactctctcaaagacccttcagctcaaaagaagttcagagcatcttattagaacctcatcatctaaagaatctccaacctactgaatataaaactattcaaggcattctgcacgaaattggtggaactggcatatttgtttttctctttgccagggttgttgaactcagtagctgtgaagaaactcaagcattagcactgcgagttatactctcattaattaaatacaaccaacaaagagtacatgaattagaaaattgtaatggactttctatgattcatcaggtgttgatcaaacaaaaatgcattgttgggttttacattttgaagacccttcttgaaggatgctgtggtgaagatattatttatatgaatgagaatggagagtttaagttggatgtagactctaatgctataatccaagatgttaagctgttagaggaactattgcttgactggaagatatggagtaaagcagagcaaggtgtttgggaaactttgctaggcagctctagaagtcctcatcagaggcagatcaccaccagcagatgtttaatattaagcagttattgaaagctcaagtggttcatcactttctactgacttgtcaggttttgcaggaatacaaagaggggcaactcacacccatgccccgagaggtttgtagatcatttgtgaaaattatagcagaagtccttggatctcctccagatttggaattattgacaattatcttcaatttccttttagcagttcaccctcctactaatacttacgtttgtcacaatcccacgaacttctacttttctttgcacatagatggcaagatctttcaggagaaagtgcggtcaatcatgtacctgaggcattccagcagtggaggaaggtcccttatgagccctggatttatggtaataagcccatctggttttactgcttcaccatatgaaggagagaattcctctaatattattccacaacagatggccgcccatatgctgcgttctagaagcctaccagcattccctacttcttcactactaacgcaatcacaaaaactgactggaagtttgggttgtagtatcgacaggttacaaaatattgcagatacttatgttgccacccaatcaaagaaacaaaattctttggggagttccgacacactgaaaaaaggcaaagaggacgcattcatcagtagctgtgagtctgcaaaaactgtttgtgaaatggaagctgtcctctcagcccaggtctctgtcagtgatgtcccaaagggagtgctgggatttccagtggtcaaagcagatcataaacagttgggagcagaacccaggtcagaagatgacagtcctggggatgagtcctgcccacgccgacctgattacctaaagggattggcctccttccagcgaagccacagcactattgcaagccttgggctagcttttccttcacagaacggatctgcagctgttggccgttggccaagtcttgttgatagaaacactgatgattgggaaaactttgcctattctcttggttatgagccaaattacaaccgaactgcaagtgctcacagtgtaactgaagactgtttggtacctatatgctgtggattatatgaactcctaagtggggttcttcttatcctgcctgatgttttgcttgaagatgtgatggacaagcttattcaagcagatacacttttggtcctcgttaaccacccatcaccagctatacaacaaggtgttattaaactattagatgcatattttgctagagcatctaaggaacaaaaagataaatttctgaagaatcgtggattttccttgctagccaaccagttgtatcttcatcgaggaactcaagaattgttagaatgcttcatcgaaatgttctttggtcgacatattggccttgatgaagaatttgatctggaagatgtgagaaacatgggattgtttcagaagtggtctgtcattcctattctgggactaatagagacctctctatatgacaacatactcttgcataatgctcttttacttcttctccaaattttaaattcttgttctaaggtagcagatatgttgctggataatggtctactctatgtgttatgtaatacagtagcagccctgaatggattagaaaagaacattcccatgagtgaatataaattgcttgcttgtgatatacagcaacttttcatagcagttacaattcatgcttgcagttcctcaggctcacaatattttagggttattgaagaccttattgtaatgcttggatatcttcaaaatagcaaaaacaagaggacacaaaatatggctgttgcactacagcttagagttctccaggctgctatggaatttataaggaccaccgcaaatcatgactctgaaaacctcacagattcactccagtcaccttctgctccccatcatgcagtagttcaaaagcggaaaagcattgctggtcctcgaaaatttccccttgctcaaactgaatcgcttctgatgaaaatgcgttcagtggcaaatgatgagcttcatgtgatgatgcaacggagaatgagccaagagaaccctagccaagcaactgaaacggaacttgcgcagagactacagaggctcactgttttagcagtcaacaggattatttatcaagaatttaattcagacattattgacattttgagaactccagaaaatgtaactcaaagcaagacctcagttttccagaccgaaatttctgaggaaaatattcatcatgaacagtcttctgttttcaatccatttcagaaagaaatttttacatatctggtagaaggattcaaagtatctattggttcaagtaaagccagtggttccaagcagcaatggactaaaattctgtggtcttgtaaggagaccttccgaatgcagcttgggagactactagtgcatattttgtcgccagcccacgctgcacaagagagaaagcaaatttttgaaatagttcatgaaccaaatcatcaggaaatactacgagactgtctcagcccatccctacaacatggagccaagttagttttgtatttgtcagagttgatacataatcaccaaggtgaattgactgaagaagagctaggcacagcagaactgcttatgaatgctttgaagttatgtggtcacaagtgcatccctcccagtgcatcaacaaaagcagaccttattaaaatgatcaaagaggaacaaaagaaatatgaaactgaagaaggagtgaataaagctgcttggcagaaaacagttaacaataatcaacaaagtctctttcagcgtctggattcaaaatcaaaggatatatctaaaatagctgcagatatcacccaggcagtgtctctctcccaaggaaatgagagaaaaaaggtgatccagcatattagaggaatgtataaagtagatttgagtgccagcagacattggcaggaacttattcagcagctgacacatgatagagcagtatggtatgaccccatctactatccaacctcatggcagttggatccaacagaagggccaaatcgagagaggagacgtttacagagatgttatttaactattccaaataagtatctccttagggatagacagaaatcagaagatgttgtcaaaccaccactctcttacctgtttgaagacaaaactcattcttctttctcttctactgtcaaagacaaagctgcaagtgaatctataagagtgaatcgaagatgcatcagtgttgcaccatctagagagacagctggtgaattgttactaggtaaatgtggaatgtattttgtggaagataatgcttctgatacagttgaaagttcgagccttcagggagagttggaaccagcatcattttcctggacatatgaagaaattaaagaagttcacaagcgttggtggcaattgagagataatgctgtagaaatctttctaacaaatggcagaacactcctgttggcatttgataacaccaaggttcgtgatgatgtataccacaatatactcacaaataacctccctaatcttctggaatatggtaacatcaccgctctgacaaatttatggtatactgggcaaattactaattttgaatatttgactcacttaaacaaacatgctggccgatccttcaatgatctcatgcagtatcctgtgttcccatttatacttgctgactacgttagtgagacacttgacctcaatgatctgttgatatacagaaatctctctaaacctatagctgttcagtataaagaaaaagaagatcgttatgtggacacatacaagtacttggaggaagagtaccgcaaaggagccagagaagatgaccccatgcctcccgtgcagccctatcactatggctcccactattccaatagcggcactgtgcttcacttcctggtcaggatgcctcctttcactaaaatgtttttagcctatcaagatcaaagttttgacattccagacagaacttttcattctacaaatacaacttggcgactctcatcttttgaatctatgactgatgtgaaagaacttatcccagagtttttctatcttccagagttcctagttaaccgtgaaggttttgattttggtgtgcgtcagaatggtgaacgggttaatcacgtcaaccttcccccttgggcgcgtaatgatcctcgtctttttatcctcatccatcggcaggctctagagtctgactacgtgtcgcagaacatctgtcagtggattgacttggtgtttgggtataagcaaaaggggaaggcttctgttcaagcgatcaatgtttttcatcctgctacatattttggaatggatgtctctgcagttgaagatccagttcagagacgagcgctagaaaccatgataaaaacctacgggcagactccccgtcagctgttccacatggcccatgtgagcagacctggagccaagctcaatattgaaggagagcttccagctgctgtggggttgctagtgcagtttgctttcagggagacccgagaacaggtcaaagaaatcacctatccgagtcctttgtcatggataaaaggcttgaaatggggggaatacgtgggttcccccagtgctccagtacctgtggtctgcttcagccagccccacggagaaagatttggctctctccaggctctgcccaccagagcaatctgtggtttgtcacggaatttctgtcttgtgatgacatatagcaaggaacaaggtgtgagaagcatgaacagtacggacattcagtggtcagccatcctgagctggggatatgctgataatattttaaggttgaagagtaaacaaagtgagcctccagtaaactttattcaaagttcacaacagtaccaggtgactagttgtgcttgggtgcctgacagttgccagctgtttactggaagcaaatgcggtgtcatcacagcctacacaaacagatttacaagcagcacgccatcagaaatagaaatggagactcaaatacatctctatggtcacacagaagagataaccagcttatttgtttgcaaaccatacagtatactgataagtgtgagcagagacggaacctgcatcatatgggatttaaacaggttatgctatgtacaaagtctggcgggacacaaaagccctgtcacagctgtctctgccagtgaaacctcaggtgatattgctactgtgtgtgattcagctggcggaggcagtgacctcagactctggacggtgaacggggatctcgttggacatgtccactgcagggagatcatctgttccgtggctttctccaaccagcctgagggagtatctatcaatgtaatcgctgggggattagaaaatggaattgtaaggttatggagcacatgggacttaaagcctgtgagagaaattacatttcccaaatcaaataagcccatcatcagccttacattttcttgtgatggccaccatttgtacacagcaaacagtgatgggaccgtgattgcctggtgtcggaaggaccagcagcgcttgaaacagccaatgttctattccttccttagcagctatgcagccgggtgaatgcgaatgaacttcacgttctccaaagcactttaactccaaactagatttgttgacttcaccagttttaggaggttgaacctaaagaaatggatgactggacaaaccatccaaataatgataaagtctattcatctgcacaaaattctgaagagtcacatgatcctaagaggaaagttctgttctattttagtgataatctggaagattgtgtcaatatgcactagccaacaagttttaagcctcgcatggtacattaaaatgatattcttaaaattttttcccaccaaggtattccaaagaaaatattaaggtctcccctttttctatgattccaaaaggaccagtagaatttaaattggttggttgatngtttatataaaacacactaaaattatattttaaaagtttantgccntgaaatactcctcccaccacacacacatgctccaaaagaggaaagaaaaaaagataatttttaggacttgataattgctttctttgagaagcaaattattcagtaggtgcctctgtaccaaatattttatggaatatctaaatactaaaataaactatgaatgaatctcaaaattaggcagtttttgccagttgctttcttagctcaaaggagaaccagaatttttttgacagccacaaacaagaatacaggtatcttggatttcagacacattctgtttcttcataaaaattttacttaaaatctgtaacgctagatattgactatccttagttgagtcactgaggtttaaacacaatggtaagtcttaaagtctgctatttacagagcattgaatctgtaccaatttgcaatagaaagccttcagtatgcaagaagtttgcatgggtattaagaacacagcctaaataaggcatttgatctaatctgcaggaagaattttcttccccaaaacagaattataaaagcttactttaaacaggaggcagaataattcttttaggaaaccatttcattctgtttctactaacctataccatctgagaattcctaaacatcttggagccgtctgtctctcccatatgatggctgtctgtatatttttacttggggtgctgctttattggctttgaaaacactgtcagataagctcagtaatatgttaccatgggataaaaatatgtatccctgcctaagaataacttgtgcatttgttatggaaatttaattcatatggtgtttacagtactacttttgtaacttccagactttctaaaacattctgcttaaaaaccatataaaatataattccaaagtctctgctgtcaagatagattcgagagaaagcacgtggccatgtatgctttaaccttaaactgcatacacatgtagtgatacctaggctgcatttagatcaccgtgtgctcaggccaggtgtgaatcctgaggtccatggaggtgcagagatgagattactcctattcacgttgaagtgatttgctttgttaacaaaaaattgcagctattgtctagctttcatttttttactgagaactttaaattagtcccctattagaatagggttgctactcatctttttttaaaaaccgaatttcatcatttatctaaagagaaaatatgcagaataactggtcttgttaagagtgcaatattatatttttatgtaaaaataaaaattaatttggggggattatttattcagcatgaaacctaatatgtatatgtttgaaatacttcataatgtgcatgttgtagcaaacatttctgtaaattatcacaagctctgttacctttatatacactgcctcttcaatttggaaataaatttcataaaaataga

SEQ ID NO: 57681 - DNA, 672 bp, Homo sapiens
  misc_feature (1)...(672): n = a,t,c or g
aaagctattanagtagccttgaacaancttttataattctagggtatnggttgtaatatctcccatttcatttctaattcagattatttggatcttctctcttcctttcttgcttaatcttgctaatggtctatcaattttatttatcttttcaaagaaccagctttttgtttcatttatcttttgtatttttgttgttgtttttgtttcaatttcatttagttctgctctgatcttggttatttcttttcttctgctgggtttgggtttggtttgttcttgtttctctagttccttgaggtgtgaccttagattgtctgtttgtgctctttcagaatttttgatgtaggcatttagggcaatgaactatcctcttagcaccaccttagctgtatcccagaggttttgataggttgggtcattattgtctttcagttcaagaattttttaatttccatcttgattttgtttttgacccatagctcattcaggagcaggttatttaatttccaaaccctaagtgttcccccagaaaactgctagaactgattatataattcagcaaagtttcaagatactggatgaatgtacacagatcagtagctcttctatgcatctacagtgaccaagcagagaatcaaatcaagaactcaaccacttttacaacagctg

SEQ ID NO: 57682 - DNA, 445 bp, Homo sapiens
  misc_feature (1)...(445): n = a,t,c or g
gtgnnnnnnttgnnnacagcttgacatgattacgaatttaatacgactcactatagggaatttggccctcgaggccaagaattcggcacgagctcgtctcctccatggtggtcactgcccctggcaggtctctgaaagggaaatgcttttctgcagaggcccctgcttgggcagttcacagtgagaccgaccccctctgaatatgataacagcctgtttcacatgaggagatgttaccaatcccgttcgctctgacccttgctggctgatcaccttgagcaacttacttaacatctgtgttcctcagtttctcatgggtaatatagggataattactggcacctgcctcccaggccattctgacgtgtaaccgcatataggagcccactggctgagtagctaccatcatcgctggtggggaaactggtggtaaaggtgtgaggta

SEQ ID NO: 57683 - DNA, 891 bp, Homo sapiens
  misc_feature (1)...(891): n = a,t,c or g
ttttttttttttttttggtttctctttttaacctttatttacaaagaacacaactcctcttgacacaaacacacacacatttcaaggaggagcccattaagaacaacaacagactggcgagaatgacggggccttattgaacactgtcaataaggaacactggtctgtgtaccccagactaggggtcactgcaaacattttctcagatatgacttttcacctccaagacaggaaaagagatcttgacgtggaggcccgcccacctacaaaggcagaaagctccacactcaatcttcagcatcgtcaaactgtcctgtttcaaagaccatcttggaataatagggtatcagtggaggcggatggtgccagctggggtcatagatcatgtctccttgtggggcacagcacacccaaggtttaagctcttgagaaatgctctcctggatgtcgtcagcatcatatggattccctgatctgctttcaattccgagttcccagtcctcattaaaaagatcgccaggctgttccttgggtggacagtttgtcccttctgacagcttcccaggtattcagttctccatcagagttcctccttcattccatggcaaagctttcctcttcagaatgggtgccctcaccccgggcaggactgtcattaggaatgctctgtgttccacgggctagtcgatccatagccttctcagtctctctctcctgactggagtggtcagctgtagcaaagccagcctccgggctgggggngccccccgcgcgctaggcagcggcgggccccgagacgntcggcgccccctgcgccgtggccccggcggcctgaaggtcgctatncgtcggcccgcgaaatntnctnntcgagggccaaattccctatag

SEQ ID NO: 57684 - DNA, 1000 bp, Homo sapiens
tttcgaaatgtcctccatgacttgacagactgagagccagccagccagccaggagacctgcagaacttaaacacagagcatttattgttagaaagggcaagtcttacactcaaataggttttaacatgaacacattaaagggagatggccctggcccccccagtgtctgctctctccaaggcatgcttcagttatactgcagcctggccaaccactgttccctgtagaagttgaagttcctctgtattatccagcagctggaggagacggagtatggcagactctggaatgccatttgtgtgagttccacctactttcttaggcttcagggtaaatggaaaaagtcgcaataggcgaaatgtatttcctaaaaagctggacagaggtatgtgacattcctttgcttaacaagcaaaacaaaatcaatgagtctggtgaactgacgccatgacagcaatgtggagaagactgggagtctacactgggaatggtgctgtggacgctctgggcacaggagcccaatttggaacctcttctcagaagcatgggaggtggtggaggccaagcccaccagaggcggggcctctccccagctgcctcgggatcatctctggttctcctgggccaggctccatggagtcatcaatcctcagtcacaggtggaggaatgagctgcagctggaagttctcattctggaagatgctgttgaaagcaggagcactctgcgagccactgaatggcctatagctctcgctgctgcgattctgggagagttccgtgaggagagccagcctggagcttcctcggtagagacggcaaagctgatcaaatgcttggatttgctgtggatccagaacaggttctgaggttccctttttagcagtgggatcccctttggactgatgatacgatggagacatttttacctgtgatggggttatccttccctttttaatttcagatgaattttcactgagttttcctactttgttacttgaa

SEQ ID NO: 57685 - DNA, 818 bp, Homo sapiens
  misc_feature (1)...(818): n = a,t,c or g
tttttttttggattcattttgaaatttaataattctaatagtaacaagaaacatagtttatgcttttttttaaatgaaaacaaacaagtaattttgtaaaagtcagaaaacaccagtatccttctgatctcatcctggatttttctgtcagctggaggatgcatttctgaccccatcccagacacgtgaaagcagaagacatgatgcatctataataatgaaagcacaatctaaagagtattatcacaccgtgaacagcttcttcctgacccagagcaaatattaagagaaagacaatatatttacaaacaagatttaataatgctcacaagaatagagtttgcccccaaatggaaaattacacattattttgtttcaaaaagttataaatttagtgcttgaaaaatccagcaggtaagtagaaggactaacagggtctgtttctggaactgtccgccagcaaatgagcatgctctgtcctggaagccatttttctttttcnttcntttttttttttctttgagacagagtttttttgctcgttgcccaggctggagtacaaaggtgcaatctcggctcaccacaacctccgccccttgggttcaagcaattctcctgggaggcagaggttgcagtgagccaagatcgcgccactgcactccagcctgggtgacagagcgagactccgtctccaaaaaaaaatatgtattcactctttctaattgtataaataatgcttgcttattgctcgtgccgaattcttggcctcgagggccaaattccctatagtgagtcgtattaaattcgtaatcagtcat

SEQ ID NO: 57686 - DNA, 347 bp, Homo sapiens
gcggcacgaggtgggccctgacattttcattagcaatggttcccttgatttcccttcagacgaatccttcctgaacccaggtgccctttatcctgcacattagcccctagtcagctcttacaagccataatgtgccgtgaagttctccagatttttccctggttggccactctgagtgtttttcactgctcaccacctctaatcaaatcagcttggtttccctgtgtctccttccctctgttttgctcctggaaactgtgataaccagatgcattaacatttccgagagtccaccacatgccaggctctgtcccatgtacattacagtgcacttgaggctcatttag

SEQ ID NO: 57687 - DNA, 1317 bp, Homo sapiens
tttgtcattcacttttctgcatactttatttgttacaaacatacaattttttttaaatatagactgtaaaactccatttgcaaaagtctattgtaaggagtgcacaccagcaggaaggattcttacattttttctctgtgagtttttctgtcagttttgctagttagtggtaaatacgggacccgccatttttacagaccagtctgaagcttctgactgtattcacattgctcttttgaagcagccctgctcctctcaaaattgatcagaatctgagcttcaacctacaggcagtgagatcaacaggcccgtctggactctgcttttgaacggttttcaggaagtgtgatttctgaatgggtactgcacttcacagatttgtttgaattgccccatgcagctctatgtttgttaaagtgcattcttctttaaaaaataagaggaataatctttactctttaaccaaggtacttaaaaaaatgaactttttggtctctcagcagatattcccaaattgatcctatcactacaaattttagtgtttatttacagacatttatagggttacaggtggaggggacccttataaaattaaaggtgcagcttctcttgaagcagaaatcagttctacaaattcatacacaggaatacacacttggtttacaatgcataagcatgtgggtatttacacagagattgaagacatccccaaaaaacacattttaaagtaatttccaacctaaactctaattgtacatctagatcaggaagctgtctcctgctatcaagatttggttttaattcattcaaattatttctgtagattctctactggcaggacatcagtcccagctttgggagtgaatagtctaagaaagccactggtagatactatgattggcagtgaagattcctatagaacggaaagtatgttatctggaaacagaagacaaatgaattttaaaaatgatcttggaaaaacatctggatggaggcccaaaataataaatccctactataattgttttagaacttcaaaaaaagaagtccagatacactgacgatcttagttactattcaaatattggtaagtcattgaaaaataactcagatttacttgtctaccgaaacgtgcaaaaccatggactctttataagtacgtcccatactgacttaaagccagtttctagactttttggtcaacctactgacttttagaaattcagagagtaggctaggcgtgatggctcatgcctgtaattccagcattttgggaagctgaggcgggcagatcacttgaggtcaggagttcgagac

SEQ ID NO: 57688 - DNA, 1076 bp, Homo sapiens
gcgcagggtttaacaaggccctgcatccttaggttattaatgatggcttctagttgtttcctagcttctggttttaggggatattgtctttaattagggaaggagatgagatccctgagatggatttggactggtgagactgttgtagctcagccagtattttcctgaattgcccaaacatctggattaatatcagtctccaccagagggaggcaaagagtctgtcctggagccataaggatggtggttcccatgtgagctaaaatatccctacctcagaggagtcgggctttcagggccatgaaatgacaagcattggactgctacttggtgtttctgctgcaaaactaggcaccatggatatgtctattactcggcttcttagcattcgcattcctgctctcttacccccaacgtccacagagctggatgttcctcacaatgtccaagtggctgcagtggttgggcattggccttgtatatcaaggggacagctcacagacatactgcagaagtcctgttggctgagataggacggcctcctggtcctgaaatggaatactgcactgacagaaagtcatactccttagctgctggcttggccctgggcatggtctgcttggggcatggcagcaatttgataggtatgtctgatctcaatgtgcctgagcagctctatcagtacatggttggaggacataggcgctttcaaacaggaatgcatagggagaaacataaatcaccaagttatcaaatcaaagaaggagataccataaatgtggatgtgacttgtccaggtgctactctagctttggctatgatctacttaaaaaccaataacagtgtcttctaggaagcccagacacatggagaagttctgagtgttttggccgatagtcccagatgaggttccagcaacagctgggatcacccatgagatgtgagtgaggaaggctttgagatggtttcagccctagccaccactgacctcataagagaccacaagaatgagaatcaccctgccaagcccagcagaccttcagaattcagaaataaaataattcatcttattttaa

SEQ ID NO: 57689 - DNA, 1567 bp, Homo sapiens
  misc_feature (1)...(1567): n = a,t,c or g
gacagactgacgtgtgagctgcatcgcgggaggcgcatggcggggatggcgctggcgggggcctggaagcagatgtcctggttctactaccagtacctgctggtcacggcgctctacatgctggagccctgggagcggacggtgttcaattccatgctggtttccattgtggggatggcactatacacaggatacgtcttcatgccccagcacatcatggcgatattgcactactttgaaatcgtacaatgaccaagatgcgaccaggatcagaggttccttggggaagacccaccctacgaagttggaatgagaccatcagatgtgataagaaactcttctagatgtcaacataaccaaccttataaagactaaaattcatgagtagaacaggaaaatcatcctgactcatgtgttgtgttctttatttttaattttcaaagaggctcttgtatagcagtttttgtctattttaacattgtagtcatttgtactttgatatcagtattttcttaacctttgtgactgtttcaatattacccccgtgaaagcttttcttaatgtaactttgagtacattttaattgccttctatttttaaaactcaaaatcattagttgggctttactgttcttgctattgtatggcatatacatctgcctggatatatttctactcttgaccaaagttttgtaaagaacaatataagatttcgggtaggggtatggggagggaagatattttattgagaactacttaacaaaagatttatctgtaagcttgaactcaggagtacagttttagctatctagactctaacagcttttgctttaaaattattaaagtgtttcttaatgaaaaagaaaagatcttgctaaagttaaaataaggaacatttcaccttttaaatatttaattcttatgtggacttatttccagaaaactttggtgataattcttgagacaaaaggtggttaagtagcattattatgtaatgcttatataccatagagtttttaatagaagagaaatccatttcctccgagggtcactattaacaatgtacttccttaaatttagtttaatgattgtaatgggtgctgcatttgcacattgcattaagttatgatgagacgaattgttgttaaaaattatagcaaaaagaaatgtaaacttggttaaaatcctttcactctttgtattgttttttttaaggtttttattccttaaatgtaaaatgactacctaattttttgatgtaaatacattaaattcaaagagaaaaaaaatcagctgatgtagcagtatatcttttccttgatggttaaatattgatctagtatttatattgctgaattattttctgtggaggaccagataagcagtaagtatgtcttatcctatatgttttgcaacataaaaatattgctaattgaaaagaattaggcaattatgtgtgttgctgggttgtttttttgttttttttttttgagacggagcttgnccctgtcgcccagggatggagtgcaacannnnnnnnnnnnnnnnnnnnnnnnnnnnnnnnntgg

SEQ ID NO: 57690 - DNA, 1337 bp, Homo sapiens
ctaataaaatactggttccctgaaagtaataaatatttaccatgtcctataacccaaggagcagcaaacggggggacaagaggaagagaactttgctgtgactccaagtgacaaaatcctagagattcagggtgccatttttatttcccatggagctgaggacctgagcacaggcagccaccagggctgctcagaccctcccgaccttcaggggtgggagtggttttggagttctgatcttgggtaggcaggcctgtcatattgccagaaatacaggcatagaggcaagagagagaagaagaggagaagaagatagcaggaagtaaaggggacaatgaagagagctaagggactccttccttcttcctcctggcactgtctccttcctctttctgcctccacaccaatctcttggccaccagctggaatgtcaaacagtggatggtgacagcaggcagggaaggggccagctgcaaggcaggcccaggcaggaggccggcagcaggaggaacaggatgacacccttgggaagcagttggtgatgggcagggcacacagatggccctgctgagggctttttcgtacgaaggttcttcccatctccaaggcccagcacgtgagtcttctccaactgggcactgggcttgactgccgccacggagtctccaggaggtccaagagtagggacttctgggtccccatgggagaagccagcctcccttccacctggctcagagcaggatgaggggtgggagcagctgatgcatgggaggctgcttatgccctggggccaccaaaaagggggtgctgctgggactcaaggatacttttactgcagggtttccacaaaggcatcaaactcgcggacattcttctcatgcacagccagcttctctggtaatgagtccaagtcttcagccatggactgtgctccaatatctatggagaggctgctcagctgaggtgggttctgaaactcccgatagaaggtccccaggtccatcggaagaatgtcatctttagaaaaagctggtttcttcaaaaacaagacagagtcagtttagcttgccttgaaccacagaggagataagctatgaacaagtctttccttctagcaattatcaaaaggttctttcaggcttatcttagggagagaaatctttacacttttctctcccagactgttcacttctaatgctggtgataatattcctctccactagttaagtttatgtcccactccttcaaactccttgcctcgtgccgaattcttggcctcgagggccaaattccctatagtgagtcggtattaaattcgtaatcatgtcatagcggtt

SEQ ID NO: 57691 - DNA, 435 bp, Homo sapiens
  misc_feature (1)...(435): n = a,t,c or g
ttgaaacncctttgacatnattacgaatttaatacgactcactatagggaatttggccctcgaggccaagaattcggcacgaggctgggggctttctgtcgcatgtgtgtctcctgtcgactctgcagtttgttctcagagcagaatgtttcctgttctcagtgcacaaagacactggttttcaatcggcgtctaaaaccacgttcctgcctttcattgcaacacggtgtgttcatttgtttaaaacagtttaatgagtaagtttagatgactggtcaatatcttaaaaatgtatattagtaagaagttcttcctggaatttttctttcgattctggcagaataaacaggtgtttttagttttcccactgtctgagccaagcaggaccctgtcccagagcaagagatgtccccttccatctctgacccttgcctg

SEQ ID NO: 57692 - DNA, 424 bp, Homo sapiens
taagcatggagaatcctttgctacaggatgtcccaggaactgtattccaaaatctaaaactgatggctgaaaatgtaagccttttccactaaatagtttgtccgagaagctaaaaaaagaaaagagaggttgattttgttgtagttttaacatttaaatgctgagatataacgtacttagactaatgactctcaatgcatgacatataattttactcccttatagattttaaatgataaaattgaactattagaagtctggtataattctagagttgtaaacttaagataatttaagattacggttagtagaacttcatatcaaatgtacagattttttaagcattcagacagaaatagagatggatttaatttgtaatagccttcatttctgggtgaatttggatgacatggctattttcata

SEQ ID NO: 57693 - DNA, 2170 bp, Homo sapiens
aaaatctggctcccttttaacacggccctcaagctccttaagtgaattgccgtaactgattttaaagggtttagattttaagaatggtgctctttcaatgcctattatcagtaaggggacttgtattagagtcagagtctttttatttaggccagttgtcaagtgtcaataaaagcatcatgtaatttatggttttcattttatttaaaattcagcaaaatcatacgccatctaccgtgatgactgccaactccatggcagaccctttctgggattcaaaaaccaattcatcagatcgctgcctctgagggatgtacagattggctggggagctgagtgctacaataaaggaggaagtaccggggaacagtgcagggcaaaggcaggaaagagatctgagctgcctggagatcatctggggtgcggagtacaaagctttgcaagggtgtggttttggaatgacgctaaactgaaggtggagagaacagataaaaaggttggaagttgcacactgtacactgttaagaagttgagctttttatcttagaggcagcagaaggtttggagccaaggaatgaaatgatgaggcgtccttcaggtaatgaacttcagctgcagtgtgaaaggggcaggaagactggcagctgtcaaaactggaacagtccagtgagtatgtgcaggcccgggcttgggcagtgacgagggcagggagcacacatcaatttctgcggtagaaccttctagaggaagaccagacagagggtcaacagagttgaaaggagaaaataattgaggatgaggtccaagtttttagtttcagagactaggcatatggttaatatttaggtaggaaattcaggaaaaggagcttgtggggcaggaagggaaggaacggcagcttggggcactctgacatctttaacaagtcttgtaaaggcttactaaatacaacgaagcattgtaccaactataccctaataaagattaaaaatttacattccagttaactaccttaaaagttaagtccactttcatcccacgcccccatcctttccgtcatccctcacccctttgtcttgagaaaggaggtttagctgcttctttagttctgcaatttctttttcttgctctattatcttcatctgtagggtgaggttaacatttccagaattttggaaaagttcactctgcagcagctgaatggcagatggtctctgcgatgagttccttctcgttaagtgctggatatacttggcttgcactggacaccttttacggagggattccggcaactgaccagttcttaaacctgttagaacttctgctcgctccatttctgttccaaacggctgaaagagctctagcaggaccacacccaagctgtacatatctgacttggcatcatactcagatccttccaactgttcgggtgaagcgtacagacaaggtacccactctgggacgtatgtgttggtgttctcttcccgtttctgttggtccagtctgtgttcttctgtaggatgtctgtgcaggccagaccaaagtctcctatttttacttgctgaatcagggccatgaagaaaaatatttcttggccttcaagatctcggtgccacaattccccatgttatgtatgtaaaacacaccttcctaccaattcttgaaaaatttttgttgcaacattggccataacataaggacaggcagactcgtccacatactcccggccccgcttgtttctctcgactatccaatcccacagcgagagctcacacagctgcatctggatgtgcagcatcaggtggtactgtgcctctgtctgacccaaaaagttgacattttcttcgggaagattcttcggtggatgtgaaactctcctctaggtgggaattacgcctgagtggcagctgctgttccacaattgaactggcagacaaaccagccaagccattttcctggagctccaggggtcgactcaagttcaccagattctcttatgactaaattggtggtgtacttcaccgacttgttattctgattttcagtgtcagattctccaaagcgtttttctttttctggggtgggctcagcaaagataatggatgagctgctactttcatcatttttaacaccacattgctctctggaagtgctctccgaccaggaagag

SEQ ID NO: 57694 - DNA, 1344 bp, Homo sapiens
tttttttttttttttttttccaggaaaaacgacgttttattttcataaatactcctgctctcactcacacactgaccccacttctgaccacggacagatggatggacagacgtaagacacccataggaggccccagcagaggccaatgaatgaaggagacacaccgagaactctaggtgccccacagcccctcgctggggccatgggctctggcattacccttgagcccccacagtccctcagggggcccaatggcaaagggaaacccccaggagtacgggccaggtgaggtttccccagcctggccccctgaggctgtgaccacagggccaatccggaagaaaagcagagtcaaaccacacaccagagtgcaaatagctgggggtgtaggcgtcaccccccagtcactgggttcctatggaggaggcctaagctggtccccagctccagcatggcccccgagttatggctgggccttcccataaggcataagagacaggtggggaagaccccacccaggctggggttggggctgggcctgaggtcctggcccttccccaacagctgtgcttcctccccatgacccaagttcttccaaggctacacagcccctccctctccaggtcccggtgatggagaccccagcagcacaaacccaggcccagcctcctactgggtttggctcagcaggggcggggccggagcaggagggggaagagtcacttgaggcctacaggggtgtggggagaagcaccaggcctgggggtgaatggccatgggcaacaaagggtgtccttggccaccaatgcctccctccaggctggacagtgaccggtccctctgccccttcctctccccagcccctctgttttagaggctaccccaggtttcaggtggggggaactggtccacatcccccatctcgttgtaggtctggtcacccatggtgaaggtgagcttgtagcggaaggcgaaccttctccttctgggggttggcaagccagcaggacctgggtgattgctgaggggtggacgatggggttaaaagctggcagctccgtgcccgagggtggctgcagcttcaccttcataaccttggggacagctgactggaacacgatgttgcggatgggctggggggcggtgctcagcatggaaaccaccaccaccagcacgtcggagcgccctggcagtgggtcccgggcaaaatggaagaggatgcggaagccgtgctggtcatacacagtcacgggcaggatgttgctgggtttgatggactccaggggcacagtgatgctggccagtgagagctcggttggtacgggctgctgcggaggcctgggc

SEQ ID NO: 57695 - DNA, 2202 bp, Homo sapiens
tttttttttttttttttcaacaacaccatctttattcaaaaatatatatctatgagacatttcagaatatactgctgccgccaacgacagcctatacttctaaatagtcctaaattaatatacaaatttaagctttgaaaatattctttaagaaaaacaaacaaacaaaaacaagggaagattgaagactttctgaggaatatgacctaaaggaaaggtcctttgaggcctacagatgccctaagaaagaaaaaacacaaaaacaaaaaccacccaccccacccaccaagtcacctcatacatacaaggaggaaagttcatttaaattaaacaaatgaagtaagcacactttgggaggatgtggacagcagaattaagatttaaaaaacgaaagcatttcatcaaaacaaaaaactaacttcctcacaggaagtccactagtaacaggtattaaagaggccaacacattcatttacataattgctacagtttcatttcttaacttttgctgtaataattatgcaccaattgctggtcagagactcagttggataaaacagagcagtgggctaaatccattctgctatattttcatctagttgatcagagcaaatatctacgatcctcttttggctggattgtggctgctcagatcgcacttccttggtgaaagcatagagtgtcccagatgggcctgctccaaaacacgctcatctagaaagcagcacaccacggggggtgggggagaggttggggagtgcagcagcagcaaagattacaatttatcttgcaattttagtgatgtcacctatggcctctggaagaaaaaccttatagactcattaatttaacagtgacagaacgacaggcagtgtccataagcaaacaacacacagtctgaattcaaatctgaataacagctcaaacactactaggttctacacagagttaaactgagtatctgctatgacttttcattgttctcacttcatgacaagcaggagagcttctggaagggaagcccgttatgctttataaacataggttatgtttcaatgtgtttaacatgtaaaattacatgtaatttttggtgatcctggaagtagcaacacaaattaatggagattacaaagccccctccactgaattcctttttatatagtttgggtttcagcctctggtctataactcctattacactactggggcaaatcgctttctgccctttccaatgtcaaaaataagcctgccaaattagaatgatttacaattggcaggctgaacctttactataagcaagataaaaattgtctctaactacattatatagtcataatgtcagctgacatgataatagaattaaaacccccaattaatatccccaactccccgcttcccctgcccgagacgagctattcaataacatctgacgcaagtactccccgtcgtgtggggacaaggacctgtgcagtggcgtgacatgacagacggacctgctcagcgtcctatttgcagtgatgttcgagtttagccaccgtactgtggacatgcacccagacagcggattaaacgttagtgtgtaccctactcccagaagaaagggtccaagaaacacccacacagatcccaaatgcagcacacctgtgtgtggggccttcatcttttggagcccaccaatgcctgccatccctaacaactgccttcgcacccaccagggatcaaggcattctgtttttcggaacgtgctccgacagtggagaagtgcagcatgggaaggttgtatctaggaacttgaagcaaataaattccttttaattcatgcttgtgatccctgttattctgtctctgaactgtgcctttatgctccagattagctttgaatcttattgctagattctccaatctgtttacaaaataaatgcacctaatcttcgtgcatcactaggagaagcaatggaaagggaggatcagagatttggcaaactctttatggcaacgctacgacagctgtgcctacaaccttttggggcagatgcagctgggaaagccaacgtctccaggacaagtgccttagtggaagcccacaccgaacttgaacaagcccagcccagaaaggagaagctgctttcatgataaaatgctgtcatgagggacaaagattctttcgaaagcttccagaagtacacatgattttcataactt

SEQ ID NO: 57696 - DNA, 1641 bp, Homo sapiens
  misc_feature (1)...(1641): n = a,t,c or g
gaactagtctcgagtttttnttttttttttttttttgctatgggatttaatgggaaaaatatgtaaaaactgtcactagtcagctggctctttttcctatgaaatctatcagtacctttctccatccgttgttctcaataatgaccacagagcctgagtataccaagaaaaccaatattcgcattacaggttgctcctgtccttccagacacctttcctgcctgtgtgactaacctaattttgctagttccataaatacacgattagtttagtaacagccatcacaatgtaccatgtacattcatggtgagagctaaagatcgacacagacttctaggagctttgttcatactgattacttaatccaattgtatagattgaatatttgagtggaaggaatttacactctgtttaaatgatgggattctatcgagatagcactcatgatcatgacctttttggtagtattcttaaacaaaattctacagagactaaatgttagcgatgatcctccattttcaattttaaccaattctgtcccctttctcaaaaccctgagccctgtgcatgctttctcagtcttgtggtgggactggatacaatgactaacttcccctcctcccctctttaaacaccattttccatggagttcaaaaaaattttttttcttaacgttacatatcataggtggaatgggtttccccagtgtatatggaatgttttaaggtgtctccaataggcttatgcagtctaggagctttccaatactcatttaattaagatttaatcatttgctaatggaaatcttaccacctttcattttccctctgttaccaaatttcagctcttaggagctgctctacaattctgaatttgcttttcttgcctctctttagtcacctgtcacaggaggttcctgctcagtaatgatattgtgagttaggataataactttttttttttgtgcttcagatttagaagaaaagatcctgtttccatttgaaaggaactgtaagcttttatcttttaaccaactgaacaatacaccaaaagcagcctagggatgagcatttctttgaaagcaattaggttattcacctggtattaaaactatttactgttaaaaaaatctgtgacttcatgaagttgatttttaaagggcagcatcaaaaactgaaaaggaagggaaaaaataggcagcttctctgcacttgtttggagctccccaaaacaggagccatggagaagtggcatcaagaccgggctgccctttcgagaacaccctgtggcagttcagagacacgcttttcctacactgcatgcagcccctctttccagcactggaaagaagtggtcttgaagcccagctgagaagcacttcacactcctctctcttgttctgaatggtgtttgtgtcagtctgcagctgtgtatggtattatgtcttataatcctgcatcacttctatcctatccagtcatatctaatgtagaaaattagtttccagtgaaagtaatatgtagtgcttttatgatatttgtgtgcaatatcccctcttccattgaggatatttgatgtaaaggaaaaaaaaaaactcagttccacaataaaatacaaaagtggcaaaagttaaaaaaaaaa

SEQ ID NO: 57697 - DNA, 1413 bp, Homo sapiens
agaggggccagttttgttgttacctgaaagtaaggtgcagcccacaaaaatgcagtgaagaagaagatgtattatgcatatgtttaagttaatacaattgagatatatttagcagacagaatcaatagagttgatgagtgactgactggatgtgtggggagtttatatcactcccaggtttttgacttgggcaaccgggcactcatgaaggaaaaagaggatccagggagaggaacttttctgaggactggggtagggctgaacagctgcattcgaggctggtggagggtgggctgggcatgggatgcacaaatggaaattccactgggtctgcagctcacacataggcatgaccagcatagagatagagaggccccagtgctgctgagtaactgtgattccccaggtgatggcatcagctgagaagggaaggaagcccatgagaggacactgaagaaggagtgagcagacaataagaagcccacagaagacagagaaggaacaactagagggagaagccaaggcaggcgtgtgtggtaacacataggaactgagggagaggacatttcaagatggaggggatgccatacaacaggactatgtgatggtttttggctgtgtccataggaagtcacaacaggcaagggaaagaaaccagaacccagtcatggagttaagaagtgagtcagagaggagatgggtagggacagtgaggtaaggcctctttctaaggaagtttggctgaaggatagactagctggacacatgctggctgtgtggggtagattgaggattgatgggagggtaggagagccttgccacctgcgagaagagtctcctaggattggggaagctgaggttaaagttgtggaagacagtggggataactgagtgacagataatcaggagaagaaaaggagatccagaatcatgacagagagatgacctttgccaagagcacagccatctttcactgtcacagagaggtaggacaaaacgattggtgttcaagaattggtttgtagcacaatattttaactatgtcctttaaaaagtttctccacagacactacccaaagcagtccttcactacagtggcagacagacctgaaaattttcatctgaagcagcagagtgaactgcagagtcagagatagaatctcactatgttggaccaggctggtcttgaactcttggcacccaagcgatccttttgcctggaatcccaaagtgtcagatttactgaagaatatttcattgtaattactttttatactttataggtcaagagctctgttttaaagacaaaatttattgaatatactttttcaaacaaagtttcatgttctaatcattgtctgatttcagcattaaatgaaacacagtaaagaaagttgggctgaaaaaaaaaaa

SEQ ID NO: 57698 - DNA, 1022 bp, Homo sapiens
ctgtcatggacgcctgggtccgcttcagtgctcagagccaagcccgggagcggctgtgtagggccgcccagtatgcttgctctcttcttggccatgcgctgcagaggcatggagccagtcctgagttacagaaacagattcgacaactggagagccacctgagccttggaagaaagcttctacgcctgggtaactcagcagatgcccttgagtcagccaaaagagctgttcacctatcagatgttgtcctgagattctgcatcactgttagtcacctcaatcgagccttgtacttcgcctgtgacaatgtcctgtgggactggaaagtctggactgggctccccgtgtggatcaggagaagtggggcccagcgttcattcaggtactatttgttttccctcatcatgaatttgagccgtgatgcttatgagattcgcctactgatggagcaagagtcttctgcttgtagccggcgactgaaaggttctggaggaggagtcccaggaggaagtgaaactgggggacttgggggaccagggactccaggaggaggtctgccccaactggctctgaaacttcggctgcaagtcctgctcctggctcgagtccttagaggtcatcccccacttctgctagacgtggtcagaaatgcctgtgatctcttcattcctctggacaaactaggcctctggcgctgtggccctgggattgtggggctttgtggcctcgtgtcctccatcctgtctattctcaccctaatctatccctggctacgactcaagccctgaccttccggtacaggataaggaggggacctgaattggtgagatgggatttttagatcgtcccccatgtgccagcctcattcgaattctactctttggttaaagttagaaattcagagatttaggggtggaggaagagctttggggaagatgaggtaaggaaagatgactccgtgaagttaataggatgtctctaatttctagatgtgcctgagcttctgttcttttcctctttct

SEQ ID NO: 57699 - DNA, 410 bp, Homo sapiens; identical to SEQ ID NO: 24082

SEQ ID NO: 57700 - DNA, 1592 bp, Homo sapiens
  misc_feature (1)...(1592): n = a,t,c or g
ccgcggcgccgccgtcttgcgcctacgtgcgcatggttttcctggcgctctacgtgctgttcctcgccgacgaggagttcgacgtggtagtgtgcgaccaggtgtctgcctgtatcccagtgttcaggctggctagacggcggaagaagatcctattttactgtcacttcccagatctgcttctcaccaagagagattcttttcttaaacgactatacagggccccaattgactggatagaggaatacaccacaggcatggcagactgcatcttagtcaacagccagttcacagctgctgtttttaaggaaacattcaagtccctgtctcacatagaccctgatgtcctctatccatctctaaatgtcaccagctttgacttcagttgttcctgaaaagctggatgacctagtccccaaggggaaaaaattcctgctgctctccatcaacagatacgaaaggaagaaaaatctgactttgggcactgggaaggccctagtacagctgcgtggaagattgacatcccaagattgggagagggttcatctgatcgtggcaggtggttatgacgagagagtcctggagaatgtggaacattatcaggaattgaagaaaatggtccaacagtccgaccttggccagtatgtgaccttcttgaggtctttctcagacaaacagaaaatctccctcctccacagctgcacgtgtgtgctttacacaccaagcaatgagcactttggcattgtccctctggaagccatgtacatgccagtgcccagtcattgctgttaattcgggtggacccttggagtccattgaccacagtgtcacagggtttctgtgtgagcctgacccggtgcacttctcagaagcaatagaaaagttcatccgtgaaccttccttaaaagccaccatgggcctggctggaagagccagagtgaaggaaaaattttcccctgaagcatttacagaacagctctaccgatatgttaccaaactgctggtataatcagattgtttttaagatctccattaatgtcatttttatggattgtagacccagttttgaaaccaaaaaagaaacctagaatctaatgcagaagagatcttttaaaaaataaacttgagtcttgaatgtgagccactttcctatataccacacctccctgtccacttttcagaaaaaccatgtcttttatgctataatcattccaaattttgccagtgcttaagttacaaatgtggtgtcattccatgttcagcagagtattttaattatattttctcgggattattgctcntctgtctataaattttgaatgatactgtgccttaattggttttcatagtttaagtgtgtatcattatcaaagttgattaatttggcttcatagtataatgagagcagggctattgtagttcccagattcaatccaccgaagtgttcactgtcatctgttagggaatttttgtttgtcctgtctttgcctggatccatagcgagagtgctctgtattttttttaagataatttgtatttttgcacactgagatataataaaaggtgtttatatnantaaancaaaaaaaaat

SEQ ID NO: 57701 - DNA, 945 bp, Homo sapiens
ggtaaatttgatgtgatgtatatttgaccacaatttgctcaatgcaccattgctggtttgaaggtggagggaccacaggaccagggacaaggacttgggaacctcagtcctacagccatgaggagttgacttgtcaacagcctgaatggtcctggaggcagatgcttccccggagcctccaggtgagagtgcagcccaccaaggcctgacgtcagtctgagagaccccgctcagggcacccactgagcccaccgcgacttctgccctggagagctgcgagatcataaatgggcactgcttgcagtccttacatccatgctgcttcttacgcagcatagaaaaccagtgcagcttgtgtctgggtggagccctccaggccgtgggccaccagtgtcttgcagtctgccctgggctgctgcctccagtgtggtttcctttgtgcttgctcccagcccgttcccatggagggatttggtgagctaccccttacccttgcaatctgttccccaaatggagcctggctctctggctgggcctttcactcccttccctcctcacagctcggaccctcccctcagggatcccatgagggctgacagcaggggccgtcttcacctctgtgggcagccaggtggcaggagaggggcagaggcgcagccatcgctctcctgcagccaccgaagactacccgagcatcctcttggaccaatagcaactgccttcggagtggagacaatgtgtgggtcccaccccgggagcatctcaagaggctgggctccctggggctggcggccacatgctctgaggagcaaggggatcatggggctgtggtggaatgttctacaggggacctgtgaggctattgtggaatgttctagaggggatcatggggctgttgcagaatgttctggaggggattatggagctgctgtggaatgttctagc

SEQ ID NO: 57702 - DNA, 1638 bp, Homo sapiens
ctgggatgtgacgggcaccagaatgctccctctccaaaggttctaaggaccaaagctgacagtttctttacttgcaggtagctgacagcatctactcctgaagaccggaaacatggcttgtaccatccaaaaggcagaagcacttgacggggctcatttgatgcagatcctctggtatgatgaggaagagtctctctacccagctgtatggttgagagacaactgtccgtgctctgattgctacctgggattctgcaaaagcacggaaacttctagtgggaagctcttgatgtgaacattggaattaaaggcttgatatttgacagaaaaaaggtgtacatcacatggcccgatgagcattacagtgaattccaggctgattggctgaagaaaagatgcttttccaagcaggccagagcaaagctccaaagagaattgttttttccagaatgccaatactggggctcagagctccagctacccactttgggattttgaagatgttttaagatatgatgaacatgcatacaagtggctctccaccctcaagaaagtaggcatagtaagactcaccggagcatctgacaaaccaggagaagtttcaaaacttgggaaaaggatgggtttcctctatctcacattttatggacatacttgggcaagtgcaaggacaaaatcgatggcaaacaatgtgggctttacacaactgggaagctaagctttcacactgattatccagccctccatcatccacctggggttcagcttcttcactgcataaagcaaacagtcacagggggtgattcagaaattgtagatgggtttaatgtgtgccaaaaactaaagaaaaataatcctcaggcattccagattttgtcctctacctttgtggactttacagacattggagtggattactgtgatttttctgtacaatcaaaacataaaattatagagttagatgataaaggccaagtggttcgcatcaacttcaataacgcaactagggacacaatatttgatgtgcctgttgaaagagttcagcctttttatgctgctctgaaggagtttgttgacctcatgaacagcaaagaatccaagtttaccttcaagatgaatccaggtgatgtgattacttttgataactggcgcttacttcatggccgacgtagctatgaagcaggaactgagatatcccgccatctagaaggagcttatgctgactgggatgtggtcatgtcaaggcttcgtatcttaaggcagagggtggagaatggaaactgaagtcacctgtagataattttaataagattccaatgaccatattttgtgagatatggcacattattcacagaccatgatctttgtgatttacatataatttccttaacaatgaacatgtaacttctctcacaagagtactctttactttgtaatcatatacaatgtcaactttttagatgtttcaccactcttttgcaaataaagcatcctttctgctctgttgcatgcctgctctaatttcttttgcccatatatgagtatctccagaatgtctacaaatagtttttgtagcaaatgaaaatttcttcaaataagccttttgtttcaaataaaacttgtctcaaaacatgcttc

SEQ ID NO: 57703 - DNA, 436 bp, Homo sapiens; identical to SEQ ID NO: 14456

SEQ ID NO: 57704 - DNA, 2119 bp, Homo sapiens
  misc_feature (1)...(2119): n = a,t,c or g
cacgcgtccgcggcttcccttccacagcacggcgaccggggcttcccctcagcagctgccggcgcctcagtctccgcggccagcccagctccgccgcgtccgcggcccgccgccgccatgcagtttatgttgctttttagtcgtcagggaaagcttcgactgcaaaaatggtatgtcccactatcagacaaagagaagaaaaagatcaacaagagaacattgttcagaccgttttagcacggaaacctaaaatggtgcagcttccttgagtggcgagatctgaagattgtttacaaaagatatgctagtctgtatttttgctgtgctattgaggatcaggacaatgaactaattaccctgggaaataattcatcgttatgtggaattacttgacaagtatttcggcagtgtctgtgaactagatatcatctttaattttgagaaggcttatttttattttggatggaggtttcttttgggaggggaagttcaggaaacatccaagaaaaatgtccttaaagcaattgagcaggctgatctactgcaggaggaagctgaaacccccacgtagtgttcttgaagaaattggactgacataactctcctcccttgttgatgacttcttgtggcatttcacacactgtagatgggtcactcccttcatgtccatgttagctcatggtgtaagatgatgtcttgtcagtattactgttttgctaagccgcttcattcatgcctacacaattttttttttaaaagggaactttagttaattaagtgataagggacttaaatatgaattagaatggtgcagaaagagataccttttctggatattttaaagtttaaaggtcagtttctcttaatctgattatgtgcacatatgaaaatggcacatcatatacatgtaaaatcaggcagtatacatttattaattactgtatttgacaaaggaaactcttaaattataatgtgaaacctggttttatgaaaccaaagactagtgcagcatttcagcatatgtaaaaaaaaaaaaaaagggaattgacatgtcacatatcaaatgaatggaaactttgttgaaactttaaaaagcaaatttactccaaagncttgtattggaaattacatacctttttttttttttttaaaggactacagattatttttaatgactaaattggagtgatacttcttacactaaaaattatttcttaggcattctgaatctgggatgagaaacaggattgtttcacaatagtaagcacataatttttaaggccaaggcacatttgactcctgagatgaattttttgtggtcataatcaaatacttagttgtttttgatgccccaaaataaagtgagaatggtaatttgccaggaattcttcataacagtatcttacaaaaaacgtgttgctctcttcacagtattatgtgtaaagtcattgtttaaagcacgaatgttccctctgggggtacttgttaaagctaaatttattttgcttccctccacttagaagtgctgcacactttacagcagcttcctttctttccatggcactgcctagttaacagaagtcttataaaaatttaaaaagacacatttcttacaaaaaagagttgaatgaggtaaaatggcattagatggctctatattttttaaagctatgtaattgttcagcgtcacttttctaagtacttatacatatctaaacatgtcttcatggtttatattttcacttatatatgctgggctggattaagctttgttgtgattgtgaccaacattcaggccacgtgagcactgtcttatcacatcgccaattagttgtaataaacgttcaacgtacaaacactggagtgtgtttttatctctttccaaaagtttgtcaaactatgcagagctgctgaaggaagaatttctcatttttttttcagtaaaatgttgaaaattcccctccatttgaatatggtggttgttataagcacacacaagatacatggtggaagatctaaggagtcttcatgtacttcattaaaaaataacatggattccatactgagagcctatctacacatttattttcaatcaataaatgctgcttttaaaacctta

SEQ ID NO: 57705 - DNA, 2663 bp, Homo sapiens
tatcagtctacctaggaaagatggttaggtacttgctcataaacagttatatgtttatgcatttaacaaaatgattttactgttcataaattgtgcttttgaaatgaaatgtatcaaatttcttttcaatgatgttttgacttggaatttaaagcaaacagaaagagaataatgacttatctctttgagtattaagctgacttattctcttgctatttttgtgtttcctgtttatccattttctcattctcctttcacttcattgtcatttttattttatttagtgaaaaggatttggtgaaacaggcaaagaccttaaatagtgcagcaaataaactgatcccaaaacatcattaggcatttttaagttggtcacgtcgcaagtccgatatcacaacttaattgtaaaaggaagaaatctgaaagttactacatttaagctctgattctatataaaatgtcaccaaaaagttgactttgaatttgttggacttttaaaaaaccagttggaaatataggttgggtttttttcttattgttttctccccagggttagaaaaattggtataagttcctaattaaaagctgaataaactttgagaaattatttctgagttgaccaataaataaaaataccactttctttaaaaaagcctagggaattgaagctctgtacatatactaatgatgcctttacaacccagtccttgataataccagattctcggtgcattgttcatgtctgtatctgcaagcctgttctgccattgcagtgtgatgaacctagaggtaactaccatgtgaacttgaactcttctaaaatagttctgtgtctcttagaccatgaccccttttcacttttgttatataggtttaatccccaagccaaggatagtacttagtatttcactacacttctattctcagtaaccaagattgcttgcaactttttttgccttggtgacttttgaaaaaaaaagaaaagaaaaagcagcatccttatatttctttaaaatacatagaaataaagttagtaattaggtaacctatgataacataataatgtggacgcctggggaaaccctcctcatgtttgtcatcttctacctctgccattttcctgcaattccgcttcctacttaggcagttcagagagaacaattctaataaaaacactcctctcctattaacaaaaaatgatgcagtaccccatttttcggtaatcctggcttttcttatattggagtaaaaaggacagggtatagacatgaatgatgatattctgcctggcctgtcatttcttacctgggaaacatttacttaagagtttctgttactttttgttcagatgggggatttgctaaagggtctgggaagctaataattgaattattaggaaaaacattttcaggaatagggaagtaaatgataaacttatattctttattattatttagtacaaaaatagattcccagtaggatatccacaaggcaatattaggcaggggcttctgtttctaaggtgaccacagactaaccctttctagggctttaacattgttaaataatcctattaaacagtttgattttttaaggtggatttttgatttgaagagacaggctttacataagccttcattccttcaaaaggtcctgacaaaatacttgggtttttttctctttttttcattctggtatgctttgcagcatttcagctgctttggtggggacacagataaccccttcgcttccagctcttaaaattctttatctttttcttggcaaaaccagaattaagagtgtaagatagattccatgtgtgcttatataggtccctgcacagattggacttgaaccaaaattaagtccaaagaacatatgtttagaccaacttcatggaagtggaagatcctgtgctcttgaacttattttaattcttataatttgcacctatataaacaaagctcctactgtattcttctcttcatcaaccttttgtggtgatgggttgccttttctacgagcatttggaaggagtgatcaaataccgaaattgaactttctaaaacctacacatagcatgcgtttaaattctattatataaagccccaagtgctttaccttctaaaacatgcttctctataggtgcaaagttataagatatgtagaagaaaacatccatcagaatcttctggagaatatggtcagagtcttaaacaggcccagtgctgagttctttgtccacttagtcacacatcttttgtgggaatgggaaaggaaggagacagccaaactctgacaaaggcttttccttatagaataacccaaagcctaggtgagggttgatatataatgtcccatgatttaatatatgtggtttgggggaaaggacaagaaaaaactataattccacatataagaaggtagttgcccatttacaagttccagttatgtgtgtaaaacagaaaaattaagtaccaaacctattaggaaatttttttaaaaagtggatttaacttaaattactgtgtacttgaggttggctttggatatggattttctaaaaagtgatgttttattgtttatcatctaatggctgtaaactgtagtactagaataaaaaaaatggaaaatcagcttttcctctgcctggttcaccttca

SEQ ID NO: 57706 - DNA, 1825 bp, Homo sapiens
tcttacaaaactgtaacctttatttgttgatccaacagtacgttaaccacttttaccccatccccactttacacggtacaccaacctgaacagattttgtgccacaatttcattcaaagggtttgtcattcactttatgattgtgctggataatctagatgtaagcaagtctggagattttaaaatacgggtcccctgtatgagagtagcatagtttatagcatacttttaaaaatggcattcggtaattttgccttctggacagaaagatatcttcaaattgcaaacacatctatttccacaaaacaatttggtcaggaaattttatttgaacattctaaagcaataatgctttagatgttacttaagtgtcccagacaggattaacaaaattaagtgtctctaaattacaaatttggctcctgtaggagtctcagaaaataaacagaagaaaacaacccccctcccaaaagaagtatgacacacacattttgaagaaaccccaatgtttcatgcaatggtaggcaagatgtaaaagcccacccaaatcacacatttctacaccaatcatcataagaaaaaagtactctgtagtcgatctgtacatccaaatgcatttgggaatctacacctacgttacattatttaatgttatatacatttattacccaccccccttgtttttaataatttcttatgtaaaaccttcattcaaacccaaaagatttaagactaacttggggggaaaaaagataatcactttagacattcagttaaaatgtagtttatctaaatctcaaaatgtttaataaaaacaagtatcttctccatttaacactttgctttctaactgtacagtaaattgcattgtagagagtacacttctgtcttcaaactgtatcttctttggatggaattaagatgtaactgtatagttttaagataaataaatgggaagttggtccaactaagatgacagcagatatattacatgcaggatttaatattttctaattctctcttttaaaaaaaagggatgctgttggattgggaaaaaaaaaagtcaaaaaagaacccagattcaatatataaaaatgtcccacaataggtcgacaatggcagtaaaaataagaggaaaaaagtaatctttctggaacatcatttttcaataacatagaaacactaagtgccaggaagattcctattcatgtaattttagcatccaagtttccctctatttattttattggaacaaatgctttaaataaactatttgtcctcttcactgaagagagctggtctatttcatctttaatgagctagtttttgggaagattagccatgtactgtagtaatgcctactgcataaaatccaagcatttgctgtgaacagttggagaaagcagtcaggaagaacctaggatcaatggaaatagatgttactttaagccaccgacgaaagagagacccacaaagtacccagtgtgttaaagcccaaatctcttcttgcgtttgtttgtttttgctgtgcaagttccacccctatgaaaaagaaattgatccaaagttccaggttttcttgggtctctagtcaattttcacattagtatagatttttcggacaaaggcacttgttcccatgtaaccaatcgctccacacattatccccaaggctgtgctaaataccgccatatatccaaagtaaaatgatgtttgaaataagccatacatctttgttttgaaaaaatagtagtaaaaggaatacatgtaaacatagattgcagttgatgcagcagagagaaaacttgtccattgccaccggtaa

SEQ ID NO: 57707 - DNA, 825 bp, Homo sapiens
cccacgcgtccgcccacgcgtccgcggacgcgtggggtgaacttgaggaaggccactggcgtccgagggctggagaagattgccaagttaaacatcccgccccggctcattgattacctctcctacaactgaattgcaggtggggtccggaccgtgactgcccccgttgtgcccagcattgcccgggtgagggctctgcctgttcctctgaagcagcgtgattgctgtagatagaacaacgctccttcgagtcccttcctgcgatcctgtttaggcttctctcctggatcctggataatgtttccagggtgttgggaaggcctgcgtctcaggtcacagttgtgggtgtggccctgcgctgttctacagaacctaccctctcaatgggcatgggcccaaccatccagttttcctcttttacggaccatcctcaaaggcactctcaggacagacggcgtggggagcacagaggaggctggcagagctggggactgagggcattgttgctgattctcactcaccggggcagcctgccgcagatgcacaggccccaggtgcaggccaccacctccgggtcggcaccaggactgccctcggtgctcatagggaatggctgggcccacggaaggtcggcctgggatgtggcctgggactgctgctctgctggctgctgtgtggatgcttttcctggagcactttccaaggcatcccccagccccaagcctgcgcgcatctgtcactcagggactttctatgggtctttgtgggggaaggccctggctttgtattccccacaagtagcactgagtttcttaggaaatttgc

SEQ ID NO: 57708 - DNA, 908 bp, Homo sapiens
tacccatcaagggttaatcatctcattttagtggagccttggggtttccctgaacgaccagaccttgctgatcaagacagaccaattccagtttggatcagagccttgggagcagcattgactccctttaaccctttagctggcctaaggattgcaggaccctttggtttaagtctagtgcagcgtttaaggcctgatttcaaacgaaagtattcttcaatgttcgaagacgatactgtgacagaatacatctaccactgtaatgtgcagactccaagtggtgacgacagctttcaagaatatgactattccttatggatgggcaaaaagggccaatgctccagcgaatttggtaaaatgcaccctggacattccagtttcagttgatctttggcgcccgatcctgcatagatggcaattctggcaccagcatccagtccttacgaccacattcatatgtgaagacaatagctattcttggggcaggacattatgtatatgcagatcaaccagaagaattcaaccagaaagtaaaggagatctgcgacactgtggactgaacacactgaagctctgatgggaaaacctggtgactgatatagttgttcagcaataattcatagtctgtgatgaagagtagtgaatacaacacacaaccaggcagccttcttgactatactttgcacatgttttctttaggaattcactcacacatttaaaccagttagtgccttctagaagaatggctttcctttctcctacacaaaattgaaatatacaagtctctaaatataatacctttaaataaaaggttatttgtccctctgatgtactgaaaaactgtaatgtttcagctgaaaattttttaatctaactttgctagttatttttatattgcaatctatatt

SEQ ID NO: 57709 - DNA, 973 bp, Homo sapiens
ttttcaactgcttcagtgtaatttattttcccacatcccagaaagctctggaaaaacacataaatgaatacatttattctctcacaggatactacactgttacccagtgtgaagggagcagccatgtggctcccaagctcccttagcaaaagggtggttctcagaactgctccattcacgagtcctgcaaccagaggcctgggctcaactcacacaaagttctgagcaatggccagcaccttggaatactcgccttcccgcttgcgcaggctggtggggatgggtgtcttaattcgtgtccccacagggttcccgttgtcctcaatgaggaccacgttgttggagtcaaatctgggggtcattcgggggccaggcatgcagtgcccccacaatgagcgcctttttcttctgtcccttgatggccagtagtatctggtcgcccaccttgcccactccattcttcttatagacatggatgcagcgaggagcccgatggtatgggctgttccccagggcactgttgtccaccactcgtacccgcgtcatcttctgaatcgcactcagactcccagtggtgctgaaacagtgatggctcagcactctgcttacacaggtgaaggggccccagagcccagtaaagaaagccatgggatcccaagatagatccgctctcgccgcccgggaaaatcccgccgcgggccccaccagcctgcgcaagcgggaaggcgagtattccaaggtgctggccattgctcagaactttgtgtgagttgagcccaggcctctggttgcaggactcgtgaatggagcagttctgagaaccacccttctgctaaggaagcttgggagccacatggctgctcccttcacactgggtaacagtgtagtatcctgtgagagaataaatgtattcatttatgtgtttttccagagctttctgggatgtgggaaaataaattacactgaagcagtt

SEQ ID NO: 57710 - DNA, 792 bp, Homo sapiens; identical to SEQ ID NO: 14470

SEQ ID NO: 57711 - DNA, 1403 bp, Homo sapiens
tcggcggcggcctgcggccatggccaccgtgatggcagcgacggcggcggaacgggcggtgctggaggaggagttccgctggctgctgcacgacgaggtgcacgctgtgttgaagcagctgcaggacatcctcaaggaggcctctctgcgcttcactctgccgggctccggcactgaggggcccgccaagcaagagaacttcatcctaggcagctgtggcacagaccaggtgaagggtgtgctgactctgcagggggatgccctcagccagggcggatgtgaacctgaagatgccccggaacaaccagctgctgcacttcgccttccgggaggacaagcagtggaagctgcagcagatccaggatgccagaaaccatgtgagccaagccatttacctgcttaccagccgggaccagagctaccagttcaagacgggcgctgaggtcctcaagctgatggacgcagtgatgctgcagctgaccagagcccgaaaccggctcaccacccccgccaccctcaccctccccgagatcgccgccagcggcctcacgcggatgttcgcccctgccctgccgtccgacctgctggtcaacgtctacatcaacctcaacaagctctgcctcacggtgtaccagctgcatgccctgcagcccaactccaccaagaacttccgcccagctgggggcgcggtgctgcatagccctggggccatgttggaccctctcactgcccacagcgagtggggctctcagcgcctggaggtgagccacgtgcacaaagtggagtgcgtgatcccctggctcaacgacgccctggtctacttcaccgtctccctgcagctctgccagcagctcaaggacaagatctccgtgttctccagctactggagctacagacccttctgatcacagcacccaggagcttgtctccaggaaggcggccccgtcccctactcatacccaccacagagcaccagccagtgccaacgccaggctgctatttatctccctatcccaccccctaccccacctaacacatttgcactgccaggaatggacactggaagtgccaggaggaaggaaggctggtttggtggggtagtggggaggtcagggaggcggggccaagggtgtcccacattcccaacaccgccctctgatcaccatgggaatctttggactcaggacagggccaggcgcagggctctccctcctctccccttcgctgtcccctccccctggagggcatggtgtcggggggtggcactgagctatgagtcccggggatggtgaggaacgccacagacagagccaccctaggagtgagtatagtgctggtgactgtgtttcatagccccagtccagggctgtctaagaaataaagatcatcagactccacctgga

SEQ ID NO: 57712 - DNA, 1591 bp, Homo sapiens; identical to SEQ ID NO: 14474
  misc_feature (1)...(1591): n = a,t,c or g

SEQ ID NO: 57713 - DNA, 476 bp, Homo sapiens
catgattacgaatttaatacgactcactatagggaatttggccctcgaggccaagaattcggcacgagctggagtttcataatcatagcttttacatctatgatcattttctagttaattatgatatatgatatgtgaggaagggatccgacttcactcttcgcatgtctcagcatcatttgttgaaaagtctattatttcctattgaattgtcttggtatatctgttgaaaatcaattgacaataaatataagggtttatttctggacttgtgattctactccattgatgatatgtctaatttatcccagtaccacactgtcttgattcagactgtagctctgtagtaagttttgaaatcacaaagtgtgagtcctccaactttgttcttctttttcaagattgttttggctattctgggtcttggaatttccatataaattttagaatcacttgtcaaagaagcatgggatccc

SEQ ID NO: 57714 - DNA, 804 bp, Homo sapiens
  misc_feature (1)...(804): n = a,t,c or g
aattaaaatgtaaaaccaagataaatatttttggcttttggactaaaaaaaaaagattagtgaggaaaaccaataaataatggggagagaaagaaatgctactaattttctcttcatgattaaaaaaaaaatcttttaaccatatttggggtgactggaaattaacagtgatgattttgagctaaaaaatcagtgacacattttattaaaacaaaaggaacaaaggaactttaaccagaccatacatgtaaaggctgtttagcatagcaatttcatggattcaaaatatatctttaatgacaaacaaaccaataaccaggagaaatgaagactgtccttccctttataatgtgatattaaagtgtggcctatggacaatttataaagtaaagagtttgaagtttaatttttattttacaaaaattgacactattaaaaccaacatgattatctttcactcatccaataactgagctaacagtattataaaaatatgtaaaaaaattctagattcataattaccagatatgctaatatccatatagctagtataaatctgatgattaaaaaaatagttttgtttccttaaaaacacttggttcatgggccaggcgtggtggctcacacctgtaatcccagcactttgggaggccgagacgggtggttcacaaggtcaggagattgagaccatcctggctcacatggtgaaacctcgtgccgaattcttggcctcgagggccaaattccctatagtgagtcgtattaaattcgtaatcatgtcatagcggttttccaaggnnntcc

SEQ ID NO: 57715 - DNA, 2039 bp, Homo sapiens
ttttttttttttttccatatttaacatttattttactttgctgagcaagaatcatagacagctactaccacggctgcttcgtttggacaaaaataaccaggaggcatccacgggattagttacacggtatcaacttaccaccacagcagaatcaacagtgactcgctaattaacagaaccgtttgctagaaagcactaatctagttatataaatactgaaataggtcacatgcaaaacactataaacggttttgtgtgatgtacttttagttctccatagttttgtttggtataaaggaaatataatttggctgtgacgtagactgttgatgtaattttcaagttttcctgtatggggaaagttgccctgactgtggcccttttcaaggtggagcctccaacaccacgttggcagattcagactccgtgaacagtctaaatgagcaagtcagctgaatgccactttcagatggaagggaaatgagatggaaaacaacaaaaaaggactgccaggcggaacagtttccaaccgagttttcgttgagtgaggatccagcagccatcaaactcaaacataggggcccgcagggaaactggaggaaatacttcagagacagcaaagctgaaggtttctgtgctctgagggatccgagagtggatgtcccactcctgtatcctcagccagacacagaactagccagattcattagggaagctcggatgctctcattctataaagtaaggccccccagcagggcacgtacatacattgggaaagaagaaaacccctttagtaccatgttggtcaaaggcaagagagagaattctatttcccatctggaatgtcattcttgtttacttcttccaacagtgaaatacttccaggccttcgaaaggccatcctttggacacatgtaaaaagctgtcttgttggcccgttattcccactgacccgtctgagtgatcacccaggagcgcggcggcagcaagcagagctcaccggatttgggacaaggattttaaaggcagctacaaagctgagctctatttgctgatgatagtctctgttcagctgtttaaaatgactgtctgactcaccatggtaatttttcacaaattaaagacacattttgggttgtgcaacagtgttctcatctttccaggcaggcagattattttaatgctgttatacagggaattgggactctcggattttcttttttaacctttttatgcctttcagtaggggaagtttccttgaaagagagctgcaaatctcttaagtatcaacgtaaagaagccgatgacccaattcgggaggtggttcaagtgttctgttcgtttacaaaagcacagaccacgaccatggacacacccagtggaagtaaccacacctggtgtgttcctagaagctcacctgtgacagttcaacaagaacttactattccagaaaagtattacacaaagttatttaaaaaaatgtctgtacaatcgttaacacggccaagccaggccttgggttttgcctcttggtgcccggctgtgctgggaatgccatgaagaccagcggctggaaactgacttgggcatggagaagagactgagggagagggaggggacagcacgactgagcaagggcacagtgctggctgcctcatgggctccaggctccttctgccaggatgaggaagaggccccagagcagcgttacacaggaaatcaacctatttgctaatcctttggaaaaacgtttgtttctggtccacaaacagaaaatccaaacaggatggcagctccttgtgagggtggaggggagggcaccagatgctgtgcggctggaaattccaaggtgctcagaaccaggcgcctgcacctctccttatgccagaccacaatcttcaaagaggccggcagccacattctcgacggggaggtggacaaggccaccctgggagttgctttcaatctgtcctcacaaatcaacaactccccgccacctccagggcattttctaatagtgtttgtttttgagacggaat

SEQ ID NO: 57716 - DNA, 2723 bp, Homo sapiens
gaagtttgagctaaattccttcaaccaaaatatacaagtgaagaaaaaaaatttgtatttaaacatttgcacatttacttctacctgaagcatgtgaatgtcaacacttcatatttcataagtagtgggttttcataaaaatagtattgtaaatataaatcatcttaaagttagtttttatttcttcttgaatatttagcagttaagtacagttactagtcttttgttgctgtgccatatacctggtttttccataacagtttaatgagttgaataattccacatggaattatgtttattttcctcaggaagtggtatataagatacatattttaatcctcaaatggaaggatgtagttcctaaacgtaaagtcctgttaatgcagttatctgctgattttataatactataatatttgtgtatactttgaaaagccttaaaaaaagtttaaattctattttgatatagtaagcagggttttaattacacatgatagaattttaaagagacaaaattaaaatgtttaagtagaatgttttcatggttgatccagaagtcttctgttgaataagcagtaagtattcttccttataaaattttcatagttgttataaatcctgtttatttttggagctatctgataactaaataatcttccttatttcttcttttaatgaaatgtttgatttgtttctcaatcaatcaagatccagctccaggtcccacaggggctcttcttccccacgaaaaagatcttattcaagttcatcatcttctcctgagaggaacagaaagagaagtcgttctagatcttcttcatctggtgatcgcaaaaaaagacgaacaagatcacggtcacccgaaagacgccacaggtcatcatctggatcatcccattctggttcccgttcaagttcaaaaaagaaataatgtattaaaatttacatcttaaaaaaatccagtacagtgcatgaagcatatttttaaagaagttggtgtcttacttggtcagaagtgctaaatctgctagtagaggtgcatgcctttcattgcttttcaaaacaatacagctgtgtttatttgtgaagttaaaagtaaatagcattttaagccataatgtcccaaaatagatgttctgtcattcattatttacaaccatttgcttcatttaaaaccatttcagctataacaaagtactttgcttcctaatttaaacccatttttgtcatttccaaatacatcctgtccattggctaagacaggattacctaggcttgcctgaactttgggcatggaagaaagactggaaactagttggaaacaacatacttatggaaaagaaagtcagcctttttatgctgttaacagatgtcagagtgattctcaccaaaaaaagttaaactatgttgtaagcagccaactgtaaatgtctattttgaaattccctatgctaagggtgccttagaatcattgtgtctcttttatccagctttacttttttgctccacatttaatgcaaaagaatcttgtgatgtctacaaggagagaagtgggatatattttcctttctgacacataatttggggcaaaaaaagaaagtcttaagagtttatcttttctctgctgatacggttgcttgataaagacatctcaaaatgtttaccaatgttttaagaagctttgtgtgatattcttccaaatgtagttaccaaatataatatggtagaaaaggctaaatcatacttaatgagcaaattgaagtaagcttttaaagtatatttctcttttggtgaaaggccaatggagacattgtgaatttaagtgaacatttgcctcaagatgttaactataaacacactgcatacaattttcttctgaataacaaatgaatgcttattgctgcatgatgtaagcaaaagtcattaatttttccctattacatttgaaataagttatggcttaaaatgcttttggagtttatttctcaaaattaaaatctggtcacatgagctttagtttgttttctggtttaaaaaataaaaaggtttctcttaacagtatttccagtgacaatgcaaggtaagtatatcaaaggaaatcaacagttgtgcttgggggctttttgttatgggatattgatttcttgttttttttccgtaacattgtctgctgcaatttaaataaaaattacgacattttaagatatttcatagacaaaccaaacaaaaatatatgtttttactttaaagtgaatgtttttctcttcagctgatctaaaaatgaaagcaagatatcttatgtagaaatattttgataatatttttacagtgagctttcccatgtttttatgtcttaagtttctttgctgcgtttatgtaggttgcacaagaacttttactcacttgtaattgtgcctcagactttttgaaagtctaccttctaaattgccccgacgatctagattctacatgttaccattggtttattcttgtgctttctgtatttaaaactttggctgtactaagcaaatgcaaggttataatttagctaatagtagtttacagacaattctgatgattatgatttcatttggtttaactaagctgtactagttcatttcataaggaaatgatactgtagacaaatgtaaataaagcctgtgagtcaagcatcaagtggtgtttgttagaaataaactagagatttttaaactctgaaaaaa

SEQ ID NO: 57717 - DNA, 1197 bp, Homo sapiens
gggaagacagagcaacttagcagaataagaggaaaaccctctctcttacctcctgaatccaaacctttctggttcctgcaggctgcctgccatctccaatgttcccacactgccctgatgttaaccttcttcactggttgcctcctcccgtagggtgtcctgggccgggtctatgagacagtggtgatgttgatgctcctcactctgctggtgctaggtatggtgtgggtggcatcagccattgtggacaagaacaaggccaacagagagtcactctatgacttttgggagtactatctcccctacctctactcatgcatctccttccttggggttctgctgctcctggtgtgtactccactgggtctcgcccgcatgttctccgtcactgggaagctgctagtcaagccccggctgctggaagacctggaggagcagctgtactgctcagcctttgaggaggcagccctgacccgcaggatctgtaatcctacttcctgctggctgcctttagacatggagctgctacacagacaggtcctggctctgcagacacagagggtcctgctggagaagaggcggaaggcttcagcctggcaacggaacctgggctaccccctggctatgctgtgcttgctggtgctgacgggcctgtctgtgctcattgtggccatccacatcctggagctgctcatcgatgaggctgccatgccccgaggcatgcaggttgtactcatcttttacctaatggtgtcctcagttgtgggcttctatagctctccactcttccggagcctgcggcccagatggcacgacactgccatgacgcagataattgggaactgtggcctcagcatggggtagggctgggtgactgggtctagcccctgatcccaaatctgtttacacatcaatctgcctcactgctgttctgggccatccccatagccatgtttacatgatttgatgtgcaatagggtggggtaggggcagggaaaggactgggccagggcaggctcgggagatagattgtctcccttcgctctggcccagcagagcctaagcactgtgctatcctggaggggctttggaccacctgaaagaccaaggggatagggaggaggaggcttcagccatcagcaataaagttgatcccagggtttgctttgtttttttaaaaaaaaaaaaaaaaaaaaa

SEQ ID NO: 57718 - DNA, 1169 bp, Homo sapiens
ggaacaggggcagtgtgaggagctgctatggtgctgagtttcctggtagagccggccgagctgaggcggtcgcggccatgaaggtgggggagtggtactaaggatcaagtatactgttaaaagaaaacaaaaacccaagcatgaggaaggcgggtgccacgtctatgtgggcttcgtgctgtgggctgctgaatgaagtcatgggaactggagctgtcaggggccagcagtcagcatttgcaggagccaccggtccattcagatttacaccaaaccctgagttttccacctacccaccagcagctacggaagggcccaacatagtttgtaaagcctgtgggctttcattttcagtctttagaaagaagcatgtttgctgtgactgcaagaaggatttttgctccgtttgttcagtcttacaagaaaatctccgtagatgttctacttgtcacttattacaagagacagcatttcagcgccctcagttaatgcgactgaaggtgaaggacctgcggcagtatctcattctgagaaatatacccatagatacttgtcgtgagaaagaagacttggtggatctagtactgtgccatcatggactaggctctgaggacgacatggacacaagcagtctgaattcttcaaggtcccagacttctagcttttttacacgttcgtttttttcaaactatacagccccctctgctactatgtcttcgtttcagggagagcttatggatggagaccaaacatccagatctggagtgccggcacaggtacgagggggtaactaattacacccagggcccggcacgcttattcttggccgtatatggtggggcctttagtgcttgatgacttctgataaacttcaagtcatgtgctggagtgaagcttccacacccagctgaactctgcacttaaaggctgtcctgatgtatagtgtctgctgaggtgctaggtggctccaaagtctgctgtctgaagggtcccaaaatagctcatcagtctcttggccttagttaatttctctgtcttacacagttaagacactaactgttgaagaaatggctgtgaaaaagtaagcacatacacatttggtagtggttatgtggttagtgcacgtgttttcagtgaccacagaaaaccaatcagtagtgtaagttagg

SEQ ID NO: 57719 - DNA, 475 bp, Homo sapiens
  misc_feature (1)...(475): n = a,t,c or g
ctttgnntancantgattacgaatttaatacgactcactatagggaatttggccctcgaggccaagaattcggcacgaggagacggtaatttataaacaaaagagatttaattgactcacagctctgcatggctggggaggcctcaggaaatttacatttatggcggaaggcaaaggggaagcaggtggcaggatagaaaaagagtgaggaagtgcctcactgtaaaaccattaggtcttgtgagaactccctcactctcataagaacagcatgggggaccacccccatgacccagtcacctcccaccaggcccctcgcttgacacatggggattacaatttgaagtgagatctggggacaccgagccaaaccatatcactatgttgtattacattagtagtcctgtgagtttttaagtaatgaactttatttttgtcaactcacagtaacaaattaaaaatatcacttaactaa

SEQ ID NO: 57720 - DNA, 2035 bp, Homo sapiens
ttttttcagaacgtacacaagctttattgggcaacagcaacgagccacgctggcaaacaatgaaagtagagtcgctcagaaacacgaaagatcatatgtgtgtcatcacagcatcgagaatttaaatcatctggaagttcctgctaaattaaagcatactgtgccagagctcccctctaatcaaaaaacgctgtcctggtgaaaatttgcaatgaggattacagagagagagatcaaccaatgaggaaatcacagactcttacatgagtttacagttaaccccactgcaacaaaataataaattagccataatttgttttttttgcaaataccatgccccccacctgacccccacaaacacaacagtcactgacatggcccagctatattaacagactgcgcctcaaaccatgctgtggcggagaagacagattcacgggtaatgccgctttggcctgagaagatgcttcggagctccaggtggaggagctgctcacgctgcaggatgctttgcaggttcattcaaaaccaaatttttttccaagaagaactggacataattcatgggaatattttaagtatatataagtggcaaaaaagctgtacattaaaagaagggggagaaataaaatgtgttgtatttacaaagctctttgtatatttttttaaatgaaaacaaagctgggagtgatagaattttaatgcaatgaaaaccaaataattcttcaaaaaactttagatgacatcattctctcgctctttcacacacacacacaccccccacacacttcaaacatacagaaaaggttaaagataaaaatagctgataggtgtttaagtaggatggagcagaagaatgtacatgtcccatttgcaattttggcaaaggtttaaaatgctgccctaaaggcacgcacgcatgcccagcctaccccagtaaaaacaagacaaagtataaaaagaaaagtctggcggggggtgggggaggcattagcatatcaatttccaatgagcacaaaattcaaaatacattaaaaagtagcatggcttacattttcagcagagaagaaactgaggaaatgttcataaagagacaatgatttttaagatttactgtcacaaaaaaaaaagggtttcacttcaggggagtggaactgggatgggaattttacaatgctagttccagcacgtggtctaatggccccaggggctggaaaagggaggtctgctccaactttaagatgcgcccttgggatgccttccaagcagctggagttagtgccaccttgtctcacctggcaccacaggcaacacacatgtgcgcacgcatgctttcaaaatgaggatcaaaactgtcccacataagaaattactcaagatggaaaaacttagtctggtgattttcttagagaaaaaaaaagagagacaaaaaggaaggggtggggggagggggaagaaaccaaatagatcctgcttccccctgtcacacaaccatcatcaaaagacatatgaacaataataaaatagtaatagaagttcttactctggcatgaaataggctagtgttgtcatgagggcgcagggagctgtgagttttgctttcaggaaaagtgttcaaacagtgctgactgtgtacctcaaggccctctgacctcaaattaaattggctgtcaaagacttacggcccatggagctcccaggtgacagtgtcaatggcgctttatgtaagttctttccagattgatgaaccaagaaaaaggtcaactgaatccttatgcttaaggtttacaaactcaggagagtttcttgtatagtaactctagtttcttgtttgcttatttctttgtcttccccaccacaactaagatgacctccgagaagtacccaggcgcccctggggttctctgctgggcttacagtctgattgtgcaggtaaagatcgtgtcctctcaccggactgcatcctcctgcctttgcgtctccagtgtctgagaagcacaggtgtgtgcattcctaggtgttcagggaccgtcca

SEQ ID NO: 57721 - DNA, 1168 bp, Homo sapiens
ttttttttttcagagcagagggtttttctatttattacaaaagttgttacacaaatacagctgaccagaaggtctaaaaacagcccagactcttccaaccctcatgcatctgtagatagaaggagagctgtggtcttgctcacacacaggggagcccttcttagaagaactgcctgtcccttggaaggttcagagtcttgggtccagcagcagagaggagcccaacctgcgtggacaaccccttgaggcagcccttggtcacagctgctctgggtgggcagcaggtttaagtttcatagttcacatgttcccaccacacaagtcaaatcaaggcatgaaaataaaagggaaaaaggggaaggctggaaaagggagcctggaagaggttgcaggtaggggaaggagacacagtgggcttccgagaagctggcaatttcttgacttggatggagttacgtagtattcactttaaaattattctttaaattgtacgtacatgttatatacttttcagtatgcatatctttaaattttaaaaattaaaaaaagaggctaaaagtgaataaaagggcagatgatggaatagaaaagaaattaaagaggagagacgacgaaggaagaagatggcccaaggtggaaaacgagaaagtcctggaggtgataatgctggcctcagtttctcttcttctgtctggatactggttctacttctagataccggagcccgaccagcatacccaggatggagaaacttgccaccatcaggggtgccaggacgccaatcgtgggagctgcagttccatagacaaacaactcagagaggaaatgccccagggcaaggaggaaggtccagagtgtgatgtgatagagcgtcttgttgtgaatgtcaatggcacagaggcagcgaatcactgatgagagcagcgtccagatcccaaaggtccgagcttggaggccattcacaaggtttggcttgccagtgtagagcttttcatagagaaaagtgtggtctcggaagctctgcagcgtgttccccatggctatgatggacaccataaccagccaacttcttaacacattcaggaaacggctcatgactcccctcaaacgtgggagggctttttgcctggcgaccgggcccccagcacagcagtggcagcagcagccg

SEQ ID NO: 57722 - DNA, 1010 bp, Homo sapiens
  misc_feature (1)...(1010): n = a,t,c or g
ctgggattcaagatggaggcgctgagtcgagctgggcaggagatgagcctagcggccctgaagcaacacgacccctatatcaccagcatcgcagacctcacgggccaggtcgctctgtacaccttctgccccaaggccaaccagtgggagaagactgatatagaagggaccttattcgtatatcgaaggtcagcttccccttaccatggttttaccattgtgaatcgactaaatatgcacaatctagttgaaccagtgaataaagatttggaatttcaactccatgaaccatttcttctgtatagaaatgcaagcttgtcgatatatagtatctggttttatgacaagaatgactgtcaccgcatagcaaaactcatggctgatgtggtagaagaggagacacggcgatcccagcaagctgctcgggacaaacagagtcccagccaggccaatggctgcagcgaccacaggcccatcgacatcctggagatgctgagcagancaaggatgagtatgagaggtctgctccatctggacacaagcatctgacggtagaagagttatttggaacctctttgccaaaggaacaaccagcagttgtgggtctggattcagaagaaatggagaggttgccaggagatgcctcccagaaagagcccaattcattcctaccatttccctttgagcagttaggaggagcccctcaatcagaaaccctgggtgtcccttctgctgcccaccattcagtccagcctgaaatcaccaccccggtgctaatcactccagcctccatcacacagtccaatgaaaagcatgctccaacctacacaatcccgttgagccctgttctcagtcccactctgccagctgaagctcctactgcacaggttccccccagcttacctcgaaacagcaccatgatgcaggcagtgaagaccacgcctagacagaggtctccactcctgaaccagccagtccctgagctaagccatgccagtctgattgccaac

SEQ ID NO: 57723 - DNA, 601 bp, Homo sapiens
gctggtatgatcccaagtggtctgcagactgctgagtggggatgggatctgctctctgttgagagttggtaatcattggtttgaaatgtgatgaaaccactcaagccaatgaaggtgggtgtgtaggtggggagtactttgccataatattttaaaacattacctggttagagttctaagtggtacttatttttgtttggttaggggaaagcctgaataaaaacagaaatggacacataatatgcatattccatagtctttgggaggctggaatgtgcctgggatttgggtctaagtgtatgcgtaattcttacctcactaaagaatttgccttgtttttttccttttggtgagtgactaaaacgtctgggcttccctgtgtgcgtgctacagtaagcaagcagaggctgtgcaaaggtgtgagcaggatcacgtggaatctggaggatacatcttggcttgcaaactgcctctgtctcctgggtgggactgttctgtccttgcactgctgttctgtgttacctcttggggtgtaaggttttgcttacaggagacaaactttgggcgtagaatggaagccactgccagcctctgtgctgag

SEQ ID NO: 57724 - DNA, 1999 bp, Homo sapiens
  misc_feature (1)...(1999): n = a,t,c or g
caagacttacaaactgtcctttattcagagtgagactgcggaacattaataatttatcacgcggggagtccccagaagccctgtgcccacgaacccctgtgggcggaggagagaggcggggactccgggagcttcctgagagggccgtgtcttgggagcaaggtgacatattcagttcaggcacgcggaacatgaactcaggaagtggggagacagagagacccatcccccaactcccaggacgggggccaggccccctaaaaaggcacaatggcagggcaggtttggcagagtggttgagtgtcaggggtcgacaaaggacaccatgatgtagcgtgtgccccaggtcgttggcagcccctcgtggtagtgggtgaggcggccggggtgcaggagtgcccagcccttcctcggggaggagatcacacagtcgtagcgcaggaagcggcagcaacctccctcatagtccaggcccttgtggttgagggcaacgttgagggtgaaggtggatgagtcgtggtgtggccgcagagacggctgctcgtctggccggtagcgaaccacaaagttcatcaccgcccggcgccttggtgtggtaaccgggaaacaggctctcggtcatggggcccacatacgtccgcagcagctgcagccactggtcctcgtaccccacctgcttcatgtggatgtccacggtgggcacattctcgtagcctccagccagccttgaatcctcatgccggccgcctgaccactggccgtagtgctccatctctgccaccagctcatcacacatttgttctgacagcagtgggaaccagtacacgtccgggcatggctgctccacgattccttccccttccagggcccggctgtagttctcgtggatgtactgctccttccagtcgacggggttgtcgaagatctgccagaggtcggggtgcaggtgctccgtgtcgtatctggaagtggccaggagccggccaaattcatgctgattgctcagatggaggaagatgcccttgtctcgaaagctcttacagaaggccatgtccgggtctgtgtcactgcccgagaacacatccctctggggcagctccatccgcagggtatcaccccggatcacataggcctgggagatgtatggtacattccacacacccagcntgttccgctgcaccagctccacgtagtcctcggagcgggcgtagtactcatcggggtcagggcgccccagaagttggaccacagcttgccgtggcgggacagcatgggggcgatcaccttcctgttctcctcaatgaggatacgcagggtctgcaggttggtgaggacagcgtcggcgtccaggctgaagtagaactcacactcggggtcctgccgacacaggtccatggccatgtccctggcctcgcctgggctcagagcctcctccggccccacgagcttcacagctgagaagtggtcctggagctgcggcccangagtcagcgatgtggggttcatggaagacctcgttgttgtgcaggaaaagggtggaccctgtcggggggatagtccaggagtagcagccgctgcaggaagcggggcagaaacggagtaggctgttccacaaacacggccagaaacacccgggggggaggctgcccccccgggagtgtcctccggtcctggttgcagaagccacagcctccctcaggagtccagccattggggacgtagtttcccaggtagttgagctgcagcttagtgggaccgtttccatggaccacaatggggagcgtgtcgtaggccacgttccggatacgcacacggttccgatcaaactttaaaaccacttcatctaaagccccgttgaggttctgaaagatccgagacttatgatccagattaaggctgagtttctccctcagtcctgggtccaggtagagccgtgtgtagaacagctggtcgtcgtcatcatccttgtacttccactggcgcacgatttggtggatgg

SEQ ID NO: 57725 - DNA, 549 bp, Homo sapiens
gccattatatatttccataaaaatgcatgaaccatcccttagctaagtaaggattttgtaatgttctctcaataatgttgcttggcaaagttaatattttttgtatgctgatgaaatttagaaaagtccaatattgagcttgattgcaaacttagaaaaactcaagacttctccttttatgttcaaattgttgtatcagtatggtattttgcacctttaccttaaacaatattttctcctttaattattgattttgcaacattttgggaaagttggaattttaaataaatgaataattttctaaaccagaataccagttcaacagccaaataattctgtctttccatgctgtaattttaaagcatttaattttccaactttttgttcatactcaagtgtgtgaacttcctggctgggcacagtggctcatgcctgtaatcccagcactttgggaggctgaggacctcaagtggagacctcaagtggatcacttgaggtcaggagttgaagaccaacatgttcatggccaacatggcaaaaccctgtctt

SEQ ID NO: 57726 - DNA, 2033 bp, Homo sapiens
ttttttttttttaagtcagaaaatttacccattttattgatgcattgcaattgctctacattttaccatattatgtagaaaatactgaaaatacaagctactttgtaaaaccaaagacaaacattgaatccaaagataaactatgttttacacaatggacccttttcccatagttagtattaaattttaaatatctatttcttttgttaaaatgattattttacatactccctaagtacatctgcattacaaacatagctcagtaattctcagaaactatctgtttctagaggcttgttgtaaaagaaagcgcacaaccaaaaaaagggagaaagcaaaaaaagtttaaatccgcacacaataactagcatatcaaatacatttaataaagtaggaattccattgcaatatcaaggattcaaagcagaaatactaacattacatataatgtacatataatgtactgctacatgtagtgagattatttttcaagctgaattgaaaccacacattatataaagtttagcaacaaacaaccatgtagacatgctgcaccatctatcagttaaaaaaaaaaaaaatcaaaataggaagcaggctcgggccactcctgtcactgagaggcaatttcatttcctatcctaaaacaaaccatctcaactagtgaatttttgcataataatgctgaacaaaacacacattactgtgcttgcctggctaagggcagtcaagcttagcccctctagtggaggacaatggatgagcaatcacaaaagcaggctcagaatggccagaactgtttgaaatggagttcttattcctggggttggtatttcagctgagcactgaaaataatatcacctcctgggagctattaaaaactctggagtgaccaagtgtccctatgagcccagagtggctacactgaacccttctccgcttcttctctcacccggaaaggaagaagttggaaatgccaagttctgagagaggacttaaagccttaagctggtttgaggtcaggtcactgtgaccccaggccagctgctcactaaattcaccaggcttcctcccttcctgtcagggcccaacagggcctaaacccccgggacagaatcctaaagcccacagtgagccacatacatacacattccagccagacacaggtggatttttatgctggaaaatcggaaatgcccagtttgcagactaagactgaaaaatctctagtttttaaagccacacactgctaggcaagtgactaaggtaacaatacaagctcttggtattatccttttctgtggagtttagactcctatcttaagtggtatctgcttattggactggggtgcaggaatgggatttggttttctttcctgcatctcatttcttacaaaaacaacaaatcttgtcccttacagaaaaaagacaaggaacaaaaaatttgtcctttagaaactagacctgtgttccaacaagaaaatcagaatgtgcttggcaaaaaggagacacaaagatcacacatgttgaccagaaaactgtatgacactagtgacagaaattatacaaactgcttgggctatcttgaccaatatagtgctgaaaaacacaactcaataataatgattttaaaaaaataaagaaaacacaacatgttcctggtaggctgtacggactacctgccccatcttggaagcccttactccttacaatgaagaaactccaaatactttgacagctcctcggtgttcaacctggtacagagctggctgaccaggctccatgaaatctcccatctccatcctgcacctccttgacaccatctctatctacacagaaccagtcctaaaattatatctcaaatatatcattttcaattcagatggaacacacctgtattttaggattaatcttctttccccaaatcctttatgggcaggaatgtccccatccccagtaccttctacttgacccagatccatgcaggagctgagagtacaaggacaatttcacagcttgaagggccccaagac

SEQ ID NO: 57727 - DNA, 2749 bp, Homo sapiens
  misc_feature (1)...(2749): n = a,t,c or g
tctgacaaaggttggtctgtgtttattcagttttgggaagctaacagcaggaagaccacattcctcaaagcaagacaaaagccttttcatatttctcagtaaatactaataatagtataaattggctgaataatctgactgatggactatgctcacaaacagattttagacagaaaataatagttacttgccagaatgtttgggcatctgaaggctcccagttgaggacaaggttgaaaataactcagtaattgataactgtcactttcactcagaatcggatttccaccatctctgggaaaattaaagacttcacacccaaagcaaactgctggagtcatttaaggctcttcaaagcatactcaatgataacagcaatatagtagatccaatagctagtaggatgcaaaacaacaataaaaataataccccaaaacgaatcctgggccatccatgaatgccaatgcaggtaggaaaaaaaaaaatagaacatttctctattctcatcctactagaaaggtggaaatttccattttctaacctctaaaactgcttcactatctgacaataagacaaaagtaggaggctcttgagagttcatcttgacttttattacacactagacatatatgaactaatcagagatgtgcatgattctctgtactctttaaaatcacaggaaatataattccacctccccctttttttctgatattggagtagcatttcagattttggagattagcttagggcaaagtaaaagtcatggaaggcagtgtataaataacattaattatgaagctacttttcagaagctagtagtaacttgcttagtaataaccacaaggttgtacagcgttcacaatgctgggtattaatcagctacatattttgaacatctactgttactggataccaaagaaagtgagttatttaaggaatcttcccattcttgttataagcttcctatgatccagtaacttctccaaaggctttgcaaaaagcggtaagtccttgctttttgagaatttttttttgtgcacccaggaaatgtaaatgcaaccatcactgcttcttgtgcaggtgtgtgctttaacaatcagggctgccttttgggtatcaagagtatgagctattaagagtttcctaaaaatactgacctaactagtcagttgcctccaccttatatactattcaggcaaagtccttcggaaaagtaatactactgtaatccctagtcccaaaataaggtaggccatgaaatatattccaacccttctttgccacatacacccaaggaagaatttaaatttctgcccttgagtagttttgtgttaggcaggaggaaaaacatattcaattttgaggtaggtaatcaacaggaatgagaaaaatacaagacagtctaagatctaacctttgcctacctttctaggcttatgtcttaatactcccgaagtggcacaagctaggttatttctagttcttaacagactactgtgcttttgcacaatgctctcaagttcagcttaagcagtgctcctctggaagttcacacccctaactgaactgtcactcttctttattttcttctagaatcctgggattatctgaataataaatgccatcacattgtacttttaatacatacttcatctctttcacctagtgcactatgaattactacgaggaagaatctgtgtgcctatcttcctgtcttcagtgatgatatactgaaagaatggtgtaggagtagaaatattctatttaccagtgctaactctttttcacaaaaccaggcagagatctgctcatttttactctgtaaacttggaaaagttaatttattcaatctctattttgtcctaactagactgatcatcttattactaagatgaaggaatctattgcaagttacacgttactatcatcccctggtatgaaagagcgattttgaacctgaacatataaaagcattcaagatagtgtctggcacagtagaacagggattaacaagacactggacttgatcctcaaattatttaagccacagaagggattcagactctggccttttgattgaccaccttttaagattgcttgaaaagacaacgcccttcctattagcacagctgaagccaatccagaactaaacatcagcacacaaaaaataccaggatagatggaatcaaaagactctgaagccaaaaggaggctagggagagcaactgaacttagcaagctgaggacttcagtgtccatcatccgatcctgccctgtaacaacaggtctatatgatagagatattccatctnnnnnnnnnnnnnnnnnnnnnnnnnnnnntaacacagaacagaaaaccaaatacatgttctcatttagaagtaggagctaaatgatgannaactcaaggacacaaagannnnnnnnnnnnnnnnnnnnnnnnnnnnnnnnnnnnnnnnnnnnnnnnnnnnnnnnnnnnnnnnnnnnnnnnnnnnnnnnnnnnnnnnnnnnnnnnnnnnnncaaaataatctgtacaacaaaaccacttgacatgagtttacctatataacaacctgcacatgtacccctgaacctaaaagttaaaaaaataaaagggatagtctatctgatgcttaaattgatctttaataaccttctgcatcccaccaccccaccaaaaccacaagagaaatatctcaatattctgtgggcttaaaaccacctacactgccccttgggttagag

SEQ ID NO: 57728 - DNA, 2229 bp, Homo sapiens
gcgtccgagctccttcaccagcttggtggtgggcgtgttcgtggtctacgtggtgcacacctgctgggtcatgtacggcatcgtctacacccgcccgtgctccggcgacgccaactgcatccagccctacctggcgcggcggcccaagctgcagctgagcgtgtacaccacgacgaggtcccacctgggtgctgagaacaacatcgacctggtcttgaatgtggaagactttgatgtggagtccaaatttgaaaggacagttaatgtttctgtaccaaagaaaacgagaaacaatgggacgctgtatgcctacatcttcctccatcacgctggggtcctgccgtggcacgacgggaagcaggtgcacctgggtcagtcctctgaccacctacatgggtccccaagccagaagaaatcaacctgctcaccggggagtctgatacacagcagatcgaggcggagaagaagccgacgagtgccctggatgagccagtgtcccactggcgaccgcggctggcgctgaacgtgatggcggacaactttgtctttgacgggtcctccctgcctgccgatgtgcatcggtacatgaagatgatccagctggggaaaaccgtgcattacctgcccatcctgttcatcgaccagctcagcaaccgcgtgaaggacctgatggtcataaaccgctccaccaccgagctgcccctcaccgtgtcctacgacaaggtctcactggggcggctgcgcttctggatccacatgcaggacgccgtgtactccctgcagcagttcgggttttcagagaaagatgctgatgaggtgaaaggaatttttgtagataccaacttatacttcctggcgctgaccttctttgtcgcagcgttccatcttctctttgatttcctggcctttaaaaatgacatcagtttctggaagaagaagaagagcatgatcggcatgtccaccaaggcagtgcctctggcgctgcttcagcaccgtggtcatctttctgttcctgctggacgagcagacgagcctgctggtgctggtcccggcgggtgttggagccgccattgagctgtggaaagtgaagaaggcattgaagatgactattttttggagaggcctgatgcccgaatttcagtttggcacttacagcgaatctgagaggaaaaccgaggagtacgatactcaggccatgaagtacttgtcatacctgctgtaccctctctgtgtcgggggtgctgtctattcactcctgaatatcaaatataagagctggtactcctggttaatcaacagcttcgtcaacggggtctatgcctttggtttcctcttcatgctgccccagctctttgtgaactacaagttgaagtcagtggcacatctgccctggaaggccttcacctacaaggctttcaacaccttcattgatgacgtctttgccttcatcatcaccatgcccacgtctcaccggctggcctgcttccgggacgacgtggtgtttctggtctacctgtaccagcggtggctttatcctgtggataaacgcagagtgaacgagtttggggagtcctacgaggagaaggccacgcgggcgccccacacggactgaaggccgcccgggctgccgccagccaagtgcaacttgaattgtcaatgagtatttttggaagcatttggaggaattcctagacattgcgttttctgtgttgccaaaatcccttcggacatttctcagacatctcccaagttcccatcacgtcagatttggagctggtagcgcttacgatgcccccacgtgtgaacatctgtcttggtcacagagctgggtgctgccggtcaccttgagctgtggtggctcccggcacacgagtgtccggggttcggccatgtcctcacgcgggcaggggtgggagccctcacaggcaagggggctgttggatttccatttcaggtggttttctaagtgctccttatgtgaatttcaaacacgtatggaattcattccgcatggactctgggatcaaaggctctttcctcttttgtttgagagttggttgttttaaagcttaatgtatgtttctattttaaaataaatttttctggctgtggcatttttcttgacctggtataatgaaagtatttcagatatttgagtttaacccttttccagaaagtaatacatgatatggatttatttatgcattaaaagagcaaatttaaagagca

SEQ ID NO: 57729 - DNA, 545 bp, Homo sapiens
  misc_feature (1)...(545): n = a,t,c or g
tnnnnnttggaaaatctgaaatccnttatgacatgacnacgaatttaatacgactcactatagggaatttggccctcgaggccaagaattcggcacgaggcttcaaccgctggttcctgacgggcatgactgtggccggcgtggttctgctgggctcactcttcagtcggaaatgaccagacactgaccatccactctaccctcccacccccttctctgctccaccacatcctccgttcagccgccattgccaccaggagaaccactacatgcagcccatgcccacctgcccatcacagggttgggcccagatctggtcccttgcagctagttttctagaatttatcacacttctgtgagacccccacacctcagttcccttggcctcagaattcacaaaatttccacaaaatctgtccaaaggaggctggcaggtatggaagggtttgtggctgggggcaggagggccctacctgattggtgcaacccttaccccttagcctcctgaaaatgnttttctgccagggagcttgaaaggtttcaga

SEQ ID NO: 57730 - DNA, 1436 bp, Homo sapiens
  misc_feature (1)...(1436): n = a,t,c or g
tccatctttaaggaagaagaatgtttgatggagaaaatttgtggccaatgaagtctgaaatacttcctgtcatctgcccctttccagaaaaacttggccgacccttggtctacagcacgggttctcagtcgggcgacgatttggctgtctaggcgtnnnnnnnnnnnnnnnnnnnnnnnnnnnnnnagttagaatggggggaagatactcctgacttgtaataagaagacatcagagatgctgctaagtcggctccagcacacaggagccccccacaacgaagagttagtgcccccaaacgtcactgttgctgaggttgaaaataatcatgcagtcattcctcaattactgcctccagcaattcctccatttttatgaatcttgtgagcacttacgctaggagaaatttcttttacaaaacttttaaaatacagttagtgctgataattcctatgtggaaatgattccagccatggtcccctcacttgagcatgtgaatattctcacggagagaagccccagcgagattttccggtgaatacgggattgcacttactctttcatcacggaaacagacccccgagagaagccccaacgagattttccggtgaatacgggactgcacgtactctctcatcatgaaaacagagccccgttcataaatttttcatctttatttttaaggttatactcctctaaataacccttaagcctcatcaagaaaggtttgtttatagtatttttactatagcttcatccttgataacgtcctaatttccttctggacaacctccttgaccaatggcatattgagatctatgtgacatgaggatatttctcagtaccactttgttactggtacctgatgcacacggattgcgaccagagcatgatgcctccatcaagtggtaatatgtttgcagcctgctgtccagccaagagtgacagatacttctagtgacttccccggtatccactctcatcttcttccaatatcaagagaatccaggttctgtcagattagtaaggtgtgctaatctaaattttaaaaaatctcttacaggttttcttgcagctggtaccatccatgtctcacagccctggccactgacagatcagcagatgtcaccacatgggcttctgagaaagctcttgaatggggatcgttcttaaacatgaattcctccctgtatgttttgttctttgctttacttttcaccttgcaaagagatccagtacctagtattggaagatccaccttaacgaccgtgcatatgaaaaccacagtctaaggaagtgactgcagaaagctcacagcgaccctggcctcccctgtggcctctttgagtgtctgcagcagccctggacttccagacttctatcacatgagaaaaaataaaactgattattggtttaagctgcaaaaaaaaaaaaaa

SEQ ID NO: 57731 - DNA, 422 bp, Homo sapiens; identical to SEQ ID NO: 24153

SEQ ID NO: 57732 - DNA, 1745 bp, Homo sapiens
tttttttttttttttaacacctcaaactcccctcagccccaatatcctggcatctttagtgagtcaggacaatcctaacctagaagcatatatgcctgggagcttcctggcctcaaaggaataaatcttttcacagcattcacaggactgaaaaataatataaataggattcctacagtaaacaagtattgtttctgtttcaaaaccatcctgcaagcataacaatcagctggtcctaaagcctgtaatacgtacacaggtcacagggcagacaggcaggcaggaaaagggattttccccagtgcaggctcctttggttctgcctcagaggcacttagaagtctaggccctgggttaacagcaaccccagagtctgcttggatatggttctagttgtatgcttcgtaagtggaacacccaaaataccataaaggtagaggagagtgaacacataacccacttgcaaataagaattaccttgcaagattcctatttttttatcttaacagtctatgccgtatgaacattttattcctataatataacttttaatataaaaataggtcatccttatgactcctaaaccatttggtaagtaaaactgatgcttcaagaagatgccaggtttttaagtttgcagttttacattcccctagtacatccctgcttactcgggagcacaaagcttggttgtaagaaattgtgatttggaagtagagaaaagcaaggaagtccaacctcaggagtgtctctgttactaagaggagagtgagatccagggtgtgggagatgatctgaaggtctatgggtggggagtgccacaggaagaagggttctggtcggagttaaaggaggatatatctatatgctgggagatgagctgaattcagaacacatggaatgggaacaattctccccatactgcgtttaagccaaattaggctaaaatgggggtgggactagcaaaaacctacaatggaaattcccatttggtaatatacattccagcccttcacgttgtgacaagcccataaaacctgcagaattcacccaaataattctggttctattagatcctttactgactattttggaaattcaagcaatttgaattcagaaatactgatttcaacttttaatcagacttctttggtccttttttttccccctaaggtcatttccgttccacctcttcaatcatttttttcatttccacagcactgaattatgaatatcaagtcctggataacttcatatactaaaaatatctcttcctcatctttaactctttctccaacacctttttccagtcatccatcttaattcatggcaccacaattttcacaaatgtagaactggacttttagggactgtccacaagagttaatttggccctaccttgctctcatttatttcatgcttcaatatgaacaaaattgggtttttgttaataggcagggagaaaactctgacttcccttcaagattattccagatccttcctaacaaagcgatactgtttggtaatacaatattatgggggctggctttcctgagtaagttcaaagcagccattgagggattacctgaaggacctttcttaattgctcctggtggatcaaaggggctcttttccttgacctaccacaaccaggggatgagaagcacacagtaagcataaaactggtcatcccttggagagatatgtgcctgctgtggatctggggacacatctggtggaagtac

SEQ ID NO: 57733 - DNA, 326 bp, Homo sapiens; identical to SEQ ID NO: 14506

SEQ ID NO: 57734 - DNA, 901 bp, Homo sapiens
aaatgtgcaacaggctattttcttgaatgaatggattcataataagaacaggacttcaccagcttccaagggaccctccccacctctcggatatattctgaagcctaaatttcacctgcttatctaggatcctaggcccaggccttctgccacaccaagccacaccaagctcagcagtactcacaggcctttaatctataactgcctggccacaccatcacttccccaggatggtggggagggatgaagatgtatagccaggtaggccacaccaactctgagtccaagagggaaggactggggtcaggctggggcttgggcaggggactcccggccccaggcgatgagggagttgctggcttgggcaagctcggcgatggacacccggccccgctgtcggatgaagttggccacggcggccagttcctctggggttatgtagatgaacttgccccggtcgtcaatcacacctgttatagtcccctcagccagcaggtcctggatgcgatttatggtgtcctgagtgcgtaggcccacctgggaagccaggtcttccaagagcacaaccttggactgcttgatgtagttgatgaactctgtcaggaagctctgggactgttcctcagtcatggtctctcctacgccttcctcctccaccacaaaggcctccttcagtttcaggtactcctcatgctcccgctgggcctgctcctcgcgggccttcctctcctcctcctccttctgctcctcctccaggcgaagccgctcctcctccttcttccactcagcttcgcgctgggactcgagtcgtttccgctcctcacgttcagcctcctctgcctcacgctgggcctttcgcgcttgtttctcctccagcttccccagtttcttagctccaatc

SEQ ID NO: 57735 - DNA, 1409 bp, Homo sapiens
  misc_feature (1)...(1409): n = a,t,c or g
tatgactgattacgaatttaatacgactcactatagggaatttggccctcgaggccaagaattcggcacgaggactgatattgattttaaaagtcacttgcccctgaatctaagaaagtggtatttatatctgtcatttcttttttgtctgagtagaagtgactggacaaccccaaaatgcatcttttgtcaagaggaaccggtggtggctacttcctctgatagctgctcttgcctctgggagtttttggttctttagtactcctgaggtagaaaccactgctgttcaagagttccagaaccagatgaatcaacttaagaataagtaccaaggtcaagatgagaagctgtggaaaaggagccaaacattcctggaaaaacatcttaatagctcccatcctcggtctcagcctgctatcttactgctcactgctgcccgagatgctgaagaagcacttaggtgtctgagtgaacaaattgctgatgcctattcttcttttcgtagtgtccgtgccatccggattgatgggacagataaagctactcaagacagtgatactgtcaaactagaggtagaccaagaactgagcaatggatttaagaatggccagaatgcagctgtggtacaccgctttgagtcatttcccgcaggctctactttgatcttctacaaatattgtgaccatgaaaacgcagccttcaaagatgtagccttagtcctgactgtcttattggaggaagagacacttggaacaagtctaggcctaaaggaagttgaagaaaaagtaagagattttcttaaagtcaagttcaccaattctaacacacccaactcctacaatcatatggacccagacaaactgaatggcctctggagccgtatttctcacttagttctgcctgtgcaacctgaaaatgccctgaaaaggggcatctgcttataagaagtgagagagaagaaaaatcatgtcccaagttctgagaattgttcacactttctaaccagagacagaattcagagctctttttgaaagaactagtttctttttaaagaagttaagtgcttacataaacatggaacatataaatcattcattcaacctaattatctgtgatatgagagaatcatttcagtttccattgagagctctgttaaaggtatcttaggagtgcagattatatgcagttccttagagaaatctgttttgattctgggctgagttattacagttatggtatgaccagtgagagcgatttgtgtcctttcttatgaaccttcctgattttttaacttagatttctcactaagtttcctgagttattagtaagattggctccctaaatgtaaccagggatttttccattatggttcccttttataaccattttaggtgtggagttccnttagc

SEQ ID NO: 57736 - DNA, 2678 bp, Homo sapiens
atgctagaacccagcgcaggagtaaattgaaagaatcacttgattctggaaaccaaaatggaggaaatgatgataagactaagaatgctgagaggaactatttaaatgttttacctggggaattttatattacacggcattctaatctctcagaaatccatgttgctttccatctctgtgtggatgaccatgtgaaatcgggaaacatcactgctcgtgatcctgccattatgggactccgaaatatactcaaagtttgctgtacccatgacatcacaacaataagcattcctctcttgctggtacatgatatgtcagaggaaatgactataccctggtgcttaaggagagcggaacttgtgttccaagtgtgtcaaaggtttcatgatggaaatggcttcatgggatggaggaatttctaggacagtgcaatttctagtaccacagagtatttctgaagaaatgttttatcaacttagtaacatgcttccccagatcttccgagtatcatcaacactcactctgacatccaagcactaaacccttatagattgacatgctggcagaagatgattgttaaactctccaggaacttgtgctatgctgggaatctgtcaagcaaaagatgcccagaaagagaacttgcagctcaatccacaaatcaagatacatgtgtgtgaaaccattccaaaaatttatatactgcacaaactggtgatcaacccctaacttaaacacttaaagtctctttatgaatttctctttttttcttctctgtgttacctgtgaatattagtaatctaaaactttttatttatcacacatggacacttgggaaaggaaacttgattatatttacatggaggcatttgactttttcaagaggcttgactcgtctcaggtgcaatccttaattaaacatacaaacaaaattttccttttactttctttgccaaaacaaaatgtaaaagcactgaaatatacattgcaagtacaaatttcctgtgaaaatctttttatagaaacacaaatgtataagacaaatgtgcttgttcttttaaattctcctgtttcagaatctctttttaatctactcctaaggatgtacaagttagagtcagaagacgttttggattttttccctctctctcatcctcccgctgtgcccttgcacttgcatattaataacatttcatggactgggaaatagtgttcttttttgcaagcttgatgtcaagttagtctaaaccagcacctggcagtattttagtgctcatcaacattgtgacaatcacacaaggaagatcatttctacatttctgtcctccctgcgttctcagcttgcttaaccattcctctacctcttgcatttttttgcggataaatgtatccccatttctgcttctgctgtttcccctccttttccattgtttttccttatggtactactttctcaggtgctacatatcatatatttgtcccatctataacatatttaaatgctataagtagtaactccattaaacaaaggcatttacaaaagcacacaggtgtttagaaaagcaatagtttcatcaattccaagttatgtgggatattgtaactgggccacaagaatgaaatgggaggggcatttgggtgtcataagatggcatgtcttgatgacaagaaacaaaacgcccttcattaatatgcctcagtgtaataactattatagaaactgttggcaagcagagtgctttcctataacagaatgtgtcttaattttctactcgagggaaaggtttgtccagggtaacaacactaaaggacaaccctaaggaacacccactccaggcagtatgtccattagacactaaaactctgccaaattatttgttcagggagcctgggcgatttctggccaaggaagggcagggtgtttttggccctttaggaggcctattacagtttcccttgggaggaaattcgtcttttcagggcaccactgttaatcactgagactgattctaatgcaaagcagggaagacagaggcagaaaccaggagagtggtagatcagtgcagcccagatatcggaatggaggagcaaagtttcattcacggatgtttgttgaatgctgctgcccaactcttcctttgtcacctctaggctattccactaagttacttataaactggtggctttaactgagggctgtgtaaaggtactatttggcatgtgaagtcaggataaatttatcgaatgtccgttttccacatgcaactgtgttaccagaaagtaagtaaaattggaagaatccacgttttatgggtgttcccccactgatggaaacacacaaacacccaagcctaataataaatatatagccttaaaaagcctaattatatgccacctgaaaatggtgggaattttagtgatgccagtaattgcaggagtcctggagttttgtatttggacccaagaattatgagatgaggatcctttttcctgagtgttcctaaagggcttccttgagggggagtggtttaaagcacttcatgaatgatgtgaagaaggtaccttgggctgagacagcattctaggtacagatggcactctgttcaaccaactgtggatggaaaatattctgaaaaaaaaatacaataaaaattttaaaaatacaatataaaaaaaaa

SEQ ID NO: 57737 - DNA, 2000 bp, Homo sapiens
attcggaacgagggcggctgcggccagtctgcagcatggcgtacccggggcatcctggcgccggcgggggtactacccaggcgggtatggaggggctcccggaggccctgcttttcccggacaaactcaggatccgctgtatggttactttgctgctgtagctggacaggatgggcagatagatgctgatgaattgcagagatgtctgacacagtctgggcattgctggaggatacaaaccttttaacctggagacttgccggcttatggtttcaatgctggatagagatatgtctggcacaatgggtttcaatgaatttaaagaactctgggctgtactgaatggctggagacaacactttatcagttttgacactgacaggagtggaacagtagacccacaagaattgcagaaggccctgacaacaatgggatttaggttgagtccccaggctgtgaattcaattgcaaaacgatacagcaccaatggaaagatcaccttcgacgactacatcgcctgctgcgtcaaactgagggctcttacagacagctttcgaagacgggatactgctcagcaaggtgttgtgaatttcccatatgatgatttcattcaatgtgtcatgagtgtttaaatcaagaggaagctgcatgaatgtaatcaacattccaactggagctctcctttgcttgtcctctttgccttcggtaatatgtataaacttacatcacgactttctcttaacagctgttgtaaagtttattactttatgtacaactgaagttttgttttagttttgataataaattctttggaactttaataagatctagtctgttacaccatttagaactttcctgagccattatcagtcatgccttattttcttgctaaaactctatgtaaatttaagtatgcaaaatgtttaagtcacattatttatttttcattgtgagacactaaaaactgttaatcagactacagctgttatctttcctctcctacaaagaatactccacacataaaaacttaggtaaatgacatagacgcacttgggtgaaataaaacaacaaaaaaggtaatccagtaatccacgtcaggattcaccttagaagtttagcacacgcccttcaaaacctgttgaataatttgattggcaaatactatctgtcaccaagtccctttttgtcatctatttaaacctttgttaactctccttaaaaatcttgtacattataagcttaactatataaaaagaaaattgatagaaaaagactaagggaatatatggaaatattaacaatgtttattttggatgaatggaattctagatgactttaattttctttatatcagtatttttcagattttctatatgctttccttttaaaatcagattttagtttttaaaatactgatacatccattttgatataccatgtattcacactttaaaaaatacacatagcagagtatcggaaagtatgtaccaaaacattgatctggctaccactgggagtcaggatcatgagttcatcttcttccttcttactgcttttccaaacattctccagtaagcaggtactacatttataatggaaggaattttttaaaaaattttaagctgtacactttcaagtaagatctgaattctaatgctggcttgtgcctcttactatgtggtttggtcattatagataatgcccagtttcagtttccccatctttgaaaaggagataatatgttatctcttgggagtagttctgaatatgaagtgtgttgatacaagaagcactgacaatgtttctgtttcttaaatttaaaactggcctggtttgccttttttatcaagagagcttaacagataaaaaatgaaattagtctattttctacttgccagcagagtatctgtcttattttaggatgcagtgtgaaacttaccattcaactgaacaactagttgtcaactaatgaaaataaaacattttctctaagcaaaaaa

SEQ ID NO: 57738 - DNA, 2059 bp, Homo sapiens
gcggcacgagttttctcaagagtcaggtgttgccgagatgaaaaacttttttcagtctcggagttttcaataactgataatgaatggttctatattaaaatagcaacttctgaactttctaattcaggacatggaaaaggaaatcagtaatgccctaggccatggcccacaggatgaaatcctaagtagtgctttcaaattgcgaattactcgaggagatattcagacattaaagaactatcactggctcaatgatgaagtcattaatttttacatgaatcttctggtggaaagaaataaaaagcaaggctatccagcacttcatgtattcagtactttcttctatcctaaattaaagtctgggggttaccaagcagtgaaacgatggaccaaaggggtaaatctctttgaacaagaaattattctggtgcctattcatcggaaggtacattggagcctggtggtgattgacctaagaaaaaagtgtcttaaatatctggattctatgggacaaaagggccacaggatctgtgagattctccttcagtatttacaggatgaaagtaagaccaaaagaaatagtgatctgaatcttttagagtggacccatcacagcatgaaaccacacgagattcctcaacagctgaatgggagtgattgtggaatgtttacttgtaaatatgcagattatatttctagggacaaacctatcacatttactcagcaccagatgcctctcttccggaagaagatggtgtgggaaatccttcatcagcagttgctgtgagaaaactttgcctggtccctctagctgctggtggttctttcacagacatttccatatacctcatgcattgtgggttaaaaagtccctgcatcacttctgttctcacaggtactgagctgtcaaaagtgcatgaaggcctctcactgtactctagtcctgacttggggtgcagagggctgcttgcaatcctgtttgtaaaggctgtgtctgctcagagctttggggcttgttcaacccacacaagaacaaacgctaactaatattttttttaagagattcttttccctatgaatgtgggaaatgcaggatttattctgtgaattgtttgtttctgtgtgtttgttcagcgtattcattcactcactcgtttgcaaacataatgggcagtggtcatttactgctgctcttttacagttagctctaaattacttgtttgaactatttatttctgaaaggaatgttactcaagctgccactccctgctgaagagcaggagggaactctcactgggggcggaaggaagtggagctggagcagtaactgccaacatgaagctggagggtttgggattttttttgtttttgtttttttgaggctcaaaaaatgctgggagaaatgaaaatgctgtgggatagggctcctgttgcctttgcagaggaagtctgacactacagcgttggcacagtgccgtgaacagtggaactgtgcccaagggactctgattatccaagcatcttccgaagagtgttgtggtcaccttaaagagacttccccttctggaaatgtggtgacttggcttagtcttcaaactggattcatggatttgaagtaactgtaaaccctaaatcttcattttcatcccagatctggttgagtataaacctcagaattgtaggggctggcctgagctgtttatttcaaaagatactattcaatttaaagctatttttcctcagagtttttgttttctatatattaagtctaaattaagttttctactcattaagactaacatctccccactccatccccactgaaatttgtggaagaaaatttagtacttggctctgaggttgccagttatacaataatctattttgcatatgaaagtttgtatttaacttttttgttcattaaaaaccttactgatatggttataacttcagacagtttagagttggtcagaacatattttgcaagatctagtgcctagtgttgcttttctgatgtaataaaaggtggtctggcagaacctaaaaaaaaaaaaaaaaa

SEQ ID NO: 57739 - DNA, 1793 bp, Homo sapiens
ggaaagggaaacaaccacataaacgcaagaaaaaatccaggaaaaagtctctcaaaaaacctgctttattcttagaggcagaaagtaacacttcacattcagatgattcagcatccagcagttctgaggaaagtgaggaaagagacactaagaaaaccaaaaggaaaaagagagagaaaaaagcccatacctctgtagccaacaatgaaatacaggagaggacaaacaaacgcacaaattggaaagtagctacagatgaaaggtctgctgagagctcagaggatgactaaatgggaaacacttttgttttccacatgactgtgggatatttacagttcttactccttgtggttttgccagtgactcttgttcagcacggggcctgaggtcagagctgtcttgtgccatctgtatgttctgacagacgtcttgtcttctattttggcgttaagcttgatccccttttcttgttaaaagggaatctggtattttgttatgaaggtttcttgaagagattatttttttttgcaattaattacgtttagtgtagagtgcatatacagcaaattaaaggacccagaaagctggatccaatagtgacctgggtacaccaatcggaatattgaatttggggaagtcaagggctgggatccaagaggtggattggaactaatgccatgtaggatggtatgacaaggcaacactgtattgctctctgtttatatagcaggtgtcacaactaacttgtctttagccttggtgctttgatccttctatattttgaccccacaggtgtggtccggtttacttaatcaggacatgggcctaagaacaaaccttttcccttcatgataacatccatagacaacttattagaagggactagagtttttgcaaatttccctgctggatggggcctatagctatacttagtatatgcctaaacatggtaattggatagtaaatggttttctagttccattgctgtatatttgcctaaatggacttgtgttcaaattatttcttcaattgtcatagataatcctgtaccaaatggggaagaattaggaaataatcatgttgtctaatggtactctggattcagggcagcaactgccatttaaatgttgtcttgttcatttctaaatctgttcatgaagtttaggttttccctgaaactaagttgaattatttccaaaatgaaacaggcttctcagggacatatccacttcttcccagtctgcctttggattaaagcaccaagcagagaccacattaattccctttgctatactgtgatccttagtatgttaattcttaagaaaccaacatatcactgaaagaaggctggcagaacgcaagtgcattttttcactgtgggaagaaagatcaagtgacgtattattttttcctggttgtcacttaatgggctgagtaaaaagcttgaaaactcagactttcggtcttggttctgccactcattggttatgaggaggcccagagcaggtaagttcaccttcctggccttactttcctgatgtgtaatacggaattacttcacagtagcatgacagtataagacaccagcagtagatacaactatgatgacattccatgagttggtatttttagttctaactgctaaatttgttctctttacgggacagatttctaataaagtgcttggtcttaaaatacatggttggacagaggtgccctatcccttaactatgagcaggtgctaccttttgggatatttattttaaattttaatactttggtactcaattgtc

SEQ ID NO: 57740 - DNA, 1886 bp, Homo sapiens
gagacgcggggagagatttaatttacatagcagccacttggggtccagtcagagctggggcagtgggggaatctataaccccagaggtaccccccagacccccacccccgggagaccagtcctcaccaacccttggatgggctcccaaggttgtgcagaagatgctccagtcaaaaggatagagacatttgggaataaggctgtccccaagttggggggaagtccacggcctggagtggtggcctacatggtggcccaggggtctgagagaccagtccatgtcctggggcgagtcctcagcctggtggccctagaggaagccttcgcggcggaactgttcctggaggagggcgcggtactggtcaaatcctccttccacacgggtgacgccgcctccttcgcatacccacaactcccggcacaccagcctgataaagcgctcatcgtgggacaccagaatcacaccacccctgaaattgttgagggcacggcccagagcctcaatggtctccatgtccaggtggtttgtgggttcatccagaatgtagaagttggggcagggcatagtcatctgagcaaaggccactcggctcttctggcccccagacaggctggcaagaggacgcatggcccagttctccggagatgccataccgacccagctggtgacggtactcctcctcaggccgccccaggaaacttgcgtgcccagcagttccacaagcactgacgtttaggtccagctgctccacatggtgctggctgaaatagccaatcttcagattcctgtgagcgtgtctgatgccccgaacaggtgccaggtcccccaaaagcagcttcagcatggtagacttcccagccccattctctccaaccacacagatgcgagactcgagatcagcagacacagagaggcgactgaagatgacgtgcttcggatcgtagtagaaatccacctcatctagctgcagaattggcggcgagaacttctcaaacccatcagggaacttcattacgacctctgattccttgtccacaggcttcagctcaggcagcttctccagcatcttgagtttactctgcacttgagaggccctgttggcattgtagcgaaaccggtcaatgaaaacctggatgtgctggcgatactgctgctgcgcctcatattcacgctgctggttgagcagccgctcctgcttactcttgatgaaggtctcaaagtctccccggtaaccatctagccgctggctgtgcaggtggatgatgtctgtggcgatggcattcaagaagttgcggtcgtgggagacgactaggatggtggagggccacgtctgcaggtaattctccagccacaggatggccctgacatccagcatgtttgtaggttcatctaacagcagaagatctggcctagcaaagagggcccgggccagggccagcctcatcctccagccacctgagaactcccgggtgggctgctgctgcattttaggggtaaagccaagcccagcgagaatgactgatgccctggcaggtgccttgtcagcctcaatctcctccagtttggcatagatttctggccagctctgcagcttcagagccctccgccctgccagcagcaatctgggcagtgagctcccgctccctccgtagcaaatcctctcgcacactgtcactctccagcacaactctgcagggcaggagtgtcatctccagcaacctcttgctcaacgtgcagcagggaaatgtgggctggaacccgcagactccgggtggccagcatcttcagtaacgttgtcttccccaacccattccgccccaccaagccgtaacggcggccccatgccaggttcacatccgctccagccagcagtactctaccgcgg

SEQ ID NO: 57741 - DNA, 1147 bp, Homo sapiens
tttttttttttttcagtagaaactgtacttcaaatattgaatttttattcaaaattctttataactttattacaatatagattttgtgttggatagttttgcccactgtaggctaatgtaagtgttctgagcatgtttaaggcaggctaggctaagctatgatgtttggtaggttaggtatattaaatacatttttgacttatgatcatattttcaacttatgatcatattttcaacttatgatgggtttatcaggatgcaaacccatcacataaatggaggggtgtctataaaacattgttagacctataattttgctgttgattattgggaggtggtatggcacagtggttaggggcagaggccttggagttggactacatgggttcaaatcccagcttggctgttttctgtgcagttctaatccagttctgccacaaacttgttgagtggccttaggtgagtcacataagcactctagatatagcttccttattgcaaaatgtctcaagctaagtttagtattctccctccaccccgaccctgcttctgttcctcttcccaggctgccccatctcagtaaatggcccatcagccacccagaaggtcaagccagattcatccttcacatcgaatctaccttctaaacacatccacaatccattcccctttctccatccccactggtccccgctccagtccatgccatcaagacttttcatttgcactttgccgcagagctgttaaaatacttttacaaactacaaatttgattgaagtcactctgaaaaggtgaaatgtggcccttgacctctgcatggtttggtcctggtctgtctctctccactcagttcaggccatcctctcagtgctccagacaagctagccttgcattcctccagctagaaggagccccagggcctttgcacaactcctccctctccctggaatgctcttccccaattgtcttagcttgatggctcacccttcaggtctaggctcaaatgtcagtccttcagggaagtattttctgatccttcaaagaggtcaggtcctggtgacctccttcagagcacctgtcaccacatcactggtgcatgtctgcctccttcccaactactgtttcaagagaggccccttccctgtt

SEQ ID NO: 57742 - DNA, 1438 bp, Homo sapiens
  misc_feature (1)...(1438): n = a,t,c or g
atctgggagcagcgaattggagaaagtgggaagtatatttttacaactaaagttggtggttaagaaaggaaatcaaaccgaaaatgtgtatataggtgagtctgaattcccacttgagcctcttcaccttttttgtgttctctgcaatcaggggctggtgacgctcaccacaaatcatgtcttctataaaaacagtcattgccagctgtggagtagctgttccacttcctttcctctcctgaaagatggcacaaggagtgttagaaagccactggcaggttggagcccccacagctgaagagccgttttgaaaaagggaaagggtgggaacggaatggctgggattgaagaagaaggttgacgagcaagaagctcttgccatagaagtcacattgaacatcccgaatgataccctttcatctctttgtgccatggagctgtgccatttgaacactcactccccttttttttcctttggagcagagaaccttctgcattcaagtctctcagttctttattatgatcagttacccatcaagagctgcttagatgtattaagccaaaaaaganaaaaaaaatcctccgggtggaaattaattttcttggatgattctgtggagttggaaacatttatctgaagctgaattttctctccccagaattaaccttgcctcagttctacagcttcctgcacgagatggagcgagtcagaaccagcatgggagtgtttcttgctgatttctgtccctgcatctcccctgggccccgttccctgccctcctcccttccctgggtgactgctctgagaggcacttcactcacaggcctgtgggatgctccatggggccctgctggctccatggggcccaggtgcaaagggtttctgaaaaacagcaggattaagtactgaaagagcccaacacaattacccctgtaaactctctgttagggcaaccaccaccacctgtcttccaggacacatttttagatactctgacaggccactgcatcttcagattcaggggagaaaataagttgtcacctccccttcaaagttccagagtaaacaaatggtgccatcattcaagataacatgctgatcaccctcctcccaaaaagcaagagcttgtttatggctgaggaatcggcggattgtctgaatgacacatatacagagcccccacggatttctgcacactctgggtctgtgctggtggaacattgccaatcagttcttaatgaggcacctgtgtgtaaatacatgcttggtcttctctgcagagaactgaggctaaactctgtccctacttctggttttgccctgtcatgtcgtaacgaggtgggccttttgaggccattttagtttgagttcgagccaaccacctctgttggttagatgatgaataaaaaggttctgaagaaaaaaaaaaaaaaaaaa

SEQ ID NO: 57743 - DNA, 688 bp, Homo sapiens
gagggctcagcgtggatattcattccatggctggggctcatacttggactactaaaaggtcgaggactaacaggataactgtcttgagactttggacttcggcctcccaaacatcgtacttcactatctgtaccattcaccatttctataaactgacgcacttttaatgtgaaaaggagattaggatttctttcaagtaaacttgggtataactgttgtgttgtttcaatggcttctcccattcttcctgctaataccaatttctgaattctttgtctattcttaatggaagctaattcttctagaacggtctggtctgtagatctggcaaaggcctctgctgtggcacagtacccatggtggactaaataagatgaaaccattttttgtatcatggtctgccattctccttctcgatctccgataggaaatcgatctatctgtgcctggattttggttctccactcccgcatatagtcttctatatcaaacacgaaaggatgttgcccaaaattggcatcgaccacttctcctggtgtttgaagccccacagtaggatacaaatttggcggtaggtcagtgaaagcaatacctaaactatgtccattcttggtgtaaaagcaggtattgttgataagattaaccgtcgacgcggccgcgaattccagatctatgaatcgtagatact

SEQ ID NO: 57744 - DNA, 1696 bp, Homo sapiens
  misc_feature (1)...(1696): n = a,t,c or g
ttttttttttttttttttcgaatacaaagttatatttattttcaacaatgaaaacaacacaacaaagtggagtcaatccactaattttttaaatctaacacaatgcttagcacaaacaatactcaataaataacacattaaccaagtaacattattcttaacactctctagagttgtgtgcgcgttttaaggaaaactgaggggtaggtaaagaaagacatccggcagacttgactgagaagggctccaaaaaaagaacagccaaagagcagggtacccaaatactaagttagcaaaaatgaatacagcattttccaaagcagtctagaaatcagagctcactgggggaaatgacaagggtttggggataatccgtgttcaaggcctcataattaaatcttctcctatttctagattctttatttggaatctatcccaatctaaaggagcttctgccaaaggacaggagattacttatgctgcctgaaatggcctatgcctcctaaatttcctttcactttgtcactactatagcaagggttccattccaacaatggattactactatgtagaccaactcctgtctgatttagatcttcctttcataaacacattgatacttgttcaaggacagctgtaaatacatccaatttcttttctttttatccccctctacaactctgcttggctacaaaaatctaggactcacagagcaacagcagcgatggtcagaaaataagtgccagttccaatgcaagaactctctaaagttcattggtcacaattttttttaaccacctcacctaccatgacttttttcttttctcattatcttgccaattatttctttcgaaattcaatcctccgagctacattctgagcaccaaattttttgaccaatgcctctctggtatcctcatcatctttttgcaaatctatgtcatcttgtcgggaccaaatgggatatccatcagctctctgaccagacgctaagaaggcggaagtagcctccagctcaccactattttttaggaaggcctgtgtaactgttgatagatccaagttaaacttctccattaactgccgaatgatcttaatggcagctcccacctctggttgagaaactttttcttcttcttcttcttcctcctcatcaggctgtgtttctgagtcttcctcaggtgtgggtggatcatcatcacacatagttatatgtatttcaaaatcaggagggctctcatccaccacaacctcctcaaactcccggggtggcttccacaagcatctttttgactgcttcttcattctcctggatttcttccttcaacatactcttcttcaggcaaatctggagttctcttattctgtggttccccgctatccgcggcctccgggtcctcctccgccttccgcttgagcttctgggaggaggggctcaccggcgcgtcccccagcaggtacttatgctcctggccccgcaggtgcttgaggtagcggtccttcagggactgccacgagtgctgcgtgagcgagctcttctccatcgctttccacaaggcgttaccggtgacggagctgggcgagcgggcattttccttcacgtaggtaaggatggctacgtcgtccgcatccgtgaagcgatcgcccgngtgcgctgcgctccgntccgcgtgcgcgtcgccaggccccgggcttc

SEQ ID NO: 57745 - DNA, 1617 bp, Homo sapiens
ttttttagaatttttaaacaggtttttataaataatgtgttcaaagatttcgaccccattacataaagtaggaatcccactccttaagaaaaatatacagattttggtaagagtttaagttctgagatattcaagcctgacgccaagcctttaggtttctactacttcaattccaaaggaccagtagatagcaattttagtacacaaaactccactatgctgtatagttccttttctcctgggtcagacagctttattctgcttcattaaccccttctttgctccttgatggatcttggaatccaatttccagatttttggatttcctttaataggaaacttcacaaccatttcctgaggatttttgcagatgaaaacaaatggagaatcagattcttgactgatgtctggaaactgctccttaaattgcttctgggacaagcagtcaattaggtccacacagcccagaagacaacctgacggatagtcattaggaaattccacatctttcccacgaagaagacgatatgtagcctggagttctgagacttcttgaggggagggttttttagctgtggctgctatccaaagtcgtcctctgtggggggtgtaccaggatctgccctccacccttttaatccctctgacaagcagagaagcccagggctgatgtacagagaggcaccagccaccatcaaagccttcctgaaattcttgatcctggattcgcaactggtgctgaaatgagttgaactctagtccaaatcctgaagaacggaaagccttcttctgtgaggctgcacctgtgtggtcaacccactggggaggggactggtacatgttgggatttaccagaactcccaaaggctcttcagaagatctatccaatttggtcagtggctggttcaaggttccattggcaatggcctgtattgtctcatctagtctgctatgatactctgctagtgaattttcttcttccaggatcttccttcctgcaaagtcaatggtgaccttcttagaaagtcgagaggcgtgtcgaagttctctcagctcctcctctcgcttctgcaaggtttcccgctcaagtttggacaaccattggttagaatcactggcaaagtaatctgactcatcatcaatgacttgggtccttcgaatactagttctgtcaaactctaacagtttgtctttatgcttgatagccttctccagaccagacttaattcgcaattcttgatgaggaagaaggtccttggtagagatgtccacctttccagaattctccactcctgacatgagtttctttagcagtttctggctcttgtttgagtcacgctgtaaaatatcttgttcctcatgagtacacaccagagtgccacagaataagcaagggcctgagccttcttgttcacagacaatgcgcccacagatcagacagttattgatgagcttgtgcttctggcccaggcaatcacaagggtgacgaccagggagcaggactgcaagcctgtcctgtctttctcttgtgtataaattgacaaactttgtcttcttctttacggagttgctgttctcttgtgccttggccaaatcaaaaggtgttttaacctctgc

SEQ ID NO: 57746 - DNA, 391 bp, Homo sapiens; identical to SEQ ID NO: 14534
  misc_feature (1)...(391): n = a,t,c or g

SEQ ID NO: 57747 - DNA, 354 bp, Homo sapiens; identical to SEQ ID NO: 14539
  misc_feature (1)...(354): n = a,t,c or g

SEQ ID NO: 57748 - DNA, 1150 bp, Homo sapiens
ttcagggttcaaaacagatatagctggtttattttggaaacaagtctcatccagaaatgttatttactgcatttaaaaaccatggaaggcgatttgcatggttcctccccacgccctcactcccaccaagtacagctttaccacccaaggtcctttcaggaccccaggcctggcggctgtaggagagagcagtgaatcctaaggggcaagagaatggcgtccacttgccagagtttctcagagcagagccagctgctcctccaagacaggccggtgaggctactcgacaccctcacaaaggggaaaccctgaaggaagtactttcagggggtgcctgcccgatgcgggaggttttgggctagccctccccagatccccggcctgaggggcctcctccagctgcagaagtcaagctgccaaacttgccaaagtattcctgcagctccagcagggcccggaagcgatgggagacagcgttcttctccgccttaggcatctctgcgtacgtctgctcatatccatcaggctgaaagcaggggtcccagccaaagtcctggcagcctctgggtgcaagattcggcccgaggtccggccccctgaacaggcgcacgggctggcttgggtccccggtgctgagtgcaaaccgtgcagagcgcataggctgacttgtcctcgaacccggccaggagctggtggagaccttcaggctttaacttctccagaaacccacttttatgtaggggcccggggaaccctccaagggcattgaagcacagacaagtgtcctcaaccagcacgggcccctgtacctggcgaactgcctcctgacatttctgtatggaaatctcatccggctccccctggtactccggcaggtcaattttctgtgccaccaaagtgcatggaaacttatctcctagaatctgaacgacctcctccagcttcttggcgttccccgttacaaacacgatcttcttccccaccaatgaggccgccatggtgatccccggttacccagctgagccaccgaaaactccttggcgtccagtgacagaaaacttccggctggtggcggaagtgaacggctcagtttccggccaggtcccggggaaagcgacccggaccccaaggcgcgtagtcggcggagtcg

SEQ ID NO: 57749 - DNA, 1390 bp, Homo sapiens
tagatcttggaggcatatcaactgtggttgtaaatggctatgatgtagtaaaggaatgccttgttcatcaaagcgaaatttttgcagacagaccatgccttcctttattcatgaagatgacaaaaatgggaggcttactcaattccagatatggccgaggatgggttgatcacagacgattagctgtaaacagttttcgatattttggatatggccaaaagtcttttgaatctaaaatcttggaagaaaccaaatttttcaatgatgctattgaaacatacaaaggtagaccttttgactttaaacagttaataacgaatgctgtttcaaacataaccaatctgatcatttttggagaacgattcacttatgaagacaccgattttcagcacatgattgagttatttagtgaaaatgtggaactagctgccagtgcctcagtcttcttgtataatgcctttccatggattggcatcctgccttttggaaaacatcaacagctgtttaggaaatgacagctgtagtctatgattttctctccagactcattgaaaaagcttcagtcaacagaaaggcctcagctacctcagcattttgttgatgcttatttagatgagatggatcaaggtaaaaatgacccatcatctactttctccaaagaaaacctaattttctcagtgggtgaactcatcattgctggaactgaaactacaaccaatgtgctacggtgggcgattcttttcatgggccctttatcctaatattcaaggacaagttcagaaagagattgatttaattatgggccctaatgggaagccttcttgggacgacaaatgcaaaatgccttatactgaggcagttttgcatgaagttttaagattctgtaatatagttccattagggattttccatgcaacctctgaagatgcagttgtacgtggttattccattcctaaaggcacaacagtaattacaaatctttattctgtacactttgatgaaaagtactggagagacccagaagtgttccatcctgagcgatttctggacagcagtggatattttgccaagaaggaagctttggttcctttttccctaggaagaagacattgtcttggagaacacttggctcggatggaaatgttcttgttttttacagcattgcttcagaggtttcatttgcattttccacatgaactagttccagatctgaagcccaggttaggcatgacattgcagccccaaccctacctcatctgtgctgaaagacgctgaaactgcctgggatgttttcgggaacaagaatgtatatttgccttatccctgaacttggtttaatcaaatcaatgtgtgtattagaataaaagtcacagcatcaaaaagccaaatg

SEQ ID NO: 57750 - DNA, 2350 bp, Homo sapiens
gttttgggaatgtatgatttttttaataaaacaattctgcttcagtgcaaatatgtagtccaaaacaacaaaaaaagaaaatgtcttatgtgacttagcacgaacagtttccacagcctttcacactattgacaatttcttcttgtagtttctttctttcctcctctttggatatattttctttctttgcttcccatttggggttatcatggttctgcacacggctgctctgtgtatgccacatttctgaatagatactatgagggttagcaagcaaaccatggtgggtaccacgttcggctaccttaccctgatccaagacaatgatttcatctgcatcaaccactgttgacaatctgtgtgcaatgaaaatagaagttctgtgtttgaccacatccttcatggcaccaagaatagtctcttcagtaatcgaatctaacgatgaagtagcttcatcatagagtatgactggggggtccttcaaaatggctcttgcaattgctactctttgcttttctcctcctgaaagcttgagtcctcgttcccctacttgggtgtcatatccatgtggcattcgaagaattgcatcatgaagtccagctaattttgccactgcatacacttcctcaggtgaagcactgatgtttccatataagaggttgtaataaatagtattatggaagaggacagcatcctgaggtaccactcccactgcccctccgaaaggctttccaggctcacatcttgtatattttgaccagccaagataaatgctacccttttgaggctcatagaagcgaaataatagcctcactattgtgcttttccctgacccactacctcctacaatggccactttctttcctgcagggacttcaaaggatattccactaaggactttctggccctcaatgtattcaaaatgcacattatcaaaggccacggtagctgtctgtggtgtgatctgaaggggagatgccatcactttgtctttaatttgggtgtctaccttgagtagagtaaacaaggtgttcatatctatgagtgcttgtctagtctctctatatacagttcccagaaagttcaggggtaatgaaagctgaaaaagcagtccattcaccattactagatctccaacagtaagggtacctgccacaattccctgactggcgagcaccattatagctgttaaaccgacactgaaaatagcactttgaccaaagttcagcatagccagagtagaggtacttttcaatgaagcagtctcatacgtcttcaaaaatccatcatatctctgtgcttcatatctttcattattaaaatacttcacagtttcataattcagcagtgagtctatagcagcattacctgcatcattatctgctttgttcatttctattctaaatctagttctccaccgtgtgactgcaactgtgaatgctgtgtatgtaccaagtgttccaagggttaccaaagcaaactgggcaccgcatttgtaatacaaaacaccactgacaagcatcacttcaaacatgatgggaagaagattaaataccaaagcactcaggacaaaactgataccctttgttcctctgtcaatagccttagataaagctcccgtctgtctgctcaggtgaaaacccagatccaggttgtgaagatggagaaagacatttttggctattcttcggattgaattctgggctaccttgccaaatactgcatttcgaacttcgttaaaaaaagcagctccagctcttgatacaccatagccaatcagaactgctgttgccatggttgcaactgtatttggtgcatcactcaggttcagcatgtttcccgacatctggttgaggctgtctacagcatatttaaacatgaagggaaccacaatattcatggcctttgcaccacccaaaaatcccagcgaaatggcaactctagctcgtagatctggcctgtctttgggccacacataagaaagcattgcttttatgattttccgagtatcaacatcttttaacccttcttttgggtctgtgtggagtcctcctcctgcatgaccatgccaacatgtcctcttttctatcagtggccatacctggagagcctttgcagcatctaagaactgtcctgaattgccttttcccaatctctgccatgtgatactttttaatgactctggaatctggtaggctcgagcggttcccaaggcgccgagttgatgtggcctccactgcggacctgagccgctaacagagactaaaggccggatcagaatcgcggagtgccggcgcttttcgaaagcagccgccgcggccgcccagcgccaagaatgcatcgcgagcag

SEQ ID NO: 57751 - DNA, 637 bp, Homo sapiens
cgctaggccgctatcgagcagggtccgagggctgtgtcagaaggctgggcagccatggcgtcctatttcgatgaacacgactgcgagccgtcggaccctgagcaggagacgcgaaccaacatgctgctggagctcgcaaggtcacttttcaataggatggactttgaagacttggggttggtagtagattgggaccaccacctgcctccaccagctgccaagactgtggttgagaacctccccaggacagtcatcagaggctctcaaggctgagctcaagtgccccgtgtgtcttttggaatttgaggaggaggagactgccattgagatgccttgccatcaccttttccattccagcttgcattctgccctggctaagcaagacaaattcctgtcccttgtgcccgctatgagctgcccactgatgacgacacttatgaggagcacagacgagataaggctcgaaaacagcagcagcaacaccgactggagaacctccatggagccatgtacacgtgaggaggttggggctgagtgctggccctctgcgtcttccttattaaccttgaatcctcattaaaggtttctttacccaccctgaggctgtattgatcacagacctggccaggggctctgc

SEQ ID NO: 57752 - DNA, 2026 bp, Homo sapiens
taacaataaaatagctctttgtttattcactttgatttggatcattggaaatattaaacaataaataaaacagagcgggggctgaggaaagcaggatcttgctgaagtcattcgaatgcatcccaaccagtgctcagctgcgtaacgacatggagagaggcaggggggaatagaaagcaaatttaaaaacaccaacacccaaacacacaagactgcacacaagaaaaagtgctcaagaaactttggctttgaagggaattcagtgaagggaagcgattgtgcaggaggaagggaagaaacccacgatcaccctaaggggcggggggctggaggggcgaggccctgagacaggctagggttaaagctgacgtcccacagctcaggacgtacaaccgatggcagttttgtactaggaagaagctgagtgatgaggctgggtgatgggatcgcttgacgggctgggagggaggacaggaggtgtaaaaggtggctcaccttcccctaggaaattcagtgctcttttggtaagaaaaaatagtcggtaatgccctgatcctgacaagctgtgagatgctgtcttgcctgtctctgccttttcttctaagttttcctccttttctttgcacaggtgtcaggtcacaccccaggggtgcaggagctggtgttttcatgacaaacaaaaatggggaggttgactctatctcaaaactagctagcccagtccacagggcaggataatcctgatggcgtgtagccacatttgctgcaaaccagatgtctgcgatggatataatgatacccccggggctccttcctcaggggtgaggacaggtgctggttcctgatggtgcatggctggtgtccagtcatctttaagcctgggcagtggcccctcgaggctcgggcttccctgcacaaggtatttttgatccttgccagcggagggagagagagttatcttggtttcctttcacttgttttcgggctgcttcaaagcaaacatcccagttccaaatgttctttgtggtttgaatcctggcagaggccagggtcacatccaagtgggactggcctctagcaccaccttctggccacagcagagaatgggattccatcaaagcctctcaaccagccgtttccctaaagaatcacccagatcttaactgccctctccaccttctttttttttttccctcctattttacattctattttctcatatccagcttttctctctaagcctaaccaaatgctttggtgaatgatgcttggaaaagctggagttttaaaaggcattcatccatttatgaactttcttccagcccaggatccctgcagagaaccagaggttacaaatctgccctcctttctcccctaaaaggtggctgaggggaggagaggtgcatgtagctccagctatagcaaatcagtgccctgactcactggggagacccagggggttgggatgttgctgacacctcatgggccacctcatcagcccatctttgtagcttcaggttcagctctgggtgctgcaggcagggacccctctgctccctgcctgaatgcagggccagtctccaaggaactctgtctgcagagtagaaagagctgtgggctgggaatcaggggcctgagggagcccctgccactgcctgcccagaaccagtgctcctcattctcctgctgacagcatgcatgtgccttttggctaacacacactcttgtctaattcccagccgccttcaccccagggatgagttccagttggtttaagccagactggtgcatttaattctggctgcaacaactggattctgttaagtgcccattgctaagccaatgagctatctgctgggctgtgggaaagagaaatgcagtctcctgcacgggagggtgtgagaaggccacccaggcagcctgcagctagagctcggcgctgagagagcacaggagagtcagacacctccattctggttacactttttccagatgctgaatggagactcgctgggaaagcccgccc

SEQ ID NO: 57753 - DNA, 953 bp, Homo sapiens
tgaaccaaaatatcacttaacatttaataattgcaaatatatttattacaatttacagattagttatgttatatacacaaatataattttaactataaaatcccaactagttacatttaaattattgatctgtagaagccaatttagagtcttctagtcccctaactttaccttccttaaattatacaaaaataaaatctgatagttttgatttcaagttaaagatgaagaagtgttacatttcatcactcagaaatggaacttttacctgtctgtacaaagccttttacatgctacattgacacttaaagcaccattaacaagactttaaatgtataaaatgtttaattaaaacctccaaagattttctctttaagattacgggggtttaactttgttctaactagaattgggatgaaacaagaattttgcttttttctccttcagtccaactttaaaatagtcctttctgtccttcttatcaccttctgatcacttcttccaaggaggctagtatatggaagaactcttaatcaagctttcactcatttgggtagtgaggttagaatcccatggggaacaattttccaaaatccaatgaaagatgtctcattattttcaaatacacagaggtgctaggtttaagaaacaggaaacacaacgttaagtctcggaaataaaatgtttcagccctggttttaaaagaatgcctgtatgttgtcaaaaaggcttttttcaaggcaaatgacgcctgctttccaaccgacattgctgttgcttgaaactagcctgttttcatgttattagaccatcctgtaaatgtgctccctatgattacctaaagtggaggtgcacaaaacacacagaatcccagcactttgagaggccgaggcgggcggatcacgaggtcagcagttcaagaccagtctggccaacatagcgaaaccccgtcc

SEQ ID NO: 57754 - DNA, 1610 bp, Homo sapiens
attacgaatttaatacgactcactatagggaatttggccctcgaggccaagaattcggcacgagaacgatagacactgaggactgcggcggggggagcgaggggagcggggagggcaagggctgaaagactatgtattgggtactatgctcacaacctggatgatgggatcattcataccacaaacctcagtatcacacaatatacccatgtaacaacctgcactctgcacatgtacccttagaatctaaaataaaagttgaaattatttttttaaaaaaaggatggcgctggtcatagaaaaagtcaaagtaaactaacagtgtcattttcaaatgttgctggaagcacaatattggccataaattagtgaggttaaaatagaagaatctggcattttatagtataaggaaaagctacaaacctcaaggttgttttatttaaaccaaataatctgagcaagacatatatacattaaaaacaaatgaacacattaaaatttcactattttacaatctaaattctagcaacatatacaaatactgagtgactacagtacatgccgaggtaagataagtacattctgggagaatatcactgacgctcaaaccatttttatttccaatatgtatttcaatacatgtttgtttccacttttcccagtgccacacacacacacacacaaaaacaaaacaaaacaaaaaaaaaacagtcacaagttggattacattagaattggtgccacagttaactttttaaaagcattttaataaccacccaactcttagattttgcagtttagggacttcaagttcagaaccaaaaagcagagaatcgtttcatgtgacatgatgtttctatagacctcttgctctctaggtgacaatgcagagccagggcaaaggtgtttaagctttgtcaccttccacagctttgtggccacattcatatttagataagctcggactctgctcccctcttctggagatggggagaggcaagtgtgtatgtgttgtcatacttactgcattaattcttcactcgaaccgtttacatcagcgaataaacccattgttcaatgcaaagtgcaaacagtgaaacatgaacttaaataaactggactagacccatcacatcccaacaggatcctatttagatttacagcatttaataaagtataagtcagaattcacaatatcttaaactgtgctgtttcctaagatcaagtaacagccaagtcagtgtaattttatgaaacctgtaatggccacatttgttgtgtctccgatgtatttctataattgcattaacaggaaaaaacttaatccaatataccagtgactttgagtcttaaatgttgcaagcaaaggataaaaattcaagggaattttgtcagatatggttactttcacattttcagttgttacttgattgtctccaaagccgtatatgtatcagacatataaatgtagtaaaaaaaaaaaaaaaacaaatagaaaacctctactataaaaaccaatgaactaaaaagaagtataaagcagaaaaaccatttgaatcaggctcagctcttcatctggaaagtaaagtttatataaaagtagtaaaaac

SEQ ID NO: 57755 - DNA, 494 bp, Homo sapiens; identical to SEQ ID NO: 24221
  misc_feature (1)...(494): n = a,t,c or g

SEQ ID NO: 57756 - DNA, 1426 bp, Homo sapiens
ttttttttttcttcggattttttttttttttttgcaaaacattcttttattaaaagaacaagtgctgtttacgaactgcccttcgtacaaataacatccgttatacaaagatacaagatccgggttatgcacaattccaggcttggaggtggcaggggggcatcgcctttgggctgaggatatcaaggttttagaaagaatgaaaaaggagcccctgggtttgcaatctgtggcttcccctccctgctccctaggaagggtctgctacatggaaacaggttgggatagaaagggggcgggacgggagcaggggtgaggtctccagtcccaccacccaagtcccaagttgagctggagaaagtgaacaaaggggaatgaaggcacccctcagttcccaacttttcagtaggtcaagacaaagtggtcgggagctagacacactctcaatcctgatggacatggtgggagagagccaaggctacttgcccaccttccttggaattcccagttgaagttacctcaatccctctaggcacctctccccaggaaaataagttgagataaaggagaactgggtgcaagctgcctacccctaactggcccattgcacaccaaggaagatcctagaagctggcagggggagcctgtgcctttgaaaacctgtcttcatttccaatttgggagagagaagcgtggaggttaccctttctcggagctggcccctggcttgggctcctctcatttctctagacccttcctaagagtctggggtgagcacctccctagaactcagtatgggggaaacaggcaggggtcccctcatcagcctcaaggtcaggacaccttgaggcagcagcagacccaggagcctgagggggaaaataccccacaaataggaaaaacaaaccaagacaatccttaaagtgtcattgtccatggagaggatccaccagctctgagctaagacagtcagtgccacatagacaccctcccaccccgggcacagccctgcactcacaccgtgtgtcacacacacacagggacagccagccagccagccatgtggagaccatgttgtggggcaggggaaccaagggccaggaggccacagtcctgagggcttgtcctggccctgtcactgagccccttctaggcttggagctgtcatctgtgatgggaggagctggctgaaatgacccctaaagacaggtccctttggcgctggcatgcaccagttgtgaccccacagcaggcactgcctctatatgcacccccactcacacctcctcactgagggtgggaacacccaactccacatgctcacccactcacacctcctcactgagggtgggaacacacgaagctctgctctcatgcgtttccaaactctgcttccgctctgcaaaccacatccttcccctccccc

SEQ ID NO: 57757 - DNA, 457 bp, Homo sapiens
  misc_feature (1)...(457): n = a,t,c or g
naacagctntgacatgattacgaatttaatacgactcactatagggaatttggccctcgaggccaagaattcggcacgagcacgtccattgctcagctcaaagtggtacagaccaagtatgtggaagccaaggactgtctgaacgtgctgaacaagagcaacgagggtatggggtaggcgggtgagggtaacctaaagtggcgaacctgcttctctcgtcccacctcctaacccagtttttcttacctgaaacgagaaaatccattacatatcgtataccgcttcatgaaccctttgcatgttgcctgcctagaattgaaaagtacaggacattcctctgctcctattgcccctgtttccgttcttttcacactgtctgtgggtgctgtgccctgttggaactctctttaacgtcttacgttggagccgctaaccttccccaggtgtttgtcttcat

SEQ ID NO: 57758 - DNA, 664 bp, Homo sapiens
  misc_feature (1)...(664): n = a,t,c or g
cccatttccctttttgaccttccccacctaccnaggcctttggttcccccatccttgaccctcttcctcccatgtggatacccgttgatacacttttaggtttgaatatcaccttccttttagaatgttcccatacctttaagcatttgataaaagctatggtggtttccccagaaaaatgttcaacaggaagttttgcctacatttttggattcacagacctcagttcctatggcagtgttcatatacgtaagttcagctgttacgtgtttacaactcaaatccaatggctaccagttttcccactggacctctctggatttagcaatctctaaaattgtattcacttgattcttaaaaaaataaaaaagcttaaatgcagataggatgtcaccctgtttaaaatttctagtggctgctctggtcatcagtttaataaaaattccttagcatgaccaagaaggctcttcactacttaaaaataaaggctgggcacgtggctcatgcctgtaatcccagcactctgggaggccaaggcagtaggatcacttgagcccaggaattcgaaaccagcctggactacgtagtgagactccatttctactaaaaaaattaatggctcatcataatctattcaaaactactgagttttaaccataagaag

SEQ ID NO: 57759 - DNA, 1119 bp, Homo sapiens
ttggcttctttgagtctttatttccttggtgaggcagggccccagggtggggtgggctgcctggctgaggctcctgtagacccaccaacctaggggcacttttctgggcaccacaggtaaggcactgcctgggggctggaggaggctggaggaggatgcccaagctccccacactcctcaccccagaccggggaagctggatatcctccgtgttgtcctctccccatagctggtctgaggctgtggtttacacgcaggcacaggtaggcgattctgagcatcaacgcagatggaggggagggtgagccgtcgtgggagaactggcccaagaccagcacctggctggtgtcgccagccccggctgcattggtgggtgaggcaggtctggctggagtctgggtctgcaggcctggccggggcaggttgtgggggaccaaggagccctgggtgtgaaccccactgtggagcagcaggcacctagtggtgccactgggacacccggctccaggactccggatgtcacacatgcgtgagtcttggcgtctacacccccctcggggccagtgggtgagcagtggccccgtggtccccgccagagctcccccagagtggaacttggctccgccggacacagtgccctgctctgagctgccgctggctgctcccacgtctgagaccacgcgacgttgcctcatgaactgacgtggacagcagcaggggagacgctgggtggttctgtggccaagcacagcccgtgtcaggagcacaggccgtgccctttcccagggggcacactgggcatttctcaatggccttcacaggacgcaaaggggcacacagaggcagtggggaagctggagttcttgggctggcagggaatggtggcagccttcttggccttcatgaagggcctggcttgctgggctaaggtcacagtgttctgaggtccccacacgcactcagactagaccctccgtacacacccaggctagaccctccatactcacccaggctagaccctccatacacacccaggctagaccctccatactcacccaggctagaccctccgtacacacccaggctagaccctccatactcacccaggctagaccctcc

SEQ ID NO: 57760 - DNA, 996 bp, Homo sapiens
ttttagaaagccaaggaattgagttaaatccaccagagaagatggctcttgatccttacactgaactccgaaaacagcctcttcgtaagtatgtcaccccatcagactttgatcaactcaagcaatttctcacctttgacaaacaggtccttcgattctatgcaatctgggatgatacagacagcatgtatggtgaatgtcggacctacatcattcattactatcttatggatgatacggtggaaattcgagaggtccacgaacggaatgatgggagagatcctttcccactcctaatgaaccgccagcgtgtgcccaaagttttgggtggaaaatgcaagagttgcctccttataacggttttggactagtggaagattctgctcagaattgttttgctctcattccaaaagctccaaaaaaagacgttattaaaatgctggtgaatgataacaaggtgcttcgttatttggctgtactggaatcccccatcccagaagacaaagaccgcagatttgtcttctcttactttctagctaccgacacgatcagtatctttgagcctcctgttcgcaattctggtatcattgggggcaagtaccttggcaggactaaagttgttaaaccatactctacagtggacaaccctgtctactatggccccagtgacttcttcattggtgctgtgattgaagtgtttggtcaccggttcatcatccttgatacagacgagtatgttttgaaatacatggagagcaacgctgcccagtattcaccagaagcactcgcgtcaattcagaaccatgtccgaaagcgagaagcgcctgctccagaagcagaaaggtgtgtgtttgattgctagggtttggcacactcaagatattcaggaagtaattcttgagaaaacaaatgagtaatcacattttagattttctgatttctctcaccaggtgggaattattagatataaacagaaggttccctgtgtcaatgtaa

SEQ ID NO: 57761 - DNA, 1282 bp, Homo sapiens
attcggcacagggggtagtggccggtgagggcccaggctggtcagcgtcccgtcttgcacacccaggggcctccctttctgctggagtcccctgtgtcctcagccatcccaagaagggtttgctggtccctcctttccccccgtcccacgaggccacctgggccagccccttgtcctctgccttctgctggcagaggagcagctggactggggcctttggcacagcagccggtgtctcctgcgcccgcctcccccatggccccatgcagccccaggggcttcccccctgcccatgggagtagagcccgagatcctggccactatgccagttctgacctcgcatccccctaccccgagcccatgcagtctgggaacatgccgccttctctccagcctctgtgcctttgttccaggtggtctcaccctcctgtccctggctgggctaggtggtcctgtccaggctcctgcagcgcccccctcactttgacactggactaggatgcagcctcccttctgtgtccccttgagggtaccctgggtcccctcatcaggggcagaggcatgaaagagtcggggctggatggccaggggcttctgggcccgacgcctagtgcagcccctggggtcgtggtttgacatttgtctgcctggtgcaaacaaggaatccttgcctttaaggtgacaggccctccacaggcttccagacttgaaggaaaaggtttaagaaagaaaacaaaaccaacagttagtggagtcaaagcccagacactgtaaatagaaccccctccaccaccccccgccgcccagcatcctacctggactgcggtgcttacgagggcctgcgggcctttgctgtgtgccaccctccctgtaagtctatttaaaaacatcgacgatacattgaaatgtgtgaacgttttgaaaagctacagcttccagcagccaaaagcaactgttgttttggcaagacggtcctgatgtacaagcttgattgaaattcactgctcacttgatacgttattcagaaacccaaggaatggctgtccccatcctcatgtggctgtgtggagctcagctgtgttgtgtggcagtttattaaactgtcccccagatcgacacgcagctagcctcctgcattgtatggttataaatagcaccctagtgagtgctgtcgtccagtctctcttgggtgtggtttgaatgatctcgggatgcatgactaaaatggaattacgatggcagatcggaaacgcgtttataaacaagtgatggtttgaaaaaa

SEQ ID NO: 57762 - DNA, 1704 bp, Homo sapiens
  misc_feature (1)...(1704): n = a,t,c or g
aagttttcaatgttttatcatatttgatagcagctttttttattggttacaaaacctaagcccatatacaaaattaggaacacatttagatgcctcttttgaaagaacgttttagtctttttaaactgagtttaaaaaaaaataacaatgcaatttttaaacactggtttgaaaacttaaaagtgcagcaatatacttagtttcctttatctacgaaatggtgcaattccaattcaaaactggtaaggtcacaaattgaatcaaggaaatgcatacaagtgtctgcactacttgatgctaatgttcacttaaatgttagtttgcactttaaaacatgagaggaaataggaatcatcacagtagaggcccaattttaatcataatgtgtgcaaattttaaaaggtaactgtcagttaagtaaggaaagtccagaagaaactaaactggaaggggtacggttcacaatatcaagaagatttggacttttaagggtttcaccgaaggtttgtgaccttaattagcttttacgttgttattcctacttttagcgaacaccacacagtttcaaaaatttagactatagtgtccgaacaggatgcagttaccatatgaagctttaactcaaaatttggataaagaaaaaaaggcacaatgaacttcaactcaattttatgtgcacaagagttgaaaaatctgagccaccttaaagagaaattgattctaaaatttataaaacctataaataatcagaggccaaaccactatattaaaacagattctctagcaagtaaaaatcttgcagtttaaacatacgcttgtatccactttagatacaagacaaaactcactctttaaagtggctccaccttggcagatacatatatttgtaatgaatgcacacctgctatgtgttgtttatcagtgaaaacaccccagctgattcacaaagctctgatggcatctgtctcatcttcatcacagtaaatacaccccccaatggataactaaattagtttagattttctatcccttcacatcaatgcattgggaaattatacccagtaaacaagagcaacaataccatttctgtgacagcacaaattatttagtttaaaaatttttaaatccatattctttcattaataactgggtcagacaatttaccaaaagcaataacttgacatagtaataccggattttgcagaattacttagagatcactgcaaatcaggtttatgttaaataactgcaaattactcctctacacagatccctgtctgaatcttttaatatgtgaagatgctttttgagtaggatctgaattaactttcccaatactcaaagaatgaactcttatgacacttctaaatagttgctggtttgttgccaaccacattatcaaaagcactggttactaagtaaaaaatattttaagactaaattacagtaaacatgaaagctccacagtttaaacccaatataaatcaaccatatccaattatcaaattaaaacaaagaatattaactcctgaaagctgaaagcaagagtttttttaaaanacatcaccaatgggtattttagacttttgcagttttttttttgtttgctttttgttttgctgtttttcctttatactcagggactcttgctttcaacttaaacagaagttcaagtccataacaggttgcagctccaggtaaaat

SEQ ID NO: 57763 - DNA, 1765 bp, Homo sapiens
aatttaatacgactcactatagggaatttggccctcgaggccaagaattcggcacgagggagcacccgttgcacttggggttgtggagcctatgctggtctctggccattgccacccctcttcctccgactagtgcccatgggaatgttgctgaaggcgagaccaagccagacccagacgtgactgaacgctgctcagatggctggagctttgatgctaccaccctgggatgacaatggaaccatgctgttttttaaaggggagtttgtgtgggaagagtcacaaatggggaccgggagttaatctcagagagatgggaagaatttccccagccctgtggatgctgcattccgtcaaggtcacaacagtgtctttctgatcaagggggacaaagtctggggtataccctcctgaaaagaaggagaaaggatacccaaagttgctccaagatgaatttcctggaatcccatccccactggatgcagctgtggaatgtcaccgtggagaatgtcaagctgaaggcgtcctcttcttccaaggtgaccgcgagtggttctgggacttggctacgggaaccatgaaggagcgttcctggccagctgttgggaactgctcctctgccctgagatggctgggccgctactactgcttccagggtaaccaattcctgcgcttcgaccctgtcaggggagaggtgcctcccaggtacccgcgggatgtccgagactacttcatgccctgccctggcagaggccatggacacaggaatgggactggccatgggaacagtacccaccatggccctgagtatatgcgctgtagcccacatcttagtctttgtcttgcactgacgtctgacaaccatggtgccacctatgccttcagtggggacccactactgggcgtctggacaccagccgggatggctggcatagctggcccattgctcatcagtggccccagggtccttcagcagtggatgctgccttttcctgggaagaaaaactctatctggtccaggggcacccaggtatatgtcttcctgacaaagggaggctataccctagtaagcggttatccgaagcggctggagaaggaagtcgggacccctcatgggattatcctggactctgtggatgcggcctttatctgccctgggtcttctcggctccatatcatggcaggacggcggctgtggtggctggacctgaagtcaggagcccaagccacgtggacagagcttccttggccccatgagaaggtagacggagccttgtgtatggaaaagtcccttggccctaactcatgttccgccaatggtcccggcttgtacctcatccatggtcccaatttgtactgctacagtgatgtggagaaactgaatgcagccaaggcccttccgcaaccccagaatgtgaccagtctcctgggctgcactcactgaggggccttctgacatgagtctggcctggccccacctcctagttcctcataataaagacagattgcttcttcgcttctcactgaggggccttctgacatgagtctggcctggccccacctccccagtttctcataataaagacagattgcttcttcacttgaatcaagggaccttggtcgtgaaacaatcttctttctttgagttgaaaagttagcacttctcctttgagggtgtcgagctcaaacaaggctgtgagaaacaagggaggggagcactaaggggcaaacctatctctgcgcagatgattcttaggtccagatc

SEQ ID NO: 57764 - DNA, 1273 bp, Homo sapiens
ctgcgccggaagtccctagccaggcctggcggtaaccttgggggcctcactgcagccgccgctgctgttggagtgggctttgcgagtctgaacgttggcggggctaggctcgttaactgccgagagcctccgggtttgcggtggaggacgctgaggcccgtggggggcaggcacccgggcgccgggcctcccagccgacatgtctctagtggcggaagccttcgtctcccagattgcagctgcagaaccttggcctgaaaatgctacattatatcagcaattgaaaggggagcaaattttactttctgacaatgcagcttctcttgcagtgcaggcctttttgcaaatgtgtaacttgcctatcaaagtagtttgtagggcaaatgcagaatatatgtctccatctggtaaagtaccttttattcatgtgggaaatcaagtagtatcagaacttggtccaatagtccaatttgttaaagccaagggccattctcttagtgatgggctggaggaagtccaaaaagcagaaatgaaagcttacatggaattagtcaacaatatgctgttgactgcagagctgtatcttcagtggtgtgatgaagctacagtaggggagatcactcatgctaggtatggatctccttacccttggcctctgaatcatattttggcctatcaaaaacagtgggaagtcaaacgtaagatgaaagctattggatggggaaagaagactctggaccaggtcttagaggatgtagaccagtgctgtcaagctctctctcaaagactgggaacacaaccgtatttcttcaataagcagcctactgaacttgacgcactggtatttggccatctatacaccattcttaccacacaattgacaaatgatgaactttctgagaaggtgaaaaactatagcaacctccttgctttctgtaggagaattgaacagcactattttgaagatcgtggtaaaggcaggctgtcatagagttatgtgttagtctcaggagtcttaacttttgaaatatgttttacttgaatgttacattagatattggtgtcagaattttaaaaccaaattactgctttttgaaacctcaaattatataatgtatcttatgtatgtgctttatattgttatttgtgtatacattaaaataattctgaattatttaatctgatatgttgtattctgtatcttgaaatttttgtttccttgaaacatgcatgcatttaaaaataaagcttaaacaactgtaaaaaaaaaaaa

SEQ ID NO: 57765 - DNA, 1214 bp, Homo sapiens
tggtgtaaaaaacacaccctcccctcccaccccaaaaaacatcaaattccttccttttccccaaatccctggatcttggaatgaaagccacccttccccaatctgtcctcacctccttcagcccatccaagttatgcacaaaaaaacaaaaattagtgagaaatttggggatttgcacaacaaaaaattagataatgttttccaaaactaggtcttctatgctgtgtcaaaaaaagtttcctacagactgaggatattcacacgacaggagcctgggggttaaatgagcctttattagaatgttgtagcagttgtgtttgaaggcggtggccctacaaaaaaaaaattaaattaaagtccctaactgcatgggtaggaaaaccagggctggagctcaattggaaccggtggagcccagaactcatggagacatacgtatgtacgtgggcacgggacgccctcgcactggcatgaagccggcccagcctgcaagagacacggaacggcttctgcctttcctcacggaaccagtttttaaagagtgggacgggaaagaaacaaaaatgaaactaaaagcagacctgatccttttaaaaacatttttgtagactctaaagggaattacaaaaaaaaaaaaaagtctgaaagcaaatcctgacagcaacccctaggtttaaggacaggttctaaactagacccaaacggaaatcctgacatctgtgcgcagcggctcgccgcacacctggacggcacctcctgacctgcacacacctgtgcacgctcacctcccaggagcaaggccagggtggcttaagattgcgtccatcgaaatgaatagaaaaaaggaaaaaatttaataaaataaaccacaacagaaaaaccccgcgacagtcccccctccagctttctgctcagggctgctgccgaccggatcctctccttctcccttaatgggcagcttctggaatccctgcttctctggctgggtctgttcttcagtttgttcttctgctaagtctggaaggtgcgggggcgggggtctccaaaacaagcagcaatggaggcgttcagctggagcgagggctgcctcggccatccctgcatctgtccgtcagtcacgggggcgggccggccgtccctgccaggggctgtggcaccatgagccgcccaccctccaggcacagggccagcgggatgatgcaacgtacaaacaa

SEQ ID NO: 57766 - DNA, 7517 bp, Homo sapiens
  misc_feature (1)...(7517): n = a,t,c or g
ttttttttttttttaaagggttacaaatattcagattttattataaataaaatactgtttttcttaaaacataaaaatgccaagtgttgcattttattaaccaccctggagagcaaggctgtagagattaaggcaaacagctaaagtgaaggcacatataaaaggtccacagttggaattcaaaggaaaaaaattcagggaaaaatagcagtataataatccctgtgtcaaccagcattctgcagcagccatcctgtcaattacattacataaaatacagataactggagctagacaataaaataatggctgtgttgcggggagtgtaattaaggtatcatcttgtaaagaaccttttattttaaaaaataaaattctgcttaaaaaatataccacacaggtggaggagaaaagcaaataacaaaaagaaagttaaaaggaaaccaaaccaaacccacccccattgtggcctgagacttgctggagtgaacttcacccaaactagcttggcagtcaatcttcagtcctcttctgcaaccttgaccaaatgcatatgttaggatgtagccacttaatgaaatgaactagccaggaaacgatgacgtgaaaactttgcaacagcacaccacatctcctgccatagtagaagaggcctgggagaagcagcagagtgaaagctcaggagtatatcgtcaaaacacttgtggtaaactctggtatatcccaagcagatggaaacaggaagtgggatcatcaagaactaagttacaccacctctcccagtctacccaccagtaagtagcactgttcctgatgccctaagtgctcagtcaaaatgtactcccttataaaacttacctatccagctccaacaattgccaaaaagggcatttctcccctcattcctggctagtcccactgtggcgtcaaagatccttcttcagcaaactttcctaatcctaccatagcttgtcaacctggcgttcctgctctggaacattgtaaaaccaccgtgctgcaggttaggatcatcaggactgcaatggaagaggacccaagttacctctttacagtggctgggtgtggaggaaagcaattatattaattttagagaatggagatgcctgcaaacacaaggcacaattctttggagtacaatcccaaagaattcctagaagggagggaaggaggtattcagatacattgtgccagtgaagaggaaaaattgagcaaagtgaacagagtgtcattctagaaataggactaagtatatttacataaattccttattctataatcatgataaacaaaacacaaaacattcacacaaaaatataaatttgaaataattaatagcaccagtgtgtcagataatagtttctttccccccaccccgcccctgctacgcaaagtacaaagttgcatagtgttaaaggctatatatgaatctcaaaggtgggttggtaggaggaagggggtgtgtggcagggaactgtcacactgtggtcttaaaaccacagagctgaggatcaaaagttgagaagcccactaggaaactccacgtaagggtcttccctctacacttagagggaaggtttagagtggatttaaatcacaaagtgcaggaactcgatagcgttggcagctgtgtgaaatactgagtgcaagtatttgccaccaggatttggcaaacaatgttttttgagggattctggaagatggaaacatcagaagaaaactggagctaagggtcaaatgtctcatctctccaacagaagaacaaatggatacacggggattctgacagtacaagctgccatctaagttttatccctttgctagaaaagactaggacgaggaggcttgtttttcttctgttttgtcaagaccttagggattaactgttctctgccagatacttaacactagttccaagactaactaataaaaaagctgtaagaattagtttgattttgaaaacaaaactttagtggttatcatatccctatttcttctgtgtaagttccatttataagaatatcaaaagatgtcttttggtctattggtgagtgcaagctgcccatcccagatttaaattatcagctgcccaaagatctgaaaaaaagttcatcttcctagtcaattattaatatactagaaaaatcttcagccatgttcacctggagacttttataaataattgcatcctgacccacggatggctcagtgtcctacactcataataactaaaagcactgatggatggctaccgacattctaaatgaccaatacctttggcacaggatgtttatttccttttgcttagaaggaagaggggcaggagatgcagatgcattttctttatccatggactggatatactggccatcacaatgctactgttagtagccaaacttttccttcatagaaacaagagtactgagactgaggaggttctgctggtatcgatgagacaggggagggctacttgctctaccccagcatacatgggctcacacgatgtgcttatgcccactgtacagtaacgtaggatgccacgtcctcacgcaaatcagaagggaaagtgtgggtaaggtagcaacgtgaatggaagagacactttattagataaaaccctttgttcccgattcaggatgtttaatttgcttctctttaaactctgtgacttttcctggttcaaaaggacagtgatggacagcagcagaggagtgggggtctgaaaaatgtaatctttgtgtcaaggcactctgtggcctcacaactgcccccctgtcagagggatgctgccttccagccctaaagacactagggcttttcaatggacggggtgttgaagcagccagatggtaaggtcttcctgatgtcctccagattgcgaatgtccttcatgatctcctcgatatctcggttatagtccatgatggcagcctcctgcttcttggcttcattctccaggtcagacactttcctatcaagatcgctgaccttcatttcatctttggctttgtttagggtgccttcaatctcgtttagcttattcaggtccactgtatccagctgccccagctgctccaagaggtcattaataatgctgaggaggctagtaacagagtttttggcttttctggcattgatctcggcttcttgagcagcctgtgaagccatccctgccatcatcatgtcctggtcagcgtcatcttgttttctctttagctctttttctgcttcctgcagttgcttcaacatattgttcacctcattatccagatctgtaacttctgcaaaagttctttcagcttctgccttggtgctggtggcattcttttggacagcgcttgcgatcctctccgcctcatgggccttgttcttggcctctgtggcatccgccgcagcactgcccagggcctgctgggcttctctggtcttttcattggcttcagtgatggtctggttgatggcaggaatcttccttagtgcctcctctgcggccgtcttgttatcgttcacgcgcctatcaaaatctttcaggttgttgagaatgtcattagcttcttgtaaggtatcccgtcccttctttgcagcttcttcagcgagggccttggcagcatcagctcgggctaggagttggtctgcggtctgctgttcagtcttgcctttctccagaaggttcttgacttcaagttccttccctctcatatcttctctgaggtcctcataatcttttaatttctggtcaatcagttgttccagattctcagcttccatctttatgttatttgcttcattctccagtgtctcagagtccaaagggctcagctgagccacgctggcatagatctccacagctttgtcaccggcccttttggcctcctcatgtactcgggcagcttgtttttccagatcctgtgagatgttcttcgcttgttcatacttcctattaagctcttcaatctcaaatgctgtttgattttctcctgccagtgtcctcagaagcaggttgtatgcctcagttgacgtatcattggctgtctttgccactcgaacaatgtcatcagcttcctgtttatgacgttcagcaagctttcgagcctcttctgccaaaagagtcatgttgtttgggtcccctgtagattctggctgagtgactgacacattggcagcagcgacttttgctttctcaagttctctggatgcgatttcaatcaaccgctctgtgttctctacatgggcacgcgcttgttcagccaagtttccagtctcttcaatggtattccggatattctgtaaacggctaatttggctggacagagtgttattcactctctgtaggcgatccatcaaattctggtcaacatctttgacatcctgggcctcacgaaggaggtccataacttccctctctgcttcctttagtctatcctcgaaggcttgatctgtcaccatctcatccccagttccaaggtttgctatgagactctctaattcctggagcttcactctatgatcagcaaccttatcctttaccagccggtaacaagctggacattcctggcagccaggccaagaccgattgtagaaatagttttcttcacactggtcacagcgatttcccacaaagccttctctgcattcacagcgaccatcatctttgcactgaagtgaaagagatccctcaggatgacagtcacagggtttgcagccttcaggtccaaacccaaagtggttgacctcacagcgctcacagtgctgaccagtgatgccgggctggcactcacactggccggtgcggatgtcacactgcccattggtggagcccaaggcatggcagtcacacctctcacagccttgcccactctgcagattgtagaatccagggtcacaagcaccacagtcctggccagtcacgtgaggcaaacattcacactgccccgtcacggggttacagctgctctgctgcttcatggtcccatacggattgcaattgcaggctttgcatttgtctgctggattgggagccaggggatttccaaaaaatccgtctttgcaccggtcacaatagaagccagcagtgttatagatgcacttcagggattctcccgtcaagcgattggaatttccaactgcgttgggattcatgttgtcactgcactggcacaggcgggaaagtctcacaggggcggttctacccagggggtctccaaagtaggcatcatcacagaggctcaaatctctaacagttgtggcagtaggaagtttggtggaaaccaacttctttgttctggggacaacagcacaactggaacttcaagacacggacgggttggcaatcggaagaggtgcctgcagttgaatctccatagtacccatcactgcacttctcacagtgcgggccagccgtattgtctctgcagttacaaacacctgtctcaggatcacaggtctcgctgtgtccattgcaggcgcaaagcacacatggactgtatggtccaagattaggagtttctcttctgtaacctgagaggcacatctcacaaaactgccctccatatcccacaggacaggtgcaggactccacccaagttgcagggactccaggcccaggacgagcacttgccagggtgacatcatccaaatatccagcacttctctcactgtatgtcccacgtatcttgatagaggtcaagttgtttaggagcttctgaaattcaaaaggggtaagagcaggcctccaagggtaatctgttgcttcatggagcctgaagacatacttcacagtggtctcacttggataggaattgccctgagcgatcaagggtacagatactcttaagccagctccctcaagcacaaggtcttcggcagagaggcgagtatctcgcctgtccactcgaaaggagaaggagaggttctgaccataactcaacacctgcttgcccaagaactttgcaggagcaatgaagtaccgaggaaagtagctgtctgagatcacggcgatatcttgcctctcagaggaccactcgagagatgcttcagagccatctctctgttccgcacgccacccatcctcatcaatctgaaaggtagaggagatagaataaacactgtagccaacagcgtttgtacagacagaagaatgcccaaagcagaagcagggtgtgcaaccccgaggattagatgattccagattaaaaaatccaggtttgcatctttcacaattgaagccttcgacattgtctttgcaaacacatcttcctgtttcaacattacattcatctatgctgccagagggatcacaagagcatggcctgcatcctgcttcagtgagagaatggaatccaggctggcaacggtcacatttgtcccccatcactcctggcttacagctgcatctgccgtaactatcacactgtgtgcttagagagcccacaggactacagtggcatgaagagcaggcttcattgttgccaaggcggaagaagttctctcggcacctctcacagtgggcgccatctgtgttatcctggcagttggtacagtggcccccatggccagtggaacgatagagttcagggtcgaagtagcattcctgggatcgaccattgcaatcacagggcaggcattcactggcactttccgcagttgccctcctccacggccggtcattgaagaaaggaagacacttttcacagtctactccatatgtgttatgtttgcaattacacaccagcttatcaaattcgttcttcatacactcgcttgcgtgtccattacatttacatctgccacctacagcaaaatcagagatggcataataataggacttgagaactttgggatcgttaaacacttcatctccaaaagtgttcaggcgattaagagttactctgatgtcagtggcagttacccattcctgcagcacagggctattgtcaaagttataggcgctgggccttccttccagggtagaaaaggccacgttgcccccagtgaggggagaaatgtcactgaattcatcagtacacaaggcctgctgctcgtcccctcctgtcctgatgaagccgcggtttgccttggagtaggtgttctcgcaggaaccactgtagtactggtaaggaatccagggcccgtcttcccgtgtgcgcttgtaaaatggcaaagctctccgggcggctggtgtggaaacttgagacgcacataggtgatgtcaaaagcttttccccaggtgcagcgtgaggttgatggagctggggtactgcaccccggccagcatggtnctgctttgccaccaggtggtgtcggcctggttgttgtagtcggtcaggaaggctgccccgtgctgcaggtggggctgcccggcgtcgcacaggtgacaggactttgtgaccccggtcaccccggtctgcacacagtattcctcgggcggagtcccacacgtgttggtggccaccacagtcacgttgaaagcggcgttgacgaactcgggcatgacagcgact

SEQ ID NO: 57767 - DNA, 2192 bp, Homo sapiens
accaacagctatgacatgattacgaatttaatacgactcactatagggaatttggccctcgaggccaagaattcggcacgaggaaagatacactcaccggagaaaagaagtttctgaagaaaaccacaaccatgccaatgaacgaatgctatttcatgggtctccttttgtgaatgcaattatccacaaaggctttgatgaaaggcatgcgtacataggtggtatgtttggagctggcatttattttgctggaaaactcttccaaaaggcaatcaatatgtatatggaattggaggaggtactgggtgtccagtttcacaaaggacagatcttgtttacatttggccacaggcagctgctcttttgccgggtaacccttgggaaagtctttcctgcagttcagtgcaatgaaaatggcacattctcctccaggtcatcactcagtcactggtaggcccagtgtaaatggcctagcattagctgaatatgttatttacagaggagaacaggcttatcctgagtatttaattacttaccagattatgaggcctgaaggtatggtcgatggataaatagttattttaagaaactaattccactgaacctaaaatcatcaaagcagcagtggcctctacgttttactcctttgctgaaaaaaaatcatcttgccccacaggcctgtggcaaaaggataaaaatgtgaacgaagtttaacattctgacttgataaagctttaataatgtacagtgttttcctaaatatttcctgttttttcagcactttaacagatgccattccaggttaaactgggttgtctgtactaaattataaacagagttaacttgaaccttttatatgttatgcattgattctaacaaactgtaatgccctcaacagaactaattttactaatacaatactgtgttctttaaaacacagcatttacactgaatacaatttcatttgtaaaactgtaaataagagcttttgtactagcccagtatttatttacattgctttgtaatataaatctgttttagaactgcagcggtttacaaaattttttcatatgtattgttcatctatacttcatcttacatcgtcatgattgagtgatctttacatttgattccagaggctatgttcagttgttagttgggaaagattgagttatcagatttaatttgcccgatgggagcctttacctgtcattagaaacctttcctcatttaagaacttatgaatatgctgaagatttaatttgtgatacctttgtatgtatgagacacattccaaagagctctaactatgataggtcctgattactaaagaagcttctttactggcctcaatttctagctttcatgttggaaaattttctgcagtccttctgtgaaaattagagcaaagtgctcctgttttttagagaaactaaatcttgctgttgaacaattattgtgttcttttcatggaacataagtaggatgttacatttccagggtgggaagggtaatcctaaatcatttcccaatctattctaattaccttaaatctaaaggggaaaaaaaaaatcacaaacaggactgggtagttttttatcctaagtatattttttcctgttctttttacttggttttattgctgtatttatagccaatctatacatcatggggtaaacttaacccaggaactattaaaatgtaggttgtctcagtcccctccaggcctcctgaatgggcaagtgcagttgaaacagggtgcttcttgctcctgggttttctctccatgatgttatgcccaattggaaatatgctgtcagtttgtgcaccatatggtgaccaggcctgtgctcagtttggcagctatagaaggaaatgctgtcccataaaatgccattcctattttctaatataaaactcttttccaggaagcatgcttaagcatcttgttacagagacatacatccattatggcttggcaatctcttttatttgttgactctagctcccttcaaagtcgaggaaagatctttactcacttaatgaggacattccccatcactgtctgtaccagttcacctttattttacgttttattcagtctgtaaattaactggccctttgcagtaacttgtacataaagtgctagaaaatcatgttccttgtcctgagtaagagttaatcagagtaaa

SEQ ID NO: 57768 - DNA, 251 bp, Homo sapiens
  misc_feature (1)...(251): n = a,t,c or g
gggnnnnnnnnnttggannnttgnanacngcttgacatgattacgaatttaatacgactcactatagggaatttggccctcgaggccaagaattcggcacgagggtattccaccacacccaatgctctggagccacaaggagtgtcccttcttccccagcagagccgtgggagggtccttgtctgctctcctttgaaccttggcagcccttggatggagggctccctttccctcccctttttttttttttt

SEQ ID NO: 57769 - DNA, 1469 bp, Homo sapiens
aggcctttagctatgacatgattacgaatttaatacgactcactatagggaatttggccctcgaggccaagaattcggcacgagagactggacctactgattcaacttggagatgagcgggtctgtcctcttcacggcgggagagaggtggagatgctttctgaccccgtcgaggtcatccctgtactgggccttacataatttctgctgtcggaaaaaatccactacacctaagaaaattactcccaatgttactttttcgtgatgaaaatgcaaaggagcccgaaaatgcacttgacaagctcttctcttcagaacagcaggcttccatcttgcatgtgttgaatacagcatctactaaagaacttgaagctttccgattgcttccgtggaagaaggtccatcaatatcgtagagcacagagaaaactttgggccatttcagaatttagagagtttaatgaatgtgcccttgtttaagtataaaagtacagttcaagtttgtaactccatactttgtccaaagactggacgggaaaaaagaaagtcaccggaaaaccggttcctgagaaagctcctcaaaccagacatagaaagagaaagacttaaggcagttaatagtatcatatctatcgtttttggtactcgaagaattgcctgggctcaccttgatcgtaagttgacagtgctggactggcagcaaagtgaccgttggagtttaatgagaggaatatactcatcatcagtctatttagaagagatttcctcgatcatttcaaagatgcctaaagcagatttctatgttctggaaaaaacaggactttccattcagaactcatctctgtttccaatactgttacattttcatatcatggaagccatgctgtatgccttattaaataaaacttttgcccaggatgcgagcatcaggtgctgagcatgaatcgaaatgcagtggggaagcattttgaactgatgattggtgactcccggactagtggaaaagagctagtgaagcagtttctcttcgattctatactgaaggcggatcctcgggtgttcttcccatcagataaaatagttcactacagacagatgtttttatctactgaactacaaagagtagaagagctttatgattcattattacaagctattgccttctatgaattagcagtgtttgactctcagccttagaattctgaggttaacgtgctaaagtataattattagctctaacgtaacaccaactgttgtgaacatccatgttattggaaaagaacacattttcagtgtattttagatgtttaaattctgacttttggctattaaatggtttacacaataagccaagaccaaatcaataaacattttatgagattctgtgcctctcaggttaacgtgttaaacagtaacatggggcttggtgcagtggcttatgccgataatcccaagtagctgggactacag

SEQ ID NO: 57770 - DNA, 513 bp, Homo sapiens
  misc_feature (1)...(513): n = a,t,c or g
gggaaacttctaacatttagcttgtaagtcctgacataagatagtgaagatatttatcttctttctaatatttgtatagtccgccaatgtattttcttcccactattcccattaacataccaaacactgtttctaggtccaaagtctatttctaggagtggccaatatttgtattgttgaatctcctagggaatgctaaatgtttcactttaaaatacctatttataccaagtagcatgagattagtactagagtgagatttggaatattagtccacatatcacaaactgcttgcctacatgtatagattttttttttcacccaccttcctaaccagggaatttgtttccttaaatttgttgttgttgttgttgttgtttgttgttatttttttgagaagagtcttgccctgtcgccaaggtgggggaatgcattgacgtggatcntcagtttcacngttaacctcttacctccccggttttaatcggatttttcctgcttcagccttccgga

SEQ ID NO: 57771 - DNA, 404 bp, Homo sapiens
  misc_feature (1)...(404): n = a,t,c or g
ctcttaagatccctattagctctcaaattgtgggataaaaataattgttaaggcatgcctaatactcttatacagactttgtaaactgatttcagagaagcgattaaggaattgtactgtctttaaacaatatttagaatgcttcagtaaaagcatttttaaaaaatttttctaatgatgtagtaaatgtacctaatataaagttaagtggttttatttaatacttttcacctgaccatgattatgttataaataagaggatttatagtttgcatgcctgatataatctatttaatttcctttacaaaatttttgtacatgaaagataaatgtcttcattttaccagctacctncttccagattgaatgcttcagtgcactttgattttcaaatngctattatt

SEQ ID NO: 57772 - DNA, 2563 bp, Homo sapiens
acagtccagggcgctgacctgggcactcggcagctccaggcctggggacttctccctggagtcttccaaagtgtctcatcacacacacacagccacgagtacacacgcacggccacacatacacagcaggtgccctgtcctctgaagagtcacatttcaaggagtatgcaaaataagcgtgttataaaatttatttgtgtaagcattcagacatttttaggtgggaaagatgatatgcagaatccactacaaggtgcaacagaaaatcgtattggaaaggacggtacatctggcgcagaccagcagtggcacgattccaaacaaatgtcagacgagagcgcttcatggggagaaactgaaaattataatttaaagcttcatgaggcaagatatgttccaatttaaaacactaagaaatagtaccatcgatgaaaaaggaaatcaacctctaggtgtaccaaaaggggcgtagggcaaacggggaaaatttgcatttgttgaggtacaaataggagtgttctgtaagagaggggcattaattattaatgacaaaccctgcaaatacaaaattaaaacccaaatcactggtcacagaattcaaaatgtacatgtaataaaggcaaggcaatagactcaagttatggcctgtcgaatatttactccactgacgttatctacagaagcacttggccagtttgtacacagtgattccttatgcacgccgaaagggtttccgtaaaaatgacattatatacaaatctgtacacccatccaccagagcgattctccagctcccagagggagttatcaacttaaagcaggatacctgaggtttcatgtctttagttgccttatcataatcccaaatatacatttcagggtttgtttttgtttttaaagacactttcctggaatatgtgcactatggttaaaattaaaaacaaaagtaataaaataaaataaaatgatcgctggaaggagctgaccctccccacccatctgagagacttcatctggctgcagcacagtgaagactgtgtgtgtccctggacgggcgcctggcactggggtggctcccagtggcgcacctcttcggtggagtcagcgaaggctctcgttgacttttaaaaaaggaggaggatgaagaaggaaaaaaggaaaaacaaaaccccaaatgccaaaggaatttcagtgggatgaagttcctccaccacttagagagtatctctggagccgctgcacgagctgggccaccatggtgtcggagatgccagggcacgcctcctccgctaggtagatggcccctcgcagctcttcaatggaccccaagttccctccgcacgccctggctcttctccttcaactctgcaaacagaggagaaataattgtagataaacactgagagaaaggcctctttgggatgtctttcatcttatttctgtccaagtccgatggctgaagagctccattctcgagattcttgggatctttttctcggattgtgaagatccagtccccagaatcactgccccccgaggcttggccatctgtttccgcgtcggaatcctcggagctcgagtcgtcatggctctgctcggccttccatctcttgtacctgtcgatgagctcggtcaagtaggaagttttctttgcattgcgtagtataaacttgtgcttcaataactccttagcagtgggtctaaagctcggctccttattcaaacaggcctccacaaactccttgaggggtttactgtagtttccttccaacgtcggtgggttgttctttggaatgaggaataaaactttcatggggtgcagctcggaatgaggtggttcccctcttgcaagttcaatagctgttatgcccagggaccagatgtctgccttcgagtcataggccgactgtttgatgacctcgggtgccatccagaatggggtgcccacgaaggtgttccttttgatctgggtgtctgtcagctggccagccacgccaaagtccgccagcttcacctcgccatgctcagacagcaggacgttggccgctttaatgtctctgtggattttcttctccgaatggagataatcgagtcctttcagtatttctcttaatatagtagcgatctgggtttcatctaatgggccaggttctaatagatctagtgcggagcctccaccaagatattccattattatccataattttgtatccttcagataggatccataatatttggttacatatggactgtcacactgactcagcactgtgatttcttgttgaatgtcctctatctcatcttcagcttcttccagatcaatgatctttatggcaaccactttctgagtccgattgtcaatgcctttgaacacctctccaaaggagcccttcccaattttctctagttttgtaaaaagctcttctgggtctgcctttaggttctgcatgccgggcaggcccgactgcaccggggagtgagccatggcgctcaggacggccacttcctgggacgggacggccgggccgcgacgatccgcgcggggcggcgaggcccgcgggcc

SEQ ID NO: 57773 - DNA, 3690 bp, Homo sapiens
  misc_feature (1)...(3690): n = a,t,c or g
gaattccgggagaagtgaccagagcaatttctgcttttcacagggcgggtttctcaacggtgacttgtgggcagtgccttctgctgagcgagtcatggcccgaaggcagaactaactgtgcctgcagtcttcactctcaggatgcagccgaggtgggcccaaggggccacgatgtggcttggagtcctgctgacccttctgctctgttcaagccttgagggtcaagaaaactctttcacaatcaacagtgttgacatgaagagcctgccggactggacggtgcaaaatgggaagaacctgaccctgcagtgcttcgcggatgtcagcaccacctctcacgtcaagcctcagcaccagatgctgttctataaggatgacgtgctgttttacaacatctcctccatgaagagcacagagagttattttattcctgaagtccggatctatgactcagggacatataaatgtactgtgattgtgaacaacaaagagaaaaccactgcagagtaccaggtgttggtggaaggagtgcccagtcccagggtgacactggacaagaaagaggccatccaaggtgggatcgtgagggtcaactgttctgtcccagaggaaaaggccccaatacacttcacaattgaaaaacttgaactaaatgaaaaaatggtcaagctgaaaagagagaagaattctcgagaccagaattttgtgatactggaattccccgttgaggaacaggaccgcgttttatccttccgatgtcaagctaggatcatttctgggatccatatgcagacctcagaatctaccaagagtgaactggtcaccgtgacggaatccttctctacacccaagttccacatcagccccaccggaatgatcatggaaggagctcagctccacattaagtgcaccattcaagtgactcacctggcccaggagtttccagaaatcataattcagaaggacaaggcgattgtggcccacaacagacatggcaacaaggctgtgtactcagtcatggccatggtggagcacagtggcaactacacgtgcaaagtggagtccagccgcatatccaaggtcagcagcatcgtggtcaacataacagaactattttccaagcccgaactggaatcttccttcacacatctggaccaaggtgaaagactgaacctgtcctgctccatcccaggagcacctccagccaacttcaccatccagaaggaagatacgattgtgtcacagactcaagatttcaccaagatagcctcaaagtcggacagtgggacgtatatctgcactgcaggtattgacaaagtggtcaagaaaagcaacacagtccagatagtcgtatgtgaaatgctctcccagcccaggatttcttatgatgcccagtttgaggtcataaaaggacagaccatcgaagtccgttgcgaatcgatcagtggaactttgcctatttcttaccaacttttaaaaacaagtaaagttttggagaatagtaccaagaactcaaatgatcctgcggtattcaaagacaaccccactgaagacgtcgaataccagtgtgttgcagataattgccattcccacgccaaaatgttaagtgaggttctgagggtgaaggtgatagccccggtggatgaggtccagatttctatcctgtcaagtaaggtggtggagtctggagaggacattgtgctgcaatgtgctgtgaatgaaggatctggtcccatcacctataagttttacagagaaaaagagggcaaacccttctatcaaatgacctcaaatgccacccaggcattttggaccaagcagaaggctaacaaggaacaggagggagagtattactgcacagccttcaacagagccaaccacgcctccagtgtccccagaagcaaaatactgacagtcagagtcattcttgccccatggaagaaaggacttattgcagtggttatcatcggagtgatcattgctctcttgatcattgcggccaaatgttattttctgaggaaagccaaggccaagcagatgccagtggaaatgtccaggccagcagtaccacttctgaactccaacaacgagaaaatgtcagatcccaatatggaagctaacagtcattacggtcacaatgacgatgtcagaaaccatgcaatgaaaccaataaatgataataaagagcctctgaactcagacgtgcagtacacggaagttcaagtgtcctcagctgagtctcacaaagatctaggaaagaaggacacagagacagtgtacagtgaagtccggaaagctgtccctgatgccgtggaaagcagatactctagaacggaaggctcccttgatggaacttagacagcaaggccagatgcacatccctggaaggacatccatgttccgagaagaacagataatccctgtatttcaagacctctgtgcacttatttatgaacctgccctgctcccacagaacacagcaattcctcaggctaagctgccggttcttaaatccatcctgctaagttaatgttgggtagaaagagatacagaggggctgttgaatttcccacataccctccttccaccaagttggaacatccttggaaattggaagagcacaagaggagatccagggcaaggccattgggatattctgaaacttgaatattttgttttgtgcagagataaagaccttttccatgcaccctcatacacagaaaccaattttcttttttatactcaatcatttctagcgcatggcctggttagaggctggttttttctcttttcctttggtccttcaaaggcttgtagttttgggtagtccttgttctttggaaatacacagtgctgaccagacagcctccccctgtcccctctatgacctcgccctccacaaatgggaaaaccagactacttgggagcaccgcctgtgaaataccaacctgaagacacggttcattcaggcaacgcacaaaacagaaaatgaaggtggaacaagcacagatgttcttcaactgtttttgtctacactctttctcttttcctctaccatgctgaaggctgaaagacaggaagatggtgccatcagcaaatattattcttaattgaaaacttgaaatgtgtatgtttcttactaatttttaaaaatgtattccttgccagggccaggccaaggtttncacgcctgtaatccccagcacttcaggaggctgaggttggcggattcaccctggggtcaggagtttgagacccagcctgatgaaaccctgtctcctacctaaaaatacaagaattagccgggccgtggtggccgcatgccctgtagtatcagctactcaagaggctgaggtgagattatcgcttgtaaccccgggaaacggaggttgtagtgaagcggagatcgcgcccactgcactcccagccctgagtgacagagtgagaatcccatctcaaaaaaagacaaaaaacaaaattgccttgctaaagaagtggtctcctgaggtcttaagacattcctgacagtgtcttgagtgggtgggagagaggttgctgtcattgcgctgtggaatttcacagatgagaaccacgcctagccaaaatcacttttcctgtttgcctcagtgacacagctgcagggaccctcgtggatgttgtattaaataaatttgacctttactctttgca

SEQ ID NO: 57774 - DNA, 1419 bp, Homo sapiens
cgcctttgcccgaagcccggggacgaaccgacggaccgaccgcctggcgcacggacgcgggcctcgctttgtgttcggggctagcgtcggcgaggcttgagcttgcagcgcgcggcttccctgctttctcgcggccaccccggctccggcggcctcggcgcgcgaggggctggaggtgcgggacgcgctctccgccggtcggtccccgcgcggctgagcccaggccgccagcgccgcggcccacgtgcggtgtccctgagctcctgctccccgccgggctgctccgagcaacggtgcttcggagctccaaactcgggctgccggggcaagtgtcttcatgaacccagaggatgtccgggaagcactacaagggtcctgaagtcagttgttgcatcaaatacttcatatttggcttcaatgtcatattttggtttttgggaataacatttcttggaattggactgtgggcatggaatgaaaaaggagttctgtccaacatctcttccatcaccgatctcggcggctttgacccagtttggctcttccttgtggtgggaggagtgatgttcattttgggatttgcagggtgcattggagcgctacgggaaaacactttccttctcaagtttttttctgtgttcctgggaattattttcttcctggagctcactgccggagttctagcatttgttttcaaagactggatcaaagaccagctgtatttctttataaacaacaacatcagagcatatcgggatgacattgatttgcaaaacctcatagacttcacccaggaatattggcagtgctgtggggcttttggagctgatgattggaacctaaatatttacttcaattgcacagattccaatgcaagtcgagagcgatgtggcgttccattctcctgctgcactaaagatcccgcagaagatgtcatcaacactcagtgtggctatgatgccaggcaaaaaccagaagttgaccagcagattgtaatctacacgaaaggctgtgtgccccagtttgagaagtggttgcaggacaatttaaccatcgttgctggtattttcataggcattgcattgctgcagatttttgggatatgcctggcccagaatttggttagcgatatcgaagctgtcagggcgagctggtagaccccctgcaaccgctgctgcaagacactggacagacccagctttcgggaccctcccgcgtgccgaactgatcttcgagctgcatggacctaatcacagatgcagcctgcagtctcgcctaatggagctgccattaggggagtgtaaaactgggaaatgctgctcactgacagaattaaaaaaaaaaataaccagtatgaaagtcgttgcgccgtgaatctctactgtagccatgaatttatggacagttagatgcttacca

SEQ ID NO: 57775 - DNA, 433 bp, Homo sapiens
gggcaaagccaagtaccacctgtgctcagcaggctggctggagaccgggcgggttgcctaccccacagccttcgcctcccagaactgtggctctggtgtggttgggatagtggactatggacctagacccaacaagagtgaaatgtgggatgtcttctgctatcggatgaaagatgtgaactgcacctgcaaggtgggctatgtgggagatggcttctcatgcagtgggaacctgctgcaggtcctgatgtccttcccctcactcacaaacttcctgacggaagtgctggcctattccaacagctcagctcgaggccgtgcatttctagaacacctgactgacctgtccatccgcgggcaccctctttgtgccacagaacagtgggctgggggagaatgagaccttgtctgggcgggacatcgagcaccacct

SEQ ID NO: 57776 - DNA, 1364 bp, Homo sapiens
  misc_feature (1)...(1364): n = a,t,c or g
tttttttttttttttttttctcagtcagatttcactttatttgtatcgatgacaatattaactcttcagatttataaaatgacaaaacttgataattacctggaaacaatttattattaactaggttaaccctaaatccatcaagaaaaaccacctaacatattcagtgttaaaaagagacattacgactagcctnnnnnnnnnnnnnnnnnnnnnnnnnnnnnnnnnnnnnnnnnnnnnnnnnnnnnnnnnnnnnnnnnnnnnnnnnnnnnnnnnnnnnnnnnnnnnnnnnnnnnnnnnnnnnnnnnnnnnnnnnnnnnnnnnnnnnnnnnnnnnnnnnnnnnnnnnnnnnnnnnnntgggggacacagcgagactgtctcaaagaggaaaaaaaaaagagagagacaacaatgagacagattggcacatgtatgccctgagaaataaatcaacagctcccattaaaattctcaatacgctagacagatttaaaagtacaatctggtactttctcttttttgagctggagtctcacctgtcggccaggcnggaangcaatgcacgatcnnnnnnnnnnnnnnnnnnnnnnnnnnnnnnnnnnnnnnnnnnnnnnnnnnnnnnnnnnnnnnnnnnnnnnnnnnnnnnnnnnnnnnnnnnnnnnnnnnnnnnnnnnnnnnnnnnnnnnnnnnnnnnnnnnnnnnnnnnnnnnnnnnnnnnnnnnnnnnnnnnnnnnnnnnnnnnnnnnnnnnnnnnnnnnnnnnnnnnnnnnnnnnnnnnnnnnnnccgctacacctggccccaatctggtactttcaatgttgcctataaacagatttcagctgaagctcagatggtaaggttaagatgcctggggactgggatggatggatgggcaggagggttggaagagaagtaatccaattagcattgaaaataagagcgccaatttggaaaatcgaatgtctatgatcattttcttccctaaaacagggaagaaagtgaatgtggaaaatccgattttcagcaatattcgcaggacctaaggcaacaaccacatgcctggggcaactatactttccaaatcctgaatattaaaaaggttttcacatggtaatcatcttaatattttctgttttttagatgaagttttgctcttgttgcccaggctggagtgcaatggtgcaatcttggctcacctcaacctctgcctcccgggttcaagcgattctcctgcctcggcctcccgagtagctgggattacaggaatgtgccatcacccctggttaattttgtatttttttagtagagatggggtttttccatgttggtgaggctggtctcaaactcctgacctcaggtgat

SEQ ID NO: 57777 - DNA, 1400 bp, Homo sapiens
gcggccgccctccgcggcccctcgtggtgcgcgccgtccgctcgcgctcctggcctgccagcccccgaggcccgcagcctccgcggatccgggcccgctcggcccctcccatggaaggtgctcgggtcttcggggcactgggtcccatcggtccctcctcacctgggctcaccctcgggggtctgggccgtgagcgagcaccggctcagcaacaagctgctggcttggagcggcgtcctcgagtggcaggagaagcgcagaccctactctgactccactgcaaagctgaagcggaccctgccctgccaagcctacgtgaaccaaggcgagaacctggagaccgaccagtggccgcagaagctgatcatgcagctgatccctcagcagctgctgaccaccctgggccccctgttccggaactcccagttggcacagttccacttcaccaacagagactgcgactcgctcaagggggctctgccgcatcatggggcaacggcttcgcgggctgcatgctgttcccccacatctccccctgtgaggtgcgcgtgctcatgctcctgtactcgtccaagaagaagatcttcatgggcctcatcccctacgaccagagcggcttcgtcagtgccatccggcaggtcatcaccacccgcaagcaggcagtgggacctggtggtgtcaactcaggcccagtccagatcgtcaacaacaagtttctggcatggagtggtgtcatggagtggcaggagcccaggcctgagcccaacagtcggtccaagaggtggctgccatcccacgtctacgtgaaaccagggggagatcctgaggaccgagcagtggccaaggaagctgtacatgcagctcatcccgcagcagctgctgaccaccctagtgccgctgttccggaactcgcgcctggtccagttccacttcaccaaggacctggagacactgaagagcctgtgccggatcatggacaatggcttcgccggctgcgtgcacttttcctacaaagcatcgtgtgagatccgcgtgcttatgctcctgtactcttcagagaagaaaatcttcattggcctcatcccccatgaccagggcaactttgtcaacggcatccggcgtgtcattgccaaccagcagcaggtcctgcagcggaacctggagcaggagcaacagcaacgagggatgggggggtagtggttaccccgggctgggcccctccaggagtcacagatgaggcccccgcagagactggtgacacgcttctgagcaggggcccctggggacttcaactgcccagcaacatggaggatggtgtcctgaggcctccaaggacggtccccacccctctacgtttccccaataaagccttttaaaaacctgaacctcgtgccaagctt

SEQ ID NO: 57778 - DNA, 587 bp, Homo sapiens
ggtcacatcctctgacaagagcctgaaggtgctactcaatgccgaggacaaggtgtttaatgagattcggaacgagcacttctccaatgtctttggcttcttgagccagaaggcccggaacttgcaggcccagtatgatcgccggagaggcatggacattaagcagatgaagaatttcgtgtcccaggagctcaagggcctgaaacaggagcaccgcctgctgagtctccatattggggcctgtgaatccatcatgaagaagaaaaccaagcaggatttccaggagctaatcaagactgagcatgcactgctagaggggttcaacatccgggagagcaccagctacattgaggaacacatagaccggcaggtgtcgcctatagaaagcctgcgcctcatgtgccttttgtccatcactgagaatggtttgatccccaaggattaccgatctctgaaaacacagtatctgcagagctatggccctgagcacctgctaaccttctccaatctgcgaagagctggggctcctaacggagcaggcccccggggacaccctcacagccgtggagagtaaagtgagcaagctg

SEQ ID NO: 57779 - DNA, 3658 bp, Homo sapiens
  misc_feature (1)...(3658): n = a,t,c or g
tccatgaccctgtcatcagccattgacagtttgacaaggctcccaatgttgaaggctaaagctacccatgtcatcatgaattctctgatcacaaaacagacccaggaaagcattcagcattttgagcgacaggcagggctgagagatgctggctacacaccccacaagggcctcaccaccgaggagaccaagtaccttcgagtggccgaagcactccacaaactaaagttacagagtggagaggtaacaaaagaagagaggcagcctgcatcagcccagtccaccccaagcaccactccgcactcttcacctaagcagaggcccaggggctggttcacttctggttcttccacaggcttacctgggccaaatcctagcaccatggactctggaagtggggataaggacagaaacttgtcagataagtggagcctctttggaccgagatcccttcagaagtacgattctggaagttttgccacccaggcctaccgaggagcccagaagccctctccattggaactgatacgtgcccaggccaaccgaatggctgaagatccagcagccttgaagccccccaagatggacatcccagtgatggaaggaaagaaacagccaccacgggcccataacctcaaaccccgtgacctgaatgtgctcacacccactggcttctagagccctctttccagggattctggtaaaggtggtttcttgcatcccactccccttttaccttggctttgacataggaaaggtatatttaaaaacttaatcagctgggcgtgnnnnnnnnnnnnnnnnnnnnnnnnnnnnnnnnnnnnnnnnnnnnnnnnnnnnnnnnnnnnnnnnnnnnnnnnnnnnnnnnnnnnnnnnnnnnnnnnnnnnnnnnnnnnnnnnnnnnnnnnnnnnnnnnnnnnnnnnnnnnnnnnnnnnnnnnnnnnnnnnnnnnnnnnnnnnnnnnnnnnnnnnnnnnnnnnnnnnnnnnnnnnnnnnnnnnnnnnnnnnnnnnnnnnnnnnnnnnnnnnnnnnnnnnnnnnnnnnnnnnnnnnnnnnnnnnnnnnnnnnnnnnngtaaagtaaaaaacctattaaattgaggctagagctggagatgtaattggtttttgagaaacattagtataaagcttgcccttgttgtgtggaagaagccattttgtactgctttaaagttagactaatattctcagcacgggtgtatggggacctcattacctatttttttcatcatttaccctagggtaagaactttgatcactgcttactaggtaaagaatgtttgtactgttccaaaacccaggcttctttattcctttaccactatccatgtgagcattgacaaatcatggcttagaggtgctcactgactcgctaagacgactttggccctgttgatgactggtgctgtgctccagccttatcagttaggggacccaaggtttgtttggggaccggggtacaggtaaaagccagacttggcagggacccctctttctaggctgaaccttgagtccccctgctttttggcagacctaatggatcactgtcttgcagctagttcttcatgtgggggcctcttaggccagtgcccggaggaggcatgctcctctttctatgccacagaacaaacactactctagcagagcctttcttgcactttaaagtgagattaatttagctgtaatttggttaaaaacttcctaagagagaaaattaagtctactgatttggtataggtaaatggacattaaacttttttaaagtaaaggagatggtagataccgttaggattatagtcttgaggttcatgtgaagccagtggtgttaacttactttgatttccttgttcaggtcagggcctggaacgcctgtgcggggaggtcactccaattcaaaattttctgtatgaaagcatttttcaccaaaatgagcctcatccctttatgcaacacataaccttactgagggagggaaatacggaagccacctttttatttctcttcactgtgtacaagttcacttgttgtcttgaacactgtctcaaatacctgctttttgttttggatagtaccttgtctgtataagaagctggcctttccatagagaggccctggagtctaaaattatgagaacaattaatttatttgtgtcttctattatgatctcgttttgacaataaaaatccttactactttctcaaatgtggctatttttttgtccttttaacaatagttattccactctgcccacccagagtcacactgaacttggtattttgaaaaaccattgcctttttattgtctccttttaacatcaaatgttttataacacacttgatccttttgtttctaccccctattcattacagtcaaattaacaggcaatataataggtctaacagaatgcttgcatttcattagggaaaaatgaacgtctctctcctgaaacaggttgtcggtaccttgaatgacataatattggtgtatagactaggttcagcagagggattttttccacatcttgaatgaaaatgttaaacatgtgatgcacagagtattaacctgtttcaaaaaagtatagataaataatttattaaaaaatatatataccttgtatatttaagccatatttgagaacaggctaggataggattatttaaaaaaagatatttactagagtttagaaattaccacctactgattaataatgcggtttggtctgtaagattttaaccacttttcatgcttttagagcttctgagcagttggagagagagttcaggaggtattcttggcattcagtgcttggcaggccctcaggagccgctccagcccttttgaaagggctctgcatcagggttcaagtccgcagcatagaagagcaggagcttcaacaagtgcactttgtcttggagttgggggacaagaggctcccccagcatctggatcaggcggctgcggaaggcctcaatctgcttctctacgtctaccactgtgatgtcatctccttgctggggtttgggcttaatccttttgattattaagtcctttcggtcgatcacggaactccttaagtgttctcttaaaacatgttgataactggacagcagaaactgcagatgctcaaccaattcgtcccaagtctgccactggcttttatctgactgacacttgagcagtgacgtagaattattcagaaagtagagggcctgggccagagacagaggcaggcgggtgggtgtctcacagctgtggaggaatatgatttctaacactttgcagcgcagaaggtggctttccatggtagtaaagaacatttctctctggctcctctcaggaatgtccagcacaaacccaaacatcatctcggcaattttattggagctgcaggtgggggtcctgtccacctctacggctatggagagcatcctctgaagctggcacacaatcagctgattggtgttctttgtcaggttgggctgggaagaagggtggctactgctggctttcaagattcctgttcctgaagacgtttgatttccatttgggggctgagtcaatccatcttcagttactgctttgaccagccacttgataacatccctgacattgtggggctgcttgtcacaggaaagcacc

SEQ ID NO: 57780 - DNA, 407 bp, Homo sapiens
gggaggatatatcagacagcaccagatcttagctggtaggaagctgattgacaagttctgtggaggacagagcagcagagccctgaagtccacagcaataaggggaagatggtgttctagacacaccagcagggaagagccaaacctggatggtcagtttgacctcccagggtaaggagcctctgggtcttctctacctctcccaggaccaccacagtgaaactagagccagagggttctttgcttgaaaagagggtgagtgaggtggagagatgcagatgagaggaggctttatgcagaagccatcaggttgtgccatatcctaaagcctggaaaaaggaggataccagctgataggatttggctctatgtccccaaccaaatctcatgtggaattgtaatcccca

SEQ ID NO: 57781 - DNA, 2431 bp, Homo sapiens
cgtcgacttttttttttttttttttttccagggtttggctttttattgacacaaacacacaaaggcagctgtggtaatggggtggtggggtacacaaaagcagaaatcgcacttcacacatttaggcctcatttagacaatgaggaggctgagcctgtccctccacctcccattgcaatggttggggcaataaccctccctaatcctagctcagtgagtagagggagtgacctccctacccaggaagtccccattttggttgcaatggcccaggtcctgaccatcccactctgtacttccctgctccatctccccacccatgtaaacagagttttgggctgagtttgataagctgcctctctgctttgagaaggcagtagggcctcccctaactgcaagggggaatgtgcttggatttttactttggtcccagtacaagaaacagacagcactgcctttcagagctctggctagtaaatgccacacatatctgcaaggctgaggaagcttccccgcctttctcctcaaccaccatagagacgggacatggcacagaccacgatgagggcacctgtttttgccctgcctccccaggaggctttggggctgcccccacccaatggcacatacacagatttttggcagtgttgtgggactggggaggagagaaaccccagctccaccagaacaaggaaggcactggggagtacaggggaggagaaggaggtgggaaacaggatcctccctccccgccgccacacacacacaagcacaggttttcgttgctaaggcactgagaacaaatccagagaactcagtgaagggtgggggctctgtatccttcccagagttgtgacctaggggagtaggtctgattcccgccctgttggaagaggcagccttggttaagaatggcagaaaacctggagatggaagaagcccaattgtgcttaagaagttggggacagaggacgagattgggaaactggtcaaagcccagaggcgggcactggctcaagcccaggctgaagggacactagggagagacaggtacatgctggactcacagagattggccccatatcctgagctgacgtttcaattctttggggaggtggcggggccagggacgggaggaaagatgaggcagaggtgaaagcacatggaacacaacaggggggactggctaaccttggcacaaaagcagcacagcaggcccggggaaagggtgggggcaggaagcagccggcctccctctgaccctccctgtcgccttggcagggcccagacatccaaatggtcacttcccaacctcttcagaggtcaggaagcggggaggggcaggggagagcggtcatcaccacagagaacttcgggggagggagggcagagcattatgacagaggctgaaatgcaagtctggtggccaacagaacgtagcttcccaacttctcccttcgctggtctctagggtctcacagccacttgccctagttctccttctctggccctggaaccaggaggaccttgcccacattcttcttctcctgcatctgtttcatggcatcagccaccttctcgaagggccagactgagtcaatgtggggcttgatgtggccctggttgtacagagccaggaggcggggccaccacaccactgaccagctccacctcaccatccaggtagcccaggtggaagccacacacagcccggttggcctgcagcagctgcagagctgtcacgctgaactgattccaccatgtccgggccagggccatcaggttccgtttggggcccgtcagcaggttggccattccataggtgacgactttgcccatgggtttcaggaggttgtagcccttggcagtatctgacccacccagagggtccatgacaatgtccactcctttaggggaaatcttcttgatctcatccacgtagtcagtcgtgtgatagtcgatgggatgtgtgaccccattctccttcagtgcctcgtgcttgctggccgaggccgttccgaacactgtcacattctccactgtacggcaccactgcacggcagccatacccacaccccctgcagccatgtgtaccaagacgctgtggccaggctgtaggttgccgaagtcaaagaggaccatgtaggctgtaatgtaattgacgagcaaggcagcagcttcctcaaaggtcatggcctcaggaatcaggaaggtctggaccgagggcacagtcacctcttcctgccacatccctgaccggttcaacaccatcacccggtctcctgccttgcggtcgctgactccctcgcccactgcgatcacaacacccgcgccctccatgcccggagtgacaggcagaggcgggagacggtcgtacagcccctgcctagccatgaggtctgcgaagttgagcccgcctcgtgccgaattc

SEQ ID NO: 57782 - DNA, 3558 bp, Homo sapiens
tttttttttttttttttgcaggttgtacgggtttattgttccaataccacaagagacatacagaagcagtgctttctctgggcagcctcatggaccagatcagtgtcaaactgtacccttgagtgtccccaaaggttccagcagagggaagaagaggactggacatgtttgggcccctgttcccggtctttggtaaacagacgcttaagttgacaacttggacttggccaatactgcattctaaatcaccacatcattcccaacttgtcactcatgcttcagatgacgaaaatgccacatcagattaaatgagaaaaaaacctttcagataaaatgagacttgaagtcatacaaattttatacttgatctaaattaagcaagaaccctcaactctgtaataagtcgaaatacaagatataaggcaggaaacaaggcaagggaaaacacacacaggggcatctacttgctggaaacatgttgggagagaggcaggagcaggcatggctttgtttcttcccaaacctgcctgatgtcaaaagtacgtcaaaaggagcctcacagtcccaggagagcatggtcccaggtattgctgtgacaggtggtgaccctggagccagatctggaaggccttcctgggggctgcccagggaactcacccatgaatccagaagcacttaacactggtggtggtgatttgtcacatatggcagcaagcagccattaaggctgtaggaggagagatgtgaaaagcaagatgcgtttgctcggtggcatgtgggcaggctgactgtggctctgcaggctgcagcaggtccagccggtgacccaacagggcatcgggcaacctgggcaggtcacaagtcaatcatttcaccctcacgtcgagcagcacagcactcagtggctctgacaacagatgtagagaaggagattacaccactttaatgcaatgatgctgaagatgtaaaattaggaagagacgttcatgttctctgtacaatacatccatttacagaatcagccagtactgtgtacaacatataaatacatgataaaacattagaggtgcatagagcatacttacagaagccaaaaagttcactttatacatccaagaataaagagttaaaaatataaaaataagaaacacacactgctttgaaatgtaaaatgactttcacatacacaggtgcgtggagatgcccactcccatagggtccaaagtgacagggaggatgtcaagcagaggaattcacctgcaaacatctggacggctgactcacaaggtctacagatggcattttcataggaaagacaaccctattccccaaccccattgtccaagcagagctattcaaggttccaaatgatcctgtgggttagtggatcacactgagacagaaaagttccaaatttgcttcgcaacagaaccaaggtcaaaacttgctccgtcaactggcaaatgactcaactgtgaccctgaggtcagcaggtgcaccagccccctggtgggcaatgcccaggagttactttaaccctgtgctggcttctttcctggccatcaactccccaaagtagcagaagaaaagatggcagggagggggtagtggaagactggcatttctacttagttcaggtaggttaactcccttggtggagaatgcaaccttcttgcttcagtttcaagtccctctgggagtcaggcagtccccccaccccccgcaaccccactccgtgccacatcaggctctgtcttgcaggagagctcaggctggctggccttgggcagcccaatgggttatacccaggaaacccctccagcaagaccagaagggtcgccaagtgacagagggctttagcagtgtaaattttgggggaaggcaagagtgctcctgcctaaagagtattatatcaatgatattctgtatacagatttaagatcaatcattatcaaaatacacacactaaatatacaatgtttcccatggccataatttattatctcaccacaaggcacaatacacagagctttgagggtccaatacagtcatcgtgacagaacgcaccgcagccttggcacatgatcatggctttcaggctgcacgcacactggagcgagatgctttccaccgtgctgctgtcagtgaacatttgcaaggaaagtgatgcactgtggctcgcaccaaagtttgctttgtggctcagctgcaccacacttccagcaaggcctttgggaaaggtgggagagctagaggaataattaaagctggtggaactcagttggagtttagaaagcttcccataaaatgcctgcttgatgctgagttgggaggggagagaagaaggctccagaggctcactgagccccttccctggctctcggggtaatttccagaagggcaagtccatgacaaagggcatcccttccaagtgacccaccagttccaggggactatgcccagtagctttcctgttctcggcatttgccttaagaggaccccccacaaaagtcttctcattcttgacgctgccaacaaaggcatgtggctttggagcccagtcttcccttggagtctgtaccccaccagacatggagtttgtgcttggtcccaacttcccactgggaaaaactggagggatctcagcaggaagaggcatcgggtccgcaggcctggggcgctgaagggttgcagccacattcccagagccaaaaagcttcttcccttggcctgtaacattgctctgatcacccagggcccgacctgtctgctctggaccaaaggagatcacatttggagatgagaaacgaggtgttctcgaggtagtaagatctcctgggctctttcctggagcagcatttgaattactgtcctgtgacatagcacggacttccttctgatcttcacaactaaaggaagagaactgctctttggaatccatttcttccagtttcctagaggatgtaatgggatttgtcactggatggagggagtcaaaacttgggactgccttgcaattcttttggggtgctccaggagcctgggtggcctcaatcctggcaagaccagtgcctgtttcacagctatctggcagaagaggctccttcaaagcccttaaagaactggggctgccttcccatcaaccatgcccactgttttttcccaagaccatgtaaagatccccatgcgtaagcgagccatggctctggtcttttgtaagtggtacttgtggggattctgacatgctgtcatcgtgggctggtggaagaaccttctctaggggcaagctaccctgcagcaactgcatcacaagtgggttagtggcctccactgaggacccaggcatggacaggcacacggctcttggctggtactcagtactggccagcagtagggaatctgggatcttttggcggaccgcacatactcgagacacccagctctgaggagcaaccatcccatctgtccttgtaaccagacgcatgtcaccattcaccttggacagtggggcagattggttccaattgggtttctcatccttgtccaccgaagatccct

SEQ ID NO: 57783 - DNA, 1121 bp, Homo sapiens
  misc_feature (1)...(1121): n = a,t,c or g
tttttttttttttgtaccaatctttatgtatttattcacacatttgataaaaatgtcacagttaggagtgaaatcattacaatgacatgagtaactgtacagacagaccccaagtgcagaatcaaattgccctaagtcagaacatggagcaaccgcaactccttcgcacttgtgcatgtgtgtgcgctcgcagacgcacacacacacacacatattctctctctctcttatgcacacatccatccacatcccaacaattgcaggtgctaagtttggacataacccagggactcttccctgacttctgtcaggtccctggaaagaagaagtaataaatgaaaagcagctggggactgctcgatgcatctctcctcttccaacaatgacgcggagaaggcaagacatacactggggcagctacttccttggcacaaaaatgaacaggcaacaagaaggtcaaggaagtgtttaagttagtctcaggtttaaaccacttttcaacaccacaaaacagtagcaagcaggaaaaaaaaaacaaaaacaaaaacaaaaactctggccctcaagactccagaaaaaagggaaggaggaggatttaaaacttgatccctattattctaacaaattgcagcatgaccataagcaaaaccagctcggtcaaactgacagcatcagattgtgaccttatctgaacagtgtagttcacttttattttggctctgaagagaggaagaaaaactttttagaggaacttaatggtaacataaaccaaatctcccactgtattagtatttgagacaagattacatctatgcattcacacagcttgtctgtagatctgagagctccaagggagtggcccagcccccattcctctgactttagccttctgaaaagaacaagtcaaacctgaaatatgaaaaataatacctgaatcaaaatggtgttttctatacaatcggactagggtagaatcctgctcaattcctcaactcctatttgacacaaaagttaaaaaatttttaaactaaatttaaatgtgatgttttgagcatcaaaaagctactatctaaaaggattagtctcccagtgttcttggtacantggggaaggttaggaag

SEQ ID NO: 57784 - DNA, 2508 bp, Homo sapiens
ttttttttttttttttacaggtccagactacaacaaaattagtcacttttatttaaaagaaacattacaaataagtgtgcaaaattaaacatcatgattaaatacacatgaaaggaacatgcatactttacagcaacatccacagagaattagctgattacatgacagtgacagtaaagaactaaagaaaccggcaaaaccgaggactcgctgctatgcaggttttacatgtttgcaatctgaaatcaaaaccataaaatagagtttaacgggaatttaagaaaattaaatatatatcccaagtagctgacaatgtagagcccataacctagttaccaaatgttaaaaaaagttatgtgcctctccttcccaaaatgttagtgtgtagctattcttacaaatgaggggaggggagacggtggacctgggggctcggaggccagaccagggcatttccctccacaccagcgggaactgcatggaccctcccagaccctgctctggcagacgaccccgaagttaaaggatgttttccccataacgaatgttcaaagttcgtgcatcactctgctgttccctacacataaccgggaaacaggtttaatccaaaatgtaaccaggagaccccccgtccccgccccgcacacgcctgaggtgtgacggctcggcttctagagtggcctggtgtctgcctcattctaatggccccaacggagacggggacggccacgcacgggcacaggtgacgtcacgggcacagatgaccacgttgcgggtacggagaagaccacaggctgggctcacacgaggggaaacattcacactgtgttctctctacagggtcaggtcgtttttcttcatgttcgggcgggaaaaggaattcctttctccttttctaaggcaagcctgctggtgttgtattcaatctgcttatcatgtaagaacttacatctgcacacttgttcactcccccgctgcagactcagtaagaacgacggaatctgctgcaaaaaacaaacctgaactcgtccaccctctcagcccagtccccaggtccgtatggagcccccgtcagtgtgaggatgcggcggagccactgaagctaacgtcacagctgaactcatgggaacagccagtggccgccagtcgagctggtcacagccactgagttacctacggtgccttgatgatgattctctctttaatactggaaatgggagtccttaggaaagcagacaaccacgtatggcttcgagaccagggtccctgggcagcccctccagcccgtggcccaggaggccccctggggcacctggcaccagccccgagagtctgaaggcggcaggtggtgggtgctgtggcgcccccagctggagtcacagcttgtcatcggtcatctctagaaactgcgcgtagacatctcggatgcactcccccttggggttgaacaggaatttgtagtagctgccgtctgcacaaattgcaatgacggcgtttggctctgttccaaaggcacaaatgcacggagagcctgagggaacctgaaacttggagaaactccacttggaactgaagtattttggaaggaaactggctgaggccaaactggactgtttattcctttttggatcttcagctgcaaaaatatgcactgtgccgtggtcgctggatacgcagatgagggacgcatcctgattgaagttgatgcagtaaatattggctgcttgagatcctcttcgcagttcctggattaaatgccctgatgaagtatcaaatattcttataagcgtccctttctcggatgcagttgcaattcttgttccctgcaggttgagtgcaatgcagctcaggacaccctcgtgtgcaggaatgtccacgggtggcttctccgtgctggccaggtccacaagctgcacatggcccgtgtgcgtgcccggaaaggccaggagggagttgttactattgggacaaaggacacagaggcctttggggttatagcaggtttcgaagacgtgcaactgatggggattgtgtgtgaatgtgaacaccttaatcatggagtccaaaaccaccacaattctatctcgccgcagcttgactgccttgacttctgtagaaaattctatttcaataacagtcttcttcttcaggtcatcccagatcattactttgttgggagggtatttcggcttttttccaccaccaactaaagctaaatagttgcagcgaaataacatttcaacatggccaactcctccttctagaaattcttgtttctctttttcttttagtggatcagtgttatagactcggaatccattttccatcccacacgcaaagcatccgtggtcctggttgaagccggcgtagagcagcccgttgccgtgagggttacacggcaggaggttcatggcgccgccgtgctgggtcgccgctcctcagcgctgcatgcctctcgctggggacggcggcctggtcccttcgggccggcgctgagcgcgcggccgg

SEQ ID NO: 57785 - DNA, 438 bp, Homo sapiens
  misc_feature (1)...(438): n = a,t,c or g
acccgctatgacatgattacgaatttaatacgactcactatagggaatttggccctcgaggccaagaattcggcacgagcagggtcttgctctgttgcccaggctggaatgcagtggcacaattacagctcactgcaacctagaacacctaggctcaagcgatcctccaactcagcttcctgagtagttgggactacatgtgcacaccactacacttggctaattttagtttttgtatggatgagatcttactatattgtttaggctggcttgaactcctggccttaagcaattctnctgccttggcctgccaaagngctntgattacccgnntgagccactgngcctggtncctttcnatcttactacactttnttatctngcntccttntttactacntgnacgattnnacanacaaacaggnttgnntacctact

SEQ ID NO: 57786 - DNA, 935 bp, Homo sapiens
gaaagtaagaagccggtggtgactttccaagcccatgatgggcccgtctatagcatggtttccaccgatcgacatctgcttagtgctggggatggggaggtgaaggcctggctttgggcggagatgctcaagaagggctgtaaggagctgtggcgtcgtcagcctccatacaggaccagcctggaagtgcctgagatcaacgctttgctgctggtccccaaggagaattccctcatcctggctgggggagactgtcagttgcacactatggaccttgaaactgggactttcacgagggtcctccggggccacacagactacatccactgcctggcactgcgggaaaggagcccagaggtgctgtcaggtggcgaggatggagctgttcgactttgggaccgtgcgcacagccaaggaggtccagacgatcgaggtctataagcacgaggagtgctcgaggccccacaatgggcgctggattggatgtttggcaactgattccgactggatggtctgtggagggggcccagccctcaccctctggcacctccgatcctccacacccaccaccatcttccccatccgggcgccacagaagcacgtcaccttctaccaggacctgattctgttcagctggccagggcccgctgcgtcaaccagtggcagctgagcggggagctgaaggcccaggtgcctggctcctccccagggctgctcagcctcagcctcaaccagcagcctgccgcgcctgagtgcaaggtcctgacagctgcaggcaacagctgccgggtggatgtcttcaccaacctgggttaccgagccttctccctgtccttctgatctctgacgacacccccagccagctcagggttttagagtgtttttcattttctttttttttttttttttacaataaagtttcaggcttttttacc

SEQ ID NO: 57787 - DNA, 617 bp, Homo sapiens
ttttcaaatttaacaactttattgaatttgcagaagcattctacagtaatacatttttaaaaatcacatagcactcagtaggtacatgtatacatgtacatttcagaagacaacaaataaaattactctcagaaagctgcaaagatggacacatataatctaagaatgtggtaatggccagagggagtacccaagagaccatattttattatgcttaaggctactactttccacaatacctctgcagttaagactcttaacttacaatcacagaaatgaaaacatgataatacactgctttatacagacatacagatactgggatatagtataatttcttatggcttaaaaaaatttaatttgcttttagagtctatattgctaaacttaactttccacaaaatacaatatatcatgaaagcaaagtattattttttaaaaggccccattatctgacaaaatagatggtgaacatgcactatcccaggatatctattattatccaaagaagtgtttctcaaagtgtggtccatggtactggtccatgaattggttgctaccagtcaatgaagagataaattacttgcatcagagtgtaaatcaatcccacgcgtccg

SEQ ID NO: 57788 - DNA, 1869 bp, Homo sapiens
atttttcactcctggaaaacctaaaacaaccaatgttctaggagctgttaacaagccactttcatcagcaggcaagcaatctcagaccaaatcatcacgaatggaaactgtaagcaatgcaagcagcagctcaaatccaagctctcctggaagaataaaggggaggcttgatagttctgaaatggatcacagtgaaaatgaagattacacaatgtcttcacctttgccggggaaaaaaagtgacaagagagacgactctgatcttgtaaggtctgaattggagaagcctagaggcaggaaaaaaacgcccgtcacagaacaggaggagaaattaggtatggatgacttgactaagttggtacaggaacagaaacctaaaggcagtcagcgaagtcggaaaagaggccatacggcttcagaatctgatgaacagcagtggcctgaggaaaagaggctcaaagaagatatattagaaaatgaagatgaacagaatagtccgccaaaaaagggtaaaagaggccgaccaccaaaacctcttggtggaggtacaccaaaagaagagccaacaatgaaaacttctaaaaaaggaagcaaaaaaaaatctggacctccagcaccagaggaggaggaagaagaagaaagacaaagtggaaatacggaacagaagtccaaaagcaaacagcacccgagtgtcaaggagagcacagcagagagcagaatctcctgaatctagtgcaattgaatccacacagtccacaccacagaaaggacgaggaagaccatcaaaaacgccatcaccatcacaaccaaaaaaaaatgtccgtgtaggacgctccaaacaagcagctactaaggaaaatgattcaagtgaagaagtagatgtgtttcagggtagctctcctgtcgatgatattccacaggaagaaacagaggaggaggaagtttctacagtaaatgtacggcggcgaagtgctaaaagggaacggcgatgaacaaatgtaattaataactttctctgtgaaagctttggaaaaatcttttttttttttttttttggtcaagcttgaggctgaataaagcctttgatgcacaaaatgggactgctgaagagtggacagttggaccttactttggtgaccccatacgtttgtggtcacatgctttagcccttacacatgggtaacattgactatgggagtcttgtgaaagtgtaaatgtgcgatgggctatgtaggacataaaaggaggaaacttgtaaaatatcttttttcttttttttaatgtttctgatttctgaagtgcttgtatagcttttatctgcggctttaaactgacagtaccccgactgtttattggatctattgatttgaaaacgaatttgttaaggatagatcttaagcagtaatctgtcagtgtttgtatttgtattctctgcaattttactgtgaaaaaaaatttgttttcaacaattggtgtcattttcttgatgtcactatttgttggagagttaaatggtctcttccctttgtgtatcttacctagtgtttactcctgggcacccttaatcttcagaggtgctaaattgtctgccattacaccagaaggatgcctctgataggaggacaaccatgcaaattgtgaaatagtcctgaagttcttggattactttacacctcagtattgatttgtcccagaattttctggcctttcatggcaatgaaaattttaagaagaaagatttaaagtattttaattttaaagagtgtgttataaaataatgtactgaattctttatcccattttatcatcctttcagtttttattaatctactgtatcaataaaattctgtaatttgaatgagaaaaaaa

SEQ ID NO: 57789 - DNA, 1493 bp, Homo sapiens
atgctgactgtggtcgccagggatcgttacccacttgacacgacaggagaaaacaggtcacagattatctggcagccacacagtgcatatgtatggtaatatggggggaagggtagcacacagacaaatcatctgcccaagtgcatgctgagtggatacagatctcaggctgagcacctgggggcagggctctaaatcttggactaaattcactcatgagccctccaggatatctgctggcaggtgcacggaggatgtacatagcacatgtgtttgataatgcagtccaattggggagtggataaagtgcatttattttcttctatgtttgtttttgtaaaaaggagaaaggaagcaaaagactccttcctttcagacccagtgtccactgagcttggagggggtggagccgggaccagccccctaggaaaaggtgtaggaatagaaggcaatggcattggcgctatagtccatggggaggaggtgcccgatgtgcctggcccctaggctggccccacccagagcggaggagtgcctcagcttcatcagggtgaagctggagaagaagttctgagcctggatctctctgccctgggtcagcgccagaagaaaaccttccttcagcagctcccagctcttccacacagagcccacgcacaggatggggagtccaatcttgccctggaacaagaccgggtcaatctcgggcaacactgctacgatgtgtctgcccagcatctccccagccttcctgaagatatagcgggaaagggggtctccctgctgagcaccttctgcaattttccggcaaaacccagcaaacctgcattttatcaaagtccctatacaggtgagtgagtatccctagccgatctggcacctggaaatagtggaaacatggcctgtttgacgtagccgatatcatgaggagccgcctctaggttgtcaatggagtcaaacactattttcactgcttggtgtgcgatccagtaggctgaaccctcatcacccatcatatggccccagccgccgcagccactctcggagccatcagggttgatgagcctgcagttggagcctgttccagatatgagcacaactccaccatccggtgtagctgtggcgatggagccggcggcatcggtggtgattaagtagctttcactcaggtagggaaatcggtccctcagctcctcgatcaggatcctccccgcgtcctcctggtccccaccgctcagagataggcccaagcttcgcagcggtaccagaggatccacccctgctttccgtttggccctgttcaccatctcattgatcctctccacacacttgtctgtcccgatcagccagtggtttgtgctcagtccatctgcttctgccaggatcttcccatcctctgagactaaaaggacctcggatcgtgtgcctcccccctctacacccccatagatcgcggccatgctgctgctaccgtcgctgcctcgtgccgaatt

SEQ ID NO: 57790 - DNA, 1291 bp, Homo sapiens
atgctgtagattcaaagagcctataaactttacctggctgtgaagaatgctaacaagcaggttaattcagtcatctgtattcagagatggtttcgagcaagattacaagaaaagagatttattcagaaatatcatagcatcaaaaagattgagcatgaaggtcaagaatgtctgagccagcgaaatagggctgcatcagtaatacagaaagcagtgcgccattttctcctccgtaaaaagcaggaaaaattcactagtggaatcattaaaattcaggcattatggagaggctattcttggaggaagaaaaatgattgtacaaaaattaaagctatacgactaagtcttcaagttgttaatagggagattcgagaagaaaacaaactctacaaaagaactgcacttgcacttcattaccttttgacatataagcacctttctgccattcttgaggccttaaaacacctagaggtagttactagattgtctccactttgttgtgagaacatggcccagagtggagcaatttctaaaatatttgttttgatccgaagttgtaatcgcagtattccttgtatggaagtcatcagatatgctgtgcaagtcttgcttaatgtatctaagtatgagaaaactacttcagcagtttatgatgtagaaaattgtatagatatactattggagcttttgcagatataccgagaaaagcctggtaataaagttgcagacaaaggcggaagcatttttacaaaaacttgttgtttgttggctattttactgaagacaacaaatagagcctctgatgtacgaagtaggtccaaagttgttgaccgtatttacagtctctacaaacttacagctcataaacataaaatgaatactgaaagaatactttacaagcaaaagaagaattcttctataagcattccttttatcccagaaacacctgtaaggaccagaatagtttcaagacttaagccagattgggttttgagaagagataacatggaagaaatcacaaatcccctgcaagctattcaaatggtgatggatacgcttggcattccttattagtaaatgtaaacattttcagtatgtatagtgtaaagaaatattaaagccaatcatgagtacgtaaagtgatttttgctctctgtgtacaacttttaaaatctgactttgttttaaaaaaacataaactgttcattacattcttcatttttatcatttatagttttatgcatgtaataaactaatatgtcataagatgaaaaaaaaaaaaaaaaaaaaa

SEQ ID NO: 57791 - DNA, 388 bp, Homo sapiens
caagcagcgtgatctcaactgccgaaggaactacacgaaggcaagcatccatgattttttgaccaaggacagtagactgcctatatcagttgattcaccaccagctgctgctgacagcaacaccactgcagcatctaatgtggacaaagtacaagaaagcagaaattcaaaaagcaggtctagggagcaacaaagctcctaattctattacccactacatgacatgtgggccaagtgagagaaaagtgtccttcagtttctcagtatgaagcctttatttctgaagtaacaagacacctagcaactataggaatcatttttaaaaatctttaaggagacttttaacagtccttcgtgaatagagcaggcaagaaatacaaaccttcat

SEQ ID NO: 57792 - DNA, 728 bp, Homo sapiens
ggaaagtggatgtgcagttgatcccacaggacctgtgcagcgaggcctatcgctatcaggtgacgccacgcatgctgtgtgccggctaccgcaagggcaagaaggatgcctgtcagggtgactcaggtggtccgctggtgtgcaaggcactcagtggccgctggttcctggcggggctggtcagctggggcctgggctgtggccggcctaactacttcggcgtctacacccgcatcacaggtgtgatcagctggatccagcaagtggtgacctgaggaactgcccccctgcaaagcagggcccacctcctggactcagagagcccagggcaactgccaagcagggggacaagtattctggcggggggtgggggagagagcaggccctgtggtggcaggaggtggcatcttgtctcgtccctgatgtctgctccagtgatggcaggaggatggagaagtgccagcagctgggggtcaagacgtcccctgaggacccaggcccacacccagcccttctgcctcccaattctctctcctccgtccccttcctccactgctgcctaatgcaaggcagtggctcagcagcaagaatgctggttctacatcccgaggagtgtctgaggtgcgccccactctgttacagaggctgttttgggcagctttgcttcccagagagcagatttccagctttcgggaagccctgggtctaacttgggatctgggaatgga

SEQ ID NO: 57793 - DNA, 3160 bp, Homo sapiens
  misc_feature (1)...(3160): n = a,t,c or g
agcccggaagcgcagaagctggcggaaccggctcgctgcaaaacgggcggcccgcgcggaggctcgcgagatccgcatgaaggagctggagcggcanagcaaggaggaagacagtgagcgctactctcgtagatccagaagaaacacatcggcttctgatgaagacgagcgcatgtcagtgggtagtcgtggaagcctgagggtagaagagagaccagaaaaagattttactgagaaggggtctcgtaacatgccgggcctgtctgcagccacgctggcctctctgggtgggacttcctctcggagaggcagcggagacacctccatctccatcgacaccgaggcatccatcagggaaatcaaggactctctagcagaagttgaagagaaatataagaaggctatggtttccaatgctcagctagacaatgaaaagacaaacttcatgtaccaggttgataccctaaaagatatgttgctggagcttgaagaacagctggctgaatctaggcggcagtacgaagagaaaaacaaagaatttgaaagggaaaaacacgcccacagtatactgcaatttcagtttgctgaagtcaaggaggccctgaagcaaagagaggaaatgctcgagaaacatggaataatcctaaattcagaaatagctaccaatggagagacttccgacaccctcaataatgttggataccaaggtcctaccaagatgacaaaagaagagttaaatgccctcaagtcgacaggggatgggaccctaggaagagccagtgaagtggaggtgaaaaatgaaatcgtggcgaatgtggggaaaagagaaatcttgcacaatactgagaaagaacaacacacagaggacacagtgaaggactgtgtggacatagaggtattccctgctggtgagaataccgaggaccagaaatcctctgaagacactgccccattcctaggaaccttagcaggtgctacctatgaggaacaggttcaaagccaaattcttgagagcagttctctccctgaaaacacagtacaggttgagtcaaatgaggtcatgggtgcaccagatgacaggaccagaactccccttgagccatccaactgttggagtgacttagatggtgggaaccacacagagaatgtgggagaggcagcagtgactcaggttgaagagcaggcaggcacagtggcctcgtgtcctttagggcatagtgatgacacagtttatcatgatgacaaatgtatggtagaggtcccccaagagttagagacaagcacagggcatagtttagagaaagaattcaccaaccaggaagcagctgagcccaaggaggttccagcgcacagtacagaagtaggtagggatcacaacgaagaagagggtgaagaaacaggattaagggacgagaaaccaatcaagacagaagttcctggttctccagcaggaactgagggcaactgtcaggaagcgacaggtccaagtacagtagacactcaaaatgaacccttagatatgaaagagcccgatgaagaaaagagtgaccaacagggagaggcattggactcatcgcagaagaagacaaagaacaagaaaaagaaaaacaagaagaaaaaatccccagtacccgtagaaacccttaaagatgttaaaaaagagttaacgtatcagaacacagatttaagtgaaattaaggaagaagagcaggtaaagtctactgacagaaagtcagcagtggaagcccaaaacgaggtgactgaaaatccaaaacagaaaattgcagcagaaagcagtgaaaatgttgattgtccggagaatcctaaaattaagttggatggaaaacttgaccaagaaggtgatgatgtacaaacagcagctgaggaggtactagctgatggagacacattagattttgaggatgacaccgttcaatcatcaggcccgagggctggtggtgaagaattagatgaaggtgttgcaaaagataatgctaaaatagatggtgccactcaaagcagtcctgcagaaccaaagagcgaagacgcagatcgctgcaccctgcccgaacatgaaagtccctcacaggacattagtgatgcctgtgaagcagaaagtacagagaggtgtgagatgtcagaacatccaagtcagaccgtcaggaaagctttagacagcaatagcctagagaacgatgacttgtcggcaccaggaagagagccagggcacttcaatccagaaagcagagaagataccagaggagggaatgagaagggcaaaagcaaagaagactgtaccatgtcctaagctgaggcaggcggcaggcgcggtgcacaggaagtctcagtgtgaaggggtcttttctctccactgccaatgtaagtagaatgttctaaattcatagagaggcactgtatgacaattaccaggtgctctactgctttaagttatagactgttacttgtagatttccatgtaatcattgaggttatcacccagattagaaagacatatttgttatcagtgtaccgttctaattgagagcattccagtagtatcaaacaataatgtctactgtttatagtccacttaataaaaatagaggcatttactatttgccttaggctgataggaatgtgggttttcttgaccaaatatatcagcatctaattgaaatgaccaaatagcattcttagacttctgtattatgaatataattgatatttaaattaatgtcttgttcacatatgtgtactttcatatttgattttaaaatgtacattataacctgtatggtattttatttaaaggagataaacagccaaatagcaaataggtcactgaatgataagatttgcaccttagaacaataatcattttaaggataacaagtaaatgtctgaaagcatgaggggctttatttgcctttacctcatatgagtctttgatcttgaaccgatacttttggatctcattgttgatatacctgaatttactttgtaagagattttaacttcacttcatgctgatgatgtatcaaattcattttatagaaagatttaaagtttttttctggaagtgatatatgtcaaattacatttcctactgcagtatttgagcagggacagtcattttttaaatgtttttggccgggcgtgg

SEQ ID NO: 57794 - DNA, 1212 bp, Homo sapiens; identical to SEQ ID NO: 14641

SEQ ID NO: 57795 - DNA, 2278 bp, Homo sapiens
cgagtgggagtattggcaaaaggattacttctccgaggagatagaaatgtcaaccttgttttgctgtgctcagagaaaccttcaaagacattattaagccgtattgcagaaaacctacccaaacagcttgctgttataagccctgagaagtatgacataaaatgtgctgtatctgaagcggcaataattttgaattcatgtgtgggaacccaaaatgcaagtcactatcacactgacatctccaattattcgagaagagaacatgagggaaggagatgtaacctcgggtatggtgaaagacccaccggacgtcttggacaggcaaaaatgccttgacgctctggctgctctacgccacgctaagtggttccaggctagagctaatggtctgcagtcctgtgtgattatcatacgcattcttcgagacctctgtcagcgagttccaacttggtctgattttccaagctgggctatggagttactagtagagaaagcaatcagcagtgcttctagccctcagagccctggggatgcactgagaagagtttttgaatgcatttcttcagggattattcttaaaggtagtcctggacttctggatccttgtgaaaaggatccctttgataccttggcaacaatgactgaccagcagcgtgaagacatcacatccagtgcacagtttgcattgagactccttgcattccgccagatacacaaagttctaggcatggatccattaccgcaaatgagccaacgttttaacatccacaacaacaggaaacgaagaagagatagtgatggagttgatggatttgaagctgaggggaaaaaagacaaaaaagattatgataacttttaaaaagtgtctgtaaatcttcagtgttaaaaaaacagatgcccatttgttggctgtttttcattcataataatgtctacattgaaaaatttatcaagaatttaaaggatttcatggaagaaccaagtttttctatgatattaaaaaatgtacagtgttaggtattatttgaatggaaagacacccaaaaaaaaaaatgtgctccgactagggggaaaacagtagttccgattttttcccattatttttattttattttctggttgccctagcttccccccctatttttgtgtcttttattaactagtgcattgtcttattaaatcttcactgtatttaatgcaggatgtgtgcttcagttgctctgtgtattttgatattttaatttagaggttttgtttgctttttgacactagttgtaagttactttgttatagatggtatcctttaccccttcttaatattttacaggcagtacgtttttttgtaacgtgagactgcagagtttgtttttctatatgtgaaggattacaacacaaaaagttatcctgccattcgagtgctcagaactgaatgtttctgcagatcttgtggcatttgtctctagtgtgatatataaaggtgtaattaagacagagttctgttaatctaatcaagtttgctgttagttgtgcattagcagtataaaagctaatatatactatatggtcttgcaacagttttaaaggcctctgcataattgataataaaaatgcatgacattcttgtttttaatagacttttaaaatcataattttaggtttaacacgtagatctttgtacagttgactttttgacatagcaaggccaaaaataactttctgaatatttttttcttgtgtataagtggaaagggcatttttcacatataagtgggctaaccaatattttcaaaagaacttcatcattgtacaactaacaacagtaactagcccttaattatggtgacagttccttattggtgtgtgtgagattactctagcaactattacagtataacacagatgatcttctccacacaccccatcacccagataatttacagttctgttaacagtgaggttgataaagtattactgataaaaaattatctaaggaaaaaaacagaaaattatttggtgtggccatcttacctgcttatgtctcctacacaaagctaaatattctagcagtgatgtaatgaaaaattacatcttactgttgatatatgtatgctctggtacacagatgtcattttgttgtcacagcactacagtgaaatacacaaaaaatgaaattcatataatgacttaaatgtattatatgttagaattgacaacataaactacttttgctttgaaatgatgtatgcttcagtaaaatcatattcaaatttaaaaaaaa

SEQ ID NO: 57796 - DNA, 1262 bp, Homo sapiens
tttttttttttttttttctttgtacagatcctttttattcagatttatataggcaatttaccaacacagaaaaccagtctagcagctccaaagtaactgtaaaaacggtggtgctgacggtggtgtgccccacacagggcagggtgacctcagacgtgggagcaggcatctcccgtggggatactatttcagacgtgcactagtgagtgtatactgagaagggattataaaccttccctggcacaacagatacaaaaagagatagaaccaatgatattttgtctaggtacaatatctagatttacagtatctagtttactggcttcacttcgtatagcaatgcacaatagaaaacggatttctttcttcaagggtattcaagaatatagtaaatatgttactatattgatggctatgaaaacagacagagacaaatgagtgaggaggcacgttctctcacagagacaggacttcattctatttcacataaatcattaagggtccattcaaatataagacctctcacaaagtttcagtcatgtatgagggcgcttacctttaagaccccatttcaaaaccattttgaaatagtgaaggggggaaaagtcacactcaaatgtgctactcttaaaagcagtgtttctaagcacagcttgcctttttcaaagagtgaaggtggcctttctgtttagtggttaggtaattgggtgcaataatcaaatcttaaggcaatggcaaggctgatggtggggatttggcacaataaggggaaggaatgatgctgtccagttgtaccttaaatcctaaaggattactaatgacatgggagggatagctacctgccccccaaacacaggggctcctggacaatacccgtggcttttagaaacaaaccctaggttcctgagggaatgaacactgccaaagtccttacagaaatcccttttatgagatagcccagtcccagaataaagcctttgcggtacttgtcaacaagcaagaagccttctgaagaggtagatgaaagcagtatttcacagcaggtgtgctgcccgacgtgacgaaagacatgcatgcgcctctcagcacagaccagaagatcaactgttgttgaaaacagtccatggtggtgagaagagatgtcggccacattactaggtgcattatttcaattttattgtattaagaacaggaatgactgccatttctttaaataaccaactaaacaaataaaaaggagcagaaatcctcgtgccaagctt

SEQ ID NO: 57797 - DNA, 875 bp, Homo sapiens
acggtccgctgggagttcggcacctgccagccgctgtcagacgagaaggacctgacccagctcttcatgttcgcccggaatgccttcaccgtgctggccatgatggactacccctaccccactgacttcctgggtcccctccctgccaaccccgtcaaggtgggctgtgatcggctgctgagtgaggcccagaggatcacggggctgcgagcactggcagggctggtctacaacgcctcgggctccgagcactgctacgacatctaccggctctaccacagctgtgctgaccccactggctgcggcaccggccccgacgccagggcctgggactaccaggcctgcaccgagatcaacctgaccttcgccagcaacaatgtgaccgatatgttccccgacctgcccttcactgacgagctccgccagcggtactgcctggacacctggggcgtgtggccccggcccgactggctgctgaccagcttctgggggggtgatcttagagccgccagcaacatcatcttctccaacgggaacctggacccctgggcagggggcgggattcggaggaacctgagtgcctcagtcatcgccgtcaccatccaggggggagcgcaccacctcgacctcagagcctcccacccagaagatcctgcttccgtggttgaggcgcggaagctggaggccaccatcatcggcgagtgggtaaaggcagccaggcgtgagcagcagccagctctgcgtggggggcccagactcagcctctgagcacaggactggaggggtctcaaggctcctcatggagtgggggcttcactcaagcagctggcggcagagggaaggggctgaataaacgcctggaggcctggccatgt

SEQ ID NO: 57798 - DNA, 739 bp, Homo sapiens
ttttcctttaaaaattttaatggacaggaaatggtatagaataactgccaagtcacataagttaacttttttgttaatgtttgtgatcccggaaagaacacactatcagtcgatgcaaaccgcatgggcgttttcatcagtcgttgtctgagcacatgaccgagtgtgggccacggacccatctttacttggtccagaaataaaagcggctgccatgtgtggcaggctgcagatctccctcgatctcagggctgggatccggtcttggtcttgagtgatagggattctccggtaaaggtcgatctgttttcactttggtgacctttgacagttctcccaggtcaggccgcacccagcccagtttgtccagcacacactcgtcaaactttgcctgctgtttgcgacagtgacgaaataactgctggccagtataatcaatgcaagtccaatattctgtaaaaggctctgcacagtgacgttttatctgcctaaagaagtccaaagcacacttgttgaccagtttgccttcctctaaacaccgcctcggatctttctcttcccagcggcagagcataaattccttgttgggcttatcacattgagctccatagtgatgggccgcagctttaagcacagcagaactaattttcacctcatctactttcagctcctctagagtgggcagctccactatccccggcatgacggctgcagccccgaccccgacgagaagccctca

SEQ ID NO: 57799 - DNA, 623 bp, Homo sapiens
ggtttttcagtatctacgattcatagatctggaattcgcggccgcgtcgaccttaaagtaaaaaaaaaaaattatgtaattaaaccagaggataaaataaataaaactcaagttaatttgccacgtagagctgtatggaagtgaggaaggtgctcttacataaacaccctccggcttccacactcatatgtatctgcttcctggtaagtctgaggttgggggaactgcaccttacttttcctctcctatatcccctagtgcggcaatatcagaacccaagggaggaaaagctggcaaagttgtcatgtgccaagcggccaatccctcctgaaatgaaggtaggttcactcggtctctcctaagcagaagaggatgtccaggaaataaaatttaaaaagccattgaagatccaacaaaccgcagccttggggtcgacgcggccgcgaattccagatctatgaatcgtagatactgaaaaaccccgcaagttcacttcaactgtgcatcgtgcaccatctcaatttctttcatttatacatcgttttgccttcttttatgtaactatactcctctaagtttcaatcttggccatgtaacctctgatctatagaattttttaaatg

SEQ ID NO: 57800 - DNA, 1086 bp, Homo sapiens
ccccttagcgcccgggctcaggggcggtaaaaggccggcagaagggaggcacttgagaaatgtctttcctccaggacccaagtttcttcaccatggggatgtggtccattggtgcaggagccctgggggctgctgccttggcattgctgcttgccaacacagacgtgtttctgtccaagccccagaaagcggccctggagtacctggaggatatagacctgaaaacactggagaaggaaccaaggactttcaaagcaaaggagctatgggaaaaaaatggagctgtgattatggccgtgcggaggccaggctgtttcctctgtcgagaggaagctgcggatctgtcctccctgaaaagcatgttggaccagctgggcgtccccctctatgcagtggtaaaggagcacatcaggactgaagtgaaggatttccagccttatttcaaaggagaaatcttcctggatgaaaagaaaaagttctatggtccacaaaggcggaagatgatgtttatgggatttatccgtctgggagtgtggtacaacttcttccgagcctggaacggaggcttctctggaaacctggaaggagaaggcttcatccttgggggagttttcgtggtgggatcaggaaagcagggcattcttcttgagcaccgagaaaaagaatttggagacaaagtaaacctactttctgttctggaagctgctaagatgatcaaaccacagactttggcctcagagaaaaaatgattgtgtgaaactgcccagctcagggataaccagggacattcacctgtgttcatgggatgtattgtttccactcgtgtccctaaggagtgagaaacccatttatactctactctcagtatggattattaatgtattttaatattctgtttaggcccactaaggcaaaatagccccaaaacaagactgacaaaaatctgaaaaactaatgaggattattaagctaaaacctgggaaataggaggcttaaaattgactgccaggctgggtgcagtggctcacacctgtaatcccagcactttgggaggccaaggtgagcaagtcacttgaggtcgggagt

SEQ ID NO: 57801 - DNA, 438 bp, Homo sapiens
gattaagagtcccgccccctccatacgggaggaaacgtgtgtccctggggccctcagccaagcctccactatctttttggcccagacggatttcccaggtcacaagtggctggagacttcctcttgaaaaacatttgccgtcgtttttccctggcagagcccctttgaccctggctaacaaggacagcctgacttggatcccactatgcaggaaggaaggcgactcttccccgcacctcttgctacgattaggacttgcgacttggtgaaaacaggaatcaaaacttgggcctatttctcctgaggtctgcttgcctagaacaattcgtaacgatgaatcttattaaaaagagaaagtcctccccgactttatctttttccgccagaatccgataaggaagacttgttctggccccctcagctctctgacctcatcta

SEQ ID NO: 57802 - DNA, 1379 bp, Homo sapiens
atcccaatttgaatgttacatgttcggaaaaactttcagttgctcaagggcaataagaaaatttgaggccgggtgtggtggctcacgcctgtaatcccagcactttgggaggctcaggtgggcgaattgcttgagcccaggagttcgagaccagccggggcaacatggcaaaaccctgtctctactaaaaatacaaaaattagctgggtgtggtggtgcatgcctgtagtcccagctactcgggaggctgaggtgggaggatcccgtgagcctgggaggtggagtttgcagtgagctaagatcgtgccactgcactccggcctgggtgatggagcaagacctcgtctcagaaaattggaaactattgactaagagaagtttctaggtttgcactgaattgtcttttgtacatacagtgaattgttttgctgttctccccactccatattaatgcaggagccaggttggtctgttaggatgaacaaaggttgaggggagggcaggattcgtgcatctgggggccaaacacatgttccgtcttgattgccttaagagttactagcgaggtcagtgttaggcttgcaatagggattttaaaatacactaactagttccttagctaccttcacatacattctataggccttcttaaattagcactaacctccacttccttctctgccccattgcctcccaaatatgctatggagctatttttgttaccacgttataacgtgaatatttatacagtaggcctcttcaggctttgtaattttcattccaaaaatgcccggtgtgatgctttacactctacaaagtatggtttaaaggcacaaggtcatggcctttgtcatagcagttgaatgtgcattgacatatttttctatgattttttaaaattacaatagaaaaataagctgttgtaacgtgtaaggtcatgacaatttttgtatttatatttgaaatcagatttctataactcgtatttgtgtacagaattctcaatggatttatatattgtgaaatttttatctgagattgggatgtggattatgcttaacagtgagagctgaaatgagaccatttactttgtttaaaatgctgtactgtgcaagtttggaaatgtaaattaatttactgtatataatatcttgagtttgtttatacctccaagtttttacactgaagataaactagctttaattcaaaactttttttttctttataagggaataagctgttgagctaaacctgtatacttgtgctttttattttctggatgcacaatgaaagtttatacttgtatctcactgcatcatatctgattgcagaaattaaagcacaatttacaagcaaaaaaaaaaaaaaagtcgacgcgg

SEQ ID NO: 57803 - DNA, 556 bp, Homo sapiens; identical to SEQ ID NO: 14657

SEQ ID NO: 57804 - DNA, 1224 bp, Homo sapiens
ttttttttttttttttagtgggggaagggtgagagctcagcactcactgctttattatcacagtaggtgacaaaggccgcagggagagggggaaaggtccagagctgtggagaaagaaggggctccctgtctccagggtttgtttaaggttttctcgcataggcctagggcccagccacttccctcactggcctcaaagccctggagttgagccctctaggcagtcaagggcaggcaggagatgggccagagaggggaggatgtgttctttaggtacagaatccctgaccacggggtccagtgcctgtgggccaaccaccaggaagctgtgcatgcccacagcccgaggcccctggtaatcgcagaggtaattatccccaacatgggctgccactactggttccatatgagcaagccgcaaggcttccttggaaaatgcgggggtccggcttgggccagccagcagcctcggaggtcagcacaaagtcgaagtgttcacgcagggccaaggccctccaggatgccctcttagccgttcggtcaaagttggagatcactgccagtctcagaccccgtgtgcggcactccctcagggtgtcctcagccccatccaacacctgccaggtgcaggggtggctgaagtctttataaagctgttcagcgatgggggctacagcctgagcatcctggacacccgccaggtggaaggtctgcaggaccacatccagccaccactggcgggaggttaggccgtggctcaggccgtagttggggaagctgagctggataagaccacctctgcgcaacctaacaatcacctctttccaggccttgtgggtcagatttgctggctaacatgaagcacttgggaaatgtcttcacagcacaagatcccaaggtcacagtgagtcagtggcacagccaggaccagaacccaaacttccagactctctggccagttcttccactgtaccatgagatatatttggattttaaaaattggtgaaccttttctccccacctccagggctcgggaaaggcgaagtccaggagcccggacctgacgcagaatgtctatagctgccgtcggcagcgtgagctggggcggcggtcctaggggccttggccgcggccgaccccttgggtccccttctcagctgtagggcgtccacggctccgggccggttcctgggcccaggacccacctgactcacaaggaagcag

SEQ ID NO: 57805 - DNA, 614 bp, Homo sapiens
ggggaggaaagagtaatcagaagaagaatagagacacacaacagacacagtgggaaccagagagaacgagggtggggcatgtggggcacaagtgcacgtgtgggtgagcagaggcagacagaacagagaaacagacagagtgcaaagagatcatagagagagaagagggcctggactgcagagactgcaggggagacagcacggggcagagagaaacacagaaagagcgagtcaacagtttctttgttatgtccttttctggttttggtattagggtgatattggcttcatagaatgatttagggagcgttccgtctttctctatcttttggaatagtttcagtaggatttgtaccaattcttctttgaatgtctgatagaattcagctgtgaatccatctggtcctggacttttttttgttggtaatttttaaattaccatttcaatcttgttgcttgttattggtctgttcagagtatctaattcttcctgatttaagctaggagggttgtatttttccaggaatttatccatctcttcttggttttctagtttatgcatgcaaaggtgttcacagtagccttgaatcatctttggcatttctgtggtatca

SEQ ID NO: 57806 - DNA, 841 bp, Homo sapiens; identical to SEQ ID NO: 14663

SEQ ID NO: 57807 - DNA, 2380 bp, Homo sapiens
  misc_feature (1)...(2380): n = a,t,c or g
accagggtttccaaaattgtgctttattaaatgctagttcattggaatgttaatacatgtttcacacacacaatcagcaggagaaaatgtttctatagccaaatgacattgataaacagtgttcttacacaaagttaagcctgtttctttattataagacttttcagatactttcccagtgcatagtgtgaatctccacaaagcaagtgaaacatgaatagctccctaaacttacttgaccacagaatgcttcattctatctccatggaaaccacttgtgaaagtctcctactccaactttcttctccaacaaaactcacctgtttgtgatcatctgaactcattttgtgctcttgcctttatataaaagagaagttctgtgaaatgttgaagaagcagggttatggcactagtaatgatccaggcactatacaaattgttaaaattttccattattttagttcagaagccctaaccataggtattctaacagtggattgtggaacccagtatgagtgtttgagacatgttacaaaatataggagctatttttaaaatgaatccatttaataatactgctagatgctgtgagagacagggactccccggcccagcacacacgcttgagcaggaatggagacatgggcatgggtaggcaggctggtggtcagcagataccctttctgtccctcctctgtgacaatcacccccaagtaatttttgggattcagaataaggcagctgctctcccatcctggttactatgagtcgctcttggcagaaaggaccacagatggagagcttggcactcgctccaactttgccgaaaagaggacaaccaccaaagtagtaggtaaaaacacaattttagcagcagtgaaataaaaagaggaagtgaggatggggccaggccgcaactataattaaactgtctgtttaggagaagctgaatccagaagaaacacaagctgtaaagtgagagaggacagggagcagggcctttggagagcaggagaggacaggctgtcaccaagcgctgctcggactctgccctgaaagatttgaattggacactgtccagtcacgtgtgtggcaaaccgtactccaagcacttttctcacggcagaggaaggagctgccatggctgtacccctgaacgtttgtggggccagcgatgtgcgctgggcctctgtaatggaggacctccagtgtgcagacaaggcgccggcagtgcccacggagggctgcgtcctgggtcctgggtgaaagtcacagctgctgaggaagcgagagctccatctggataccagagacccctgggccatcagtgcagcaggaaccaccatgtgagagccgcggccaggcagccccacgtcacgcggcctgctccaggcagccccatgtcagggggtcgagtccccccaccgcacaaggcctgctatgggctgccccatgtcagggggtcgaagtccccccacaatcatgaggcctgctccaggccagctgtgctcttcttcttccgtctgtaaccagctccagtctagggccgtgaaactctggtcttgttccctcacagtgtcctgtatggcattttctagcagggtgcagaggttatgtgcttcagccaccagttcttcactcttcttggctggctcaggtaagctgttggaggccgtggagggctgagacatcagctgcccaggctggctaagtcgagaggcattcatgctatccgggcttccactgacaggaccacggaccttgctacaagcaatcttcaggagattccagagctccttctgccgcttctcctgcagccggacaacagtcttctcatcctcattcattaagctcaccacctcttccaccttgggcaacagttccagcgccttctgcttgcaaaaccacagttttactgagctgcgtatagatcactcgcaactttcttctcgaagctctgaattgcctgaagcagcaagccgtaccatttcctgactgtcaccctcaagttcgctggtctcggaggtttttcccttagtctcctgtacagctcccttgcttgctcctctaggtcgtccagcgttcccccctgcnttcacgcgcatggggctcctctgtaagtccacaatgtcggtctgcagagccatcatccgttctaccaggagttacattcgttctcccgcccacagagctccacagcctgctccatttccctccaggccagcagcagtttatctgatgtgatcccaaactcggtttgctcgctgtacttctccaggtcaatctggatgctggttttgaagaaatccaacttggccttgagctgctgagacatggaagccatggaattcttcattttggagaggcagctgttgtttcg

SEQ ID NO: 57808 - DNA, 1393 bp, Homo sapiens; identical to SEQ ID NO: 14671

SEQ ID NO: 57809 - DNA, 1233 bp, Homo sapiens
ccgaacgcccgcagcagggtcagaagggaggtggccggtctccgtcgtgacctctgacggtttctgagcgttggcctttggcacggcgctacacccttttgctttggttctgccatgccgatgtaccaggtaaagccctatcacgggggcggcgcgcatcatccgtgtggagcttcccacctgcatgtaccggctccccaacgtgcacggcaggagctacggcccagcgccgggcgctggccgactgtgcaggaagagtctaacctgtctctgcaagctcttgagtcccgccaagatgatattttaaaacgtctgtatgagtttgaaagctgcagttgatggcctctccaagatgattcaaacaccagatgcagacttggatgtaaccaacataatccaagcggatgagcccacgactttaaccaccaatgcgctggacttgaattcagtgcttgggaaggattacggggcgctgaaagacatcgtgatcaacgcaaacccggcctcccctcccctctccctgcttgtgctgcacaggctgctctgtgagcacttcagggtcctgtccacggtgcacacgcactcctcggtcaagagcgtgcctgaaaaccttctcaagtgctttggagaacagaataaaaaacagccccgccaagactatcagctgggattcactttaatttggaagaatgtgccgaagacgcagatgaaattcagcatccagacgatgtgccccatcgaaggcgaagggaacattgcacgtttcttgttctctctgtttggccagaagcataatgctgtcaacgcaacccttatagatagctgggtagatattgcgatttttcagttaaaagagggaagcagtaaagaaaaagccgctgttttccgctccatgaactctgctcttgggaagagcccttggctcgctgggaatgaactcaccgtagcagacgtggtgctgtggtctgtactccagcagatcggaggctgcagtgtgacagtgccagccaatgtgccagaggtggatgaggtcttgtgaaaacctggctccttttaacacggccctcaagctccttaagtgaattgccgtaactgattttaaagggtttagattttaagaatggtgctctttcatgcctattatcagtaaggggacttgtattagagtcagagtctttttatttaggccagttgtcaagtgtcaataaaagcatcatgtaatttaaaaaaaaa

SEQ ID NO: 57810 - DNA, 794 bp, Homo sapiens
  misc_feature (1)...(794): n = a,t,c or g
taatacgactcctatagggaatttggccctcgaggccaagaattcggcacgaggtgaaaggcttgtgaaaatttctggaaagagcattggctggcttgttcatctctctgtttggtcagttgctgtgtttctgccggatcagatgagcagattggttagtgaaggtcagtgtgagaagaagattgtttctgagcttgagaagcttctggaggattgaagagtattnnaagncngngncaaacatccatatcataagtggaattntggagatattcanagaatgctgtcacaagggtatctcagtggacttgagtactggaatgacatccactggagttgtgcctcttataatgagcaggtggctgcggaaaaggaagaggagacaaattctgttgctaccctttcctattcctctgtggatgaaacacaagtcagaagtctctacgtgagctgcaaatcatctggcaagtttatctcttcagtgcattcaagagagagccaacatagcagaagtcagagagtcacagtgctgcagacaaaccccaatcctgtgtttgaaagcccaaacttggctgcagttgaaatatgtagagatgccagcagagagacctacttggttccatcttcttgcaaaagtatttgcaagaattataatgacttacagattgcagggggccaggtgatggccattaattcagtgacaacagattttccctctgagagcagttttgaatatggccctttgctgaagtcatctgagattcctttacccatggaggattccatttctactc

SEQ ID NO: 57811 - DNA, 837 bp, Homo sapiens
ttttttttttttttttttgaagtttgcaaatcttttatatttccagctgttgagacagtatttttgagggctgatgttacctctagcggcgaaaccagagccagctattaagcagccagaaagctacagtaattgaatacatgaccatttctcttttagcacgttctttgttctcctcttccagaagttgcagacgtctatttagtttgattatctgtcgtcttagtgaagctgcatctacaacagtcaggtcatctgacgttccttcaatggttgtatctatatttgaaatgccatacctgacgttgtcatgatgaggattagaagtggcggcagcagacccaccacgcaacacaggtctgcgattttcatccagcacatccaagatctgctggtatgccctacgagtagaagactggataagcgacaaaatgccacgagcagaggaaagattagctccatcttcaggtaacatatggggaggacagacccgagcctgttgtggcgatggtgtcacagtgtactccggtgcagaaatcggtgcctggaaccttgaaattttatttcttggggcagaatctgatctgtgccacagagaatcatttctgaccagctgtccattttggcgaacagcattttcactcatagaccgctctctttttagtctgccaactgctcggatttcttcattttgaggggttgtaggaggtctttctaaatccagaaaatctagtggtctttcactcagcgtaagtacacgaggtggtgttttcagtgccaggggtttaaagggagttgactgaataaggtcaagatctgctggtcttgaaaatgaaa

SEQ ID NO: 57812 - DNA, 1242 bp, Homo sapiens
cccacatggctgaagatgtgggtcctggatccttcccccttctcaccataaccccctctcagtgtttccccaacttctcccttttagcagggtccctttagagcccaactccaggtcaaatctggagctcaaatcccagtgctccctccccaggagtggggccccaactcttccaagataccagcattcctcaagtcctcccaaaacttcctacccacaccctcttcccaaggccctcaggggcagaaaacatctccttcaacccgtccccactccttcctctgcatgaccttggggcaaacccttgccctttcaagccatcagctcctgcctctctgccatgagggctttggatcagattcctcttctcgccaggatgaggacacgcactgccctccatagacacagatgaaggggtgggggtcattcagctcgaatgggtcccagatgctcacttggcctttccctgcaggatgagtgaagacgtttgcctctcacagtgtgtcttctacctgcattttggcatcagagccccccagcccacccaccacaggcaattactagccctagttgataggtgaggtgggtgaagaaggctggaggtgacatgtccgaggtcacacaacaaagcagcatgcaggaactagaaacacatcttcagcctcctcctgggccagctcttgtgctacaggtggggcggagccagcccctcaccttcctggttccctgagggtcctcagggtggaggacaggtttggcccagaaagactagccagaggcctgatggtcccaggtggctctggatatactttggatatggatttaaatggtctctaagagccgggggtagggggcaggaaaagtgggttgtctttgcccctcaaagtccacctacctagaaaccaagcccacggtcttggccgtgaccctgataataaatgggctctctcagaggcgccagcccctccctccccagccggaggcgtcatctctcttctgtaccactagagggagctctgatgcagctggagagcagcgctcaaggctctcgcccctcccctccctaacccttaccttcagtctccaccagcctgaagggcctcctaggggatcctcaggcggcccccaccagggcacaccctactgtccttgtgcctcacgccccctcctcatcctgcaccccttccatcccaccttccctttcaataaacagctgggatggatactgaaaaaaaaaaaaaa

SEQ ID NO: 57813 - DNA, 7063 bp, Homo sapiens
gctgccccgagcctttctggggaagaactccaggcgtgcggacgcaacagccgagaacattaggtgttgtggacaggagctgggaccaagatcttcggccagccccgcatcctcccgcatcttccagcaccgtcccgcaccctccgcatccttccccgggccaccacgcttcctatgtgacccgcctgggcaacgccgaacccagtcgcgcagcgctgcagtgaattttccccccaaactgcaataagccgccttccaaggccaagatgttcataaatataaagagcatcttatggatgtgttcaaccttaatagtaacccatgcgctacataaagtcaaagtgggaaaaagcccaccggtgaggggctccctctctggaaaagtcagcctaccttgtcatttttcaacgatgcctactttgccacccagttacaacaccagtgaatttctccgcatcaaatggtctaagattgaagtggacaaaaatggaaaagatttgaaagagactactgtccttgtggcccaaaatggaaatatcaagattggtcaggactacaaagggagagtgtctgtgcccacacatcccgaggctgtgggcgatgcctccctcactgtggtcaagctgctggcaagtgatgcgggtctttaccgctgtgacgtcatgtacgggattgaagacacacaagacacggtgtcactgactgtggatggggttgtgtttcactacagggcggcaaccagcaggtacacactgaattttgaggctgctcagaaggcttgtttggacgttggggcagtcatagcaactccagagcagctctttgctgcctatgaagatggatttgagcagtgtgacgcaggctggctggctgatcagactgtcagatatcccatccgggctcccagagtaggctgttatggagataagatgggaaaggcaggagtcaggacttatggattccgttctccccaggaaacttacgatgtgtattgttatgtggatcatctggatggtgatgtgttccacctcactgtccccagtaaattcaccttcgaggaggctgcaaaagagtgtgaaaaccaggatgccaggctggcaacagtgggggaactccaggcggcatggaggaacggctttgaccagtgcgattacgggtggctgtcggatgccagcgtgcgccaccctgtgactgtggccagggcccagtgtggaggtggtctacttggggtgagaaccctgtatcgttttgagaaccagacaggcttccctccccctgatagcagatttgatgcctactgctttaaacctaaagaggctacaaccatcgatttgagtatcctcgcagaaactgcatcacccagtttatccaaagaaccacaaatggtttctgatagaactacaccaatcatccctttagttgatgaattacctgtcattccaacagagttccctcccgtgggaaatattgtcagttttgaacagaaagccacagtccaacctcaggctatcacagatagtttagccaccaaattacccacacctactggcagtaccaagaagccctgggatatggatgactactcaccttctgcttcaggacctcttggaaagctagacatatcagaaattaaggaagaagtgctccagagtacaactggcgtctctcattatgctacggattcatgggatggtgtcgtggaagataaacaaacacaagaatcggttacacagattgaacaaatagaagtgggtcctttggtaacatctatggaaatcttaaagcacattccttccaaggaattccctgtaactgaaacaccattggtaactgcaagaatgatcctggaatccaaaactgaaaagaaaatggtaagcactgtttctgaattggtaaccacaggtcactatggattcaccttgggagaagaggatgatgaagacagaacacttacagttggatctgatgagagcaccttgatctttgaccaaattcctgaagtcattacggtgtcaaagacttcagaagacaccatccacactcatttagaagacttggagtcagtctcagcatccacaactgtttcccctttaattatgcctgataataatggatcatccatggatgactgggaagagagacaaactagtggtaggataacggaagagtttcttggcaaatatctgtctactacaccttttccatcacagcatcgtacagaaatagaattgtttccttattctggtgataaaatattagtagagggaatttccacagttatttatccttctctacaaacagaaatgacacatagaagagaaagaacagaaacactaataccagagatgagaacagatacttatacagatgaaatacaagaagagatcactaaaagtccatttatgggaaaaacagaagaagaagtcttctctgggatgaaactctctacatctctctcagagccaattcatgttacagagtcttctgtggaaatgaccaagtcttttgatttcccaacattgataacaaagttaagtgcagagccaacagaagtaagagatatggaggaagactttacagcaactccaggtactacaaaatatgatgaaaatattacaacagtgcttttggcccatggtactttaagtgttgaagcagccactgtatcaaaatggtcatgggatgaagataatacaacatccaagcctttagagtctacagaaccttcagcctcttcaaaattgccccctgccttactcacaactgtggggatgaatggaaaggataaagacatcccaagtttcactgaagatggagcagatgaatttactcttattccagatagtactcaaaagcagttagaggaggttactgatgaagacatagcagcccatggaaaattcacaattagatttcagccaactacatcaactggtattgcagaaaagtcaactttgagagattctacaactgaagaaaaagttccacctatcacaagcactgaaggccaagtttatgcaaccatggaaggaagtgctttgggtgaagtagaagatgtggacctctctaagccagtatctactgttccccaatttgcacacacttcagaggtggaaggattagcatttgttagttatagtagcacccaagagcctactacttatgtagactcttcccataccattcctctttctgtaattcccaagacagactggggagtgttagtaccttctgttccatcagaagatgaagttctaggtgaaccctctcaagacatacttgtcattgatcagactcgccttgaagcgactatttctccagaaactatgagaacaacaaaaatcacagagggaacaactcaggaagaattcccttggaaagaacagactgcagagaaaccagttcctgctctcagttctacagcttggactcccaaggaggcagtaacaccactggatgaacaagagggcgatggatcagcatatacagtctctgaagatgaattgttgacaggttctgagagggtcccagttttagaaacaactccagttggaaaaattgatcacagtgtgtcttatccaccaggtgctgtaactgagcacaaagtgaaaacagatgaagtggtaacactaacaccacgcattgggccaaaagtatctttaagtccagggcctgaacaaaaatatgaaacagaaggtagtagtacaacaggatttacatcatctttgagtccttttagtacccacattacccagcttatggaagaaaccactactgagaaaacatccctagaggatattgatttaggctcaggattatttgaaaagcccaaagccacagaactcatagaattttcaacaatcaaagtcacagttccaagtgatattaccactgccttcagttcagtagacagacttcacacaacttcagcattcaagccatcttccgcgatcactaagaaaccacctctcatcgacagggaacctggtgaagaaacaaccagtgacatggtaatcattggagaatcaacatctcatgttcctcccactacccttgaagatattgtagccaaggaaacagaaaccgatattgatagagagtatttcacgacttcaagtcctcctgctacacagccaacaagaccacccactgtggaagacaaagaggcctttggacctcaggcgctttctacgccacagcccccagcaagcacaaaatttcaccctgacattaatgtttatattattgaggtcagagaaaataagacaggacctgatcgctgcaaaatggaacccgtgccttaacggaggcacctgttatcctactgaaacttcctacgtatgcacctgtgtgccaggatacagcggagaccagtgtgaaacttgattttgatgaatgtcactctaatccctgtcgtaatggagccacttgtgttgatgggttttaacacattcaggtgcctctgccttccaagttatgttggtgcactttgtgagcaagataccgagacatgtgactatggctgggcacaaattccaaggggcagtgctacaaatactttgcccatcgacgcacatgggatgcagctgaacgggaatgccgtctgcagggtgcccatctcacaagcatcctgtctcacgaagaacaaatgtttgttaatcgtgtgggccatgattatcagtggataggcctcaatgacaagatgtttgagcatgacttccgttggactgatgggcagcacactgcaatacgagaattggagacccaaccagccagacagcttcttttctgctggagaagactgtgttgtaatcatttggcatgagaatggccagtggaatgatgttccctgcaattaccatctcacctatacgtgcaagaaaggaacagttgcttgcggccagccccctgttgtagaaaatgccaagacctttggaaagatgaaacctcgttatgaaatcaactccctgattagataccactgcaaagatggtttcattcaacgtcaccttccaactatccggtgcttaggaaatggaagatgggctatacctaaaattacctgcatgaacccatctgcataccaaaggacttattctatgaaatactttaaaaattcctcatcagcaaaggacaattcaataaatacatccaaacatgatcatcgttggagccggaggtggcaggagtcgaggcgctgatccctaaaatggcgaacatgtgttttcatcatttcagccaaagtcctaacttcctgtgcctttcctatcacctcgagaagtaattatcagttggtttggatttttggaccaccgttcagtcattttgggttgccgtgctcccaaaacattttaaatgaaagtattggcattcaaaaagacagcagacaaaatgaaagaaaatgagagcagaaagtaagcatttccagcctatctaatttctttagttttctatttgcctccagtgcagtccatttcctaatgtataccagcctactgtactatttaaaatgctcaatttcagcaccgatggccatgtaaataagatgatttaatgttgattttaatcctgtatataaaataaaaagtcacaatgagtttgggcatatttaatgatgattatggagccttagaggtctttaatcattggttcggctgcttttatgtagtttaggctggaaatggtttcacttgctctttgactgtcagcaagactgaagatggcttttcctggacagctagaaaacacaaaatcttgtaggtcattgcacctatctcagccataggtgcagtttgcttctacatgatgctaaaggctgcgaatgggatcctgatggaactaaggactccaatgtcgaactcttctttgctgcattcctttttcttcacttacaagaaaggcctgaatggaggacttttctgtaacccaggaacattttttaggggtcaaagtgctaataattaactcaaccaggtctactttttaatggctttcataacactaactcataaggttaccgatcaatgcatttcatacggatatagacctagggctctggagggtgggggattgttaaaacacatgcaaaaaaaaaaaaaaaaagaaattttgtatatataaccattttaatcttttataaagttttgaatgttcatgtatgaatgctgcagctgtgaagcatacataaataaatgaagtaagccatactgatttaatttattggatgttattttccctaagacctgaaaatgaacatagtatgctagttatttttcagtgttagccttttactttcctcacacaatttggaatcatataatataggtactttgtccctggattaaataatgtgacggatagaatgcatcaagtgtttattatgaaaagagtggaaaagtatatagcttttagcaaaaggtgtttgcccattctaagaaatgagcgaatatatagaaatagtgtgggcatttgcttcctgttaggtggagtgtatgtgttgacatttctccccatctcttcccactctgttttctccccattatttgaataaagtgactgctgaagatgactttgaatccttatccacttaatttaatgtttaaagaaaaacctgtaatggaaagtaagactccttccctaatttcagtttagagcaacttgaagaagagtagacaaaaaataaaatgcacatagaaaaagagaaaaagggcacaaagggattggcccaatattgattctttttttataaaacctcctttggcttagaaggaatgactctagctacaataatacacagtatgtttaagcaggttcccttggttgttgcattaaatgtaatccacctttaggtattttagagcacagaacaacactgtgttgatctagtaggtttctatttttcctttctctttacaatgcacataatactttcctgtatttatatcataacgtgtatagtgtaaaatgtgaatgactttttttgtgaatgaaaatctaaaatctttgtaactttttatatctgcttttgtttcaccaaagaaacctaaaatccttcttttactac

SEQ ID NO: 57814 - DNA, 1412 bp, Homo sapiens
tttcattataaaagtcagtttattttccctttctgtgtttcgtattttccctttttgtcagtaaatgagcaatacactgattggaaatctgcatgattaaataacattaacaagttcataaacacaccccatatcagagtataaagcaagaggttgaaaaatatcccctaaccgaatgcaaattaggtatccctcaaaattgcacattctcctcctagtttgcttgcataatttaaaatatgtatatacagaatgatcttaaaatattgataactagtatggaattcacagccctgaagatatatatactctacatttttctaaagaacggacacccctcaggccctagtaatccattcatgtgattcaatgtcatgtacagacagtcctcagcttctgatttttggactttacaatggtgtgaaatggttgcaattttcaacataatgtacaatattcaataaattacatgatatattcaacactcgattataaaatagagtttgtgttagatgattctgcccaactgtgggcaattctaagtgttctgagtacatttagggtggacgaggctaagctgtggtgtccagtcaggggtattaaatgcatttgacttccaatgggtttactgggacataaccccatcataagtcaaagagcatctgtacttgacacttactagaagaaaaggtctttcccttttctctaattctagtcttctgctgaggtaactccaggaagctggttgtgccagagatcaatcctctaaaaatagactaagcagattagcttcctagaggatcctaaagttcccagacaacaaatctgggatggagtgcttcggctgtgagttacacgtcggaatgttcaagataaatgatgtaccttatggtcctttacacgtcagaatgttcaagataactgatgtaccttatggtccttgaaatggaagactcaatactccccggagtcaagttaattgaatgaaaatggaagagaacaagttgacaataatttgaagcaattcatgcttcctagggctgaatgacgtttagatcagacacagagtgactgagccaatcaacaggcatgtagtgtgatctttcccaccacagtgaacagagggattctttgtccaaggcaggttgcagctcggtccagcttgagcatttgatcaggatttgatgcttcatagatgacccactctctgtaaactcattaccaaagcaaaatgcaatgatctcttccatttgtggaacataccaccaacacaaaccacgcgtgctttgcctcctgttcactccattttcaaggctagagaaagttcaagtccaaaacaacagttaaggttaaaacgctaaacctcaataggccaaacaaagacgcgggcagagtcagaggtcaaagatgct

SEQ ID NO: 57815 - DNA, 1208 bp, Homo sapiens; identical to SEQ ID NO: 14681

SEQ ID NO: 57816 - DNA, 3788 bp, Homo sapiens
ttttttttttttttcacattttttttggatttatttaaagaacacacaaaaaagtgcatctaaatgatttttttttttaaaaaacaatgtctttaattcctcatatgctgacttggcaatccatatgcagcctaaaaggtggttgaaagatgtctgtggacttctacacaaattgtttaagattattgaatttgatacaagaatacgtgaagtgtcttcttgagtggtaatgggcaccctgtagttatttgctcagaaccactcacacacccttcccctccccacacacacttttgccagttccccctggtgaaccataatacacacgtgggagacagctggcatcatctgagtcttggaatagctttcttgtttgttatctgcaaaaagctaggtggcctttttagtatcaaatttcaatcttggcctcactggaaccatgctctacagagctttcccaacagtttagcaagtaagcaaaatcagcttttgctcttcatatttcgtaggtgagactggggcttttaaaagaaatatttcataaaaaagacaaaagcataaatgagaaattagagggattttagttatcattaaaggaaaaaactcacaaattgatcccatttgttccatggggaagaaaagtattataaaaggaaataacttgatttttaggtttgaagggggtcccaatctaataataaaagtcttttgataaaaccatcataaaaataaaaactaatttaaaatataactgccagtgttttttaggatttaaaaaggtgagatgttccaggtttaagcaaatggttccttgggttgccaaatgcattcccatgagtgtttcttaggctgagggaatagagagccatgctcaatctgtttaccccgtaaggactgaaattcaactacatgtacacatttaagacttgccctagttcaatggtcagctcaagtactggagatttaggctactggctgtgtaccggcatgggaagctgtcttcaactctttcacaactcacgccagaacagagaagcttgacagggcaggaaaagcgagcaactgcgtgtcaaacctgcaggtgaaacccctagtgtagaagagcaactatttatttgtcaacactacagattttgtttttaaaaattaagcttagtactaaaaagtcaaaatttttttgcatgatagaggagtgtaaataaagttccataaaccagtatacatatgcttatgagccaataatctttaaaaagacaaaaaaagctgcatggatcctaaatgactatgtaaatagatccactccaggtcaaaaatattgtaagcacaagtcttaaattcttaatagcaaggattagaatgaaagaagaagctgagcagtagcaatgcctgggaggaagtactgtgtattgaatattattccctaaaaggaatagaggaggggagaaaaagcacaattctgattgctcttttcacatttcagtatctcagaacttcatcgaaaataggaaaagctaatccagaaactctcatctgctcattatcattgctgaagggtgttttaggaatgacagaattactcccccagggacaggctgtgtgtggtagaaagccactctcacaaggaggctggctgaggagggggactttgggaggaggctaagtcagcaagcaagtggcctctgaggttctggctttcacgtctgtgacactgctgtggaactggggagacatgagacccctctactgtgggttctgttggttaaaaatgcaacagactacatttatagcacttcagtcatttaaaaaacaaaagcttatcctccttcccctaccctacccaactgtaggaaaggagaaattcatgaagcattttttttttaaaggtttctgcagtgctatgaaagttcaaaggtaaaacctaacagccccacattgttaggatgatctccagggaccctgaattggatacttgaaggttgatagaaactgaaatgagctggacttaagctgctggctcactccctccacaccacagtcatttctgtttgttccacctggagtggtcccgtgccacccctcagtgaaccctccgggcagcagcaggggggctgtttttgggaagctactggttttgccatttgcttccagaatcacatagactataacaaactttacattaaacactgttctgtcctgagttgggggaaagcccattgaggaggggccgagttcactgggactcttccctccttggcgtggcgtcatacgtggccctcaggtttctcttcttccattgcttgactgtctgttcctttttcattagtgaccccttctgaagtcttcttgcccattgctttattggcctcttccttggcatcctgctctgcaaacttcttgaacatgttggcgtatatcctgcggtcccgctcgttgtgctccttggcctttttctggcacatggagatctgcagtcttgcagccttattctgggggtttacttccagcactttctcaaagtcacccttggctgactcaaactcgttcatgagcagctgggcttcacccctcctatacaagcctttctcattggcactgtccagtccaagggccttgtcacagcattcaacagctttggtgtattctctaagcttcaggtagcacatggccaggttcagaaaggcagcaaggagaaatgattcagaagctttcgattccttttctgataaaccatattccatctctaaccaggacactatcttcccatactgaatcaccgcctgcatgtatttgcctcccttgaagtatacggttcccttctctttgacaatggcagcctgctccaatttttctttggtatccatctcccaggattctttggccttttcgaagctcttaagtgtaacttcatatataagctcagcattaggttcaatgccaaatttaggcttccctgcctctccaaaaccatatcttggtccaagatataaaatacattgttcttcccgctgcattttctccagagctttgtcaattccaattggaatgtcgtggtcttctccttcgcccacagtgaatgccacatctctgcagtcaaacatccttccaccacagcggccttccaggtggatttctactgttgctccttcgtttggatttgaatatccctctcctttccgtttggttctccggataatgcctccatcttcaaataaatcctctcctttgaaatcaaggagctcaatctcaaaaaagagagttgcattcgagggaattttagggagactgccagccgagccatatgcatattctggtttgcacagtaaatggcatatctctcctttcttcatggtagccaccccaatgtcccatgccttgatgacttggcctttgccaagactaaagacaaatggttcatttctatcatgactggaatcaaacttctttccatttgacaattttcctttgtaatggacataaactttgtctccaatcatcggcgtttcctcaccattccccactcttttgacaatctttaatactcccctgtcttttttggaggtaatatcctctccctgctcagcaacagtggctgtggggctttcttcattgttcttggcaccttcatcagtagtcattgtcttttaagtagagaacctgtcgccgcgggggctcgccgactccgtcactctccgccttgcccgtgctccgctaacccttcagcccgcccagcaggccgcccgcgcgccggacaccgccgcccgagactggcagcgcccgcgagccggccc

SEQ ID NO: 57817 - DNA, 9089 bp, Homo sapiens
ttttttttctcattttagaatgttctttattctgacagttgttggacaaatataaggcatgttcacaagtatctgaagttatgtacaaaacacactcattcaacggatgttcctcttctccttttgtacttgctgctgcaaactgatcctcatgcacgttaacacccatagcgctcaattcttatggatatgcagacagtgttttggggaccaccgtggagaatctgtttcaaactaaggcgtgagcttctaagaactaagtcactaagacatcagaactcacagtgaacaaaggcagaggaaggtgaccaaatcagctcataaactcatgactctaagtttccagtggaacaaagaacacattgaaaaacattttttgatccttcatgttggagagaaatggaatgtgaccagaattcatggttctatatttaccactgtctaaaagtcacaaaacaatatctaattttttcatggtttctaatgcagttacagttttgttcttaggtcacagtacaagactgcatgcatactttacacaaatatcaaacacagaacgattgtaacacagatacctcagggttgtctaaagacacagcttctctttttgtggtggggtggggaaggagaatggtggtggccatttccacacacagcctgttgtgtgctcagcacggctggatgcggatcccaagcactcgctgactgactcacagaagaggacagaagctgctaaggaaggcagcggagttcaaagagcaggctccaaccgggggctgggatgacggacacacagcctcgattccagggggaaaaagtcttagtcgatactaattaaaaagtgttaatgatttttgaaaatcagattacatctataaaagatgaaaagcaaacacttaaaacaatctaacgggggaacataaaataataaaaaatcaaatgcagatgggatttcacaaagaggagatttgaatcttttggtctaaatcagccaatattttaacattaactataaattattaaaatatagtttgcttatgcccatccttaaaatgcagaatctttgaggaaaaatataggcatatcaggaatacagactcttgtaaaaaatttaaaaagtcagtatcatctctcttgtggagctaccagaacaggtttttcaaacagaaaaggggaacaaacgtggggaacaaacgtggggcgcttggctatgttaagaattcttatcactagaatactgcttcgagacgttcatagtactttccaaaagaagccacccacctcaaagagccctgcgcagccccagtgacccatgagtgtggtagccgtcattttattagccactgttggcaatcatcaaagtattcactcagagtggggaaattacttaatatcagcgatattaacgatttccatgtatttagctttgtgacacacaatgcacaagggtcttcaaatgtttgttttttacaccagtggtagaaaattgtcattcttcggattcaacacactggtggatgacactttagtgaagtgtgactacctagaagagcaggaaggcagctcctgattctgactgggccagcctcttccagaaggtgactcttctgtcaggagatcacgaccctggcaggccgggcaagcgctctgccctttaagccactgcttaaagcaccctttgtgatacttgtgcccacatttgagcacacgcacgttttttgatttgaacacctcgtggcatatttcacaggaacttgcacccagtgcaatcctcacagggacatcttctgctttctgccccttggttttgggtgatggtgcaacaaccaccgagggtgagccctgggaggacctggtcacgggggtggcagagctgggctcataagtcctcttgtcctttcctgggtttggctttttctttttctgttcatctagaatgtgttctgtcactctttggacaatttcatcaatactcaatcctgagagtgagttcttgtttttgcttcgcacttttttaataaaaccagcaagctcagtgctgttgtaacatgggaataccactgacaggtgctcaataatactattgaacggcttttttggagactggcttgaacgcgcagcacgtcctggaggaacaggctgcttccgatcagccacagggcttcgttctgacagagctgcctggccagcccgttttggccctgtcagctgagtggcttcaggctgaccagggggtggccctggcaacagcgcagaaggagcctcccctggggaatcaccagcagagaacacactaggatccctgtgaagtgctgcgtggtttccagtcacgtcgcttgcagaagtcacaagcccttggccatcgtggcctgaagactcagggagtaactcgggatgaaccgtgttacaggcaggaaatgaaagctcagaaatctgcactttagaaagttcactgagccgagaaccatttttaattgccttaatttgttcttcaaactgagattttgctttctcaatttcttttgtaacattagaaagaaacaattcccatgaacgtatatcagactccatgtcaggatatgctgcaggatcacggctaatcagccccagcttcttcagaaaggcttctgcttgtgactccatgatctgtagcttatacacttcactctccttccagttttcaagtacggatacctctgcagccacagctctctgatgactctcttcataatcctctttccctttctttatatactcttctattttcattttctcatttgtaagtgtgttgctgatttcaagggactgatccagatgtaattcatgttccttttcctttccatcatttttctgggtatacatttcactggcatttgaaacctttttaattttcttcttcagtgattttagtctttcttggatttcttttttttcctgttgccattttttaatttctctttccaaatcttgaaggaaccaatctaattccgtctttgagatcttgttttcttctaagtgccttttcaacttctcttccaggtccctggtctcttctaagcccttaagttttatctgctcataattttcatacacttcttgaagttggtcttgtaatacttggtgctccttttcaatccgtgaaatttccccttgtcgttcctcaaaaggattatatggctcagtattgacttcttggtgtattatgttccaagatacctgtatggcaaccatctgcacgtgtggaatgtttgttactgcactggtgctttctggaattacttcacatttgttgttagaatttccacagtgctcatcatttctgttagactcactcaggactgtatgagcatcacctgtgctgcagtgtgactttacagatattcccaaagagccctcaaggatctgtgtttcagaggcaatctggtgaccagcaacattctcagcattcaaatgatgaccctcaaaataggcagcagcatttttatctgctctgtcattggctacaaaagacggcaccactggtactgatcttggtagctgatattcaggagaaaggctggccaagggtgtatatatgctggtgtactggggcaaacctggtaacacgtttatgtatgctggcggtgtctgggtgatatcaaatctctggaaaggaagatacgtacagtatcctgtgaccaaatgggattgagcccaataagttggtttcacatcctcaagaaccggtttgggggaattacaggagactcgcttgtaatttgcatcctcagagcctggtttaggagaattagaagagacccctttgggttgcccatcctcagaaacttgtctagaagaattgtcggatactggtttggccttcacatcttcacaagctggcttgggagaatttgcagacacaggtttgggtttcacattttcaaaagctggtgctgaagatgaatctgacactggtttagactttacatctggtttaaattccctagcagctggattcagttgtagtttaactcgtacatactcccctgcttttgaaatttcttctacttttgttttaatgtttttcttcttcctttttttcttgagccgtgatgcaaccttcttcagtgcaatacagttgtcaatcacaacaaaacgagggcatcccaagagaaaaggttttaaacctcctgctttttctagtatctgtcgagtttcttctgggaaaaactcatattctgcagagaacatcttgttactcatgtccaagggaccatgttcctccaaaaactgagagaagtaatcatatagagttgaacatttttgttttgggttcatgtcccatagcttcttattgcggacaacatattcgttactgtgttggtcatagagagcttcgaattcttctacatcttgccgaagatggtcaggcactgcaaatgggcctgcagaatctgaatttcgattgctatggtcttcacttgaagtgatgatctcattatttgaagttactgaagttgttccagacccaactaacataggctttgaatcctttggcttctttttcttgcttttgtttttcaccttggttgaactaaacggtgcttcaccactatcttgtttccttaacacagtacagcggctgtccattatatcaaagaattcatctaaagcactatgcaatgctgggaacttgtctctgtgttcttctagcagccatattaaacaacgggcttccttcaatgatgctggctcagagaaataatcaagttgctttccttctatagagtctagtttgtgaccatatttctcattccagaggaaagtcatgatactaaaatcaagcagtttaagagatgctccataacgagaaaagaaagttcctgtggcatctaagccaaagctattaagtttttggatccaggcggctaatttgggctccacttctttaagctcactcaaaacatgcagaaatattcttgtctttactctgttattttcttgaatcaagtggcgaataacatagtccactgcttcatttagaaaatttctgctagaaaaacaggttgtatagtcttctgtgctcaaaactttccaagaaagcaattctttgagaagcatggctgtattctgtatgccggatttaatcttgtcagcatactgctttatacactgtagaattctgtcatcaaggaactgacaacgctgaacattgtctacagtttctttctgctcttcatttttgggtggattactttctcttaagtcctcctccattctttcttgtgctaacttttttgcttcttttttttggatctttctcttcaattttttgtcttctttcagtcttagtttctctaggctagaacatttctgtttcagaataggtcttggaggaaccttttcttttatgaccttgtgttcaaattcacatttaacttcaccaccactgctgaagatgataatcttagaaatgacaccttcacagtcaggggtaagacatattccttgtagaaaatccttgtcaattttatcattaaaggttgtagtttttaacttcttccagcaattcatgtgaaattctattttacagtactggcaacagctgatgcgtataaaacccttaaagtctgggatcagttatgtatatctgggatcttagaatatccatggcacttctgatagcaacaaatggcatctggcactggagggaacttgcattcttcaacaaatttctctaacagcatctttattttttgtggctgagactcttcaataatcacattactcgtgggccaagttaacactccaggaagacgataaatcaaggttcttgctttctcaaagtgattgagagcttctagaaatctgttttttttcaaatacacttttccaattccacagtaggccaagcaatcaaggccctcactggggtagtgttcaataatcctcttaaactggttttcggcttcagataattcctcaggctgtcctattccaaggagagaaatggcaagtccatagacgaccaaaacatagttaatcatggccaggttcaattgctttattttttgaggatctaaaccgttcagcaactctgtaaaggcctgtgcagcgctgcggcaacgctgctccaataaggccatatagccatcttgaattaagcttctcagcattttcattatattagcaaaatcctggtgtgcagctctggaagatttagaaaactgtttctccaagatgttcttcaaatctgctggtaaagtcaatggtgaactagaactgaacttttctgattcattgtttcgagatttttgttttcctttatgttttggaggctgacttgatggtggtgaaaattcaggatgacagtcacaatcatctaccttcaacgcctcatccgccacctttagattctgattaccaccgttggccatttcgtgattaatttttctgaaatctctttccttctccacaaagttaagtgaagtagtaaatataggtgctgataaactcctaggtgtgtaggccctgttttcataaaaggctttaattggatccttatttgctgttcgaccttgtaggtcttctatttgtttttgtaactttacatgctgctgaattagatccttgattccctcagggtcatttttacagagtttttgagcttttatgtttgcttgcagggcccagtcatattcccccagcatagaaagagcatcacaataacgataatgaccctttggccaagtgttcttcagaatagtggctctctttccatcaccgagtgcatttctaaactgtccagtacgaagaaaacaaagagctcggttaccataaagaaggtagttttcaggtctatattcaatggctctggtgtaatagataatagctatatcaaatctttctttggaaaactcttcatttcctttcattttcattagttctccttcctctatacaatccatacaactttgagttttaagttcttcaagcaaattgcagtcttccattacaattttagttatgtggtacttgtattcagtaaagaaaatacttaacataggccaacaattgtcaattgatcctaatttagttagaattgttacatcgccctgcatattttatccaattcagagcttcttccattgccaagattttattttctattttacaaccaattctcaataagcctccaataaggaatgaatcattagcaactttctttgccaaatccacaatatcttccatcaactcaagatgttgtagtttcttcaaatttatctcagaagcacgtgaattgttggcgtccacacagggatgcaatcgtgatattacggaactgttttgatgttgaaacagaagtggccagaagatgtttattttaatggcatcgcaataatcttgcaggacagaaattggtttactacaccatatactgcagatgtcaaattccaaattcctctcactttggatataatctttatattgcacacccaccccatcacagtaaagctgagtcacacgaacataatcattgctcataaattcagcagcaaagacacaatcatccacgtgagggcaatcttctaacaaggcataatccgccacagtgaaatctccctcagcaaaattgtccatggtgcacaagtctaaggagacaacacaaactcaagtcagtaattaaatcatttgagataacagaagaaagttttcctggcttctatggtatattagaaaaatacttggaacctatgcccaaggaaataactcctatcagaacactgagctccgaaagattctcgtccccattctgctgacttttcctctctctccagataatttaatctatttcttcctttcctcaggttcacatattcaccatctctactctaagttaacctgtttacatgtctcctttaaatagaggatcatcaagggcatcttatttatctttgtatgtgcctagcacatggtaagctctcaaataagtgtttgctgaatgaagaaaagacatcttcctgttgctgcacttgtaccctacctgcttttactgcattctgtgaaatatgccatttcatcatacacaaactgttatattctcaatctcctggcctaacctaaatcctgactccactgagaactttcctatcaactgctcatattctcctatccatctcagtgtgtttctgtcttgggcaaaggagtagggctagagtggtacagggtaagtctgccaatctcctaactccccaaggcggcatccagaccttccatcctcctatcgactgctgcttctaatgctctcacaactactgcaatacacaatcagcactgctaaatcgcaaaaaggaaaaaaccctcacattatcaaaagccatgttttaaaaatacgtatttcaatggggggcaagggggattggtgctaaagtttcagactaagggtttttttttcctgaagaatcttcaataataaggatttttatagttatcagagaatagctacataggccaaacatcactgaaaaatgcaccattttattacttctagctcttgcccatataatggctttcttttcctatcatcaccagcgcatcataaacactattacttgtacctatcacttcaccattattatcctactattattaggataaaccaagtttcttctttccaaagcaagaacactaccagtccttgaagttcaaatctatttatttaatcaatccatctcatgatgtccaatttgctgtatgaaaacttcacaatatcacaagtgaagaataataacaatcttcctagcaaactatttgtactatgtgtcacatactgtaccaaatgttttacatgcattatttcactaatcttcacagcaattcttcttagcaggcacaattatcgttatctccactgtacagatgggaaaatgctcacttaaatcaagtaatttgctcatgtcaccaagctaggaaggattcaaatccagtctttagttgccatagcttctgctctcaaacactctcttttactacatctaattttcctgtcattgtcacctatttatctcttggttactgtcacgtttcaagatcactggcaactagttcag

SEQ ID NO: 57818 - DNA, 740 bp, Homo sapiens
ctgcgggactgcggcggcgccggcctccggggagaaacgcgaatgacaacagagctgctcaaggcgggaactctgagctaagcagtggaggtttctctggatctggagagaagagtgaccttggagccaataatgagccatcctgactacagaatgaacctccggcccctggggacccccagaggtgtgtctgctgtggctggtccacatgacattggtgcttcgccaggtgacaaaaagtcaaagaacaggtccacacgagggaagaaaaagagcatatttgaaacttacatgtccaaggaggatgtttcagaaggcttgaagagaggaacactcatccagggtgtattgagaattaatccaaagaagtttcatgaagccttcattccttccccggatggtgatcgagacatttttattgatggggttgttgctcgtaatagagccttaaatggggatctggtggtcgtgaaactgcttcccgaggagcattggaaggtagttaaaccagagagcaatgacaaagaaacagaagctgcgtatgaatcagatatccccgaggagctctgtggacaccatctcccgcaacagtccctgaaaagctataatgacagtcctgatgtcattgtagaggctcagtttgatggcagcgactcagaagatggacatggcatcacacaaaatgtgctggttgatggtgttaagaaactctcagtttgtgtttctgagaaaggaagaga

SEQ ID NO: 57819 - DNA, 1364 bp, Homo sapiens
gggaaatggagaccccaacagccagcatcagtggccctcatcacagccctccaggagatatcaaaggagacaacgccattattgacgagatcactcccaagcggattggagattgtcccaatacttagacctatagcaaggccttgggagaaatggtggtgcagcaggagagcaggaacctaaccattgccatcctaaggccctccattgtgcggagcaacgtcgcaccagcttttcctgggttgggttgataatctaaatggacctaatggaatcattattgcgactgggaaagggtttcttcgggccataaaagctactccaatggctgtggcagacgtaattccagttgatacagtcgtcaatctcatgctagctgtaggatggtatactgcagttcacagacctaagtcaacattagtctaccacattacatctggtaacatgaatccctgcaattggcacaaaatgggagtccaagtcttggcaacctttgaaaaaatcccatttgagagacctttcaggaggccaaatgctaattttaccagcaacagcttcacatcacagtactggaatgcggtcagccaccggggcccctgccattatctatgactgctatctgcggctcactgggaaggaagcccaggatgacaaagctcatgaatcggcttttaaggaactgtttccatgttgggagtatttcatccaaccggagttggggaatgggagcacgtacaatacaggaatgctgatgtctgagctgagtcctgaagaccagagagtattcaactttgacgtgcgcccagttgaactggttggaatacattgaaaattatgttttgggagttaaaaaatacttattgaaagaggatatggctgggatcccaaaagcaaagcaacgcttaaaaaggctccgaaatattcactacctctttaatactgccctcttccttatcgcctggcgccttctcattgcaagatctcagatggctcggaatgtctggttcttcattgtaagcttctgttattaaattcctctccgactttagagcatcccagcacgcctcaaagtttaagagcatttagccatcgctttttatctggaacctcctcagatacctcctaaaacagcaaactgtgattctcaagattagaaagtaacaaggaatatgcccaaactgtcaaatgtcacctgttatgtattcgtccctaatccttaactatgtatttttatttcagtgagagaaggaaagttgtaaactagcccatagtcacctatattttagggaaaaaaatccaaattgtttcctaacattctattttatgcccttgcgtattaaacgtgaaagtactcccaaaaaaaa

SEQ ID NO: 57820 - DNA, 1343 bp, Homo sapiens
  misc_feature (1)...(1343): n = a,t,c or g
gaagcaacccaaccagactcttggcagcctgccttacagggtagcccaccttatagggtagccctcatatctgccctgtgccggccctctactgccccagctttggtacaggagtgagggagaagctggagcttgcacacccagtggccagtggggctgtcttcccagctcctcctcagggctttcctgtcagtgccaagccagttccccagccaggtttccgtgtgccatttgccagcgtgtgggagctctgcgcgtgtgtgagggtgtttgtagaagagggcaagtttcctttcaaatggccttaggaagggaaaagagtactccctccagcccctaagtagccttggccagggatgtgggccaagaacagtctgtggagctggccaaattgtggcatccactccaaatagcagagacccagtcacgcctgcttctngtcctccctgccctcagtatttggttttgtacaccaaagatgatctggcccatcttcctcccagaggcacaacagtaacatgttcctctgtcagcctgtgaagnattgcagggttctgaagccacagactcagtctccccaagtcagcaatctctttctctctctctcctcaaacttcatcgcattcatagaagctgcttgcaggggtcgccggggctaaccagggtgatcggcgaactttaccgtacagtacctcagtctagctgtcagatcaccccttttgctgtagcctctgttgaggtttttatatttgtgatcattggtaattcagtgtcctatgaagtggggcacagctccccacagagagcaagttgtcagcaggtctctgtgcactggtattggggcagggcagtgccctggggggtaagctaggtggctcagggagtggcagaagggccatttttccctctgccaaaaagacttccttggatttgtagatgttgacccagagtcctctgtcccctcctgaagaggattttcttactggtttctactgaaggggaggtaggggaggaggaaaaaaggaccatgtgtgatgctgttagacaagacactgacgctgattatggagggtctcctgcaggcccttgtgggctccttggcaaggccccaggctgggaaggagctccccccactgcccatcctgcccgctttgtggcgggtagagtcagtgacagggaggcagccctccttttgtgtatatagagtgagctgatttgggctcaggaaaacctagtcgcttgttgctctcgtctgtgacatttttgtacactggtttgctactcatggcaagaaacagacaaagccccatgaaaaataaaacaaaacaaaagtcatttcaaac

SEQ ID NO: 57821 - DNA, 978 bp, Homo sapiens
ctgcttaaaaaaacaaaaaaaaattttatttgacaaaagacaaaaaagttatttacagtagtttttgctcaaataattcaatgggacaactgtgcttctcctccaggtttatcttacaaccaaacccaagcagagtctgcccattgaattatttacagtagtttttgctcaaataattcaatgggacaactgtgcttctcctccaggtttatcttacaaccaaacccaagcagagtctgccctacccaacaccccattttacataatggggaaatgccaaccagaattcagcagcatggctccctcaccaccctccattgctcagtgcactgtggggagggaaaatcccacctcagcccaatacacttccagagttccctactacaggcatcctgcagcagttgcaccagacctgggctcactgacagggctgggatggaagaggctgggcaaatggcagcatcagttaacctggatgaagccatgttcattcttccccactgggcctcaggagggtgaggatccctgattccccttgggggacacggggagagggcacgggaggaagaagccagagggaggcaacacagagagcccaggaaacttgcccacctagagagagcaaagctccctctccttcagcgatccgttcacactcccacagcaacagatgggcgactcagaagttggggagcctctgtgatggcttcagggatcttcccagaaagtacagaacacatgttactgtctttctcctggctagacccacccaagttagtcagtatccaggaaccttttctccttgtgcctgacctggtgatttcaggaaaactaaaggctgtcgtcctgatctatcttttggcccagtgacactactcaggacaaaaatattttggctagcaataacctaggattagtgtttcttaggatatataaagatggggcatattgttgaacactgtcagcaatgaaacagca

SEQ ID NO: 57822 - DNA, 1813 bp, Homo sapiens
ggccgagaatttttttttttttttttttttaaatttcactcattttaatccagaaaaggacatactgggggaaggcatccagatgtgccctagtggttttcaagtcccgactcttcccctctctcccaagaacccaggcaacgcccaccccaaaacccccacctcatggtcagagcattcctgctgatgttactcagaatgtgtcaggatcaggaggacaagtgaggggggaggcgtgcaatgtgatcagaaccctatgatttctgattcctgaaattaaagacacaatgtgccttatgtttgtatgtctgggagcttaaactatagattcctctggttgtgggtgcctgttgtttatgaactggaaaggaatgataaagccgcaatcaagatcacacaacacaagaaattttacaaaaggaaaaaatattttgtttgaaaatctttgctacatgtcattatttttgccactgtaaagcttagcacagatgccagcaatacagaaatggccaacaagaaaacaaaacagtcaaaaataaaaccctgaaggaaaagcaaaaacaaaacccccagagcatcttctcgctatcctccccttccccaaaagccctataataactgtacaatattatagtcctgatcacatttaaaaagtcgattattaaaaaacaagggttccattggaaactcaactttttggtttcgtaaattgtggatataaatatatatgtatactgtaagtgtgcacatagaataaaaaaataaactgtctcctttttttactccactacctggcaccagactggagacataaggaagggaaactcagcaaatggacattcctttggcctcttcaaggccacccttgctcctcagtcccctatgactacatttaatatatcttctcattaattcagtcttgcactttagctactggccaaagcccaatttaaaaaaaaaaaaaaaaaagctggtatctacgactgttacctgaggaaggtaaagggtgagggtagtaacctgtatccgcatttatatggctattgttaattaccaagtgaccctgttgagatgggtgtccaggccccatctatcatacggaattatgatacttgcactctaaagcaaaacccaatctcaagattggagggagcaaagaggaaaaacctcttagggccagagagacttaaatctcagttgcttgctaaactgggtattttgagtatgggatgaaagaggctactttgcaagagggcttcgtatttggtttacactccaacaatgaggattttcactgggacggctaatccaagaagttgagtttccatgcagaaataacctctacagaacacacatcatatgtgattctgacagaaaaatgcagcattatctttatggccaagtctcgggttccagaaagtgtttatcttgccagcctatttaggtaatgtttgcagatcttccagataaggtgagagcaccaaaagcagcagtaacccagctttatcactgaatgtgttcgataacagacaatcgtatcaacagccgactttctatatttgctttacagttgtatattggctgggcatggatgcaagcgcagcaaagacgtttatttaaatattctttggctgcaatactaagtggaaaatacctggaagatttaactccttaggactctttgaaaagtacacagaaagacaaaggtaaaatcggggacaaattttgcataactccctaatagggagaaagagtgaaatacagaagcatgtgtgcgcacacacacacacacagacatacacacacactctcc

SEQ ID NO: 57823 - DNA, 979 bp, Homo sapiens
gactacacttgctgaactggctcctggggccatgaggctgtcactgccactgctgctgctgctgctgggagcctgggccatcccagggggcctcggggacagggcgccactcacagccacagccccacaactggatgatgaggagatgtactcagcccacatgcccgctcacctgcgctgtgatgcctgcagagctgtggcttaccagatgtggcaaaatctggcaaaggcagagaccaaacttcatacctcaaactctggggggcggcgggagctgagcgagttggtctacacggatgtcctggaccggagctgctcccggaactggcaggactacggagttcgagaagtggaccaagtgaaacgtctcacaggcccaggacttagcgaggggccagagccaagcatcagcgtgatggtcacagggggcccctggcctaccaggtgatgcccggggcttggggataggatgaagctcctggagccttggtttgccccactgtgggctgggcagcatctgaggctcctgctgggctcccctaggctctccaggacatgtttgcactacttgggggagtttggagaagaccagatctatgaagcccaccaacaaggccgaggggctctggaggcattgctatgtgggggaccccagggggcctgctcagagaaggtgtcagccacaagagaagagctctagtcctggactctaccctcctctgaaagaagctggggcttgctctgacggtctccactcccgtctgcaggcagccaggagggcaggaagcccttgctctgtgctgccatcctgcctccctcctccagcctcagggcactcgggcctgggtgggagtcaacgccttcccctctggactcaaataaaacccagtgacctcacttcttttctctgcaaaaggtgcttgtggggctgggagtgcagacattggtgtttctgctgatgtcccttgtgaaaaaaaaa

SEQ ID NO: 57824 - DNA, 2067 bp, Homo sapiens
  misc_feature (1)...(2067): n = a,t,c or g
ttttttttttctagaaacaaagaatcaggctttatttttgttattttgaatacaggtattgtattgtagacatctgttagtctcataattcagtatggccaacacacagaaattaaaagtagaaacaaaatgagggcacacttgctcctgtccttggcttggcccctccaacctccaaaagaactgtcctccccattgtcatatcctttccctgctacgaaagacaaaacaaaatgatgccccaaagaaaagtcccagaggctctctcccagcagtcagtgggatgaagcaagacactgttaccttgggtaggatggagaagccaccaggtccataccacagaggccacagtgggatggagaagccaccaggtccataccacggaggccacgtgtgccaccagtggagccaaaccctggccatggctggcaaaactcaccaccaggcgagaccagagcatattatctaccagtaatccccgaggtccaacgccattcaagtcaggcagccctgaggcaagcaggaggagccctgtcctctggggggtgctgcttccagaggaggcccccaaggacagtctcttcagagaggggctcacccgggaaagggggttccctgaggaggcgtgcaaaggtcaagggaccccacccttgcccacctgtccccagggcttactgctgactcccactgtccctgggagtgctggaatctccacaccacttaaaatgaaaaaggaaatcagaaataataaggcattagacgtttgattcttttatttccatatgcaatgtaatgtttaggcacgctgcttgggatgctacttctaaaaaaattgttggccatttttcagaatatccttttggttttaaatactggtcaggaaaaacaaatgatgtaaaaatacgtgaataattttctattacagaaatgaaaaactgatttgcatctaaaagtgcaagaggtgaagtaatttaaccctttcaccagacgatatggcaatatacaatatattgcttgagctgtttgagaaggctgtgatgtatttttgtattgacatagaaaattataaattacattgaattagtatccataatcactatatatatacacaaaccagttctaaaaaaatacactggtttaaatttatgagtgaaaacctcacaaggtacagtaaacaattagcatgcttcggtgccagattttgatttctacttttaaaatactagcctgtaaaatgaacgcactctaattccattagcagcacgagcattttcaactgacttgcctaataggatttattttaggtctgttaaatatgcagattgctctgaaatgttcattggtgatgcttgttaacaaggtaaattttggtgaatgggttaaaaggcagatgaactaccaaatgaaacaaaaaaacaaacnaaaacnaaagccaaaaaaaaaaaaaaaaaaaacccaaaacacaagccatatacactccaaatagtctagtgtttcacttgtaggaataatcatttcaagcaaacaagacttgaacagaacatatggctttacgataacatcaatttatcaactatgatgtagcaataaatactttacttaatctctaccaatagacttacatttttgatccgttttaaacaatacagaaaacaattaccaatcaaaaactggttataaaaagaacaccaaatatttcttattcaaaatcacttttgtaagttagaacaaccaaaataacacttagagggcattttcattctacaactccttgtcggcctggaggaaaaatgaattcataattttgtacaaggtgaaaaatgtatgaaaaccgcctaatactttggtcacactaataattgtcaaagttatgtttcaaatacaatagatctgtgtattcacttttataaaactattcttacagccattttaactatagtattactactattattacatgggtggcaagatcttatttcacaggctacccattatttagnacaatacaatataaacatacgcaaaaattcttggtatttgtcaatgtgcaatatttttacacttctg

SEQ ID NO: 57825 - DNA, 1640 bp, Homo sapiens
gcaccagaaccagtgctcgctattcctctggcacacagagtcgtataagaagaatgtggaatgatactgtgagaaaacaatcagaatcttcttttatctcaggtgacatcaatagcacttcaacacttaatcaaggacattcactgaacaatgccagggatacaagtgccatggatactctaccgctaaatggtaattttaacaacagctactcgctgcacaagggtgactataatgacagcgtgcaagttgtggactgtggactaagtctgaatgatactgcttttgagaaaatgatcatttcagaattagtgcacaacaacttacggggcagcagcaagactcacaacctcgagctcacgctaccagtcaaacctgtgattggaggtagcagcagtgaagatgatgctattgtggcagatgcttcatctttaatgcacagcgacaaccccggggcttggagctccatcacaaagaactcgaggcaccacttattcctcagcggactcactcccttctgtaccaaccccagaagaaagtgaagtccgagggaactgacagctatgtctcccaactgacagcagaggctgaagatcacctacagtcccccaacagagactctctttatacaagcatgcccaatcttaggagactctccctatccggagagcagccctgacatggaagaagacctctctccctccaggaggagtgagaatgaggacatttactataaaagcatgccaaatcttggagctggccatcagcttcagatgtgctaccagatcagcaggggcaatagtgatggttatataatccccattaacaaagaagggtgtattccagaaggagatgttagagaaggacaaatgcagctggttacaagtctttaatcatacagctaaggaattccaagggccacatgcgagtattaataaataaagacaccattggcctgacgcagctccctcaaactctgcttgaagagatgactcttgacctgtggttctctggtgtaaaaaagatgactgaaccttgcagttctgtgaatttttataaaacatacaaaaactttgtatatacacagagtatactaaagtgaattatttgttacaaagaaaagagatgccagccaggtattttaagattctgctgctgtttagagaaattgtgaaacaagcaaaacaaaactttccagccattttactgcagcagtctgtgaactaaatttgtaaatatggctgcaccatttttgtaggcctgcattgtattatatacaagacgtaggctttaaaatcctgtgggacaaatttactgtaccttactattcctgacaagacttggaaaagcaggagagatattctgcatcagtttgcagttcactgcaaatcttttacattaaggcaaagattgaaaacatgcttaaccactagcaatcaagccacaggccttatttcatatgtttcctcaactgtacaatgaactattctcatgaaaaatggctaaagaaattatattttgttctattgctagggtaaaataaatacatttgtgtccaactgaaatataattgtcattaaaataattttaaagagtgaagaaaatattgtgaaaagctcttggttgcacatgttatgaaa

SEQ ID NO: 57826 - DNA, 1880 bp, Homo sapiens
tttttttttttttgaaacaatgaagcaataaaagcacagatttattgaagcaaaagtatattccacagagtgggagcaggctaaagcaagctgctcaagagccccagttgcaaaatctggggtttaagtaccctttaggggtttcctattggttacaccctatgcgccaccaatcggaggccgaagtgaaggctcccagtctccagactcttattctcctagctccaaagaaatccactgatttcctctgtagcatcttcaggttccatcttgacaacttcctctaaatccccaggggaagagttgtttagagactcctggatgccctgagggagcggctccagagcttgccttccctcctctgttttcacaacggtccagcgataggcactgttctctgacaatccttcttggcactgtttatcgactggtggaggccctgggctatgttccactttggggaaaacagtagcagagagaggagatagttcctggggctctaatttgggttctaggccctgaaaggcattttccccatcagccacagcacaaagcaatgtccacattcatgtggggccttatcttcaggggtggatggtataggaagattcacagaattgccagaaacaattaagggtgagacagaggaggcccacaagggcctggtttcaatggaacaggggaaggaagtagggttaaccaagagggtggcgaatgggaaatagtctggggactctgggcccacagccgcattgacaggctggatcatgttacagccaccgccaaggcctcacaatcttcacagtggtagcaggaacagtgaagataacagatgcagggtggataacaggggcaggtttgatacagcgaaaggccctggctccccttctttttgagggtctccgtctcacatatggctttcgaaacatggaagaggcaggggagggcatcattaccttgggcacaggggcagaagagagcaaagtctgggactcagacagagggaagcttgtcctggcctcagggggcatagcaggcagtgctgcaggagactcaaaactctcacctccactgacccccagtggagggacacctggaactgtctgtaaaacagtggctggctgtattgggtgaggaatccggagcaccattttgctcggaggggcttctgaatgagttgattgggctggtgttttcccagggttgaagctgggctggagagaggggctgggttggataaggaggggtttcaggactgatgaacgcttctgtctccaagccttcttggggaaacggtcggcaactggcttcagtttcaggactacacccttaggcaatagcagtgggtaccgagtttcactccccaactctgagttgtctttttctaggccttgatctgagttgatctcagtggttccagtcatatttcctacctctctagcaccatcagccatgtgccgcagttcttcctggatggatggcagactggcctattggaaatgagaacactctgatccagcacatgtccagaaatttgggggaaaaagaatggggacttccctaagtttaggggaccctgagacaagctccaaggcatcctttcccaagggactctgcatatgaaatttcctacaaagaccacagtccaattatacactttagaaactcttctctgaatttcctttagcaaattaccattttacccattattttgaaaatgttgtagaatcacccggagaagggcagaaaagtaagggaagaaaggtgaatcaggaagattcctgaagtcctagttctacaactaaagcattagacgattaaggaagtccttgatattctctcagaactttcagtgaccttctgcctcctacagacttcga

SEQ ID NO: 57827 - DNA, 456 bp, Homo sapiens; identical to SEQ ID NO: 24418
  misc_feature (1)...(456): n = a,t,c or g

SEQ ID NO: 57828 - DNA, 716 bp, Homo sapiens
  misc_feature (1)...(716): n = a,t,c or g
aaggattttagctgatatgcaggcatctggatgttagcctggggttttggctggattccacctcgctcagtgatgatagtctgtttccctggaacattcctgtggttttagtagtaatgagatgtgtgcaccactccagtgggaactgaagctcttagtagttacattgtaattaaaaaagaattataaaacaagaaatcagcaagcctgcttacctccagagacacaccgttccacttacagtatctagcttcctcgactcctttgttaaaatcgtggagtatgaaccgtgaccagagaagtaaatatggagccgttttattgagcagtttcctccagggatgacggctgtcagtgtgtttcctgccagttttccagtccttactctctgcccttcattctgtactcttggcagagtcagtaaccaaccactaataaaatcaaagttgtagtaaagactttataacacatatgcctccttctgagttgttggttttgttttgttttgttttgttttgttttgtttttgagatggagtttcactcttgttgcccangctggagngcaatggtgcgatcttgncttanggcaacaagagtgaaagtcgacgcgggcgcgaattccanatctatgaatcgtagatactgaaaaaccccgcaagttcacttcaactgtgcatcgtgcaccatctcaatttctttcatttatacatcgtt

SEQ ID NO: 57829 - DNA, 594 bp, Homo sapiens
gcccgtgcaggagcagctgatgagccagatccgggagacgcagcagctctgccaccagaccctgttcatcttcgatgaagcggagaagctgcacccagggctgctggaggtccttgggccacacttagaacgccgggcccctgagggccacagggctgagtctccatggactatctttctgtttctcagtaatctcaggggcgatataatcaatgaggtggtcctaaagttgctcaaggctggatggtcccgggaagaaattacgatggaacacctggagccccacctccaggcggagattgtggagaccatagacaatggctttggccacagcccgtcttgtgaaggaaaacctgattgactacttcatccccttcctgcctttggagtaccgtcacgtgaggctgtgtgcacgggatgccttcctgagccaggagctcctgtataaagaagagacactggatgaaatagcccagatgatggtgtatgtccccaaggaggaacaactcttttcttcccagggctgcaagtctatttcccagaggattaactacttcctgtcatgaaggctagaggaagacttcctggactgct

SEQ ID NO: 57830 - DNA, 1391 bp, Homo sapiens
gaaatcatgagaaaggactttgaatgacgcccgggacctgcatggccaggcagagtcagcagctgcagtgtggaagggacacgttgatggaccgtagaaagaaggcacttgaccgactacaagaagctgcgggccttctttgtggaggaggaggagcatttcctgcaggaggctgagaaggaggaggggctccctgaggacgagctggctgaccccactgagcggttcaggtcactgctgcaggcggtctcggagctggagaagaagcatcgcaacctgggcctcagcatgctgctgcagtgatggcgccaacccgtggcagtcccagagctggaggcaggaggatggatcctcatctccatgggaagtgtcagcgtgtggctgccagggaagcgtggcaggcgcctggccttgggtccatctacatagttgcgtgtttcaacaatgtccatttatccttcaccccgaggcgtgttttgggggcttgcaaacaactcccggtagaggctggacctgaggacccttcccacctgtgcccgtcccttcctgaagtcctagccacagcccatcctccatgagtcccggcagctctgggtcatgcccttccctggtcacccatctgcccctcacctcgtcatccagggacccagaccctgcaccttccatgtgggcccacagatccttggcaggtacctgaggtgcaccattgagtgtcggatttggggttagcatccagaaagaagaatgcgcatgacgctctgtgaaggctggaactcaggtcttcagggagagaaaggaagactggattgcaccttgatgcctcctgaggaggcggcccccctcttgaggtgggcgtgggcccggcccagccttatccaagtcgctctgtccacctcccccttcctggcccccaccccactcctgtgcctcccaggagccctccctgtgctccacctgcctccgcagaaggaagcctctttctctgtttccctgggtgagggggctggcaggtggctaaccccatttagcatctccaggccctgccatggtgtctcatcttgctgttatctctagctctttccctcctcccatttcctttagtagttgaattttgcaaagcttgtagcagtagctcagttgcctgcagcatccttgtgtgtagataaattagtcgacagaaactcagcactggggacaggattgcaaagtcggggacatagatgcagacagttgttgagatttggggatagccgggcttgtgagcggtgcccatttccagatgaagcctttcagcccttctgagtccccggcccttggtgcgatgtctgtgagtttgacctgcccagcgtgtgggctggctcaatgctgaataaagtgggtttgtgtcagct

SEQ ID NO: 57831 - DNA, 1943 bp, Homo sapiens
agtcctagagacttgtcctgacagtgccgcacacctacttttgatctctcagagcaggtggctccatccccagactagcctggctgctctccgaggcccctccacctgctccccttattgccccattcttgtggcttgccgggccacttggcctcccttcttgccggtgacagcgttccatcatctccccgctccccaagggccaactgcttctcactcaggctggtgtcatttcaggaggaccaaagcctgcgtgagcctttttattttcagtaaaatggtgcttttttccttacttcgagatactatatataaataataatgtaaatgacaccttttcgtacggagctgtttgagtattgctttacagagctcactaaatcagcttcaacaatcttgagctctgtggctcctcaccctgtctgcatggaagaccttgctggacgctctcgggagagcagacatagcaccagaagccactgggagaagtgttttcgatccgtgtctgggccacagtagtattcactgtttagtctttgagttccgtaagcagtctcttcatacatttcttacagtctggagtgtactgactaaatctgtgtaagcaaattgaaatactctttcttttaggtagcgtcacagtggttttttttttcctcaggataatttctatacaatttccttactgtcagaggggaccagatctttccctcactgtgggcagggggccgtgcaggtggataaaggaagagctggtttccggagagtgactgttaacagcgttgactcgaagctagagatggagggggtggccgtctcttagacattggacacctctcagagcctcctgaggggcttctttgtcttctagaatctctaccggtggtcctcctgcaggttctggctcacagacatcatcatgcctttttttccctccctgaggcgccttggcagaagagcgtgaccctgtgagccaggccccccttagctctgcttcagatcacagaacacagacagactcgcgagttgctggacctctttcggtattaagtgtttgaatccatggtgggccttttgcaagtagcgttagctctttttaaatgttgaactgagctaaggatgcactttcttgtggacatagaaggggcccacgtaaggccctgagtaggctccttagttgctgctttacctgatgagggccaaagagattaactctgcctcgttgccatgtctcaggaaaagttgccatatttcacccagaaggggctcgttttcctcttactcttactttaaccatgtgcctggaggagccattctggggctctttgcacttgccccagccttttcttttgccaggggcagagaagggaaagggggtagattgagtgtgccaagggccgtgcaagggcaggcttgctttccacccatctgctgagggagccctctcctctcgctccttgcctctgttcacacctgttgtcttggaagaggatggtccctttgtcttaaggctttgtgataaagtcatctccagttaggatctgcacctgtttccttcgtaatagtgcctggcggcctttctgaagttacaggtggttgggagccctctcgcatgcagaacatctggtagattgatcttgccaggctgggtggttctactgctttctcaatttctaagaaccttttttttttcttaaagagttctgctgaattatttgacaatatttgtaagtaccatgtttccttgtggtgtatgctctgttctggtttctgttttcaaatcaaatgcctgtttgggaggagatgaacgtatttagtctattagatttgcactgctggatttttttttttaaagtgtaaccttgaatagctgtcttattgtttatcctgtaagattagtcaatcgattaaagtttgataattaattgcgaaaaaaaaaaaaa

SEQ ID NO: 57832 - DNA, 724 bp, Homo sapiens
gcggcacgaggcaagttgcatctttaaatgaaaagcgcaccttcttccacctaagtgccctcaaaggatatctgtatgcagttggtgggcgaaatgcagcaggtgaactgcccacagtagaatgttacaatccaagaacaaatgaatggacctatgttgccaaaatgagtgagccccactatggccatgctggaactgtgtatggaggagtgatgtatatttcaggaggaattactcatgatactttccaaaaggagctcatgtgctttgaccctgatactgacaaatggatccagaaggcgccaatgaccactgtcagaggtctgcattgcatgtgtacagtgggagaaaggctctatgtcattggtggcaatcacttcagaggaacaagtgattatgatgatgtcctaagctgtgaatactattcacctatccttgaccagtggaccccaattgctgccatgttaagagggcagagtgatgttggagttgccgtcttttgaaaataaaatctatgtggttggggggtattcttggaataatcgttgtatggtagaaattgtccagaaatatgacccagaaaaagatgagtggcataaagtttttgatcttccagagtcacttggtggcattcgagcctgtacactcacagtttttccacctgaagaaaaccctgggtcaccttctagagaatcacctctttcagcaccttcagatcattctt

SEQ ID NO: 57833 - DNA, 2198 bp, Homo sapiens
tatctgtatcaataggaggaacattgccattttcttctacatgacataaaattgtactaaaaggcactagtatgtgcctttctgggtggcaggcctccactctcatgatgttttaacaaagcaaagtagatatacttacggattcaaattttgactactgaataactcatttcaaaaagaaaattcagctcaataaaattcagtatctgtctaaaactatttgtcagggtaataagttcatgggaggtccaaagacaaagtatgtagtcctattctatactaaagtaaacctggattgagatttataataaaaatcacaacacaacagtattacttggtaaagtcctcaaagtagattttatttatacatttcttcaaatgattgtggtattttaaaaaatctctcccaaatttgatgacatagggacagtggtgagaacaaagtatccctaaaggaaacaaatatcgattggtgctttcctagctcactgagctaacactcagaagccaatttattctataatcctaaagaaccttaaatgtgggtttgtttgaattggccttctgagaatcattgaaataaaggaaatattacggaaaagagattagtttcccaaaaatgtgctgtctttgaaaataagtcttcagacatgtgtgtcggaaaagatctgcaaagcttggtacagtgttaatgtgtaaagagaaccaatcacctccatggactttaaaactcaaaattatctatgaaatactttaaatgacatggcattaccaacattctttaaagcatttcatttaaaagaaaaatgtaagactgttctcacccttttgaaaagacctaatccctttctaaaccaaaagtataatttgcaagagaaacaacattacaattcactggtaaattaagatttctgaagttgtaagaaatggggccaaaacaagtccacgcctcaaaaagggatggttaaccaccaagaaatgtgcctatgagtaaagtgccatgaaagaaagccctgctcagcctaaatgaagtagacaaagatcagaagtcaagggtcattcgccagagcggcagcaggctcgaaaacccacactgcaaattctggcatccactggcggtatcagcatgaggaccgttaatgttgtcacagtagtaaaagtattcatcattcagagaaggacatgctgaaaccaaatcctgcaggcctgcacccagttatagtaagacaaccagagagattaaggtgctccaaataaggcagccctcctcccagagtcaaaaccctgagaccatggtctgtgatctgataacatccagataaactgagaaacagaagtacacgtccagtctcttgatcagatttttcactcccaaagtaaattaagtcttttcccctaggcaatctagtccttgctgcttttctacacattgcagaagattctgggagtgatgacatagttcttaaagctgttcctgtacaacaaaatgagtgaccacaatacgcaaaggctggagaagcacaatgctgctgccaacagacactagtccttagtccaacaatgtccttactaaaacaaccagaggtggaacaactaaagttggatgctgtttccattacacaaagactttcaacatttctatgtctccattccacagtatcttcaatatcagccaaatcttcagcatctaacatccacacataaggagaagtgaaattctcagaagaaacaggcttagtccaggggtgttcattatctatttcttctccaatgcccttgttagttaaatcgtgcaaacaggcatactgcttggtggactgcatggtaatgtctttatttttccacgcagttgaagtaattttgcttgtagatgttttcaaaaagccactttgatgagatgtcagaattccaagagctctggaaatcttctctagggccacatctgtgattttctcacaaccagacagatcaagatgccgaagactctggcagcaaccaagccaagaccaactgtcaaatgcagaatctgaaatgtcagtctgggtaagatccagatgctccaggttaggacaaagctctaaaatctgcctaaccattttgctggaaactgcagagctgtatgctaatactaaggtttttacagaagtaccaacatatggtagaacgttatgaattaagccatggagtaaacgtttttc

SEQ ID NO: 57834 - DNA, 748 bp, Homo sapiens
agctatgacatgattacgaatttaatacgactcactatagggaatttggccctcgaggccaagaattcggcacgagggcggcggttgggaacggccgagtgtggctcttctggtgtttcagcttggggagagaggggtggccttcttcttgcagttgaggccggcgccgagccggacttcagccggatctcgtggcggagcccatcttgctccctctcccaggcctttacccgctccctaggattcccgggccctgtaggtgggagttgggagacgacagtactgcttttaaagagacagtgttagggatcttggaagcacagccaacatgtgtgacattgaagaagccactaaccaactcctagatgtgaaccttcatgagaaccagaagtctgtacaagtgacagaaagtgacctcggaagtgaatctgagcttctagtcactattggagccactgtacctactggctttgagcaaacagctgcagatgaagtcagagagaaacttgggtcatcatgcaaaatcagcagagaccgtggcaagatatattttgtcatttcagtggaaagtctggcacaggttcattgtctgagatcagttgataacttatttgtggtggttcaggagtttcaagattaccagttcaaacaaacaaaggaagaagttctaaaggattttgaagacttggctggaaaactcccatggtcaaaccccttaaaagtgtggaaaattaatgccagttttaaa

SEQ ID NO: 57835 - DNA, 1318 bp, Homo sapiens
tttttttttttttaacaatgtgccaaatgttttatttctctcatatgcaagtaattacctctcaaagcatttttaaaaaacgcattattacactttaccaatgaattatttctgtccctggagattaaatcaaatcaaaatgttacaaatagtatcagtatgatataatttcttaaatatatgggacattgtcaacagctgtgattcatatgaaaaatataatcagatatctcaaattcctaattctgttttaaaaacacaaaacactagaacagttgctatgaaattactgataatgatccctttaataaactgcaattaaccactaatatagaaattcaatttaagcaagaagttttatatattatactttacagaaaaaaataattttgaaaaagtaatgacaaacggagatcaaacatttagggcattagttactggattttttttttagaatatacattaagtaacactagtaaaatttaaagttttatgaccaggccttaaaaaacatgaatgatgatgacagaaccactatcacacataaacaaaaatagagcaaaccaagcgtgtccacatctccatgaattcagtgatttgaaataaatgttgttatgttaaacattatgagcaaatctaaaggttcaaccaaaaaacttacatatttttgagtattttttaaagttttaatagtttatctctgatcaaggatggagaaaggacaaaaaaaaatactgtcctgaattgattctcacagggcctgctccctcacagaacacagtgtcattatatatgccttatttataatataaaacaacccaaagaattttcattcttcttagtaagtatttaaaatacattctaggcgtgcattaggagtaaatgttaatttgtgatgcccttaaaagactttcaacctgtaagaaacaatttctgggaatataaaaatattgaattttacatatttcagagtcttgagaaacttaaagtgcagtattttcatgtatcagcaaataataattgtgtcatataagctcatcttgaaagaggatgtaaatacttccaaatttttatgaatgctacattacagagggcagagtgtagctattttaaggtttgattgtccagatttttttattagactgcaaggaggaaaaataagcaccaaagtaaaatatgctttattagggggaaaaacagtgttttcatgaaaagaaaatagaaaacatgtcatttctccctttagtgacctttcttcattcaattacctggtttaccaagaatgttaactcagttcaattattgaacaaatcactct

SEQ ID NO: 57836 - DNA, 1277 bp, Homo sapiens
gcaacaaagccataggaaaacacacaggagcttttccctccccttcaggtccccgccctctttccaagctggacaattttttattaagttgtttattccctgccttaaaactgaaacaggaaattttctggtagaaggagggtcatttagtcacgaacactgaagtgggtcaaaattctattctgggtcaaatccttgaattcaaacagatgtccataatcagtactgatggaatagagcaagtttttctatgtaagacaaataaatcaaacatcatgtgcatctcctcataagggtctgcaagggtctgatggtttaaagttcctaacagatctggttgcagcatctgccggagcttgcaccccatcatcggacggtcatcttcctgctgcagaagttaggtaacataagacttagatttcttcctgttctagcaatctgcaagaccaccaggcttaactttttagctgccagaagacaaacccccttttctgtttcggcaatttgtcctggcacgtgttttggacttcctccgatttacacgaaaagctctgatattcattggagtactttattttttttcctcagttttgtttcttttctcatgtaaaaacaaacaaaaaggtcaacaaaaaaaaattgaggtttttcttgtttctatctagttcatgctttctttgcggtgtttgaacagtagtctgttaacttagtaggtggtacctggaaaggtattttaagtatagtgactgtttaataaatacttaattggatgatggaggaggagaaattgttttcttcccaggattctctttgggggtcattttgtgtgacagatatattttagacatttggagaaacagtttcagatcctgccaggatatttttgtaaaaaaggaaaatgggaagattcccaataaactagaaacagtacgtatctaagatgctgaccacagaagctaatgtgacttttcagcttatcaagaggatggccaataaaacttaaaggtgtggttagatgttttctcacttttgtgacattaatttatcactgagtctcattcaaccaagtaatctaaaatactgtgcaaattctagcagtatgtcttcgataacttggatgttaggatagccaatatgtacaaaaaattaaatcaagtattttgtcctatgtataacacaaattaattttacacagagaaagatgtttctaggcaagtgaaattctggtaattcatactatttctttgtatgaacaaataaaatatattttgccaacg

SEQ ID NO: 57837 - DNA, 2128 bp, Homo sapiens
tttttttttttttaatcaaaaatgttttaatgattactgtttagacatttaacaatgtaggtatatccaggtgagctaagcacactttgacagcacactattgaatgttatagtttctgtattgaaatatgtaaagacatctgcaaattagtacctagcaatgaagacatacatttataaatatacacattctaggtttgataaggtaaatgtaaacagatgccatgactccttttcaaacagaaaacccacaagactaatagagaaccaataggctccctatagtacgaatgtgcaaaattaaagcatggtaaactggatatttacataaatatcaaaccaacaattagtttatacattgtcaatgaccttctaagatatgtcatgagtggttccaagaatatctttcccccaatggagaaggtattcagaggctaaattccgacactttaaaatgacacacatcataggctttacctgtttgaccactgcctcaaatgtgtgagatgtgattttatgataagcagtctattatttttaaacaagaggttctaaacacatctttagattctaagcagaaagaaattacaagtactattagatttacattaaacaagttacctctatcaaatttctcgattctcttatgctgtagctatatttgattttaccttaaaaagttctaaggtcctttccccccctttgttaattttggtaaactaggcacattttacaaggaaatctgtgtcaaaacagataacagtgcataaatcaatccaaatttagaccctggcaaccagttccccattgctcatctacaggactctgtcaaacggtaaataggcaatcatctctcttgaaaagtatacatcctctctcgcactggtggaaagcaaaattgactttttgtttgctgtataaaaacacttagcacttcagaaattaaaaatggcctactcaccctacacccttcctaaaatctcgaggacaaagaatatatatttaagtttcatcacgactgctgtagagcccccccctttttacattaatagtggcactcaaaataaaaaaataagatctgttaaaaagttaaactgactgttccactagatttgagcctgcttgattcaaagccaatagtacaaaactgaaaggtgccgtgtctgatttcacatcaacaagtcactggaaattatgtcacattagtttcataaatcatggtctttgattttttctaaacagagctattacaaattaatacaaacttgaaacataccctaatttaaactaataagctttgggccctgctttttaaattttaaggcatgtgtgtttctctaccataacaacattgtacaaatttacatttacaatcacatgcatgatctacagttaaaaaaaaaagtttggattacagtgtttttaaaattgtgaatcacaattcagcacctatcatgttataactaataaggcaacagccagtgttgtatactataataatactccccttcccacagtctagcgcaggggtcagagagcccagaaatgttagaaatccttatccctacttatataatctgtatacgttttctaggggttttgaattgatgaaagaagtcctacatgaatcacactattgtaggccagactagttacagcagctgttaacgagcattggggcacaactcatattgtgcatacaatcagatgaccgtggtttggagggtttcaattctttgacttcaatcccttcccgcagcttcccttggcttcacattgttttccaggggtgaaaagctgttggtgtgtcccattcacagcagcccatggacccattctggtggtccttccaggtggtctttccttcgggaggcccctttcttgttgtaggtctgaatgtagaagtttgtgaagagagcaatcagggaaatcatgtatccaatctggaaatacaaccaaccaagagggaatgtgcacggccagatgaccccgcagctggtctggatgattgtcagcacaaactgaagctaggggaacagaggggatgcagctgaacagggacagtgcatggacgaggccccacaccaggcagactttttaaccagcatcacctaaatttctgaattaa

SEQ ID NO: 57838 - DNA, 456 bp, Homo sapiens; identical to SEQ ID NO: 14717

SEQ ID NO: 57839 - DNA, 960 bp, Homo sapiens
  misc_feature (1)...(960): n = a,t,c or g
gaaagctaagagtttcagtagccagagagggtgtcttcaactctattccttggtacagtgtctggaattgaaaccaaatccatgagctcattgtagtccagctctctgaccacagaaagtaaagcaaatccaggcttagaattagacctgtttgtggggagcagaaaggattgggatggggaggcatagtggagcaacacatctgagacaggaagtacggcccctgttctgttggcagtggacctcttcagtcagtagccaaggtcacagccctgagccgatgatgctccatgctgctgcctggatggaaagcattcgaggggaccttttggccaccagcattatgctgacagtcccagctcagacagaaggccttcttgtggcctcttttctgaggtaggaaggaaggttccgggtcaggaagtacatggtttgttgtaggtctgatgtgaacagtttgttgtcactaaccagccctggctagcaagaattccagaagagggatttggcagggacccatgtggtattgcaacctgtcaatacatcttgacaagtttgtaaatcagtcttcctggcagccagcttcacatagtatctaacacagacaggatttgctcaccaaaaacagagatgagtttgtttttggaggcctctgctgttacttctggccatttacctcttgcataatgtaaggtagccttttctcatctttgccctccaatgcccatctggttctcagacaatccccaaaccccacaaaaatggctgtttagaagaggaaggataaacagttggcccttggtatctgcaggttccacattcatggagtcaacaaaccataaatcaaaaacatttttggggaaaaaaaaacagtgaaaattaacaatacaattagtnnnnnnnnnnnnnnnnnnnnnnnnnnnnnnnnnnnnnnnnnnnnnnnnnnnnnnnnnnnttttt

SEQ ID NO: 57840 - DNA, 1074 bp, Homo sapiens
cagagctgctgtcatggcggccgctctgtggggcttctttcccgtcctgctgctgctgctgctatcgggggatgtccagagctcggaggtgcccggggctgctgctgagggatcgggagggagtggggtcggcataggagatcgcttcaagattgaggggcgtgcagttgttccaggggtgaagcctcaggactggatctcggcggcccgagtgctggtagacggagaagagcacgtcggtttccttaagacagatgggagttttgtggttcatgatataccttctggatcttatgtaagtggaagttgtatctccagcttacagatttaatccccgttcgagtgggatatcactttcgaaagggaaaaatgagagcaagatatgtgaattacatcaaaacatcagaggtttgttcagactgccctatcctctcaaaatgaattcttcagttccaccttcttactttattaaaagggaatcgtggggctggacagactttctaatgaacccaatggttatgatgatggttcttcctttattgatatttgtgcttctgcctaaagtggtcaacacaagtgatcctgacatgagacgggaaatggagcagtcaatgaatatgctgaattccaaccatgagttgcctgatgtttctgagttcatgacaagactcttctcttcaaaatcatctggcaaatctagcagcggcagcagtaaaacaggcaaaagtggggctggcaaaaggaggtagtcaggccgtcccagagctggcatttgcacaaacacggcaacactgggtggcatccaagtcttggaaaaccgtgtgaagcaactactataaacttgagtcatccccgacgttgatctcttacaactgtgtatgttaactttttagcacatgttttgtacttggtacacgagaaaacccagctttcatcttttgtctgtatgaggtcaatattgatgtcactgaattaattacagtgtcctatagaaaatgccattaataaattatatgaactactatacattatgtatattaattaaaacatcttaatccagaaatcaaaaaaaaa

SEQ ID NO: 57841 - DNA, 2107 bp, Homo sapiens
  misc_feature (1)...(2107): n = a,t,c or g
gccaagttgcttgactattctcagtctcagtttctgcacctgtcaaatagggtttatgttaacctaactttcagggctgtcaggattaaatgagcatgaaccacataaaatgtttggtgtatggtaagtgtacagtaaatacttccattatcagtccctgcaattctattttngttccttctctacacagcccctgtctggctttaaaatgtcctgccctgctttttatgagtggatacccccagccctatgtggnttagcaagttaagtaatgacactcagagacagttccatctttgtccataacttgctctgtgatccagtgtgcatcactcaaacagactatctcttttctcctacaaaacagacagctgcctctcagataatgttgggggcataggaggaatgggaagcccgctaagagaacagaagtcaaaaacagttgggttctagatgggaggaggtgtgcgtgcacatgtatgtttgtgtttcaggtcttggaatctcagcaggtcagtcacattgcagtgtgtcgcttcacctggctccctcttttaaagattttccttccctctttccaactccctgggtcctggatcctccaacagtgtcagggttagatgccttttatgggccacttgcattagtgtcctgatagaggcttaatcactgctcagaaactgccttctgcccactggcaaagggaggcaggggaaatacatgattctaattaatggtccaggcagagaggacactcagaatttcaggactgaagagtatacatgtgtgtgatggtaaatgggcaaaaatcatcccttggcttctcatgcataatgcatgggcacacagactcaaaccctctctcacacacatacacatatacattgttattccacacacaaggcataatcccagtgtccagtggcacatgcatacacgcacacattcccttcctagggccactgtattgctttcctagggcatcttcttataagacaccagtcgtataaggagcccaccccactcatctgagcttatcnnnnnnnnnnnnnnnnnnnnnnnnnnnnnnnnnnnnnnnnnnnnnnnnnnnnnnnnnnnnnnnnnnnnnnnnnnncagctttttgggggatcataattcaacccatgacagccactgagattattatatctccagagaataaatgtgtggagttaaaaggaagatacatgtggtacaaggggtggtaaggcaagggtattctacgactgaggggattgaactagacacacacagacacatgagcaggactttggggagtgtgttttatatctgtcagatgcctagaacagcacctgaaatatgggactcaatcattttagtccccttctttctataagtgtgtgtgtgcggatatgtgtgctagatgttcttgctgtgttaggaggtgataaacatttgtccatgttatataggtggaaagggtcagactactaaattgtgaagacatcatctgtctgcatttattgagaatgtgaatatgaaacaagctgcaagtattctataaatgttcactgttattagatattgtatgtctttgtgtccttttattcatgaattcttgcacattatgaagaaagagtccatgtggtcagtgtcttacccggtgtagggtaaatgcacctgatagcaataacttaagcacacctttataatgaccctatatggcagatgctcctgaatgtgtgtttcgagctagaaaatccgggagtggccaatcggagattcgtttcttatctataatagacatctgagcccctggcccatcccatgaaacccaggctgtagagaggattgaggccttaagttttgggttaaatgacagttgccaggtgtcgctcattagggaaaggggttaagtgaaaatgctgtataaactgcatgatgtttgcaggcagttgtggttttcctgcccagcctgccaccaccgggccatgcggatatgttgtccagcccaacaccacaggaccatttctgtatgtaagacaattctatccagcccgccacctctggactccctcccctgtatgtaagccctcaataaaaccccacgtctcttttgctggcaaa

SEQ ID NO: 57842 - DNA, 871 bp, Homo sapiens
gttaaagataaaaattaattcaagagcacagatatgctatgcatactactaaaataaatacagtgatttataaatgagaaaaagttaacaatgaacagtgtttcagaagttgaaaaggtgacactaacagtgctaaatacacaggcttttatttgttttcttcagattgctttttcgtgaatataaagatgaggagtccattctgcaacctaaaaatatttacttattaaaactatattaatactttaataaactatacaaaaaggtaatgagacaaacatctgcatttatggaactgcatgtcagtcaggccagttccctgcagagggaattcccagcatgacctcattcatctgtgaggacacagagcagtccttgtttaggacatacacattcatctactgctcatcatggtcagccttccacttcttgatggtttccttctggctatgaatgcgcatgtccgggttgtctgcttcttagagcagacatttaccttcctcatccaccagccattggaggggggactagggccacgcagaatgattgattctacccattccttccggggagggtttcctggtggccctcttccatcatcatatctggaatcagatgagtttccataggcttcttctttttttcacatcttgctgaagcagagttttgaaactgaaaaacaaaaccacaaactcagctattccccagaagaaatctgttatcaaagataatctccatggagactgactccggctgtccaacacttgtccgttcgagatgtaaaccatcttgtcccacttccccgcttcggagccaccgggcgcctggcccctgtcggtttctgtatctccctctgctcccacttcagatt

SEQ ID NO: 57843 - DNA, 1168 bp, Homo sapiens
atagtggagggcgaggaaaggggggtgataccttgcagtaagtaagtcgaaatagcatgcctgaaaatttgaaacagaccattctaacacccaaggcttgtttataaaatacttgagaattacattaatgtggaatcaacagatgcagaagaatataacataacttttaaaagctttcataaataccagcagcaattgtaagcaaatctacaaaggttcttgaacctttctattatatacaaaactgaaaagtcattaaggagttcaactaatcaggaattaaatggtcatttatttcatgcagtatgatttaaggtatttcttgagattctggtcaaatgtcataatcagcaaacgggattaaaaaaaaaactccaaaatcactaaataattatctaaataatgggtattgggaggaacttgtttccccgctatttggaagagattgttgcttcattgctagtttgtatttctaacttctacagttatagactccactgtgctttgtgtctgaatttctcagtatagacattttgtttactgtatgcttgcatatttattttcaactttgcctgtctttaaaattgcttgaggaaaaatggttgtaattaatttctgctacagaaaagccacctggtacgttttgtctcatcaggaattgttttaaattctaaactataagtttgttcagaggggcttttgcaatgatagcagaaaactgtacaaatgtacagttagttatagaggttcttgttgaaatgaacttaccatctgatgatatgtatgtacagctgtgtacttgagtcttttttagtttacttagaaagactagcagtttgacctgttaaacaggactagttcaagtcaagaaactaaggttgttgtatacacctggaggcatctgttattcagcttatcctttgagtgggtatttggcacaatgaggataaacttatgtgacccacttgaatggctgatctaataatgttgacattatgcattctgtacttagtgaaatgtcagatgaaaataactgatgaataatttttttgtattaaagggatgggaaaagaacacatgaatttgttaataaagcactatgatctgcaaacgatggaatgtttcataaagatctaaagaaataaaggaaactttaaaacagaaaaaa

SEQ ID NO: 57844 - DNA, 497 bp, Homo sapiens
  misc_feature (1)...(497): n = a,t,c or g
gnnnnnnnnnnntttgnnntccnnnnatttgganaccgttatgacatgattacgaatttaatacgactcactatagggaatttggccctcgaggccaagaattcggcacgagaccagttgttacacttactttttcaagttggagtatatatgactcagtgcagactggtctctcttatgtgaatgcacacatgcagaaatgcagagtcaattttacatgcccataaagacatttgtaaagaattcagctcttatggtctgttgtataaatgtgtatctaggcactttattataactggaatttgacctcacagatgttacaacttgatcagtcatttgacctaatttgtggtagctatctgtatgttttgcaatcttaatacagacatgctttccaaaaagattaatacagaaccatcctgccgttttggataagtctatccagctgtggaaagggcaacctgtggtttctctgtactggtgtttaatgggggaag

SEQ ID NO: 57845 - DNA, 3034 bp, Homo sapiens
tgaaagttcccaaacctgaacctataccagagcctaaagaaccttctccggaaaaaaattccaaaaaagaaaaggagaaggagaagacccgaccacgatctcggtcacgctccaaatcaagatcccggacgcggtcccgctctccttctcacactcgacctagacggcgccatagatcccgatcaagatcgtattcacctagaaggcgggccaagcccaagaaggcggccatctcctcgaagaagaactccgccaagaagaatgcctcctccaccaaggcatagaaggagtagatctccagtaagacgaagaagacgttcgtcagcatccttgtctgggagtagctcatcatcctcttcatctcgttcacggtcaccaccaaagaagcctcccaagaggacatccagcccccctcggaaaactcgtaggttatctccttcagcaagtcctccaaggcgaaggcacaggccatcacctcctgcaactccaccacccaaaactcggcattcccctacaccccagcagtcaaaccgtacaagaaaaagtcgtgtttctgtgtctccagggagaacttcaggtaaagtgacaaaacataaaggtactgagaaaagagaatccccttcaccagcaccgaagcctagaaaagtagagttatctgaatcggaagaagataaaggtggcaaaatggctgcagcagattctgtgcagcagagacgccaatacagacgacaaaaccagcagtcttcatctgactctggctcctcctcctcctcagaagatgaacgacccaagagatcccatgtgaagaatggtgaggttggcaggcggcggagacattccccttcccggagtgcttctccatcaccacgaaagcgccaaaaagagacttcccctcggatgcagatgggaaagcgatggcaatcgccagtgactaaaagtggtagacggaggagaagtccatccccaccacccaccagaaggcgacggtctccttctcccgcccctcctcctcgacggcgcaggactcccacaccaccaccacgacgaaggactccttctcctcccccacgtcggcgctcaccttctcctagaagatactctcctccaatacagaggagatactctccttctccacctccaaagagaagaacggcttcacctcctccccctcctaaacgaagagcatcaccatctccaccaccaaagcggcgggtctcccattctccacctcccaaacaaagaagctccccagtcaccaagagacgttcaccttcattatcatccaaggcatagggaaagggttttttccccaagccgctctacccggggagggcccgatcaccacaaccaaacaaacggcattcgccctcaccacggcctcgagctcctcagacctcctcaagtcctccacccgttcgaagaggagcgtcgtcatcaccccaaagaaggcagtccccgtctccaagtactaggcccattaggagagtctccaggactccggaacctaaaaagataaaaaaggctgcttccccaagcccacagtctgtaagaagggtctcatcctcccgatctgtctccgggtctcctgagccagcagctaaaaagcccccagcacctccatcccccgtccagtctcagtcaccgtctacaaactggtcaccagctgtaccggtcaaaaaggccaaaagcccaacaccgagcccatcaccgccaagaaattcagatcaggaaggaggtggaaagaaaaagaagaaaaagaaggacaagaaacacaaaaaggataagaagcacaagaagcacaaaaaacacaagaaggaaaaggctgtggctgcagctgctgcagctgctgtgacccctgcagccattgcagctgccacaaccacattagcacaggaagagccagtggcagcgccagagccgaagaaggagactgaaagtgaagctgaagataaccttgatgatttagaaaagcacctgcgtgaaaaggccctgagatcaatgaggaaggcccaagtgtccccacagtcttagggggaaatgtttgttatgatgtaaattttatttggtttgtacgcagttcaatttcaaaattgctaaaatgtgtttgagctttagactataacatttgttgtaataattgctaggttgaagttcaacatgtaaaaaaagggggcatggatttacattgcaaaaggtgtccacagtgtattagtgacattctttcattgacagctgacataattcattgagtgaaatattttaagccaaaaaaaaattccctttttaaaaaagggggtttaaatactgttggcatttttatggttcctttaaatgccctagctattcccagaggggtttttttgtttgtttttttggttttgattttctttttgtttttctttcttcttcttatttttttcatttgagtcttaggctcccatttaagttatgcttctgaccttgtatgggtctgtaagcttgcccaggaaataaggaccactgttttggaactaccacaaaagtataaatgaatattttaatgccacaatctttcctgttgcctgtggagtctctgctgaaatgaatcaggattccgagctctaggatgagacagaaaatgaaagcatgttgtttgccaggacactgtggggtttatattggatgtgtaaccaagttgatttggaacactggactctcattctgttattctggttttgttttttttgttttgttttttttcttttgtaaaggcaatgagctagtcccagaaaggatccttcagttacatacaatttgtttaatgaaatgtcatggctctgttcatatttttgtcttgttcttccaattggtatatacaactttcagagcctcttgtatttggaaggctggaagggcccagactttggaatagtgtcttggtttcactgtttttgttttgattttttttttgttttgattttttttaaactaaagctatataaagcttgtggattaaacagaataaatttctaaatttaaaaatttaaaaaaaaaa

SEQ ID NO: 57846 - DNA, 1136 bp, Homo sapiens
  misc_feature (1)...(1136): n = a,t,c or g
tttggaaaagaggtacctttatttgaacagaacaagcaccctggccccagggcaaccacttccccaggtgcacagccagggccctcctgtctgcaggagaattcacagctggtgtgggactcagcccctaggccattcacagctttgtctggctctgtacattcattcagcacggggcaggggggccatgccaccagcctgggggctcaccaggcccctggatgcacacaactcaggcagggcacctgtgggaaggcgcatatcctggcggcagcagcacgtggcaccaggtgcaaggccagttaggtggatcctggggccccagggagcgcagcttgctgggcagtttcataaaatgcagcccctgcccacacccacctggcttcaggctttggatgtctccaaaccaaaaacctcccactgaaaatccaggtgtgatnnnnnnnnnnnnnnnnnnnnnnnnnnnnnnnnnnnnnnnnnnnnnnnnnnnnnnnnnnnnnnnnnnnnnnnnnnnnnnnnnnnnnnnnnnnnnnnnnnnnnnnnnnnnnnnnnnnnnnnnnnnnnnnnnnnnnnnnnnnnnnnnnnnnnnnnnnnnnnnnnnnnnnncagatccaggcatggccaagcgattcatggctgggcagggccagtcccgtctcgctgcacgctgaccaccgtgccctgcgctcacgcctgcaagccactcagctggaacctggcctcctcggatatgccgaactgttccagggggtccttgcccgtcaccttccggatttcgttcctgtagaagatgaggcttctccgcatgaactcgtagctggcccgacgcagagcctccatccactcctgacactgctcctcgctgctgcactcaaagtgatacttcctctcagggtcctcaatgaagctgatggagaaggtgccgggctcttcccggacgactctgcagcgctccagcagcagggctccgacgggctcggcctcgtctgtccgaaagtagaagaggaaattcaccaccagcttcaccagccgccgcttcagcacgctgcccttcttggggcccctcatgcccagctcggccgccatctcggccggctgccgggacagagcctgcagctccttctcgttgtaccgcc

SEQ ID NO: 57847 - DNA, 1840 bp, Homo sapiens
  misc_feature (1)...(1840): n = a,t,c or g
cctggtgncaaaaatnaaaagaaacatgaagnaaaaccttgtgcttgccccaagtggaactgtcctggtaacaacaacaacgacatttncaccccaggccgncaattgccaaaactgtcctcaatgccccatgtggggcgctgggaatgccttccctgtaacagaatgtcctcaatgcccttcaagttaacacaataaggtgttccctgtttaacagttccctggaggtcagaagcacaggcacgagagaagcaggcccgttcttcccgtggcccacttcttcctttgaacaaaggctccttggacccagtggcgggaaactggccctcccacaccccctgcctgttctgggggcagcagtctttggaggagtaatgccaggcagcccctcactgagggccccagtctcccctgcatttcttccctgattgattgataggaggtggctgggctgccactgaatttgtcaacttagactcattgacaacacattaaggggctgtaattatatttattagattaacaaggcagatgtgaattttctcttctataatccagtaagtctgtgtattcgttgactcagacagacaagaagccacaaggaaacaaagaagtaatcatttgttgagagacgttattaactatgatcttccctgaagctaccgggatgggaaaggtcagtgtcttcctttgaaccctgagacaattaggggctcttgaggcctgctgtgcccctgctgccaaggcagcctcaagttcaaggagcagctaatcacccactcctgcattcagtctgtcttgcctgatgagggctacgcaggctgcctcccattggtgtgcactgtttcctttttcagctgctaaatgggctgaacaccatcggcctggggtatccctttttggggaatacgtctgtctgtctgaactcctttcccttcaaatggcactgtgataaaatctggtcataccatgctccagcactggaagtacatgaaagcacgcagtctgtgagtgcccatgaggactctcgtgctgggcccccgtggccctggctagctgtcgtaccagtcgaggaagagcaaggagaaggagcacatcacgaggaagaagaggatccacacgcggaagccagcgttgtttttaatggcctctcttatgtcttcgttgccttccttgatattttcagttgcccccacaactaactggtgaatgctgtcaatctcagcttcctgttgcaaaaccttttccgtgaatatctcttggagtctggaaatctcaaccactctcccttcgatttgcctcacttcatcaaacaagctgttcatttcaccaattagtcgctgattttcctgttcaaacatttgtatttcttctggggataactcatcttcgcctttgcccatctccccacgttccccaattccaggttgtgtttcagccaaaattttttctggacgttcttcagtggcagggttttcttcagagtcttttgaaggactctgtgaaactttctcagaagatgtggattctcttgtctttgtatttggttctggttccagcttagataatcttttcttatccaccactcttttaactcggatggctctctgttctgagtaaagtttacatactcttttcaagtaatcttcaatgaaatccaaaacagcggtcctgtgctccttcacttgctgggaatgtatctccttgtgagcttctgttcgtagttgctgaattgcttctgaacaggtcctcatgaatatcatgggcatcctggtctatctggtctcgttctgtgtctgtcatcctcccatattcagacatggtatggctataagcatta

SEQ ID NO: 57848 - DNA, 1104 bp, Homo sapiens
tttttttttttttttttttcctcctgcatatactttattcacacatgctaaatctcactaaacagatcacactgtcaaggaagatggctaaggagaagctagggttgtcaaggtaatccttgcttcggccctgttttgcaacaaggtaataaacagccagaacagactggagtgaagcaggttaagggtgaggagagaacacagtgcagtgcagggtgtggaaggcagctcacagtcagggaggcagcagttctagccaatcaacactttatttttcaagtcaacacctgcacagatgttagtgtccacttcctgaccctagtagggggtcccactacacttggatcacccagaggagcagtaaggaagctcctaatctcaagagagagcacatgctcaccaactccagtgctggcgccatgtactgcgggatccctgctctcctgcatcatgaaaggccgggctgaatggggcaaggatgcagtgaaggttacacagactacagtgacctaagagtgtaactactggcctgacccactgccccaggtttactctttacttcccagaccaggagcctccctaaagcttggccagtgcccacgggataggaggagctggcaaaggatggggttgagctgctaaggacaggacacagcagggaaataaagcagaaaggaacacaagacaagagaaaaattataaagtgcctcaactaaacaaccaagtgggaacttgagggccagagcagcacaggtccctgaggataggaggaaaaagaaagggccagaccaccagggcttggggcatagtggaatgagaatagagatgaggcagggaggcaagcgcaggctgtgggaaggacttccctagccctgttcacatccactaacccaaatggaaaattatttacaaatttaaaaccaatcctaggcacaggtactgcaccatgcccaggacagcaggcaggcaggcaggcagagggtggaatagctaccatccgacagccagcttccccacacactgccccaccccagagtggtaggcaaaggaggaaacagcaacactcctagccaggaagccctactgtgcctgcagctccttcct

SEQ ID NO: 57849 - DNA, 906 bp, Homo sapiens
ttttttttttttttaaggataaaataagtttttatttatagtcttatagtaaagggggaagccttaacttgcaagacaattcttcggcagtatgtacaacatactttttatttccatggaatggaatcaaacacgaactgagactacagagtatacactagaaatcagcaaatgccaggaacggagtaggaaaaagacaaagaaatgaggcctaaacacacaaaacccttcactggcatctgctgaccacagccagaaccagggctggatcacacaatggagacaggttccaggacagtaggaaaggaagtgggatgagggctgggaagggtccgcactggggtgcgggtttagtaccaggtaaattgctcttggtatttacatacaaaatcagttggctctatttcttagaaatacacacgggaagaaagaaagatttcatcattactttatgaatctgtcgctttgcaagaccgacatcatcagaaataggtacaattcactcagattcaaatttaagtagcaggaaataaatatcaaaacatcatcactggccctcaatacaaaacctctatgccacccaaaacaccctccctgtcccaaccccaaatggccactccctggtggctgctgcttcactgctgccatctcccatacataccacgagagtgtcacacggccctccgtgagggctgggcgccgcaggcttaaacagctgggctgagagaagcaggagtgaaaacatgccagcgactctgtgctgcgaatctgtccccactttctttttataccacaaacttctttaaggatctggtctttcaataggagcgatctcgtgccgaattcttggcctcgagggccaaattccctatagtgagtcgtattaaattcgtaatcatgtcatag

SEQ ID NO: 57850 - DNA, 918 bp, Homo sapiens
caagtttataaaggcatttagtttatttttcaaaaaaatactttgctagaagggttgagtactgtaattttacatgatcataatctctaaataaattctttttctgaccaacaggtaccagttaagtgaacagctcgtctaggtctgcttttgtaacacccaaatacaattagcacttctctgctggtattccctgggccgtcttaattatctagaggccaggaggcaaagcctagcacgtaacaaagtatgtgctttgtaactgctgattaattcagtttcttaactaggcagagcaggtcatcagtgtatctaattcacactattaatacactgtcttgctgaagagtctgacctgcccagaaccccgttatggctagcccagggaagcagtaaactgcaaagcagagaaaaggggcagctaagatgaggctagtgctggctgagtcccagttaggtctgttactgttctgttccaactataaatccaggatgactgttactcagattcagtgctatgtagaaaatagaatgcacagcccaaaaacataatttggggatgactggcagcacctttttttccctttcttaagaggctaactgaaagttgattaggattcttgagagaacgtaactaaaagttgaatcaaatctatattcactgctatagatttaataaaaggaaagaccactgtaaagatgcaactacaacctgatgcgtctgctgaggagaggactgggcagcttgttgaaggctcgtcaaaagtagcgcttagttatcacaaggcctgcactcaacctcaaaagcgtaaggtttaggccaggcacggtagctcatgcctgtaatcccagcactttgtgaggcagaggcgggtggatcacctgaggtcaggagttccgagaccagcctgaccaacc

SEQ ID NO: 57851 - DNA, 485 bp, Homo sapiens; identical to SEQ ID NO: 14741

SEQ ID NO: 57852 - DNA, 1094 bp, Homo sapiens
ctctgagaccacctggcgtgaggtggacaccctgggccttcctggaagcctgcagttgggggcctgccctgagtctgctggggagtgggcattctctgccagggacccatgagcaggctgcatggtctagaggttgtgggcagcatggacagtcccccactcagaagtgcaagagttccaaagagcctctggcccaggcccctccgtgggacaagccccgccgcccctccccaccagggctttgcagatgtccttgaaagacccaccctagagccctttggagtgctggcccctcctgtgccctctgccctggtggaagcggcagccacaagtcctcctcagggagccccaagggggattttgtgggaccgctgcccacagatccaggtgttggaagggcagcgggtaaggttcccaagccagccccaacacccttcccacttggcacccagagggggctgtgggtggaggcctgactccaggcctctcctgcccacaccctctgggctgagttccttctttcccttggacgcccagtgctggccttggaggacggtcagctggaggatggcggtgggggaggctgtctttgtaccactgcagcatcccccacttctccacggaagccccatcccaaagctgctgcctggccccttgctgtaaagtgtgaagggggcggctgagttctcttaggacccagagccagggccctcaacttccatcctgcgggaggccttggccgggcactgccagtgtcttccagagccacacccagggaccacgggaggatcctgacccctgcagggctcaggggtcagcagggacccactgccccatctccctctccccaccaagacagccccagaaggagcagccagctgggatgggaacccaaggctgtccacatctggcttttgtgggactcagaaagggaagcagaactgagggctgggatattcctcatggtggcagcgctcatagcgaaagcctactgtaatatgcacccatctcatccacgtagtaaagtgaacttaaaaattcaatcaaatgaacaattaaataaacacctgtgtgtttaagaaaaaaaaaaaaaa

SEQ ID NO: 57853 - DNA, 1839 bp, Homo sapiens
cctctgcgggcgctccgcggtgctgtccctgggcgcctccgtgctctcagccaaccgcctctgagagcgcccactcgagcgccccgggagccagagggcgagggtcctcgccgggacctcctgtgggcccagggggacaaaagtggctctcaatccagcacatgcacattgaagcaagttaaaggatttaatatgaagcacagaagcagatagtgccaaatagcaagcagtagttgttacacatttctggaaaagcagtgtccgtgttgttatgtacacctccaaaaaaagttcaaatgtgtaggggaattgttgtgtaaagtaaactgaactgcagggtagcagtattttaatagctattatagacctgtatttactgtatttaaatgagtaaaggaacaagcagtgacacatcactaggaagggtgagcagggcagcatttccttctcccactgctgctgagatggcagaaattagtcgaattcagtacgaaatggaatatacttgaaggcattagtcagcgaatgagggtcccagaaaagttaaaaagttagcaccgccaaaccgctgacctggaacaaggattccaagaaggagttccaaatgctagtgtgataatgcaagttccggagaggattgttgtagcaggaaataatgaagatgtttcattttcaagaccagcagatcttgaccttattcagtcaactccctttaaacccctggcactgaaaacaccacctcgtgtacttacgctgagtgaaagaccactagattttctggatttagaaagacctcctacaacccctcaaaatgaagaaatccgagcagttggcagactaaaaagagagcggtctatgagtgaaaatgctgttcgccaaaatggacagctggtcagaaatgattctctgtatggcatttcaaatatagatacaaccattgaaggaacgtcagatgacctgactgttgtagatgcagcttcactaagacgacagataatcaaactaaatagacgtctacaacttctggaagaggagaacaaagaacgtgctaaaagagaaatggtcatgtattcaattactgtagctttctggctgcttaatagctggctctggtttcgccgctagaggtaacatcagccctcaaaaatactgtctcaacagctggaaatataaaagatttgcaaacttctttgtttctgtctctgcattgtatgccattttatagtccacaccctgaaaatgtatttcttccagaaagtctggaggaaggacctatatttgtagaagtaaaggtatattctgtcactcagctgtattcacgtctgagcagttctgcagtaacacctgcttaaaattctccctttgcatgttttgtaaataggctccagttttgttttttaaaaggaatttattttttgcctcatcagtccacccaactgattctgaatgggagagagtctgtagagaattgattcagaaaagtgtctgtgaaagaaaaacaattattttgtcctgtttctcaaacagtgttaagcagttttgttaatagacatttttgcatcgacacttcaacattaacactttgaaagtcatggtctggtgccagatttaagaaactcgaaccacctaatatttcataaccttcttcattaggtacttgtacagattaatttctaacattgcagcagtttcatatgtgtgcaatatgtgcattctttcattttagttttgcacttggttttctataaagtacgtttttactcagttcatgcgtgaacaatttaaaaaacgacagaataaggtacaaatgtagtgtatttaataaactgtcaaccaaag

SEQ ID NO: 57854 - DNA, 1218 bp, Homo sapiens
ggcttcagggcgcatccatgtggatataggaaaagcctctttccacagacttaggaagccccccgaccacgcggacgctcgctgggctgcactcagcaggctgcttgagtgggagctgactccaacatgccctgccctggctgggactaggcatgcttccagcccttcccgtgctctccctgctgtcaacacttgcgtacaaacctgcctagctgttgtaagttttcatcagtagcttaagtactagtagcaaaaacttaaattcattcagaaagttgccacttctgaatgagtagagcaggaaaagtaaactttactgaaacataatttgctgcaacagtcaacattgttatgctgaatgtgctctcaactgccctttgctgcatgcgccagatttattatccagtgtattcctaacagtcttttgttgtcgttgtttttaaaacaaaggtacggaccatgtgctatatataaatcgaatggcttaaactaatttgctatgatcctctaacaccgaaatttcccataaacttaagtgcctacacttaggacttttgaactttcagtcatctttttcgtggtgtctcactgaacgatgtgttaggaacatgtgttccatttggagttttggggcctgtgcacggtcaaccccaattaccaatttagttgaggctggattcgattgctcagttcacctgccacgttctctccaaggagtggggtctacgtgacctttagtcctctacctcagagccccgagtcatttctgaccaccccgttctgtgtcctcactcttgtccctgaatgggtccctgtgtggatctcagtgtgtgtgtggtttctccactcctccccgctcatgtcccacacctgccatattgaaccgtttctgcactaatcttctccacgggcacggagtggagggaacgtcttgggaaaggggagagcttgacctccatctaggtttcttttatctggagaaaaagaacacttttgaactatgtaatgcttcgccctgaaaggcaagctaacgctaacttcccaggtgacagtagcaggaacaaggaagggtaatgtttccatgacagacacttgcttcccttgggacaagtcccagaagaactacctgaagcaccaaagctccccaccccagcctggtggcagaggaagcaggtggcaccaactcaccaaagggacttgggagccaccttctcactc

SEQ ID NO: 57855 - DNA, 1291 bp, Homo sapiens
ctgtagtaattttgtgacctagtccttggttacagtagtgagggttcagaaacctgggagctttttgagtaaatacaaagcacaacataaaacttttatgtttgactctattcctgttcaaagctatttctgttaactaagcttatctgcgcattctagttgggaactattactacaatgttagactgctccatgtaaaactaataaatggcagtaaaaggtctcagaagcaccaagggttttgatcaggtcaggagttagaaacttaatgtcatttgtattcatttcttgaccaattgccaaagtttatatatttttaatttttctaacataccacattgtctgttgtattaataccagttcactttttgttttctgcagaaaaatccagaggaagacaactcagggagaacattgggttgggagccagggcacttgctgctcaccatctgcaccgtgcgcagtatggagcagctcctgccgttcttcaatgtgctcagtcaagtcttcaacagcaaagtcacaagccgatgtggaggacactcagggagtcctatcctctactcaaatgccttccctaataaggacatgaaactggagaaccacaaaccatgttccagcaaagccaggcaaaaaatagaagagatggtagaaaaagattttctggaagggatgataaaaacttgagcaccattgcctggttcccatttagccttacatgtaaatgtaattatttaaaacacacacactgctctgcgttgtatagtttttccttttttgtatgtaacagaacacatttcagattgtatttaatttaaatatttgtatataagagcaaatgtctgaatgtggcctgaatcaagtttaaatattgttggctcatactgattatggtgcctaagagagctatatatatacacatgtaaagtccattgtttttattgtcctgagttgtcttaaacctgcaaaatatacactacccattttttttttccattggtttcagacttggttcaattaagattggttggggatttttctcttttccttattaaccatgttctggtatcagaatggtgttccttctccatcagaggctgggaaacgtattataattagtttttctcccacataccttcaccaagagcagtgaagaataactgaaggctggaccatgcatccttaaaagtattgcatgagcatctccacctcagtatggaagagggatggacaaccccctattcatacctctgagttcctgatggcattagtcatataggtaagtcatctc

SEQ ID NO: 57856 - DNA, 1028 bp, Homo sapiens
ttttttttttttttttttggagttgcatacatttttttttaatccaaagaagtaagcctcctaagtattgcttagacaggtttatcagaattaagtaggcacaacactcatactttcagaaaagcatttccagccaggggagtaacgtggcactcaccagcatgatgtctgttttgccaacttgctgaagaacgagtaacctgaaatgaaggagcgagaatcccaccctcagccccccaacagcttcctcagcttctttttcttctgagtcacccctgaaacagtcgctgcatctaagaccagcctcgggctaaacccagctggcctgaaggctcaactcacatcaaacggagctgggagtcgcttttgcgtgtgtccgcagtttgaagtgtcctctccgaaggtgaagtgggggaagcaggtgcgctccgggatgaagtgcagggaggcaaactctggctgggttcctgtaaacatccatcgcagctgcaaataatcagaagccaaggccaggccatcgatttgacactgcaggcagatgaggtcttgggatgcctcttgcgttcccccttctgtgggagcaggtgccttcccaacctcagcactcagtcccaatctctcttccactctcctgggttcaaacaggaacctctctgttggcacgaagcttttgaggggagcaggtaggcctcggaggcaggggagggtctcctcctggggaacccatccccgtccagatggtgcccccaaccagctgcggcggcatgatctgggcggctggtccagggcatgggttgcggatcgtgtagggaagaggggaacagcagtcgagaccctactccaagtacgcatcaaagacgtcgagctccgagtcagcatcgtaaaggcccgagccggggtcggagagcacgccgaggtccacgagcgcctggtccatgtcctcgggcaggaagacgaggcccacgttgaggacgatgtactccatgaggaaggcgtagtacaggatcagcacattgacgaagaacagg

SEQ ID NO: 57857 - DNA, 457 bp, Homo sapiens
  misc_feature (1)...(457): n = a,t,c or g
tgganancctntatgacntgattacgaatttaatacgactcactatagggaatttggccctcgaggccaagaattcggcacgagcaatgcaagtcttactctaatttttaagtatttttgttggtacttacatgggttataaatcctctctctggacatcaatgtagagtccatctttcaagcactttaatttttttagctgccaaagggtatgaattacattattgtatgctaatttccctgaaatcaatgccttctatgttcaccacagggatacaagcctgttatgtttgatgggaaagaccactacaatctaatggtgatctaaaataacttttttgggctgggtgcagtggctcatgcctataatcttagcactttgggaggccaaggtaggaggattgcttgaagctaggagtttgagaccagcctgggcaacagggtaaggtcctgtctc

SEQ ID NO: 57858 - DNA, 2122 bp, Homo sapiens
gttgtgttttttttgttgtgttgttcgctttccaagtccttcgtgtagtgtcaggtagtgcttcaacccaaacacaagcaagtatacataccatagagaaagggacctgagggcatctgagctcatgcatggtgtggtacatacaaaccttggcccagcccaaaggagcagtcaagggcctggaagaaagatggtttgctctttccccctcctcctctctctttcctaccgggcttaaagtccgtggaagagaaagtttttaatcagtggaactgataaggcctcagggccgtggagggtagatttggttgttcagtaatataaaatgtgtttaagaaaaaaaacagcccaggcttcccagcagtagcccatgtgttggctggttcagcagcctgacctctacatctagacaaggaagtgaggagggtgattgctgggcattggtgtaggtttatgacggagcagcataagattttccgtgccctgtgaacacgtatacaaacattcatagccccttcccctcagccctgctctgctgcaaggaagctgctgagagtgagtgacagctgggcacaaagtgtcttgtgagaccagctatagggtctaatgcagtgaaagtcagtcatttaggacctattttcacacaggggcaaggaaaaaccagaaacaacttctctcttaccctttaaactaagatacttcattcctacacgattacctgaaacaaatgtctcaggtcaaatcacaagccttagcttctgcctagggtttgaagtctgggaaatatataatccagctcttctctttcagtcccaagctctagcttgtcagcaagactgttgcagaagatctatccttaagaggcagaaacatctgcggtgaggaaggcagctattgaaggtattccaggagcatgagactgagtttgcagagctgagggttgtcaatttccttttctactgatatcttcttcctttagagcaaacttcctccttaggacctcagagataagcacagcagggtcttcctccttcaataaactccggttcagatcttgactctgtttcattccggtgaaaagtcccttcaggatacccatcatgtcctgcaaagctgctggccttggacaaagagacgcagtcatcctcttcagacgaactgcaggcagctttgtgttctggtttgcaacattcagggctggcagaacaaagcagggggactgatggaagctcagggacctccacctctgtctcctcggtgatgtcactaatgacaaaggaagttgtagagtggaatgaggatccaaaacaaggtaagggagaagagacatttgaacttcctggagataagaaatctggcgttaatgaagccgaagctgcatcagctgccactatctttgcaatctggctgcgcaagtggctcagctcgtcctgcagctcagtagtgcggcttagggctggcagagctggcttcttcagggccagaagcctctcctcggacccacgcaggttgggaacagaggcattgcgctgcatgacaatcagagggctgggtttcccaggtgtgcctcagggggcgcgtatcactcctgacccgggcatatgtctcctcttcatccgcagcaatccaggcgatgtcagccagggtagggactgggggcacatctctcaaacacaggtcagagatgttgggcagggtctcaaaggacgcccgggcacacggcttcaagggtaggttggtcccaattcttcttactacacttcgagcagccccatgtggcttgttttgccagattgggatggtcacagtggcttccattcctgacatttgaaccagctcctgcacttgaaggacaaggcagccactgggcagctccgggaggcgggaggcgtgactccttcatatcaggccatccttggccaggtgcggctgcagcttcttcgcactgaggaggccggcgctggagatcacggcatccagcacggcggagtagcgctgcgtttcgcacaccagcgcgtacagctgcttcacgttctggaagttgctggagtacaccagccccttgatagagccctggcggctctccacgccggccaacacgcctgcagctgcagcatacagc

SEQ ID NO: 57859 - DNA, 1491 bp, Homo sapiens
tttttttttagctttgatacatgcatatatttaataatgaaacaattcatcaacagcaaaaagaaagtagaaaaattcgtaagacctcagggctgtggaagagaatgggacatcaaggaaaaaagatatatatagcaaccaacccagaaggctgcatgatgagtgaagcaaaggccaagtttggctaagatagtattatatgctctgaaaagagaatggctggataggtacccacttatgtgactgcttactagcaggcagccttactgtatgcctcatggaatggaggcaaaaagccagggaaaggtgggaggggagaaggaagagaactgtataaaacccagggtaaacaaatgagtggggcagaattacagagagaggactctaaagtcttttgtttccttgaaagtctaaaataaaccttaagtttttaactatgtcagtcaaattcaatgaacacataatgagtagcactaggcactgtaaaggaatgatagggggaataattataaattaaggcaatgcctggatcctgctctcaaggagcttacaacttatacggaaagacaagattccacacaaaaacaactgcaaaccatatttacatagtaacatacataaaaataaatatacatataaatagacatatgaataaccaacatatgaaaactaaggaatattgtgttaataactgcttagcagtacctaagtctgttactaaagaaaaaatttttggacttttaagtataattagtggagagtagggcatgtgcaaaggtatggaactaggaataaatatgtcacattcagtaagtagattagcctgattggagtagaaagtctaggtctagttaagaagggagtttgatgaaacagtagaagtctatctggtgaaagacactacaatgttagatctggcccctaaaataaaatgaacagggaacaaatgttttctttaggtaataataagtggccacatgtccctgaccaacttcactgctcttaaaagttttgaagttacactaagagatagaagctaataataggatagtagagaagtactcagtgctcttgggcaagtagaggaaactgccttctacaagaattcttaggaagtggcaagcagacacccaaaggcaaggaagaaaaaaactcaatgaaattccgaggcagaggatctatcaaccaaaggccaactagatctaggtaattgcaagtgttcaaatagaatgtctttgaccctaattcttagtgggaagtggattgtatatgcttacgaaattatttatttaggccaggcacggtggctcacacctgcaatccagcactttgggaggccaaggtgggcggatcacgaggtcaagagatcaagaccatcctggccaacatggtgaaaccccgtctccactaaaaacacaaaaatgagccaggtgtggtggcacatgcctgcagtcccagccactcgggaggtcgaggcaggagaaccgctcg

SEQ ID NO: 57860 - DNA, 1031 bp, Homo sapiens
tgttaaaggtgtctacaaagaaaaggataatgaagagttgacaattagttgcccagtgcctgcagatgagcagacagaatgcacttctgcccagcaactcaatatgagtaccagttctccatgtgctgctgagcttactgcattaagcacaactcagcaagaaaaggatctaatagaagattcctctgttcagaaggatggtctcaatcagacaactataccagtttctcctccaagtactacaaagccatcgagggcaagtactgcttcaccatgtaataataacataaatgcagctacagctgtggctctacaggaaccccgaaagttaagttatgctgaagtgtgccagaagccccctaaagagccatcttcagttcttgtgcagccactacgggaacttcgctccaatgtggtgtctcccaccaaaaatgaagacaatggagctcctgagaactccgttgagaaaccacatgagaagccagaaggcaagggctagtaaggattattctggcttccgaggcaatataatccccaggggagcagcaggaaaaatcagggaacagagacgccagttttagccatagggctatacctcagggagtgactcgacgtaatggcaaagagcaatatgtgccacccagatcaccaaagtaaaaaacaacaaaactattcaaaaacttcactctcttcccattaaacttgaactgtggctatattgaactgttttggaggggagggggtagccaggaaggaaacaagagaaagtacgtccatttcattatggattttggagttgtgagtgataggatcccaaaattcatctctaatgtggtttttaaatgctggaggattccaatcaatataaatatatatatatatatacacacacatatataaaaagtataatttttctatttttgtttttggttttaatttgcagagatttgctgccaggaatcaattttgagggttcagatttagcttggaagaaaaaaaagaaacatacatccttcagtataggagatgag

SEQ ID NO: 57861 - DNA, 2618 bp, Homo sapiens
gcctagtcccgcccctgcgtgcggcgcttctcccaggccccaccttccatccagtgccctggaccctcggctgggtagcgccaccagagcgaccaaacgtcccgcgccttccaggccgcactccagagccaaaagagctccatggcggcggcggccaagcccaacaacctttccctggtggtgcacggaccgggggacttgcgcctggagaactatcctatccctgaaccaggcccaaatgaggtcttgctgaggatgcattctgttggaatctgtggctcagatgtccactactgggagtatggtcgaattgggaattttattgtgaaaaagcccatggtgctgggacatgaagcttcgggaacagtcgaaaaagtgggatcatcggtaaagcacctaaaaccaggtgatcgtgttgccatcgagcctggtgctccccgagaaaatgatgaattctgcaagatgggccgatacaatctgtcaccttccatcttcttctgtgccacgccccccgatgacgggaacctctgccggttctataagcacaatgcagccttttgttacaagcttcctgacaatgtcacctttgaggaaggcgccctgatcgagccactttctgtggggatccatgcctgcaggagaggcggagttaccctggggacacaaggtccttgtgtgtggagctgggccaatcgggatggtcactttgctcgtggccaaagcaatgggagcagctcaagtagtggtgactgatctgtctgctacccgattgtccaaagccaaggagattggggctgatttagtcctccagatctccaaggagagccctcaggaaatcgccaggaaagtagaaggtcagctggggtgcaagccggaagtcaccatcgagtgcacgggggcagaggcctccatccaggcgggcatctacgccactcgctctggtgggaccctcgtgcttgtggggctgggctctgagatgaccaccgtacccctactgcatgcagccatccgggaggtggatatcaagggcgtgtttcgatactgcaacacgtggccagtggcgatttcgatgcttgcgtccaagtctgtgaatgtaaaacccctcgtcacccataggtttcctctggagaaagctctggaggcctttgaaacatttaaaaagggattggggttgaaaatcatgctcaagtgtgaccccagtgaccagaatccctgatgttaatgggctctgccctcatccccacagtctcgggatctcagggcacaatggctggacaggggtgggctctgatgcagaactttctcttttgaatgttaagaataactaatacaattcattgtgaacagaagtccttaagcagaggaattggtgtgccttaaagatacaatctgggatagtttgggggaacttgtagccagaatgccctgttcatgctgagcaaagttcagcaagtagagcagagtttggcaggcaggtgccaggaactccccttcttcctggagtgccttcattgaggaaggaaatctggcccttgggtttcctggttccactgctactgacccagaggggaatgagggctgagttatgaaaagataacttcatgaagacttaactggcccagaagctgattttcatgaaaatctgccactcagggtctgggatgaaggcttgtcagcacttccagtttagaacgcaatgtttctagagacatattggctgtttgttttgatgataaaaggagaataagaaaaggcatcactttcctggatccaggataatttttaaaccaatcaaatgaaaaaaacaaacaaacaaaaaaggaaatgtcatgtgaggttaaaacccagtttgcaattcccccctaatgtggaaaaagtaagaggactactcagcactgtttgaagattgcctcttctacagcttctgagaattgtgttatttcacttgccaagtgaaggaccccctccccaacatgccccaccccacccctaagtacggtcccttgtcaccaggcaaccaggaaactgctacttgtggacctcaccagagaccaggagggtttggttagctcacaggacttcccccaccccagaagattagcatcccatactagactcatactcaactcaactaggctcatactcaattgatgggttattagacaattccatttctttctggttattataaacagaaaatctttcctcttctcattaccagtaaaggctcttggtatctttctgttggaatgatttctatgaacttgtcttattttaatggtgggttttttttctggtaagatttagacctaaatcgcatcatgccaacttgtgactttgagactattcatcaagaatgaggatatagtagccatgacatagcttgagctatagcctttaattccttactttggctatgggtggagggtgagtttgaagaggttctgattttcttgtaacctgggaaagccatgaccttgtgcccgattctttcagattgctttgggtaataaatattggtggtggtatctgaaaaaaaacccaccattaaaataagacaagttcatagaaatcattccaacagaaagataccaagagcctttactggtaatgtcgga

SEQ ID NO: 57862 - DNA, 483 bp, Homo sapiens
  misc_feature (1)...(483): n = a,t,c or g
ggtgtttgaactngatgaccngattacgaatttaatacgactactatagggaatttggccctcgaggccaagaattcggcacgaggactatcactaatctgcttgagggggccgtagctttcatgcctgaagacatcaccaagggaactcagtccctacccacagcctctgcctccaaggcattcgatgcgtgtttaatgatgatgactccgcaagccctctgacattgtgatcacctcagtttcccagctctggcccggtgacccctcagccaacagccctaacatttgccaagtcttcctgggcccggcaggagagcctgcaggagcgcaagcaagcactatatgaatacgcaagaaggagattcacagagagacgagcccaggaggctgactgagctcaaaggaacaggatggcacccagagccgcaggacggagactgggggcaagcctcacccaactcacaacaggctggatgggtgg

SEQ ID NO: 57863 - DNA, 351 bp, Homo sapiens; identical to SEQ ID NO: 24491

SEQ ID NO: 57864 - DNA, 2504 bp, Homo sapiens
tttttttttttttttttcattaaacaaacatttattgagtgctttctaggtgccaggcaccaagccaggcactgttaatacaaaaattccaacacaatccttgccctcaaggagcttacagtctactggggagatgaccattaggcaggcaagtgagcccagagtgatctgtgtagtatgccagggtgggggtcgggaggagagagtatagccaaagctccttggaggaagtcaagtctaagttgagatttgacagagaaagtaccctttctctgtgaccaaaagaaaggaggaatcagagtggcaatggagagccactgcatctctggatacaggaggctgggacccagaatgcaagaaggccaagtgatgagaccagagaggtgagcagggacaaggacaccatgagtctcacaagccatgctgaggggtccagactttatcctgagggcagcagggagccaaggaaggttttaggccagagagtgacttgatcaactatgcaatgcattttaggaagatagctctggccacatgatagagaagcagtaggaggctgtcacgataatccaggtgaaagctgatgacagtgggagtggctcaaatcaagagatgttaaggtagacctgaccgttttgagagattggatgtggtgggcagaaagagaaaacaggaatagaataagtttcctgtctggctcctgagtgatctcggggtcaagggaagtacccagaaggggcaggtttgcagaagacagcaagtaccatctgggccatggacctgaattgtctgtgcacctagagggcagcaaaactgtggttcaggtgatcaggaaggatgttggggctggaggtcaactctaaattcctcaccatccttgaaaccatccagatggatgggcttccctagggagcccacagcagaaccctgaaagaccctactgtgcatgggcaagtggagaagcctgcacggaagcctgaaaggaacagccagggaggtaggacaactagccacagaggtgccagggaagtgccatccaagaagcaaggggtgatcagccatgtcaaatgctgcccagatctagtaagacaggaaaggggtctgctggatttaaccaaccccctgggaaaaacactggcaagtagagtggagggggccaaagcccacatccatccaaggtgagggaccaagcagcagagggaggaaagtagggcccagctgtcagcccaatgggaggatgatgcaggctgcccagtatcccctgcccttgtctatccctggtgtgcataggagaaaagggccctggcaatctcgttcacactaagaggagaccaacatgtgctcttcctctcagggaaaggggaaagctggtattcttaagagaaggtaaatgctaaagccaaggaaatgaagggctatgatggaactccaggcatgatatagaggaaatattttcaagcacaggggtttttccagtggcttaaatgtatcacatgtgtacagttcatctctgtacctgccagcctcactttgaggtatagaacatggccagaaatggctctcatagggacttcattccaatatgtactgttgagcacttgcaaggcactatagttggagtgcaaggtcaacaaatgcaggtctgtgcccaagacctggcctgccttcttagaaggcagatatatctccccaggagccaagagtgcacagacgggccagggcttggatgctcttagagtgacaaacagcttctcccattagtcccatttctttaaaaacaggctgcctggaagctaatttttattttgtttctccttgagcctaagatagtattcagccagaaaccactccttttcccagaggaagatttataaataggatattgtagatgttcttctgaaaatctagcccagtcctaaattgtcccctctcctactcccagtttgacagtcacggagccttggggaaagagatggaagagagtgcatcagagaggctgcctatagccccacttcccactccttgagcaggctcagctcctcacccctgcccccttcccattaagggccacaagaacagtcccttgggaagggcaagacccaaacccagaaaaggagtccctggagcagaaaagtgagtccagtccagagcagaaggttagcaggaagaaaggaagatgaactgtcagggtattaaggcaaacagtgccacctagaagcgaagctttattcaaacggaaatctgcacttggacagaaatcaccgttcaacagcaaaaactatttctgttggacatgccaagccatggcccctccccatggccacctgcccagagaacttgtcaccatctgctcttaagcttcacagaccctgccctgcctgccccagcggggccagaacctcctgacccaccttggaagggacaggggaggactgagggacctcggcctcctggctaagcaggctctgccaccctccttggtgccctctgaggttacagcctct

SEQ ID NO: 57865 - DNA, 429 bp, Homo sapiens
  misc_feature (1)...(429): n = a,t,c or g
anttggnnacagctatgacatgattacgaatttaatacgactcactatagggaatttggccctcgaggccaagaattcggcacgagcaaatatgagtgaccatggcccatgacacagccttcaggaggtcctgagaacatgtgcccaaggtggtcagggtgcagcttggttttatacattttagggagacaagagacttcaatcaaatacatttaagaaatacattggttccatccagaaaggtgggacaactcgaaggggagggtgggattccagtttataggtagatttaaaaattttctggttgacaatagcttgagtttatctaaagacctgggatcaatagaaaggaaaagactgggttatgttgataagaggttataaacactaaagttttatcatgcagatgaagcctctgggtggcaggct

SEQ ID NO: 57866 - DNA, 1600 bp, Homo sapiens
tttttttttccattcttcaaaaatttattatttattattaaaaatctcaaacaaacacagacatatggggataccagcattcccctcctggataccaggcagcttcagccctggcaggcacgatagaagaaaatacttgttacacatcctcatcaactctcagagggatcctgagccgtagatggaggaaacgcagacggagtaagcacaggtaaaagatctccccaggagctgacacgggcacaacgatacaaatccctgtggaaacagatgctggcgtgggctgcagcttcctgcccacatcccactgattttgggtcacaccccccatacctgccgtgccggcgggctgtgagcacagcatgctgcatgtgcccatctggacagcacaagtgacaatgcacatggcgaggccgtttaaggacaggctgagtgatacggggccagcgatgagcctcctctggagacccccgagcaaggatcaccatagagaacttttcttcctttggtttcttgttccagctgaaggggatgggatggtacgcctgtgagaagctacaggccaggttggtcaactggggacaagggagttcatgggcacactttgagcacataaaaaaaaatgaggtaagacaaaagacccatcaatcacaaaacttaaaaactgagaataatagagtcaaaaggggcccagggagaagggaggacaggagcagtgggtaggaagagcccaggggaatcattaggtaggaactggataggaacacaaagtagtggagagtggccttagctttaccatcttacatttgctcggcccacgccctaagttcagatccgtgtggtgggacaggcagaagtaatactcaccggggcaaagacaaaaccaggtcgagggtccaaaggtgacttctcttttcccttaaggaccagatccctggcatccatgagaagggctgtgccaggcttttgtttcctttctccaccagtacctgttcacaaaaggggaaaatatgcagaagacttgaattacacgaaagtataaatgtcagtagctgtgtaagagcaatcatagagggagaaggagtcctaaaaagaaataggcattacataatcaggatggagaccctcaaagagggataaagaaacccatgaaggagaaaaatggtgaagaataaagacaatgagaggagcaaaggcatgaaatccatgaagctgcttcaagacttaaggagaacaaggaattttaactcaccaggaaatgacctgtcttacgccataaggtttgaactacctcagtgcggtcagccttgctgggcagttcacttaaggaaaaagctgacactactacatcaaactgcaccttgggtgatacaggtagaaactgtctgaaaaagacacctggaatataaggctccccagattctgaaccacctttcagtagtttttctgccaaaaccaacatggcagctgatctgtccacacacatatattcacgtaggctctggccccaaatactgtgagcagccctaagatggcaaaattattataaatcaccaattcccatgaccaagagtcatctctacaagaggcccatttacac

SEQ ID NO: 57867 - DNA, 1412 bp, Homo sapiens
tcagacaagcactggacgtggcggccattttgttttggacaccgagcaggagctggcggccgctgcagacgaaaggcaggaaagggcaggccgggtgagcagacggatcggccgacctagacagccaaccagcaacaacgaactgagctcgcatactaccgcttacgcatctaaccaaccgcccatctagctaacccgagcccctccaccgtcaactcaggttccggccggtccccggccgtcgcctgccggagccgtaggtggcagccccgggaggagcactggcgtctgtttccttcgattctcgggattcgaagatggctgcacaagtaagctccgaaaagttgtgctaaaaagcaccaccaagatgtcttctaaatgaggcgcttttactaatatggttgaaggaacaaacaggccgacggcagtggaatatttcggggcttttggatggcagggcaacaacaggcagcttgggccagttgtccaggaaacaggaagattgggcccaggcagatgggagaattagaccctctgttccagggcagcatttaaaacttaaggcagagcttaaagcagcgcctgggtaagagtaacatccaggcacggttaggccgacccataggggccctggccaggggagcaatcggaggacgaggcctacccataatccagagaggcttgcccagaggaggactacgtgggggacgtgccaccagaaccctacttaggggcgggatgtcactccgaggtcaaaacctgctccgaggtggacgagccgtagctccccgaatgggcttaagaagaggtggtgttcgaggtcgtggaggtcctgggagagggggcctagggcgtggagctatgggtcgtggcggaatcggtggtagaggtcggggtatgataggtcggggaagagggggctttggaggccgaggcccaaggcccgtggaacgagggagaggtgcccttgctcgccctgtattgaccaaggagcagctggacaaccaattggatgcatatatgtcgaaaacaaaaggacacctggatgctgagttggatgcctacatggcgcagacagatcccgaaaccaatgattgaagcctgcccatcctcccatgagagactcttgttagtcaacacatctgtaaataaccttgagataacagatgagaagaaatctgattgatgctggatggacctatcacaataggctgtggacttacttgccaccagcttgtgcatttagtgtgttccttttactttttgatactgtgttgtatgaaacccttttgtcctttgatttggttttttgtttttgtttttttaggggggagggggggtttcccctcctttgcccagacttctctttgaacacaaatgcattagccttgtggctagaacaccctcttcct

SEQ ID NO: 57868 - DNA, 2266 bp, Homo sapiens
tttttttttttgaatgtaatatttatttggtgaatttacatgtgaggtcatttacaaaagaaagatacagacagatgcagctttcagtgcagtttcaaacattttcacaacaggcaatagtccatgagaatttggaatgacagtatagaatggcacatgcttcagtttcctttgtgtttctctacccaaccccaagatgaaagaagggagaagagtagaagaaaatgtcagtgttaatgtaaatacagccatgcaaataaaaacttttttaaagtcagaggtcattcagagatgtagaacatttctgtatttgggggttatcagaaggtgcataatttaaaaacaaaatgcagcggtctcaaacttcccatcatccaaatcatcttgaattatattaactgcaccaactaattagtgacctcctcaatattttccaaagattgactttgaaagggagtcatttctaatagtttctaaaaaagatagcatttgtagacaaatctttttggtttcaacagaattaagcacccttaaggggtgtaaaaatgctcctttactcccaacagtgtaaaccataattataattcgttcttaaataaacctctccccatcctgagtatttcaaaacaaaagacccctgaagaacacaacccttccctcaccagaaaaatctagcatataagcaaaaggatggtctataaaagtggaaaatggaaataaatcgtaaagtgatttctaagtaaggaggtggagtaaagcttaaacactgtcagtacccctagtgaagacctggacctgggtagttagtccttagagatcaaggttagctcactacaaaaagcactctacatgtcctcagcatcttcaaaaataagtggctcaaaattccttaagcacatgtagccatagttaaagcactaaacttgttatttcaggaaatactatgctctggctccaagtcttacatcctttttgaccctttagccacatgtccttcacgagaaattttaagctattttaatactcccatatatcacacttactctacctttatttgggttttacatacaagcaatctgcactttgattttaaaaaagttctaaaattttttaaaggatggggtcttgctatattatagcccaggctggagtgcagtggctattcgcaggtgcaatcatcatggcacattacagcctcgagctcctggtctcaagcctcttgcctcagcctccctagtagctgagactataaatagtatatacagtgccactgtaccctctatcctacatttttaaaagctcaccattaaatagtactaattattatagaaaatagtcacagacaattataaacacactactgtttcatcttacctctttgtctggtccactcccccatcaatactcagtcttccaacacatatatcaattagaatattttgcatctgcataatttactgcaagaaaatctgctgttgtggactttaagaagaatgtacactatccattagagtggaaaggggccaagaggattaataagtgccaccaagtttctaaaactgcagaatcagaggcattgtgcatgctgacaatggtttaaagggtctctcaattttactttaatcccccatttaacctttgtttctttcaaaaaatcaactgaaagcggttaactgaatataaatctattttacagcatttactacgttaatttaaaaatcaacaagctgtaaaatacttacattattcacacatatatagacggaatcatccagaacataatcaactgccaaccccccttaaaaaaaaaatcaacaaatcagtttttatttgcatggccaattatcatttgtactctttgcaactttatttaaaaatccctttaacatgttctaatcttttgttgcacagggaataaaagctgcaagactgcaaacttccttcaacagccacacccacaacacctagacatgaaacagatgtaacaaataacaacaccacaaacagaaatactgatttccaccattcaacacagttcatgacagtgtctttagggttcagttgaagagggggtaaacttttaaaaagagggtcagtctgctttccccctgttttataatgttggtggttttaatccgtatttctttgcaacttctgtctgggcatgggcggcatcgcaaagtgaatacagatgggccatctccatttccgatttggccaggttaatagctttgttgaacatgtcaatgggctttctccatgtttc

SEQ ID NO: 57869 - DNA, 1513 bp, Homo sapiens
gccaaagtactttgttccccccgacaagggctagaatgtgttcacagaagaaaaagaaccacgtggactacactaaactctacagggccttgtgatttttccattccgtagacctcctgggcattggagcagagcaagactttctataagccagattggtttgacatcgtggagtctgaagtcaagtgctgtaaggaagctgtgtgtgtcattgacatgtcctctttcacagagtttgagataacaaccactggggatcaggcattagaagttctacagtacctcttctccaatgacctggatgtgcctgtgggccacattgtgcatactggcatgctcaacgagggtggagggtatgaaaatgactgcagcatagcacgactgaacaagcgcagtttcttcatgatctctccaaccgaccagcaggtccactgttgggcctggcttaagaaacacatgccgaaagacagcaacctgctcctggaggacgtcacctggaagtacacagccctcaatctgattggccctcgagctgtggatgtgcttgtcttgagttgtcctatgcccctatgactccagaccacttcccaagcctcttttgcaaggagatgagcgtgggctatgcaaatgggatccgggtgatgagcatgacgcacacaggagagccaggattcatgctctacatccccatagagtacgcccctgcatgtatacaatgaagtgatgagtgttggccagaaatacggaatccggaatgctgggtattacgctcttcgcagtctccgaattgagaagttttttgccttctggggtcaggatataaataacctcaccacgcccctggaatgtggacgagagtctcgggtgaaattagagaagggcatggatttcattggtcgcgacgccctcctgcagcagaagcagaatggagtgtataaacgcctcaccatgttcatcctggacgaccatgattcagacctagacctttggccttggtggggagagcccatttaccggaatgggcagtatgttggcaagaccaccagcatgtgcctacagctacagcctggagcgccacgtttgcctggggctttgtgcacaatttttctgaggacacgggggaagagcaagtggtgacagcagatttcatcaaccggggagagtatgagattgacatcgcgggataccgcttccaggccaaggccaagctctaccctgtcgcctccctcttcacccagaagcgccgaaaggatgacatggagctgagtgacttacatgggaagtgatgccaccagggcagcctcacctcctccccatcatcttgtcctagagtgggcgtcaccttggagcttctcttccttccgcctctgttcctcttctggagcctttgcctcccatctcttatctccttgatataattttgaacttgacctactttaaacttttttgctctgcagccttccttgcccttccacctcctcctcctaatattcactctgggctcttcttccct

SEQ ID NO: 57870 - DNA, 915 bp, Homo sapiens
tttttttttttaagtcagaaagaattaaaacatttattgggcataaatatattacatatacactacagatacagttaggtattacatatagcataatatttgcaaaatctatacattaaaattgatatggcagttttaatacaatgtatatgaaatagtctaaaatttacaatacaggaaaacatgattttctttttctcctagagttgaaaagcttggaatgtatgtccaacagtgaggtaaaacattttatctttcaatttaaagaattgtgcaaggataacattcaaacacattcaattagggcacttctcaattttgacatgaatactgaattattgtagccaacaaaacaaggttagaaaatgccaacatttcaagttgataagaacaaggcagagaatatgcaaaaaatctctttaaaaagttttctttttcaacaatttctttgaggacaaagggcagtttgcttcacatgactggaatttcttgtgccagggatgagtttgacatacagagaagagtcagagcatcagaaggccactcattcactcctcacatagcaaaagggcaaagagatcaggttaatagaacactttattttattgttcgtgtgtgatggcaatatatatagttatatatcaatatcacatatacatatttgtgataaaaaacagtgccatagagagtaataattttctgactgaaggaatataatgaataccaaataatggagagcaataaaataaagtgctgtcagctttgtacttcacacacttcagcttcctggtggttaaatgatagtatgaaaatctcaagaagatcaaatattcatataaattttggcctaaagtactatttacttaaaaaaaaattcaaccaattagagaatttctttatagcagcagttctgaa

SEQ ID NO: 57871 - DNA, 947 bp, Homo sapiens
tttttttatgtttcacaatttgtatggctgattctacgcacatttaaatgtgtttatgacaattgtagatttcggttttcctctggttaaaccaatgtggaagtacacaggatgggagctgagagacaagcatcctgggcccagccatgctgcctcagtgggccaagctggggacagatgacctctgctccgtggatcctgctggctcagggtggggaaggggcctcaggagaggagtcaggctctcttctttattctcctcacagccatggtgaatggcattcctgggaggctggtttggagaactcgctgaaccatgctctgcatccagtctaggtggctcctagcgggggcttggtgggttctccatcctcagcaccatctgcagcaccatcttggtcatctgagaagcagggttgcagaggacactgtggtctgggtggcagtctggtccacatggcagaattcatcacagtagcaacttcccctcttgcagtggtgatccgtcccaagacagcaaaggttctggggttgggagcagctgcctgcaagcttcttcctgtgcctttggaatctgctcctgccagtctgcagggaaccacggatctgctttccgtcacgtaggaggcattctcgacaccctctgtacacagcatgcgctttatttggcttctcttacgcagcgtagtgactttcagatttattcaagctgctgcgtgcgccaacagtccactccttcctagtgctgaggcccccatcacatgagcacaactgtttcttgtgtgtgatgtgttgttctctggctgtgcactgccaaaaaagacatcattaaaaaaaatttaaatataatgtaagacctgccttgtcttaggaaacgtttttctggcagtggctcacacctataatcccaatactctgggaggctgaggactacaggcacgcgccac

SEQ ID NO: 57872 - DNA, 1172 bp, Homo sapiens
tgggggggaactgagaaacactttcctggagctgctggcttttgcacttttttgatggcagaagtgtgacctgagagtcccaccttctcttcaggaacgtagatgtcggggtgtcttgccctgggggcgttggaacctctgaaggtggggagcggaacacctggcatccttccccagcacttgcattaccgtccctgctcttcccaggtggggacagtggcccaagcaaggcctcactcgcagccacttcttcaagagctgcctgcacactgtcttggagcatctgccttgtgcctggcactctgccggtgccttgggaaggtcggaagagtggactttgtcctggccttcccttcatggcgtctatgacacttttgtggtgatggaaagcatgggacctgtcgtctcagcctgttggtttctcctcattgcctcaaaccctggggtaggtgggacggggggtctcgtgcccagatgaaaccatttggaaactcggcagcagagtttgtccaaatgacccttttcaggatgtctcaaagcttgtgccaaaggtcacttttctttcctgccttctgctgtgagccctgagatcctcctcccagctcaagggacaggtcctgggtgagggtgggagatttagacacctgaaactgggcgtggagagaagagccgttgctgtttgttttttgggaagagcttttaaagaatgcatgtttttttcctggttggaattgagtaggaactgaggctgtgcttcaggtatggtacaatcaagtgggggattttcatgctgaaccattcaagccctccccgcccgttgcacccactttggctggcgtctgctggagaggatgtctctgtccgcattcccgtgcagctccaggctcgcgcagttttctctctccccctggatgttgagtctcatcagaatatgtgggtagggggtggacgtgcacgggtgcatgattgtgcttaacttggttgtatttttcgatttgacatggaaggcctgttgctttgctcttgagaatagtttctcgtgtccccctcgcaggcctcattctttgaacatcaactctgaagtttgatacagataggggcttgatagctgtggtccccctcttccccctctgactacctaaaaatccaatacccaaaatacagaagccttg

SEQ ID NO: 57873 - DNA, 1685 bp, Homo sapiens
caaaaccacctctagaaaagcatggaatgaagaccattgggagcagactctccaggatcgtctgatgaggaaatatctgatgaggaagggtctggagatgaagattcagagggactgggtctggaggaatatgatgaggacgacctgggtgctgctgaggaacaggagtgtggtgatcacagggagagcaagaagagcagaagccactctgcaaaaacaccgggcttcagtgtccagagtatcagtgactttgagaaatttaccaagggaatggatgaccttgggagcagtgaggaggaggaagacgaagagagtggcatggaagaaggggatgacgcggaagactcccaaggcgagagtgaggaagacagggctggagatagaaacagtgaggatgatggtgtggtgatgaccttctctagtgtcaaagtttctgaggaagtggagaaaggaagagccgtgaagaaccagatagcactgtgggaccagctcttggaaggaaggatcaaactacaaaaagctctgttgaccaccaaccagcttcctcaaccagatgttttcccattgttcaaggacaaaggtggcccagaattttccagtgccctgaaaaatagtcacaaggcacttaaagcattgttgaggtcattggtaggtcttcaggaagagttgcttttccagtacccagacactagatatctagtagatgggacaaagcccaatgcgggaagtgaggagatttctagtgaagatgatgagctggtagaagagaagaagcagcaacgaagaagggtccctgcaaagaggaagctggagatggaggactatcccagcttcatggcaaagcgctttgccgactttacagtctacaggaaccgcacacttcagaaatggcacgataagaccaaactggcttctggaaaactggggaagggttttggtgcctttgaacgctcaatcttgactcagatcgaccatattctgatggacaaagagagattacttcgaaggacacagaccaagcgctctgtctatcgagttcttgggcaaacctgagccagcagctcagcctgtcccagagagtttgccaggggaaccggagatccttcctcaagcccctgctaatgctcatctgaaggacttggatgaagaaatctttgatgatgatgacttttaccaccagctccttcgagaactcatagaacggaagaccagctccttggatcccaacgatcaggtggccatgggaaggcagtggcttgcaatccagaagttacgaagcaaaatccacaaaaaagtagataggaaagccagcaaaggcaggaaacttcgggtttcatgtccttagcaagctactgagtttcatggcacctattgaccatactacaatgaatgatgatgccaggacagaactgtaccgctctctttttggccagctccaccctcccgacgaaggccacggggattgacatcgcccacctccgacacccagtgggcgccttggctggtgcggctgctggtccagatggaggaaaccagtgactttatggggctgagctagtagggaagcccctggaaagatgctgcgttccgaacctgtgcctaatacacgcaagggcgctgtcccgcccaaccccgcctttaaacgccacaaataaagagcattgttaccgccaaaaaaaaaaaaa

SEQ ID NO: 57874 - DNA, 1460 bp, Homo sapiens
  misc_feature (1)...(1460): n = a,t,c or g
ttttttttttttttctttgtattataaactgacttttaataataataaaaaatctatcaagaatttaacgagaagaatctgtacattttaaagtaaaccagtgcacaatgcgctggccctgggccatcccccatttcccgcagcagggctaaagcgggtcctcctttgtctctgatgcaagatacagtgacaaggccactgcctgccctcgtgtatgctgcggcaagagagggaagcgcaccctggagggcgggaggctcggatgccagatgccgggagggcttcaagctcccaggcctgggggcagcagggagcccccacctgaactcaccaccttgccaggggtgacaggcgtccccccgcttcctccccagctgtgacctttccctgaaggcataccgaagctggggggacaaactgccgagggggcttgtgtgggtccctcctccccagcaggccagggtggctttcctgtgctctggctggtgatgtcccaattgccctggctctgagaagttaccatcaagaaaataaatcacagaagccaccgcccggtgtttcccagtgaccctctaaccccgtgtgacacggcacctcaggtggggctccatcccctccagctccaaccctggctggccacctctcaggcccttgtagccagtcactcaaagagagcgagttctaacaccggccaaccgctggagaatggagggtgggggaaggaatcacagtcgatacctcaaaacgacaccttacaaccctaatattaacaaacaggaaacaatgacattttttaatttttcaataatttagtttttcttttgtgctcttttttttttagtagaagcaggaacagttgtcaatactaccttctgttggtcccctgttagacaacatacctttctttgaaatgtaaaatgtcaaatatataatcacacaactttagaaaaaacaaactttgacaacaccaacaacaaaaaatcccaaaataaaccagagatttcatgccatataaataaagtcagagcaaatctcgtgcccagggctggtggccccagttccagggggcgggtgatgtccagagctggtgtggctctcggggatcctctggtaacaggcgtgatggaggccccgtctctcctttcccgacagagccaagtcttttccaagtccaccaagcaggttagtacagggttagggtgaacctggaagctaagatgaggaggaggagacacgtgtggtcacctggaatgtggacgttgaaggaaaccggggtttcaaaagtgcaggcggagccatcccgagggagccgggtgccccatgtggcctccatgacgttcccttgggttctggggacgcaggagccgaaggccaggcaccagctgctcccatcagctctatgggtctccagcacccctccagcttctggcaggcgtgtgaagaatgggnccgcccagggc

SEQ ID NO: 57875 - DNA, 756 bp, Homo sapiens
ccccagagccagaagtggtgatgcaagatgttgcccccaacccagatgacccggaagatttccctgcgctgtcttgaaagagccctgtttcccagcaccgcggagctgcactgcacacctgtggggagacttttccagctgggccaagggagtcagactctaagaacaatagatgttgcttttcccgtgtcatgtaaatttgttgcacttttttgggctgagctgttagaggggcttctccagaggctcgagagcaggccatttcccaagaagatgaagaatggtgactgtgtttttattgaaggaatttcaaatgaagaataatgtttaaaatgtgtatatagagatagtatagactcctccgcggaagcatggagggaaaggaggttgtaaaatagactccatggagactcttaggaagcagtagattcccgggggctgtgcctttagcgttagaggaaacacatagagctggaactgttaatggaaagcagtcacagctgagttttcggagaccaagaaattaaaatacaattgcacttactgtttacttgtaaatgttatcttctctcctggaatattttgagttctggttttcacttaaccaatcatttaaaaatcgctattgtgtagccactggccaccactctgtgacacagaatcagagaaagcgttgatttttaatggtgatttaaactacctcgtggtttctgtgtgtgcacacacacatctagtgtttgggtggtttttaggaag

SEQ ID NO: 57876 - DNA, 6048 bp, Homo sapiens
tttacaacatactgtaggtttatttttattcaaaaagttactgtctcaagacataaatacaaatcagaaaacagtacaattaggacaatagaatgtggaggacaacaggttagagtaatatataaaacatttttagctggttgaaaacaaagctgtaagaactgctttcacaaagaagtactcctttcaagagtgagaaaaaaaatcaacttaggtttaaaatcatatatacagtcctctcagcagttctagttaatgcagtggtgtgtaaaacaacataggcaatacttttgcacataacaatatttgttgatggaaaatctgttagacaagtctggattcatttgttattaaccatgacttaataaaataattgtatcatgatctttttagctaacctatggtttttggctaccacagcccaatgcttgatttctgactaaaaactgaaagccttttggtattcacccatctgaagatattcttgtattgcaagcatattaaggcatggaatgattaaaataatatacctcaagaactgagagacgactgacaatagatagatacacatgtaatataagttaatattttgttttaaacgatgtctagctgcctaagcctcgcaaaatgagttgatgtcaaaatggcaagtagccactttctgttttaaactaatttatttgtgaaaggacataaaatgaagtttaaagcttagctttcaaagaatattatgggttatgaattctattatcccatctaatttacatacagaggaaatgtactgtaacctgttagaagtatctttaacctgaagactgcttgcaaagacagatagataaaacaatataaaatacaaatttaaaaatcattttaaagcatgaacactcatgcttttctatttttaaacattgttaaactttcaatatatttctgaaacctcataattttaagttggaatttaaaagtaagaaaaaactaaacaaactgcgcaattataaaatcagcaccaatttatatatatatataattttatttaaaatttagatccctattcccacactctaataagctgtataatttttgtttagaatttttctgcaaacatactacaataagcttcttttatttggagacaaaatacagtggcattactggaaggaatatcacaacattacatttttatcttaaaggacaagcaaactttcagggttgataatgggataagcatgtttgagactggttaccttctggcagttcactgcatctggatatttctgaaaagtatagagaagctcttggattttaaaaatatcttaaaatacttttagatgaaaaaattgtaaaagttctgcttataagtttacttttctccacaattacaatatttaaaacaaagttttgttgattgacgttttaagcatttaaatttagaatgctaaaaacaattctatcctacactttcttcagggtaggggaataaatacatccttaacattgttttctggatgtaaacagaaatccagcagaggtcatcattatttagtacaaccagtaaataaatgtaagagaattcatatctgtaccaaatgcctcttcagattgttattttgttttttttttttttaaaaaaaagcatgaaataatcgattcaaaagccaactaacagcgcataaataaaatatttactttctaagaaaaactgtagcttatcatcaaattgtttacttgtcctttacgtttattcaggcaaacaaaactgcccctcaatgcacttgatcttggtaagcataagcatgtcatattctccttagagaaaaatctgtacagaatttcactgtatctaccacactttaaaatttcctcttccacttagaaaatgacttcaccacagatttaattgtgtactggtattaaaacattgacactccaagaactgattcatccataattgaagctggatcaaagaaatcaggcttcagttctgttctctctcgtctgttctttgatggtggcaaatctatatccatggtgtcaaaatccattccctcattaagatcctcaatcctcccttctgaggacatcataacatcttccacaattggctcttcatcatcttccattaggcttgtgccacgccgattataatcaagaggtgtttgatgatgttcagtctgcattggataaacactcatgaagctatcctcaggccgtaatcttttgggctctctcataatagtggaggtgagttgtggtgtctgcatcataacaggggtgtgcagtgtttgttctctgcttaaccacatactgtcactactactactttcttcagtgagtgaaagctgcatgccctcaaccactttccgttttcctgtagatggttttgattttttactccgtactgttgacccccggctgctgattccactaatgactgacatggtgtcatcatcaccaccagctagcaaagaatttcggtaagacatcagtggaagccacacatcctctcttcggagtgacatctgaaaggtcatgaacttttccaagtaaacatacactgttcttttgtcttgtcgaagtagtttagaagaaaattcactcagaatatcaagaaatgccaaatttaaaggtggatggctctccccttgcggattaggctctttaaaagcaaattctatgccatctttgtgtagcatggcaatggcttctcttgttttcaactgatcaagtccaaaagttaaagcaaaacgtcgagcaagttcttttatgccactaaatgtagaggatgatctatcaaaattatagccattttcttgtatcatttcattaaaaagctgttgcagactgagaataagggtcttagcacactgaattttgtctatctgccttgttttactcattgtttctttgatgatatctccatagtcattataatacttcatatactgtttgaagatatctgcagctgtattcatctccaccacagtatatacaattagcttacaaaatgctgcaagtaaatttcttctcttgtgcagagcttcaattttactggcttcatcctcttgctgaccatctgcactattattatcatcatcctgttcaatgaagacatgatccaaaataaagctgagcaactcagactgcaatgaagaatcaggggtatacactaatggctctaacatgtcacgccctcctgacataatctgatggctgaagatcatcaaaatatcacacagaatagtgaaggcctgttccttaacagtagtattcacgttggtcaggtaatgttgacatatctgacaaaatactctcatttgtttctttaaacgcagcaagtcctcctttgtagagctgctttcagttatcttagcaagttgccaaaggattacatagtgagtacactgcagtgcgtgaataacaatctgctcaggcatgtctccattttcgattccagttttcaagagtttgtaattacaagcaaataaatccctctttgaaaggtcatgggcattatgaaaagcagtgatcctcttcaatgttgacaatacctgatatgcatcatcttcatcaggttcttcaccctcttgcagaaaatcttcaagaagccggttaaatttatctgccaattcatctatcagttgacttcttgaaatatctactctgttgaagattgtgaactcttcattacagagtgcatggtaagttttagaacatgcttccaaaacatctgtatctgtgtgcttctctacaatattccggatctgtcgcaataaggcatccaaatcgttttctaatcgtccagtggtatatatttccaaatcaaagtactgaggcaactgcaacaagttagtcaccttttctgcatctacagagtattttgctaataactgaggaagggccacggcaaaaagctcagtgatttttgtcctatcatccaactgtgtcttcttctcctttgctgtaagcaccctttttcctgtccctcttcccacgggaggatgacattcagccgcttgtctaatggtacaaagcattatttcaatcagagcactctcttgcctatctgttagtgcttcctctccactaagtggctcttccagtaacaagctattcatacattcccagtctttcagcagctcagtagcacagtcccacatgctatccacaaggtatgctgcatgctcatgtaactcactttctagaaagaaaaaaaccaatgtcttaacaaggttggcatttggaccttgtcttcctcttcttttcatcattccatcctcctctggatctctacgactgaagagctttttgtagagaaattctccagctgctactgctactggccggtgagctgaataaaccagatgatagacattttcacaatcttctgcagtgagaacttcttcactactctgtaaaacaagagtgagtaattttattgcttgtactgcaacatcatattctttgtcaagggtcatagacacaattctatccttgaaccgactggtaaaaagttccagtttggaattaagctctttgttataataaagcccttgtagagcagtaagacatttgagtcttacttcaccttgcttatcatgcatagtccaaccaacatattttaaataactgtcattaagaaaggcatcactatacatcttcatccaaatgccaatctcttcaatgcaaatagctcgaatttcacgtatcgcatcacggtatctatgtacaaacactcctttaaatattgcattcatcatattttctatttcatcttgattttcctgaagctctttccgcttttgtagcaggagttctagcctctcattggctcgtttcccaatcattttatttcgttctgcttcatattgtctttgtgtattatccatattaatgctaagatttagtgccacattcaccaaagctgtcatcaacttcatagctgccagggtgcttgtatgtcgaaatgctctgacttgtgagtcagacaatcctgtaagaagtgaaatgactgtatccatcatatactcatcatatatgatactatattgacattgccgtactaacacgccaatgaattcacaaaaactggatttgaacttcttccactgaggaccagccatggtaagtggataatctccactatcctcatcgaattcttcagtcatttttcgaattatctcagagttctgcatatgtctaaacatttctgctgtgacaactcctttacagcctgaacactgaataaaaaagttgataaggtcaagaagtgctatatctcggtcatgcttgtatgattctatccaatcatctaccaccgactgcatagcactcttgcccattttaacaacttcaaacaacatcatgttttccactccattctgttggtgatgaccattcattcggtttggaccagaaggaggttttcctcctccatttccacctttgcccttttctgctggacccttattaagagatatgattcacaaatatttttcccattctgtgagttgtctgatcactttcttcacagtgttttctgaagcataaacattctaattttgctgaagttcattttatctatttttttcttttgttgcttgtacttttaagtgtcatgtcaaggaaaccgtgacctaattcaaagtcacaaagatgtgtacctatgttttcttctaagagctttaaaattttagctcttaaatttaggcatttgattaattcggagttaatgtttgtatttgagatttgagataggggtccaaactcattctgtgcttatggctatccacttgtctgagcaccattttttgacaagactattctttcccctagtgaattgttttggaaccttagtcaaaaatcaggtgaccgtaatcgtatgggtgtatttctggactgtcaattctgtccattgatctatatatctgaccttattctaatactacattgtctttattcctgtaggtttgtgttgtaaattctgaaactatgaattgtgagtcttccaactgttaatatgaaatattacattgatttttcatatgttga

SEQ ID NO: 57877 - DNA, 2032 bp, Homo sapiens
  misc_feature (1)...(2032): n = a,t,c or g
gaaactgaaactctgtacccactgaaaaagagctccaaattccaccctcaccccagaccctggtaaccactatttcactttctttctgaatttcccttcatatgagtgggatcaaacaagagttgtccttttgtgtttagcattcttacttagcaagccatcaactgctcgaacagtcactggggcaactacttttcgcccagtgtcctccagaaaagaaaggtctgggagggtcaggccactctttttcttcaaaataatgggggtgcagaagggtagggatgaacctctttcctcctttggccactttaggttttagcttcaaagggaactccaacttttttattattttggcaacagttaggctttcttttgtttttcacatctctggccttgcagaaccatgacctattcaaggtgttttgttcaaacaaaaactaattactttcccggggaaaaagccatgtgggtaggcaagtaccagaaatttttatgggccaaataatacaccactatatccatagaccgcatttggtttatccactcatctgctgattgtttccccctcttgggtattatgagtaatgctatgaacatgggtgtacacatctctcttgaagtcccttcttaggtcctttagggatacatatccaggagcagaactactagatcacatatgctaaggtctgaatgtccccccaccaaattcgtatgttggaagcaaccaccaacgtgataggtgaggctttaggaggtgattatgtcatgagagctccatcctcattaatggatttagtgcctttataaaggggctcaagggaaccaattacctcctttttgcccttcgattcccttccaccatatgaggacacagcaacaggccccgtcctagaagctgagactgggccctcaatagatgataccagtctgccagcacgctgatcgtgggcttctcagtcttcacaactatgagaaataaattcgtacttttaaattacccagnctcaggtattctgttacgggtaacacaaatgactaagacaacaggataattctgtttaactttttgagaactgccaaacttttccaccgcagcnnnnnnnnnnnnnnnnnnnnnnnnnnnnnnnnnnnnnnnnnnnnnnnnnnnnnnnnntgccagcactcattttctgggttttttataatagccctccaaatgggtgtgacgtattttgattctatgtccctaatgactagtgatgttgagcattttctagcattgatttttaagatgttacccaaagaccccttgtatcaaaataagctggatttttttattgaaaattattaactctagaaattttagtttaaactagacttagggatatgtgtattttaccggtattccacgttttatgcatgggtttttaaaacttctcaagtattaaaactaaaagctttaggtgctttgcttatcaagaaatcctacactgtccactggagacatccatgtttttacttggctctgccctttagtggtccctgtgaaccttacctcaaaccatgcatctggggcagagatccttacttgcttggtggttacaaatgcaaatacagtgaagaatgtcatctttgtgattgttcctgaaatagttcacgagaaatccatgaccgtaaagtactgtgatagtgatgtctaccactgtgagcttccagtactaggtgattggtctgcattcacagtgaccaaaatcagctatgtggccaggtaattcactgctgagggctttggattttcctttatgaactactgaaatgaggtcaacttgactattactaagggacattttgctacaaagaatgttagttttgccaattccctttccaaatctaaaatttattttaaccaggattttagatgtaaacatcaagtagttttggttgtttcaatgaagtaacatgtttaagctcacattatttgaagtacttcagttcctattgccatgaaaattgtatccagcagctaaaaaaaaaaaaaaaaaaacctcgtgcc

SEQ ID NO: 57878 - DNA, 1920 bp, Homo sapiens
gcgccgcggtcggctctgggactcgtctggcgtccctcagaggcagaagaggcctggaccttggcgcacacagacccaggaacagatgagcggggatgtctgcatccacacctggccgtgcacctactacctggagcccaagaggcgatgggttactggacagctgtccttaacatcgctgtcgctcaggttcatgactgacagcactggagagattctggtcagcttccccctctccagcatagttgagatcaagaaggaggcttcacattttatcttcagctccatcaccatcctggaggaagggccatgccaagcactggttcagctccctgcggccaatcggaaatgtggtcttcagcatcatcgagcatttttggagggagctgctgcttgtttcagcctggggccgtggcagacgcatctgtcccaaggacccggggcgaggagctagacgggacttcattgcttggatcccagaaacgcctggaggacacggcgagggtcctgcaccaccagggccagcagctgggacagcgtcatgagaggcctggacaagatggagtcagacctggaggtggcggacagattgctgacagaactggaatctcctgcttggtggcccttttagctccaagctttggaagacaccaccggaaacaaagcccagggaagatgtctccatgaccagttgtgaaccctttgggaaagaagggatactgataaaaattcctgctgttatttcccacagaacagagtctcacgttaaaccagggaggctcaccgtccttgtgtctgggttggaaatacatgactccagttctttgctcatgcacaggtttgaaagagaagacgtggacgacatcaaggtccactcaccttacgaaattagcatccgccagcggtttattggaaagccagacatggcctatcgtttgatatctgccaagatgccagaggttatccccattttagaagtgcagttcagcaagaagatggagctgttagaagatgcattggtgctcagaagcgcaagaacctcttcccccgcagagaagagctgctcagtctggcatgcagcatctgggctgatgggccgtaccctgcaccgtgagccacccgcaggagaccaggagggcacagcactgcacctgcagacaagcctgccagccctttctgaggcagatacccaggaactaacccagatcctgaggaggatgaaggggctggccctggaggccgagagtgagctggagagacaagacgaagccctggatggcgttgcagcagctgtggacagggcaaccttgaccatcgacaagcacaacaggcggatgaagaggctgacctaggggcagaacgtccctgcattcctgtctcaccctgcacatcccgctgagatggagggctgggccggcagtgccagggctgcaagaagcctttggccctccggagtggtcttcctctggatggggctgctactgtggggctgcttctgcaccaggggcctccccaggtgtgcaccatgcctgcctcccacttggctgtccctgctgctgggcaggacccggccacatgttctgcggatgctgcagaagtgtggaccatggcgggaccccaaggacacttggcacaggcctggaagaggccgccctccgtcttgtctcggctccctttcatggacagactggccttcttagctgtactataaagtttgtgagtgaagttagagcccagctcacttagccagctcactttgagggcatcctataaacacccaactgttcttttatcgtctcggttttagccaaaagtgaaattagcatgactgcatctttcaaacaaaaatattgatttctgcttttagggccccgtttccatccagaaataaagggaaatgctggcaaaaaaaaaaaaaaa

SEQ ID NO: 57879 - DNA, 1665 bp, Homo sapiens
ccccccggattatgccacagacccagcccccccccaaacccccagcaggggtgccccctgccccagaaccctgtgcctgggatgcccctaggagccacagagaacccactgccccgttgttgggctgcgtgtgccacaattccatacccccgatcccataatcccctaagacaagaatggctgtcattgccccgggttcactttcctattcaaagaggactcatttgggcacagcccaatgtagtagttaaaatgcattttgagaaaaaataaatattctgtacaatgtatttacaaggatcaaatgttttgtaacccacccccaattagtttcccaattgggaaactataatttgataattaagaagcatattattggccgttagtgtcacgtcaacaaagaatgtggagctgaccacctaaagtatttttgaactatatatatagagagagagagtacgcaaaatttcacattttaatatgcttagaaggagtttttaaagaagtagaaatgatttccttggcctctgactttcagtgatgaaaatgcaaccatgcagtcccccctttgcagaagggcagttcttcccaggctttctggaagcaggggcttccgaggagtctccacccacctcacagaacactcactatgagccctgcacagacagcaggattcacaatctccaatagggatggcaggggcagcccttaaaacttgaagaggtcgatgaagtgctgcggagacacaggcgtgaagcagctgtcagggtcggccgccgtgcaggggtgtcctgagtccttccaaaagagaatgctgcagtgccgacagaaatgcagtgtgtctccgtactgctccttcgctgggtaatgtttctgaagtgcaaagtacatcaacttccattcaatatgacctttttctgaaaggatcaaatgtctacaaaactgcttttcagcaaaatggtactgacaaagcttcttccacagctgtctgtcttcactaagcatatacaacgtgggggtcacctggcctaaggtgatgatgtcccatccgtctgagaaccggtataggatgttgttcagcatgtgcagaggaaggtcactgagggtgaggccattgttcacttgcttagtcatctgaagatcctgtagctgttgttgcccaggcgagaatagtttctaatcggcaaatccaaatattgatgtttcccactaatacagacttccctactcctctaataagaatgcagagggtagagcttaggtcttgcagaagatctttgattaagcgaggattgtggtggtcatcaagaaccttttgaacgattttatccaaaatgttgaagtaattcttctgtgccacgccactcaatgaagttaactgggattttgcaattagctgcaacagtttgaccacataattgaaccttcggatatcttgaattgcacttgagaagtctaaccgattaaaggcttctcccaaggtgcaatagccatgcctctggaaaagcaacacagaagttaaaattagtcaattagccaaaaagaattggcagttaatgtcaattaattgtgcgattaaaaaaatttttggcaaaggacaatttgtttttattttgaagactgattttagatttagatgagagtatagtaaaattatagcaatgc

SEQ ID NO: 57880 - DNA, 1497 bp, Homo sapiens
  misc_feature (1)...(1497): n = a,t,c or g
gttgccgccatgatagaacagcagaagcgtaagggcccagagttgccgctggttccagtcaagcggcagtcnattgagttgctgttgggagcggggtctggcccaggagccgggcagcagcaggcgacgccgggagccttgctgcaagcgggacctccaagatgttcctcccttcaagccccaatcatgctgctctctggacatgaaggggaagtctactgctgcaagttccaccccaacggatccaccttaggcatctgcaggatttgaccgactgatattactgtggaatgtctatggtgactgtgataactatgccacactgaagggacacagtggagcagtgatggaattgcattacaacacagatggcagtatgcttttctcagcatccacagataaaacccgtgggctgtgtggggatagtgaaacaggttgagagggtttaaaagggttaaaggggacatacttcctttgtgaattcctgttatccagccaggagaggccctcagcttgtctgcactggcagtgacgatggcacagttaagctttgggacatccggaagaaagcagccatccagacatttcagaacacgtaccaggtgttagctgtgaccttcaatgacacaagtgatcagattatttctggtggaatagacaatgatatcaaggtctgggacctgcgccagaacaagctaacctacaccatgagaggccatgcagattcagtgactggcctgagtttaagttctgaaggctcttatcttttgtccaatgcaatggacaatacagttcgtgtctgggatgtccggccatttgcccccaaagagagatgtgtaaagatatttcaaggaaatgtgcacaactttgaaaagaaccttctgagatgttcttggtcacctgatggaagcaaaatagcagctggctcagccgacaggtttgtttatgtgtgggataccacaagcaggagaatattgtataagctgcccggccatgctggctccatcaatgaagtggctttccaccctgatgagcccatcattatctcagcatcgagtgacaagagactgtatatgggagagattcagtgaagatatggactggaagactccaaggccgcttgtctttgagacctcagactgcataagtgatgccaaatgttggatgtccaggctagcaccctcccttcagatgaccattgctagcaagaaacaggaggcggtggccatattccaaaaaccacttctgtcccatttcaccaggatgactaaggcaagctccctgtggcctctaaaaaccacctgccagatttcagggactgtttttttttttctttttcttttttcctgttttctaatgcaggcccaatgtgacaaatttgttggttgggatttttttttttttttgtaactggcttgtatgatattttctttctgtatttctctatatcattttgtattaaaagccaaatagatgcctttttacaagaaaaaaaaa

SEQ ID NO: 57881 - DNA, 2304 bp, Homo sapiens
  misc_feature (1)...(2304): n = a,t,c or g
cccagatcctggagaaggatgcagtgatcaaggtccttcagcagcgctccaggagagaccctggcaaggccatccagggctccctgcggcctgccaagtcggtgccatctgttttcgcggctgcggcagcaggaacccagggctggcaagggctctcttctagtgagcgacaaacagcagacgcccctgctcggctgactacagcagacagagcacccacagaggagccagtggtcacagctccccctgctgcccatgccaaacacgggagcagagatgggagcacccagactgacggccccccagacagcacctccacctgcctgccaccggagcctgacagccttctggggtgcagcagtagccagagagcagcctctctgggactctgtagctacatccagagtccaggacttgtcagacatggtgggagatactgatctgaaggaggtggtgcttcaggactctgagccattctctcccctcctctgccctgtgccactctcagccatttcagcagccccgtcaaccgctgctccgtccctttccccagccagacactcattcccattgaccatctggtcccaggagctcaggaggaggaccccaggggagaggagagctgtgagagcaccggcacccccagaagactctgcttcttagcccacattcctccgggccttatggagaatgaggattcagccttgacttcttgcccaaggcctgctactggggtagcaactgacagctcagaaaggagctgagctccctctgcccctgccagttgtcagtcaggcagggagggagtggctgtgttggtttggggaactaatttccaaggacggctgcccgtggacaccaggtggactggttcactaatcaagtcagccatattgttctctggctaagtttggttccagccaacgtcatctgctcttcagttcctcactgccttcttgggatactaagacttgaattttttggggactattaagggtgttagtcttggagaagacacagcctcaccttctcacttgctgtgggtgaggggccatttaagtggactgggagacagtgcgcagtttgtatataattccctttcttgtggaacagaagactgaggcctgcaggttccgatgtgtctccatgggctgtgctcccctcttcctactgtcagtttctgaaacttctgactggcctcccagttatgcctcctcctcaagttcctgggcccgtggatgttaaagctgctcgattcccagggatctcggctgccttttcctctatcttgagccctataaatgcccacgggacccccaccaccagcctcttgaagtgggttccacagctcctgtccctggaacatcctgtcagtttggtcataaaccctgagccagatgaaatgagccaccgtgaacagacatctgccatgcccccaggtgggcttcggtggccctacccggtaccagttctctctgagaaactggagatgtcttgttagcataagtgtcttcattcccacctggagggtttgggagaggagcaaagcagttgaaaactagttaatgagctacaagagtcaaatagtcctctgaatggagcccccatcacaaaacagtgcccaggaggctggctcttcaagctacccatgcccagcgccctaaagcagcaccagatgctttgggaattgggggtgaaacacccacatgggcagcctgctaggcagcagtngactttgatttctgggtcttaaagagtccctcacttcagccccaggagctattggtgggttttagcagttttgtctttaccgtttttagttctccttgattctttgttttcttcctttatcgtttttaggtttggtatgtgttgttttatttccatggttcctcaagtttcctttttaaacatttgcatttgctggacaattgcaattttttttaaaaaattcccctacccctgtttaaagctgaaaaatacatttggttccatgtgccattgtttacaaagcaaaaagaaaaaagaggaaaaaaaggcaaaaaatattgtgaaagaaaaaaaacaacttaatatattttggattaatatttggtatttcttttaaagtattttttgtgctgtgaacattttctgccaaagaccatgatgtgtgtctgtatgtttaagttatcgtaaatatttaaaatgtaaacatggctgttttgttatgccaccctgtaccaggattgctgccgcattccactgggtataacagtattttaattaaaaaaaaataattaaaagtgaaaaaaaaaaaaaaaa

SEQ ID NO: 57882 - DNA, 1421 bp, Homo sapiens
cactgcattttctactgtaaaccaaaagaggttactaagcaaaaccacctaaatttaagttggtgatttaaatgaatctcacattaaaagaaagcttgacagtgttatgaaagccaccagactcagccagtgtgtccccatgggtatccccagccatccttgctcaatccattacttatatactaactacataatgacctgttcaaaccagactctatttaatgaactgtgaatttacacagaggccattttaaatggggtcaccccatttaggattagtggatctcaaattattaaccaaacatcactccatttcaaagtaaaatattccaccagcgatttgatttattggctcttccattgccactgagcaatgcccaggaagcaggcacattgccaaggactgggggcatcttgactaggaagctcctcgtttgtgtgagcgtgggtcagaccgccaaagtaggacttcatcgtttacctacctattatcaatatggtgcttgaatatattcctataactgtagaacagtgtggaaagtgatggtaactttgaagttgttcatgttttattggctttgttttaattgacactagtagagttttaatggtctttgtgtaaattttaatggcttttccattgtttttgcttctcttaaaaagtttaagaagaatatgacctcattaaatgtgctgttttatttggaccagtcacacaaaatgtctctctagagttgactttaaagttgtttacagaaatttaaactcaattccagagattgaagttgtccaaacagctcatgggcttagtgtccaaacccctgcccagccttccctttccaagttggtgccacctccaggtagccattggtggttttcctattactgatgtggctgtggaatgataaggtcctagaggggccctggcatttcaggaagcggacctggtattccctgacaaacattgcttaggaaagagggccggagaataagaagccagcacctcatcagtcagccctgcaatgtgagacttccgtagctgttgagagtcactgcaggtgttctttcatcccgtctgattttaacccatggttgagacgttccaagttagatctgctgctcttaggtgtggggctgtccacattagggaacttgcctcaaaaacagtccacagtggcaataccggacttctgttcaagctttttaaagtgctgagccttacaaacccctgaaggaaggtgaccctttaagagaggatcatctttttttatatttattttcaccaaatagggtgatgagggttggtttttgttccctcaacccatttgggtaaaataacggatctaattagaaactgttttaaggaggggctgggctcggtgggctcacgcctgtaatcccagactttgagaggccaaggc

SEQ ID NO: 57883 - DNA, 1454 bp, Homo sapiens
ggtgcaggggaagtacgtgaagaaggagacgtcgcctctgcttcggaatcttatgccttcattcatccagcatggtccaaaaattccaggacgaactgatatctgtcttccagattcaagccctaatgccttttcaacttctggagatggagtagtttcaagaaaccagagtttccttagaactccaattcaaagaacacctcataaaataatgagaagagaaagcaacagattatctgcaccttcttatcttgccagaagtctagcagatgtccctagagagtatggttcttctcagtcatttgtaacggaagttagttttgctgttgaaaatggagactctggttcccgatattattattcagacaatttttttgatggtcagagaaagcggccacttggagatcgtgcacatgaagactacagatattatgaatacaaccatgatctcttccaaagaatgccacagaatcaggggaggcatgcttcaggtattgggagagttgctgctacatctttaggaaatttgactaaccatggttctgaagatttaccccttcctcctggctggtctgtggactggacaatgagagggagaaaatattatatagatcataacacaaatacaactcactggagccatcctcttgagcgagaaggacttcctcctggatgggaacgagttgagtcatccgaatttggaacctattatgtagatcacacaaataagaaggcccaatacaggcatccctgtgctcctagtgtacctcggtatgatcaaccacctcctgtcacataccagccacagcaaactgaaagaaatcagtcccttctggtacctgcaaatccatatcatactgcagaaattcctgactggcttcaggtttacgcacgagcccctgtgaaatatgaccacattctgaagtgggaactcttccagctggctgacctggatacataccagggaatgctaaagttgctcttcatgaaagaattggagcagattgttaaaatgtatgaagcatacagacaagcccttcttacagagttggaaaaccgaaagcagagacagcagtggtatgcccaacaacatggaaaaaatttttgagctgattttttaaaaatttaagttttgtaagagctttaaaatattttcacagataaaaaattgcaaacaagtactctggttaataaatgctgcttcctttgtggaaattataaaattctaactttacatgtattttgttattagaaattttcttttattgaatgagaaaaattagtctatcattttaagagccaatatggcaaacactttcaaatactgtatattaggaaactgttttggtattcttgatggaaaaaaacgcagcggaaatgtcattatgaacagatgttaaataggaaattattacttgttaacttcttacagcagtagtaccttctttaaaaaa

SEQ ID NO: 57884 - DNA, 874 bp, Homo sapiens
gctatgacatgattacgaatttaatacgactcactatagggaatttggccctcgaggccaagaattcggcacgagttaatatatggtctctgtgcttgaagagacgctaattttctgtggttgaagagatgctgtgaattgtgtgatagtggcagctctcaaaaggacaaggaagagggaaacatattcctagaagctgaaattttattacccaattgcaaagactttttgtcactacttattcttaggaataaccataaagtgtttattttattctgtatggaactttgtactttaaaaaaatatgttttgtatcatctggtgtttttgtataaaggaactgttggtttgaaaagaaggtaaacatcatttatattccttaccttgttttgggatgtatctctacagtgagttcatgtaaaaaggtcttaatgtcatttttgggtatacatacatgtagaaagccctcctgatataaaatccagtagctatttgacagactacccattaatttattactggaacttaaaaataattactgtacttttaaaagaacaagaaattggtcaggtgtgagccaccacgcctagccaaacccatctctttcattaaaccacctcattttggttcagaaacaagactgccatgtatgtatttaatgcttattatgtgccaagcactattccaggtactaagatacagtgatggacaaaacaagatcccttctcctctatctcaggacttattaatttgggcattttcattttccaatataggatcttttagtactggtataggattcctgaaggaattcctgaaatataattatttttctgctagagcaaatcaattttggtttttggtttttttttga

SEQ ID NO: 57885 - DNA, 1830 bp, Homo sapiens
cacagggtgaaagctttgcttctctgctgctgtaacagggactagcacagacacacggatgagtggggtcatttccagatattaggtcacagcagaagcagccaaaatggatccccagtgcactatgggactgagtaacattctctttgtgatggccttcctgctctctggtgctgctcctctgaagattcaagcttatttcaatgagactgcagacctgccatgccaatttgcaaactctcaaaaccaaagcctgagtgagctagtagtattttggcaggaccaggaaaacttggttctgaatgaggtatacttaggcaaagagaaatttgacagtgttcattccaagtatatgggccgcacaagttttgattcggacagttggaccctgagacttcacaatcttcagatcaaggacaagggcttgtatcaatgtatcatccatcacaaaaagcccacaggaatgattcgcatccaccagatgaattctgaactgtcagtgcttgctaacttcagtcaacctgaaatagtaccaatttctaatataacagaaaatgtgtacataaatttgacctgctcatctatacacggttacccagaacctaagaagatgagtgttttgctaagaaccaagaattcaactatcgagtatgatggtattatgcagaaatctcaagataatgtcacagaactgtacgacgtttccatcagcttgtctgtttcattccctgatgttacgagcaatatgaccatcttctgtattctggaaactgacaagacgcggcttttatcttcacctttctctatagagcttgaggaccctcagcctcccccagaccacattccttggattacagctgtacttccaacagttattatatgtgtgatggttttctgtctaattctatggaaatggaagaagaagaagcggcctcgcaactcttataaatgtggaaccaacacaatggagagggaagagagtgaacagaccaagaaaagagaaaaaatccatatacctgaaagatctgatgaagcccagcgtgtttttaaaagttcgaagacatcttcatgcgacaaaagtgatacatgtttttaattaaagagtaaagcccatacaagtattcattttttctaccctttcctttgtaagttcctgggcaacctttttgatttcttccagaaggcaaaaagacattaccatgagtaataagggggctccaggactccctctaagtggaatagcctccctgtaactccagctctgctccgtatgccaagaggagactttaattctcttactgcttcttttcacttcagagcacacttatgggccaagcccagcttaatggctcatgacctggaaataaaatttaggaccaatacctcctccagatcagattcttctcttaatttcatagattgtgtttttttttaaatagacctctcaatttctggaaaactgccttttatctgcccagaattctaagctggtgccccactgaattttgtgtacctgtgactaaacaactacctcctcagtctgggtgggacttatgtatttatgaccttatagtgttaatatcttgaaacatagagatctatgtactgtaatagtgtgattactatgctctagagaaaagtctacccctgctaaggagttctcatccctctgtcagggtcagtaaggaaaacggtggcctagggtacaggcaacaatgagcagaccaacctaaatttggggaaattaggagaggcagagatagaacctggagccacttctatctgggctgttgctaatattgaggaggcttgccccacccaacaagccat

SEQ ID NO: 57886 - DNA, 2766 bp, Homo sapiens
cgttgttcccgtctgagtaccagctccccactgccctgagggcgggccggcctgccggaagggaaaaaggaagaggagaaggaaattgtcccgaatccctgcagtgggtccaagcctctcccgggtggccagtctttctgtaggttgcggcacaacgccaggcaaaagaagaggaaggaatttaatcctaatcggtggaggtcgatttgagggtctgctgtagcaggtggctccgcttgaagcgagggaggaagtttcctccgatcagtagagattggaaagattgttgggagtggcacaccactagggaaaagaagaaggggcgaactgcttgtcttgaggaggtcaacccccagaatcagctcttgtggccttgaagtggctgaagacgatcaccctccacaggcttgagcccagtcccacagccttcctcccccagcctgagtgactactctattccttggtccctgctattgtcggggacgattgcatgggctacgccaggaaagtaggctgggtgaccgcagcctggtgattggggctggcgcctgctattgcatttatagactgactaggggaagaaaacagaacaaggaaaaaatggctgagggtggatctggggatgtggatgatgctggggactgttctggggccaggtataatgactggtctgatgatgatgatgacagcaatgagagcaagagtatagtatggtacccaccttgggctcggattgggactgaagctggaaccagagctagggccagggcaagggccagggctacccgggcacgtcgggctgtccagaaacgggcttcccccaattcagatgataccgttttgtcccctcaagagctacaaaaggttctttgcttggttgagatgtctgaaaagccttatattcttgaagcagctttaattgctctgggtaacaatgctgcttatgcatttaacagagatattattcgtgatctgggtggtctcccaattgtcgcaaagattctcaatacttcgggatcccatagttaaggaaaaggctttaattgtcctgaataacttgagtgtgaatgctgaaaatcagcgcaggcttaaagtatacatgaatcaagtgtgtgatgacacaatcacttctcgcttgaactcatctgtgcagcttgctggactgagattgcttacaaatatgactgttactaatgagtatcagcacatgcttgctaattccatttctgacttttttcgtttattttcagcgggaaatgaagaaaccaaacttcaggttctgaaactccttttgaatttggctgaaaatccagccatgactagggaactgctcagggcccaagtaccatcttcactggggctccctctttaataagaaggagaacaaagaagttattcttaaacttctggtcatatttgagaacataaatgataatttcaaatgggaagaaaatgaacctactcagaatcaattcggtgaaggttcactttttttctttttaaaagaatttcaagtgtgtgctgataaggttctgggaatagaaagtcaccatgattttttggtgaaagtaaaagttggaaaattcatggccaaacttgctgaacatatgttcccaaagagccaggaataacaccttgattttgtaatttagaagcaacacacattgtaaactattcattttctccaccttgtttatatggtaaaggaatcctttcagctgccagttttgaataatgaatatcatattgtatcatcaatgctgatatttaactgagttggtctttaggtttaagatggataaatgaatatcactacttgttctgaaaacatgtttgttgctttttatctcgctgcctagattgaaatattttgctatttcttctgcataagtgacagtgaaccaattcatcatgagtaagctcccttctgtcattttcattgatttaatttgtgtatcatcaataaaattgtatgttaatgctggaaagaaaaaaagaagaaagaaagaaaccatccctgtccttcagtttataatctagttggagagataagaaacgtacaaaccaaaagataacagaatatctgaagcatgtactcattgtcagatgttccctctgagagcacagaggagggcaaaagcttctgtgggatgtgctagtcggctaaagcttcacagaggaggtggcaattgaaaatgagtcctgaatggggtagggtggttagggaattccatgagacaagacaaggggggcatggtgtgagaaaggcatggaagtaggaaccctcttcctatgacaggagtctacactgcttggactgcaccaaggacttcccttgacagttgtgcttctggttgaatttggccaatggagaggccattcaggaaagcagaaagaaaaaggagagtgaagatggaatacttacttgaagtatttatctggatggtgcctctcaaacaaaagtccaattcccatgggatgccttctccaaacagctatatttctagcttctctccttccccttttagacctaggactgccaaagcttccctattgctgctagtcatggagtactggcactaccgcctgtagtttcccttcactctatccacgcatttcatgaactctcttcaaattactcaatatgggtagccatcgacttcttaccaaggccctgactgagacactttcattcttttaaaaatatccgagtcaactaatatattaaaatagaccagcatctcttctcaaaaaaaaaaaaaaaaa

SEQ ID NO: 57887 - DNA, 993 bp, Homo sapiens
tttacgtagggtctgaaggataaactctcgggcatccgcaaagttatcacggaatccactgtacacttaatccagttgctggagaactataagaaaaagctccaggagttttccaaggaagaggagtatgacatcagaactcaagtgtctgccgttgttcagcgcaaatattggacttccaaacctgagcccagcaccagggaacagttcctccaatatgcgtatgacatcacgtttgacccggacacagcacacaagtatctccggctgcaggaggagaaccgcaaggtcaccaacactacgccctgggagcatccctacccggacctccccagcaggttcctgcactggcggcaggtgctgtcccagcagagtctgtacctgcacaggtactattttgaggtggagatcttcggggcaggcacctatgttggcctgacctgcaaaggcatcgaccggaaaggggaggagcgcaacagttgcatttccggaaacaacttctcctggagcctccaatggaacgggaaggagttcacggcctggtacagtgacatggagaccccactcaaagctggccctttctggaggctcggggtctatattgacttcccaggagggatcctttccttctatggcgtagagtatgataccatgactctggttcacaagtttgcctgcaaattttcagaaccagtctatgctgccttctggctttccaagaaggaaaacgccatccggattgtagatctgggagaggaacccgagaagccagcaccgtccttggtggggactgctccctagactccaggagccatatcccagacctttgccagctacagtgatgggatttgcattttagggtgatttgggggcagaaataactgctgatggtagcttggctttttggaaatcctatggggtctctgaatgaaaacattctccagctgctctcttttgctccatatggtgctgttctctatgtgtttgcagtaa

SEQ ID NO: 57888 - DNA, 1215 bp, Homo sapiens
gcactcaagatggtaggagaatgagctcctgtttcggaggtccggggcgcgtgaagtgctggggatgtggctctggggacttggaggctcagcggctccggggctccggggttccggggctcgggagcgagtagtgagtgactgggcctgctgttcccacagctgcgccgcgaggcccgcctgcgccgcgaggtacctgtaccgcaaggcccgggaggaggcgcagcgctcagcccaggagaggaaggagcggctgcggcgcgcgctggaagaaaaccgcctgattcccactgagttacgccgagaggctctggccttacaggggtccctggagtttgatgatgctggaggtgaaggtaactatacaaggtgtgaccagccacgtggatgatgaataccgatgggcaggagtcgaggatcccaaggttatgatcactacctcccgagaccccagttcccgcctcaagatgtttgcaaaggagctgaagctggtgttcccgggcgcccagcgaatgaaccgaggtcgacatgaagtgggggcactggtgcgaagcctgcaaaaccaaacgggttcaacccgattctgctggtcgttcacaaagcatcggggcacaccctgtggggctcatcgtcagccacctgccctttggtcctacttgcctacttcacgctgtgcaatgtggtcatgcggcatgacatccccagacctgggcaccatgtcggaggccaagccccacctcataacacacggcttctcctcccgcctgggcaagcgggtctctgacatcctccgatacctatttcccgtgcccaaagatgacagccaccgggtcatcaccttcgcaaaccaggacgactacatatcattccggcaccatgtgtataagaagacagaccaccgcaacgtggagctcactgaggtcgggccccgctttgagctgaagctgtacatgatccgtctgggcacgctggagcaggaggccacagcagacgtggagtggcgctggcacccttacaccaataccgcacgcaagagagtcttcctgagcaccgagtgagcacactcaccactcagtcaggacatggacttggaactcaggatggggctgtcatagacagacccaccagtaggaactgtcacagaatggcctgctgaactgggatgtggaactgtggcgggtggagaggtctgaataaaccgtctgtgtcatggca

SEQ ID NO: 57889 - DNA, 1674 bp, Homo sapiens
ttctgccgcgtcgactggacacggtctttcttattcagtacctgttcctgacttttccacggattgtcttcatgctgggctttgtcgtggttctgagcttcctcctgggtggctacctgttgtttgtcctgtatctggcggccaccaaccagactactaacgagtggtacagaggtgactgggcctggtgccagcgttgtccccttgtggcctggcctccgtcagcagagccccaagtccaccggaacattcactcccatgggcttcggagcaaccttcaagagatctttctacctgcctttccatgtcatgagaggaagaaacaagaatgacatgtgtaaataaacgggaactacagctcaaaggcagtcatacacttgtcattcttgtttcttcctctcatgacatggaaaggcaggtagaaagatctcttgaaggttgctccgaagcccatgggagtgaatgttccggtggacttggggctctgctgacggaggcccaggccacaaggggacaacgctggcaccaggcccagtcacctctgtaccactcgttagtagtctggttggtggccgccagatacaggacaaacaacaggtagccacccaggaggaagctcagaaccacgacaaagcccagcatgaagacaatccgtggaaaagtcaggaacaggtactgaataagaaagaccgtgtccataacatggaggtgtccaaggtcatcgatgtaagtctcctggtataaatctgacatcaccaccaagtggaccagaaaagtggtgctcacaatggcgacggtggcagccgaggccgtcaaggtcaagacgtagatgaggaagtacctgatgttccaggccccgatgcagttgttcacccaaacacagtgatggtcgaaacggtgcacacaccagttacacacactgcagtgcttggatcgagctggtttccttaaatcacaagtagagcacctcacgttctttggaaacatcacttcatcaaattcataaacatgaagaaataataattcatttgcttttgttataatgccaggattggttccacaagtcagggtgaaaaaaaacaggtttacacctagcagcagatagggcagaagaaggtaatgcaaggacaactccagctcctgacagtagccaaatacttcccaggtgtactcagtataaaccatcccttgcaagaccaggtgcaggacaatgaaggtgtggtttctcgtatggaaaaggtaatgaagcaatccatgcacgggctctctgaagacattctggaattatacaggaaaatatctgtgcttccttccccttggccaggcctttcaagctatgggttttcgagcagacgcagataagaacaagacccatcagcaccgaagccaggttagaacaaagaagagggaccagaaagtccatccttgcagatttctcttggttggggtaattttcagccggcagctctggcattcctcttcccaacattcacagataattcaaacagcagctcctcttgggcagcagtgtgtgcctggcatgaccagtagctgccggacatggttcttccaggagcctggatctggctgcagagacagatcaattcaacacccacataagacgacaagagttgcagtcaaaggcagaataccgccagccgctgggctccggcg

SEQ ID NO: 57890 - DNA, 587 bp, Homo sapiens
aaaattatataactcaagtcaagtgaatggttcagcaaaatagtgtttctctgaatgatgaatttgggggtgatttttacttgcttatactttagtgtccaaattttctacagtgactataaatttcattttaaaactaaaaagttcttacatttggggaaatgcagtgaattcccacatcatgttttaaattactcagccactaaaaatgaatgtgcatggcgtcattaacataatcattgcctgaaccgtatttttcacactatgtactctaggttcctggaggtgaaaggaatctggacttagagttcttggctacctctggctgcccccgaattagaacagcccatgggggtatgtgtattgggagtggaggagtggacgggtagattgactttttctcaggcatcaatctgttacaaggttcatggtttctatggggccagatgcatgagaggtcaaagcatgggcaataggggttaactgaacgagttgaatgctaggaagtcctcaggggagccaacgttccttgtaaagtgtgtagattttttgttttttaactaaataaaatcttggcactgaaaaaa

SEQ ID NO: 57891 - DNA, 1489 bp, Homo sapiens; identical to SEQ ID NO: 14821

SEQ ID NO: 57892 - DNA, 1982 bp, Homo sapiens
aaaattgtttgctgccctgttgattaaatgtgttgtgcagctggaactcatccagactatcgacaacattgtcttcttcccagccacaagtaagaaagaagatgcagaaaacttagctgcagcacagagagatgcggtggactttgatgttcgcgttgatactcaagaccaaggaatgtaccgctttttaacatcacaacaactttttaagctactggactgcttattagagtcacatagatttgcaaaagcgtttaattccaacaacgaacagaggactgccctgtggaaagcaggattcaaaggcaaatccaagccccaaccttcttgaagcaggaagaccagcaagcctggcctgtgggctgccgcatttctccttccggatgtacatggatgagagccgcgttagtgcctgggaggaggtccagcagaggcttttgaatgtctgcagtgaagcactaagttacttcctcactctaacatcagaaagtcatcgagaagcctggactaacttactgcttttgtttctaactaaagttctaaagataagtgataataggtttaaagctcatgcatcattctactaccctctcttatgtgaaattatgcaatttgacttgattcctgaacttcgtgctgttcttagaagattttttctgcgaatcggagtagtttttcagatatcacaaccacctgaacaggaacttggaataaacaagcaatgatgggaacttaatatttttgttggcatttacatccctctgctctttaaaaggacgctggagctgaggtttcctacctgaaaaatgatttctctggattgcagtgtctgagttactggtaaagatgcttagaagtcttactcaaacttgcaacactccagtcccttttagtgctggtggattttgtgtgttatattggcctcatgttgagcagaaagcctgtttaaacagtgtcagctcatgctcacgggtccttccctgtcttccacggcaggaaaagccccacgtttttggcaggtgtggaagtgaaacttacccaaagaactatagatgtaaagattgaacttctacaagaagtacaactcaggagagctgtattttgaaggataaaatgtttataattggggagtggggagagaagaagaaattattgttcatggtaaaagatatttagcaactatggtattcttattctgaagatttttgcacactcaggctatctgagatactggtaatcatcctgtgaaaaatgtacagagatgcaggtctgtaatataaaaatcttaaaacattatatagttcttcctgcactgttttctttattttcttattcatttgctaaatacccataatattttgtcaaatgcactaaacatttgggtggaactttcttttttattttatagggatttttagttttgccctttttggtaggtggtgattttgaggctgtaacatgcccagaagctgttgtggccgacacttcaacaatagggaaaaaaaggtagaaaatatccctactgacagtaactacctgtcacatatttctcttaggacttttaaagatgagccattaaaatagaatgatcctttatggaccaaaacttgaatcactgcaaaatgaatccagattgctgtcattttcttttcttttgggtggtggggcttgatgtagattttactctatgtacagaatttaacgttgaatatattaaaataacaaatctggcatggtttgcggaggttagatttactggaaatgtattcatactgtgaattgtgctctgatggttaaaagacaagattgtcaagcattccgtattaacagtggatgtagaaaattttttcagatggacaaaatgtatatggtacagatgtaaagttttctatgtaaaaaattctgtacaactttctgtacaatattgattcccatctggcatattctaatcaggttataggtcaataaagtttttgaattat

SEQ ID NO: 57893 - DNA, 3311 bp, Homo sapiens
  misc_feature (1)...(3311): n = a,t,c or g
cgtttctaggcctggtcggctggcggcgatggcaggattttcataatatatgtagtatgagttccacatcttggcctcttacccagcttcagcagtctcagctccaccagttagagaataaatgggatttgcatgaactccactctgagctgaaatacagactgcggtgttaatatccttttcttctgattgttattaacaggtccttatgtcgtcagaagatcgagaagctcaggaggatgaattgctggccctggcaagtatttacgatggagatgaatttagaaaagcagagtctgtccaaggtggagaaaccaggatctatttggatttgccacagaatttcaagatatttgtgagcggcaattcaaatgagtgtctccagaatagtggctttgaatacaccatttgctttctgcctccacttgtgctgaactttgaactgccaccagattatccatcctcttccccaccttcattcacacttagtggcaaatggctgtcaccaactcagctatctgctctatgcaagcacttagacaacctatgggaagaacaccgtggcagcgtggtcctgtttgcctggatgcaatttcttaaggaagagaccctagcatacttgaatattgtctctccttttgagctcaagattggttctcagaaaaaagtgcagagaaggacaggctcaagcttctcccaacacagagctagattttggaggagctgctggatctgatgtagaccaagaggaaattgtggatgagagagcagtgcaggatgtggaatcactgtcaaatctgatccaggaaatcttggactttgatcaagctcagcagataaaatgctttaatagtaaattgttcctgtgcagtatctgtttctgtgagaagctgggtagtgaatgcatgtacttcttggagtgcaggcatgtgtactgcaaagcctgtctgaaggactactttgaaatccagatcagagatggccaggttcaatgcctcaactgcccagaaccaaagtgcccttcgggtggccactcctggtcaggtcaaagagttagtggaagcagagttatttgcccgttatgaccgccttctcctccagtcctccttggacctgatggcagatgtggtgtactgcccccggccgtgctgccagctgcctgtgatgcaggaacctggctgcaccatgggtatctgctccagctgcaattttgccttctgtactttgtgcaggttgacctaccatggggtctccccatgtaaggtgactgcagagaaattaatggacttacgaaatgaatacctgcaagcggatgaggctaataaaagacttttggatcaaaggtatggtaagagagtgattcagaaggcactggaagagatggaaagtaaggagtggctagagaagaactcaaagagctgcccatgttgtggaactcccatagagaaattagacggatgtaacaagatgacatgtactggctgtatgcaatatttctgttggatttgcatgggttctctctctagagcaaacccttacaaacatttcaatgaccctggttcaccatgttttaaccggctgttttatgctgtggatgttgacgacgatatttgggaagatgaggtagaagactagttaactactgctcaagatatggaagtggattgtttttccctaatcttccgtcaagtacacaaagtaactttgcgggatatttagggtactattcattcactcttcctgcgtagaagatatggaagaacgaggtttatattttcatgtggtactactgaagaaggtgcattgatacatttttaaatgtaagttgagaaaaatttataagccaaaggttcagaaaattaaactacagaatattaaatattataatgtgcccaaagctctgaatagttaaaaattaaatatttattttcttccccaagctttaggtaaggagaagaggggtcaagagttaaacttagagaccctttgtctctgagaagcatccttctaagacattctgttggagttccctcagtactattccttacaactggagtgggtagaagccttatgaaaattatactgacaacctgatctcgtttactccatgttaatcacattcctaccaacctaaatttctgccaagtcagttctctttggaggaagcccattactccataactgactggatggtccagtgtcattttgatctgcttttcagaatggaaatttataatataaatatatgttttaataccacaaacactgtggggcacttgatatttattagtggtgtatatggtccactggtttcaggccaaatctagaatttagtgatactggctcagaagaatttaagttctattcagctttcctgggtgttagaacctagattcaaaatggcttgtctttgctacttttgttccacattctctctctttacctttgccctaccttctgtttgtaaggatgattttaatattaattccaggaacacatgtttttatttcctctgctggaataggagaaagcttaatatattcccaagctgaatgttcttgaattatatctgcatttaccactgtatatgcatatagtgacagtataacctgtctatactacagtagttccagtcctaactttctgaattatttttaaagatcttctctaacaagctatgggaatttggcttcatactctttctttgcaacagcagtgttctgggtgataattttgaattgatacctgttcctttttctgggttttgttggctttttgaaaaattgtctttccttatcattggtgggaggcttggtagcaaagtaacattttttggaaaagaggacagaaaaattgaactacagcttgagaacgtattctttttttcctactttgttattgcaaattgaggaatcacttttaactgttttaggtgtgtgtgtccagagtgagcaaggattatgtttttggattgtcaaagaggatgcttagtcttaaaataaaaataaatttaaaaatcatcttataattagaacagagttgctgctatttgttctgtcaccaaggcaactaatcacattttaaaactgttcggcatataacatattcttaaagtaagaaaaaaaaggtcacagaatagcatctcttttacctgggcttgtgactgagcttaggttttagggcccatattttgtttaaaccagatagtttcatgggtcctncatttcaggacattttgtggtaaaattgngggtnatttgctggggacagtggctcacgcctggtaatcccagcactttgggagggccagg

SEQ ID NO: 57894 - DNA, 562 bp, Homo sapiens
gtggggtttcaccatgttggccaggctggtcttgaactcctcacctcaagtgatccacccacctcgccctcccaaagtgttagtattataggcgtgagccactgcactcagcctgatgttccctcttttataagtgccattccttcttcctacctcacaacctagcaaaattggattcttcaaaacgccaggttggcctttcttgactccaaaagaggtgactcttgtagcattcttacaggcctaacatagcacttactttatgttgcaatgctgtgtgcaatgctgtgtttttttactcactagctctgagcaaaacattatttattcttggtaattgtaacacttggtagtgaagacatattttttgccatataatggattatactttgtatttgaatccatgtgaatcagtagcatattggtcttcattgtttttcctccttctccgacgtttttttgagacagggtctcactctgttgcccaggctggagtgcagggcacaattacagctccctgcagccttgatttctcaggctcaagccatcctcttgcctcagc

SEQ ID NO: 57895 - DNA, 1323 bp, Homo sapiens
ggaatatatatgtcccagatgtgaatcaggctttattgaagaagtgacagatgattccagaatctaaagttgaaggtcccttccacaaccaggaaaaactacacattttacattttttaggtggtggcggcagtcggatagacaataccacaacaacacattttgcagagctttggggccatttggatcacacgatgttttttcaagattttagaccctttctaagtagcagtccactggaccaagataatagagccaatgaaaggggtcaccagactcacactgacttctggggagcaagacctccacggttgccattgggtcggagatacagatctccgaggaagttctcgtcctgacagatctccagctattgaaggaatactacaacacatctttgcaggattctttgcaaattctgccattcctggatctccacaccctttttcctggagcgggatgctgcactccaaccctggggactatgcctggggtcagacagggcttgatgccattgtaacccagcttttaggacaactggaaaacacaggccctcccccagctgacaaggaaaagatcacatctcttccaacagtgacagtaactcaggaacaagttgatatgggtttagagtgtccagtatgcaaagaagattacacagttgaagaggaagtccggcagttaccttgcaatcacttctttcacagcagttgtattgtgccgtggctagaactgcatgacacatgtcctgtatgtaggaagagcttaaatggtgaggactctactcgggcaaagccagagcactgaggcctctgcaagcaacagatttagcaatgacagtcagctacatgaccgatggactttctgaagctaaagaccacacctgaatcagggctgtggtaatcatcttaccatagctgtaaattgtatcaaaacaaaaaattagtagatggatttaggaatatgtaagaaactcaacacataatataaatgcaatgaatgtttttcttctttaaatttaaagttagtatctacagatggaattgtatctacaaccaaatgcctcttatccctgaattcagagtgataattttataagtgtgaaacttaattatgtagggctccccccgtctgaatagaattaattccttaaagtctagttagggtcctgctgtctgtcatgttgccttgtaacggatgtttccacctccttctccaacctctaccccaccattagtgtattttactataaaaacagtggaaccacagccctaaagtcctgctgatataaagtccttttgtcttaattgtatttaaaaaaaa

SEQ ID NO: 57896 - DNA, 775 bp, Homo sapiens
tttttttttttctaattcaggagttcttttattgccagtgaccgagagatggctagagctcaaaattctctcagccccgaagaaggggatagatttctttttataccgtggtctaaatagggcagggggagcctagctgaagcaatttttacagaagcagaacacgcaaaaagttaaaaaaaattaatggttacagagatagttacagaaaaatacacagttccaggtacaggggcttaaactatcacaaagagataaatgcgggggctttaggtaccttccaccgagcacattcccaggagctgctggtacagcttgcctcaatatcttatcagcaggtgaattcctggatgtgcttggagtcagcttgcactagttattcccttaagggagggggataaggggactgcaagtgaagaggctaaaatggagtctgtccggctctgtctgctaggagagagtcactcagattaaaacaaggtagggtatcacaacaagttttaaaatgtgcccatttaagttggttttttgtttatgtccttcattatggttggcaaaccaatcgcctccccaaacatgtcccattccctaatttccctggaacctgtgaatatgttaccttaaggtgacaaaaggaattatgcagatgtaattaaggttaaggatctggagatgagattattctgaagtatctgggtaggcccaatctaatctcaggagagagtcaaagcatgagaagaattccatgccctgttgctgcttctgaaatgtaggg

SEQ ID NO: 57897 - DNA, 1055 bp, Homo sapiens
atcagtggccaaaaaattggcctaaacaaaaggctgttacaggacttgtcggcataggcacagcctcagaagtgtatcaaagtactgagattttacattgcttagggccagataatcaagaaagtactgttcagctaatgattacttcaattcctcttaatctgtggggtcgagatttattacaacaatggggtgcggaaatcaccatgcccgctccattatatagccccatgagtcaaaaaatcatgaccaagatgggatatataccaggaaagggactagggaaaaatgaagatggcattaaaattccagttgaggctaaaataaatcaagaaagagaaggaatagggtatcctttttaggggcggccactgtagagcctccaaaacccattccattaatttggggggaaaaaaaaaactgtatggtaaatcagtagccgcttccaaaacaaaaactggaggctttacacttattagcaaagaaacagttagaaaaaggacatattgagccttcattttcgccttggaattctcctgtttgtaattcagaaaaaatccggcagatggcgtatgttaactgacttaagagccattaatgccataattcaacccatgggggctctcccatcccggttgccctctccagccatggtcccctttaattataattgatctgaaggattgcttttttaccattcctctgggcaaaagaggattttgaaaaatttgcttttactataccagcctaaataataaagaaccagccaccaggtttcagtggaaagtattgcctcagggaatgcttaataattcaactatttgtcagactttcatagctcaagctctgcaaccagttagagacaagttttcagactgttatatcgttcattatgttgatattttgtgtgctgcagaaacgagagacaaattaattgaccgttacacatttctcagacagaggttgccaacgcgggactgacaatagcatctgataagattcaaacctctcctcctttccattacttgggaatgcaggtagaggaaaggaaaatt

SEQ ID NO: 57898 - DNA, 3488 bp, Homo sapiens
  misc_feature (1)...(3488): n = a,t,c or g
ttgtttttaaagcctttttatttttttaaaaaaacaaaaacccccaaacaaaaacaaaacctaaattaaaatatttcccattggaggctatttctttttttgtcttttaaaaattttattacacaaatatcacccattcccacgtgtcagaggaaagatgtccttgctctctctaaaaccaatagtggagaacttttggaaaacaaaacaaagtccaactagcttcctccttctctggcccaaaataacctcaatgtgtcaactgagatagcataagacttatccccttaatgcttacatttaatttaaactttttagcacaacattggagattgactctaaatcagcaacaaaaaaatatatatttacaatatttctccgaaaaacaaaaaacacaaccaaaccctttaaacataagtgactttaggagttttatttatggagcagttatttttttaatcaccaagtgattttatattatatatatataaattttcttcctttcctttgtggtttttcgccccggtgcttggaaagatggaggcaggggttctggtcctgcagtctgagggcaggctctcctggcaaggccgtgtctaagagcagattgtaggacatgcgatggactccccaggttcctctgtcccccaacagagacacttctttcctccacatggaccaaccctcacctctaaaaaccatttcccctcacagtcccaaagaaaaggaaaacccagcaagggcatggtccatctgctgccttttctgggctcccttttctgctgaccaatttacgtgcacggtaaaaatgcatgtttttccaaaccccaaaaaaacaaacataaaaaccaaaacccaaaagaaaccattggcttggaaatttctgtggatgaaatgtcccaaagtcagaggcactctcccggcacaatccctgctctgaaggggtctctccacctccccttttataaaaagacaacaaaataaaacaaagtaatcttttcagtattttccacaggagcaaccaaagaaaaaggcaggaagcttccaattataggtcattaacgataataaggtttttgctcaatacccagggttctttacagagaagttcccctaactgaggcactctggaataagtcactggcatttcctcaaagtttcaaccccagattattggggcctggagaccaatggaagtgggcagagggtcatgggagcagactgctgtttgtaaggtgcagtcaaaagattcagcagattggaagaaacaaacaaaatgccaccccctaccaggatccagtttcttctaaggccagttaatgccagggtcaaaactggcctaggtggcaaagaggggaccactctgcctctattgctttggaagtggcaagggtgcagttggcgtctctcttctcagtggctcacactttagacccctggtgcctgggctccattccctaactctgtagggcttcaggaagaggaaagcctgagactgggctacaggaagagggccagaaagggacagggatggacgaccaaaaggcggggcggggtggggggaagaggttgtgctatcagtatccttacagagggggagcagagtgcaaatttgcatcaatcatttataagctcttgccataggctgctgctactgagcatctcctcacacacttaaaaatattgacccaaaagaaatttcgacctnttctnttctgtctttttttttttaaagtgcaaaaagctctctgctgccctagagagaggatctttggacaggccgttcaatgcaaagtaaaagggggcagctgatggggctcaacaaagggtcggtggagcgggagacaccatgctcccctccctccctccctccacacacacgcgcagaatacactcagccacacacacagaggcacgtgcacacccccttccatggctgcaggcagagggctggtgactggcttctaagcaggaccccctgactgccctgaaagttcagtgagccactggggctagacacaggcctgggctcagggggctccgctaaaccagaggcctggaggagcctggctgggaggcaggttggggcttggcccagtcctctgccgcctccagcttgggggagataggctgctccctctgaggacgtgcatcctgggaaagccttcttcaggcagaatgaagacacatggaaaagggcagtcagtgggaggcaaaagagagagggggaacaaggagatggtgcctgtctcagaatccacttgggtagcaacgaaatgggtgtgtccctgggtagacagttccagctcctctgaagagcttcaacccccaataagtgcaataaggacctcatagaggactagcaagtaagtcgggtaggctggggtgggaaaccctaattatgtgaacaagcacgagtgctgggcagaaccaagctcaagggagaggaaaggagggagagcacagttaaggacgtgaggtttgggagatctcaacagcaccagtgtgatcggcacgggtctgggactcgctgggctgctggcccctcctgcgcaagccgggagagtgtgatggaggagagacgcgcactggacaccacaagaacctggccatggagacagggccgttttcttccctgggagtttgctcagaaccaggcactgctggggaccatggatggggaggaggggcacagggcccagtgcagatgaaggttgcacaaacaccccaaactgagagcccggcctcctggcaggcgagtaagcgagcaggcgcctcgacagcacagcctgtgctttcccctcagatcaatctgctactcccttttccttaggagggagaggagcaggcagataagcctggtgtccaccaccctctctgccccacctgtagaggaagggctcaagggacaggagagcagagagggagtgtgacgctggcctcagagcccgtgcagggtcgaggagaggctctcctcggtggggagtcaggggaagatcggtttcctgttgaatctgggctgggtgtgtcttagctgatcttctgtatcagcttctcgtcaaacaggcagtagaggctgttgatggacaagtctgagatgaagtgctcgcaggcttttcgagtgatctgcttgcatcctcgaaggtcgatcaaaggtgacgttggcaatgcgccgtaggtagatcagggtctggtctgtcaatttattgcaacctgccatattgagctctgtgagagagtagcgagtggaagacccgacagcagtgagtagattggaggactgatctgtaaggtggctgcagtgactgaggtcgagtcgagacaggaggggcatgtggcgaattatgaggcgaagcgtggcatctgtgatgtcaaggcctgccagccggaagtcggtcatgttccggagcttgctgcgattgtcctgacctggtttatcagccggtggagtaagcaagtcccgaatttgagggtccttgattcctact

SEQ ID NO: 57899 - DNA, 2109 bp, Homo sapiens
gcattggcgtccgagcgacttctaggagcctggggttcggcgctatggaggagctcgatggcgagccaacagtcactttgattccaggcgtgaattccaagaagaaccaaatgtattttgactggggtccaggggagatgctggtatgtgaaacctccttcaacaaaaaagaaaaatcagagatggtgccaagttgcccctttatctatatcatccgtaaggatgtaggatgtttactctcaaatcttgagaaaactcttcaatgaatcccatggaatctttctgggcctccagagaattgacgaagagttgactggaaaatccagaaaatctcaattggttcgagtgagtaaaaactaccgatcagtcatcagagcatgtatggaggaaatgcaccaggttgcaattgctgctaaagatccagccaatggccgccagttcagcagccaggtctccattttgtcagcaatggagctcatctggaacctgtgtgagattctttttattgaaggtgggccccagctgggccctctcctcctccatctccttgactgggtccggctccatgtgtgcgaggtggacagtttgtcggcagatgttctgggcagtgagaatccaagcaaacatgacagcttctggaacttggtgaccatcttggtgctgcagggccggctggatgaggcccgacagatgctctccaaggaagccgatgccagccccgcctctgcaggcatatgccgaatcatgggggacctgatgaggacaatgcccattcttagtcctgggaacacccagacactgacagagctggagctgaagtggcagcactggcacgaggaatgtgagcggtacctccaggacagcacattcgccaccagccctcacctggagtctctcttgaagattatgctgggagacgaagctgccttgttagagcagaaggaacttctgagtaattggtatcatttcctagtgactcggctcttgtactccaatcccacagtaaaacccattgatctgcactactatgcccagtccagcctggacctgtttctgggaggtgagagcagcccagcaacccctggacaacatcttgttggcagcctttgagtttgacatccatcaagtaatcaaagagtgcagcatcgccctgagcaactggtggtttgtggcccacctgacagacctgctggaccactgcaagctcctccagttcacacaacctctatttcggttccaacatgagagagttcctcctgctggagtacgcctcgggactgtttgctcatcccagcctgtggcaggctgggggtcgattactttgattactgccccgagctgggccgagtctccctggagctgcacattgagcggatacctctgaacaccgagcagaaagccctgaaggtgctgcggatctgtgaggcagcggcagatgactgaacaagttcgcagcatttgtaagatcttagccatgaaagccgtccgcaacaatcgcctgggttctgccctctcttggagcatccgtgctaaggatgccgcctttgccacgctcgtgtcagacaggttcctcagggattactgtgagcgaggctgcttttctgatttggatctcattgacaacctggggccagccatgatgctcagtgaccgactgacattcctgggaaagtatcgcgagttccaccgtatgtacggggagaagcgttttgccgacgcagcttctctccttctgtccttgatgacgtctcggattgcccctcggtctttctggatgactctgctgacagatgccttgccccttttggaacagaaacaggtgattttctcagcagaacagacttatgagttgatgcggtgtctggaggacttgacgtcaagaagacctgtgcatggagaatctgataccgagcagctccaggatgatgacatagagaccaccaaggtggaaatgctgagactttctctggcacgaaatcttgctcgggcaattataagagaaggctcactggaaggttcctgagaactgcttcaatgtggtatctttgtatggcaatgtatatagattttttaaaagaataaatgttgttttgcaaatgtaaaaaaaaa

SEQ ID NO: 57900 - DNA, 1651 bp, Homo sapiens
tttttttttttttttggctattcaaaaagactttgattttattttgtgatctgtgtcaaactgcctcattctcagtgcaggtgatccctcctccccagaaacaagaactgacaggtagggtctttgtgaagtcatggcttccacaaggccccagggaaaccccacacagttctgagagttgatgggaatcccagcaaagatggggtgggtgggagacagtgacaagaaggggtggtggtcaccacgtcaagaggctgggggttggaaaaccctgtctttggccttgctcagctttggggctgccatgttcatgatggagatgggggactgaaatttcccctgacctggaagtaccccttcggccaggcatggctttgattctctgctaagggctcagctgagagaggagcaggaaaatgtcatgggctggcttcttcacaaggcattgctgctgatgctccggagtccaacaccacgggcaaattgctccagcaggcccccgatggcaccggaaggactggggggctactgcccgaagccccactgtgctgctgtacgcagccaagaaggctgagcgcacctcctgcagccgagtctctcgatcactcagggctgcaagcagacaactgttagggagctcatccgggaagctgaaagggagagaggagtctgtgtgcaggacagcccgctcctgaatactgccacagcccgttaccatctgccagctgccatagtctgtggagagagaggatccgggcaaggggatggtccactgatctgggtttggggacctccaggggactgctacccatcctgaaaaagttatcagaatggtttgaggaagaggagctggaagacctggcttccgccagcccctgctgggaaggcaagcggtcctctgagggttgtggccggttccagaggacactctgtggagaggatgagtggctcttcctccaagctgcctgagttggcgctcctgctgggaccagctccacggcctcataggtgaagctcccagtggctcctggggaactctccatgaccagggagaagtcgctgccaaggctggtggtgctgccacggtcctttcgtctcagcatgcagatgtcttccagggtgaagcctccatcccgggctggcaaactcttcctcctctgggtcttcagagcagagaactcctcggaggtaatatgcttcaaaaaattgaagcagaagaagaaaatctcctcccctttgctgagccgatctaccaacatgtgcccgaagaggaaccagtcataggccacagtgaggtagaggatctcagtgggcttcagggacgtgtggatgagcccatcagcccacaaggaaaggcgcaggagggagatgaagaggggggtccgatcccagcctgagatacagtgtaccagcagcccgctgtcatcatcactgttaactaaggaaagcagcagcttcaggtagttttgtgtttgttgcaccagatcccaacactgatactggctccagtcaatgttcagagagtgagtcaggaagtcggggatgctcaatggggcatcaacgtagtcctgcttccagttaaatatgagcccttctgccatgtaatcccgatctttatattccttgaaaaattcacagcctggatacgggc

SEQ ID NO: 57901 - DNA, 5054 bp, Homo sapiens
  misc_feature (1)...(5054): n = a,t,c or g
gagaaggggaccttcaggtccaggcaaagggggaacttctgtcgtgggaacgaaaaagaaagaggatttacagggtggggggacagaggggcagcaggaaccagaagggagacagtggcggtcgcaccggggccgatccgagagttccccttagagaacggagctcacgggcggggaggcctcacctgctagtaggacgcagaaagacagaaggcgaaggagaccccctgccgtagccatcttgcctctctgctgagcggaagcccccgttcggctcctgtctgttagcggcctctctaggctaccactgacaccgtctctgtggcccggagcctaagagaccggaagttcgtgtttccaggcgcttccggaaaccgcgggagagggtcgctgacgtggaggcgtccgaagggcagcagggtgtgtcggggctcggattaagacatcggagtcggagacctgagagatgttaaccaaattcgagaccaagagcgcgcgggtcaaagggctcagctttcaccccaaaagaccttggatcctgactagtttacataatggggtcatccagttatgggactatcggatgtgcactctcattgacaagtttgatgaacatgatggtccagtggcgaggcattgacttccataagcagcagccactgttcgtctctggaggagatgactataagattaaggtttggaattacaatcttcggcgctgtcttttcacattgcttgggcacttagattatattcgcaccacgttttttcatcatgaatatccctggattctgagtgcctccgatgatcagaccatccgagtgtggaattggcaatctagaacctgtgtttgtgtgttaacagggcacaaccattatgtgatgtgtgctcagttccaccccacagaagacttggtagtatcagccagcctggaccagactgtgcgcgtttgggatatttctggtctgaggaaaaaaaacctgtcccctggtgcggtggaatcggatgtgagaggaataactggggttgatctatttggaactacagatgcagtggtgaagcatgtactagagggtcacgatcgtggagtaaactgggctgccttccaccccactatgccccttattgtatctggggcagatgatcgtcaagtgaagatctggcgcatgaatgaatcaaaggcatgggaggttgatacctgccggggccattacaacaatgtatcttgtgccgtcttccaccctcgccaagagttgatcctcagcaattctgaggacaagagtattcgagtctgggatatgtctaagcggactggggttcagactttccgcagagaccatgatcgtttctgggtcctagctgctcaccctaaccttaacctctttgcagcaggccatgatggtggtatgattgtgtttaagctggaacgggaacggccagcctatgctgttcatggcaatatgctacactatgtcaaggaccgattcttacgacagctggatttcaacagctccaaagatgtagctgtgatgcagttgcggagtggttccaagtttccagtattcaatatgtcatacaatccagcagaaaatgcagtcctgctttgtacaagagctaggcaatctagagaatagtacctatgacctgtacaccatccctaaagatgctgactcccagaatcctgatgcgcctgaagggaaacgatcctcaggcctgacagccgtttgggtcgctcgaaatcggtttgctgtcctagatcggatgcattcgcttctgatcaagaatctgaagaatgagatcaccaaaaaggtacaggtgcccaactgtgatgagatcttctatgctggcacaggcaatctcctgcttcgagatgcggactctatcacactctttgacgtacagcagaagcggactctggcatctgtgaagatttctaaagtgaaatacgttatctggtcagcagacatgtcacatgtagcactactagccaaacacgccattgtgatctgtaaccgcaaactggatgctttatgtaacattcatgagaacattcgtgtcaagagtggggcctgggatgagagtggggtatttatctataccacaagcaaccacatcaaatatgctgtcaccactggggaccacgggatcattcgaactctggatttacccatctatgtcacacgggtgaagggcaacaatgtatactgcctagacagggagtgtcgtccccgggtactcaccattgatcccactgagttcaaattcaagctggccctgatcaacagaaaatatgatgaggtactgcacatggtgaggaatgccaaactagttggccagtctattattgcttatctccagaagaagggctatcctgaagtggcactgcattttgtcaaggatgagaaaactcgctttagtctggcactggagtgtggaaacattgagattgctctggaagcagccaaagcactggatgacaagaactgctgggaaaagctgggagaagtggccctgctgcaggggaaccaccagattgtggaaatgtgctatcagcgtaccaaaaactttgacaaactttccttcctgtatcttatcactggcaacttagaaaaacttcgcaagatgatgaagattgctgagatcagaaaggacatgagtggccactatcagaatgccctatacctgggtgatgtgtcagagcgtgtgcggatcctgaagaactgtggacagaagtccctggcctatctcacagctgctacccatggcttagatgaagaagctgagagcctaaaggagacatttgacccagagaaggagacaatcccagacattgaccctaatgccaagctgctccagccacctgcacctatcatgccattggataccaattggcctttattgactgtatccaaaggattttttgaaggcaccattgccagcaaagggaagggaggagcactggctgctgacattgacattgacactgttggtacagagggctggggagaggatgcagagctgcagttggatgaagatgggtttgtggaggctacagaaggtttgggggatgatgctcttggcaagggacaggaagaaggaggtggctgggatgtagaagaagatctggagctccctcctgagctggatatatcccctggggcagctggtggggctgaagatggtttctttgtgcccccaaccaagggaacaagtccaactcagatctggtgtaataactctcagcttccagttgatcacatcctggcaggctctttcgaaacagccatgcggctccttcatgaccaagtaggggtaatccagtttggcccctacaagcaactgttcctacagacatacgcccgaggccgcacaacctatcaggctctgccctgcctaccctccatgtatggctatcctaatcgcaactggaaggatgcagggctgaagaatggtgtaccagctgtgggcctgaagcttaatgacctcatccaacggttgcagctgtgctaccagctcaccacagttggcaaatttgaggaggctgtggaaaaattccgttccatccttctcagtgtgccacttcttgttgtggacaataaacaagagattgcagaggcccagcagctcatcaccatttgccgtgagtacattgtgggtttgtccgtggagacagaaaggaagaagctgcccaaagagactctagaacagcagaagcgcatctgtgagatggcagcctatttcacccactcaaacctgcagcctgtgcacatgatcctggtgctgcgtacagccctcaatctgttcttcaagctcaagaacttcaagacagctgccacctttgctcggcgcctactagaactcgggcccaagcctgagggtggcccaacagacccgaaaaatcctgtctgcctgtgagaagaatcccacagatgccttaccagcttcaatttatggacatggcacaacccctttgacatttgtgctgcatcatatcggcccatgttaccgtggggaaaggccagtaggaaaagtgttccactcagtggggcctgctattcccctgagttcaaaggtcaaatctgcagggtcaccacagtgacagagattggcaaagatgtgattggtttaaggatcagtcctctgcagtttcgctaaggccccctttgtgtgcatgggtcagtcaccatatgttccccccagagaatgtgtctatatcctccttctaacagcaccttccccctgcagctactcttcagatctggctctctgtaccctaaaacctagtatctttttctcttctatggaaaatccgaaggtctaaacttgacttttttgaggtcttctcaacttgactacagttgtgctcataattgtccttgcctttccagcttaattattttaaggaacaaatgaaaactctgggctgggtggagtggctcatacctgtaatcccagcactttgggaggctacggtggggcagatcatctgaggccaggagttcgagacctgcctggccaacatggcaacaccccgtctctaataaaaatataaaaattagcctggcatggtagcatgcgcctatagtcccagctgctcaggaggctgaggcatgagaatcgcttgaacctaggaggtggaggttgcattcaactgagatcataccacttcattcccanccccgggggaccagagcaagactctgtcctcaaaaaaaaaaaaaaaggaaaactctgtgatggacatttgtttagtaaatcccttcagtatttatccctcctttccccacagcagctttctttcctgtcaactagaaaggagcaggatgtaataaatacattttggtgtgactaggccacaccaactcttaatcatctcccattttccttagacatttaaatttcaaggcaggtaccctctgtgtactcagaaatttgaagaagttatttggttttccaaaatgcacactgcgggttattgatttgttctttacaactattgttctcatatttctcacactaaataaatctctatgagagcttcttgaaaaaaaaaa

SEQ ID NO: 57902 - DNA, 903 bp, Homo sapiens
ttttttttttttttttgagtggcaacttcacgacttttatttgtggtgcctgtgctttatctcgaaaataccttctccccctgccccagacagtgggcggggagggggcagcaaaaaatagaagacgtccctccctattgcacatggaccctatatacaggcccacctggctgaggctggcgggactcttggcacattcttggatccctgctcaggaggggaggggtgacggggtggcatcacacgtgagatggggacctccaggcggccactctggtcctggctactgatccttgcacttcttggtcctcagttccttcctggtcccgtctctggccctggtcccctctggcaacgtccccctgcttggctcggcctcccacctccatcctggcctcgggtggccccctcggctcctggggactctgctcccctcccagtccggaggtcccaggggggctatggcttctctgagacttcccccggagccctgtcactcgtgttcacacgggggaaggggtgcgtgtggcagaagcagctgtataaatacgggtgcgggaaagtccctccgggtcacttggagagtttgctgatgacgcggatcaacgctgcattctcatccttgaggcgctggttgtcagcgcggaggtcagacagggccttcagctcctcctccagctctgcggccttgcgttccagggccctgcgctcgaatctctccagttccaggagggctggcctctcagcgaagcgttcttgcctctgcgtggcccgctccagctccaccttgacgtgcgccagccgcagcgtggtctcggtcagggcctcgcgaagccgctcgttctccctgcgcagctctgcatacagcgtcctaaagcctccgtctggctcttccgattctgg

SEQ ID NO: 57903 - DNA, 908 bp, Homo sapiens
ggcaggctcgaaggcttctgcacatgctgctttccttgtggaaggaagactttcaggggccggttccgctgcagctgctgctgagcccaagaaatgtggggcttctggcagacacaaggccaagggagtgggacttgctgctattcttgctccgggagctggtggagaagggtctgatgggacggatggagatagaggcctgcctgggcagcctccaccaggcccagtggccaggggactttgctgaagaattagcaacactgtctaatctgtttctagccgagccccacctgccagaaccccagctaagagcctgtgagttggtgcagccaaaccggggcactgtgctggcccagagctagggctgagaagtggccctgccttgggatgtgcaccagaaccctggacccccgcctcacgaggaggcccaagtgcccaatgcagaccctcactggttggggtgtagctgggtctacagtcagacttcctgctctaagggtgtcactgcctggcatcccaccacgcgaatcctagaggaaggagagttggcctgatttgggattatggcagaaaagtccagagatgccagtcctggagtagaagaggtggtgtttgtttatctcttggatactaaatgaaatgaggtgtgtgggcttgtcaacacagaattcaagcctcatttgctatcccagcatctcttaaaactttgtagtcttggaattcatgacagaggcaaatgactcctgcttaacttatgaagaaagttaaaacatgaatcttgggagtctacattttcttatcaccaggagctggactgccatctccttataaatgcctaacacaggccgggtctggtggctcatgcctgtaatccccagcactttgagaggcctgaggtcggcggactg

SEQ ID NO: 57904 - DNA, 1310 bp, Homo sapiens
  misc_feature (1)...(1310): n = a,t,c or g
aaataagtgtagcatcagaagcagtaggaatggccgtatacaaccatcctgttaaacatttaaatttagctctgatagtgtgttaagacctgaatatctttcctagtaaaaataggatgtgttgaaatatttatatgtactttgatctctccacatcacttataacttatgtgttttatttctccaagtgcggtgttcctgaatgttatgtatgcttttttttctgtaccacaggcattatctatacctggggccagattttctgcactttgaaatgttgcctttgcctaatgtaggttgactttctgaattgtggagaggcacttttccaagccaatcttatttgtcactttttgttttaatatcttgctctctgacaggaaagaaacaattcacttaccagcctcctgaccccatcctccaccatttccttaatgttccatggtattttcaacggaatacnctttgaaaggtaanaacaattcaaaagtatcgattatcataaattcacaaaatatttttgcaaccagaacacaaaagcaggctagtcagctaaggtaaatttcattttcaaacgagagggaaacatgggaagtaaaagattaggatgtgaaaggttgtcctaaacagaccaaggagactgttccctaatttattctcttggctggttctctcattgaattatcagaccccaagaggagatattggaacaggctcccttcatgccaagggtctttctaagttaatactgtgagcattgagcccccattaaaactcttttttacttcagaaagaattttacaggttaaagggaaagaaatggtgggaaactctccccgtaatgcttagccaactttaaagtggtacccttcaatatccccattggcaactgcagctgagatcttagagaggaaatataaccggtgtgagatctaggcaatgcattttggaatcttcactccctaccagggctcttcctatttttaaatctcttcacctcaggaactaggacatatgggagagcttttaaagggcaagctgggaagggcacattgtatcaattctaccttgtgctatacgtaggagagatccaaaatttggatgcttctggagactcttagacatcttttcattgttgtccatttttaaagttgatgattgctggaaacattcacacgcttaaaagcaatggtgtgagttattaatgggtaaactaagaagtgttatagggcaatgacttgaaatggtttttaaattgtatgggattgttaagaattgttgaaaaaaaattttttttttttggcagcttc

SEQ ID NO: 57905 - DNA, 700 bp, Homo sapiens
ttttttgcactcaatgaacaaatctttgttgtttattttaaaattcaagacaatttttttgcaaatgctgattcaaaacgtaccaatccccatctatcatgcctatgccaatacaatctgtcacaaaaaagtttgcttctcattgtcacatagctatggggactggtggcccttctaaaatcactgtccagctgctgcaagtgtgaggccagcaacccacggcagggatgcaggagggaagccatggctaagctgtgggcctggacaaaggccacagatggggttgaaaggtgagaagcggtaagctagaggagacagacggcgttgccattaaaaacaattcaacttcattttaatgttgctatgtaagttcacaataaaatccctggaagttcaaattggaaagagcagtttggggtcatgggctcaacaatataaaggcagattcagtgaggggtaagggtagtggctctgggggcagactgacctagatttgaatgccagttgtaccagactcaagacaccttgggtaagtggttttatgaagtacctcagttcttcatcagtagaaagagtgctaacacctccataagacttttgtatggattgagtaagataatgcatgttaaaccacttgtatagtttctggctaactgtaaacaagatgttctagaagttctagttatcttttttttttttt

SEQ ID NO: 57906 - DNA, 1201 bp, Homo sapiens
aaagtggtcgcttatggtcagaggagcagcctgctcaccctctccaggtgggggctgtgtacctgggtgaggaggagctcctgcatgacccgatgggccaggacagggcagcagaagaggccaatgcggtgctggggctggacacccaaggcgatcacatggtgatgctgtctgtgattcctgggggaagctgaggacaaagtgagttcagagcctagcggcgtcacctgtggtgctggaggagcggaggactcaaggtgcaacgtccgagagagccttttctctctggatggcgctgtgagcacacttccctgacagagaagaggagtattacacagagccagaagtggcggaatctgacgcagccccgacagaggactccaataacactgaaagtctgaaatccccaaaggtgaactgtgaggagagaaacattacaggattaggaaaattttcacttctggaaattttaaaatatgttcacaggaccttatgggtttttctggaacccaaacggtagtgactgtactcttagttcctgttttacaccccgtggtgccgcttttctgccagtttggcccctcactttaactctctgccccgggcatttccagctcttcactttttggcactggatgcatctcagcacagcagcctttctaccaggtttggcaccgtagctgttcctaatattttattatttcaaggagctaaaccaatggccagatttaatcatacagatcgaacactggaaacactgaaaatcttcatttttaatcagacaggtatagaagccaagaagaatgtggtggtaactcaagccgaccaaataggccctcttcccagcactttgataaaaagtgtggactggttgcttgtattttccttattctttttaattagttttattatgtatgctaccattcgaactgagagtattcggtggctaattccaggacaagagcaggaacatgtggagtagtgatggtctgaaagaagttggaaagaggaacttcaatccttcgtttcagaaattagtgctacagtttcatacattttctccagtgacgtgttgacttgaaacttcaggcagattaaaagaatcatttgttgaacaactgaatgtataaaaaaattataaactggtgttttaactagtattgcaataagcaaatgcaaaaatattcaatagatgcaaaaa

SEQ ID NO: 57907 - DNA, 534 bp, Homo sapiens
gctcgcccccccgcctcaccgggtcagtgaaaaaacgatcagagtagtggtatttcacctagtgcgcgcagaggccgcggaccccgccccggtgcctcgcggggacaccgggggggcgccgggggcctcccacttattctacacctctcatgtctcttcaccgtgccagactagagtcaagctcaacagggtcttctttccccgctgattccgccaagcccgttcccttggctgtggtttcgctggatagtaggtagggacagtgggaatctcgttcatccattcatgcgcgtcactaattagatgacgaggcatttggctaccttaagagagtcatagttactcccgccgtttacccgcgcttcattgaatttcttcactttgacattcagagcactgggcagaaatcacatcgcgtcaacacccgccgcgggccttcgcgatgctttgttttaattaaacagtcggattcccctggtccgcaccagttctaagtcggctgctaggcgccggccgaggcgaggtcgacgcggc

SEQ ID NO: 57908 - DNA, 2494 bp, Homo sapiens
aatgagggaattgaggttcgtctagtaaagaggagagaatatgatgaagagactgttcgatgggcagatgctgtcatagctgcaggaggtgatggcacaatgctgctggcacgaggtaaagtcttggacagacttaaaccagttataggggtaaacactgatccagaacggtctgagggtcatttatgcctgcccgttcgatatacacattcctttccagaagccttacagaagttctatcgtggtgagttcaggtggttgtggaggcagagaatcaggttataccttgaagggactggcataaaccctgtacctgtggaccttcacgagcagcagctaagcttgaatcagcacaatagagcccttaacattgaaagagctcatgatgaaaggtctgaggcttcagggaccccaacttctgccagtgagagcactaaatgaagtcttcattggggagagtctgtcatccagggcttcctactatgagatttcagttgatgatggtccatgggaaaaacagaagagttcagggctcaatttgtgtactggaacaggatcaaaggcctggtcattcaatattaacagggttgcaactcaggctgtagaagatgttttaaatattgcaaaacgacaaggaaatttgagtcttccattgaacagagaattggtagagaaagtaacaaatgaatataatgaatcactgctctacagtccggaagaaccaaaaatacttttcagtattcgagaaccaatagcaaatagagttttctcaagcagtcgtcagcgttgtttctcctcaaaggtttgtgttcgttctcgttgttgggatgcctgtatggttgtggatggaggaacttcttttgagtttaatgatggtgcaattgcttcgatgatgatcaataaagaagatgagcttcgaactgtgcttcttgaacagtgaaggatttcctcatgacaaattttgattactggcgagaatatttttacttcagaaacagactaccagtcgtaaagtgacattttttggttattgttgagactgcttgcccgtgggctcagaagtgagatttgcattattcttctgttggattctgatagaaaaaaagacattcactgtataagaaaatggatggactgaaccaattagaattgataccagtgaaatttttatattgcttacaattggtaacccaagagtgcctgatacccttttaaatttagaggggcaggccttaaataaaggacctaaatatttaggatttgaaacttaactgtataagtgtgttttccttccctttcctccctaattgtgggattgtcagaactgaacacatatcatttgattagtgccatattttttatagtacctgaaaaccaagattttgaaaaaattttcaagacagagaattttgataaatcctgacattgacctaattgacataggtaaatatgtttgtatatgtgctaataattttctaatttcggaacacgatgatgttatgactattgatttaaaaatttcaaataataatttttgaaattatagatgaatgctttcatttgagtttcattctgtaattcagcagttctgggtgaaatacagatagcaaaacaaatcatgatgctgttacaaatgtattagttatccaataagtgttttaagtcaatttttttaaaatgatatgagtcttacaggtttcttccatctttaaaatgctcaaacatggattcagggactaaaaggatgaactgattagacattttctattaggagtttggtaaaatattgtaaaaatatcttcacctgtgttaggagtattatcagaaagaatggattctttaataaatatgtaaaacacagtagttttggaattgccttccttagtattgtgggttttcacctagcttatattccaagatttacagaatagcttttaggataagatgttaggactttttttttttccccatgagaattcctttatttttggaggaaattattatctaattattgatctacttataagtaatcctagaatttttgccaaaagatcctgtcgttgcataatcaaacagttggtattctcgtgccgttgttcaaagtcatgtgtttctttcatttggtgctgaaaatttctgttcaatcattgacaaatatttattgaacacccactctgtgccatgtaaaactatgtcaggtgctggatatgttgatgaatgaaacagactctatccttatacaatttgagtcttgtgggctcagaagtaaattctgtgaaagctggacggatagtcgaattgagtgctcttagttttgccaatatttaacatgttgttcttatcaattttttaaaataaatgttaatgtacaaagttaatctaggttttgatgtatatccagagaatcaatttttcttaaagtatctgcgtagacattcatagcaaagaatttatgacatatcagatagaaatacattaaaatgtagtgttttcc

SEQ ID NO: 57909 - DNA, 948 bp, Homo sapiens
cagaaatctccaggccaccggctttccgctaccggattggctgcgtccgggtgctgaggcccggcccatttccccgggtcctttgatcacgcgcctgacggcttttccggggcccgggagccaaccgagggcgttcctgtcggggctgcagcggcgggagggagcccagtggaggcgccctcccgaagcgccagctgcccatgctgaccacccagccctccggctgctgatgtcatgagtaacaccactgtgcccaatgccccccaggccaacagcgactccatggtgggctatgtgttggggcccttcttcctcatcaccctggtcggggtggtggtggctgtggtaatgtatgtacagaagaaaaagcgggtggaccgggctgcgccatcacctgctccccatgtacagctatgacccagctgaggaactgcatgaggctgagcaggagctgctctctgacatgggagaccccaaggtggtacatggctggcagagtggctaccagcacaagcggatgccactgctggatgtcaagacgtgacctgacccccttgccccacccttcagagcctggggtcctggactgcctggggccctgccatctgcttcccctgctgtcacctggctccccctgctgggtgctgggtctccatttctccctccacccaccctcagcagcatctgcttcccatgccctcaccatcacctcactgcccccaggccttctgccctttgtgggtgttgagctcaccgcccacccacaggcactcatgggaagaggctttccttctgggatggcggcggctggtagacacctttgctttctctacgcctcctgggctgggcttgggcacaaatccccaggcaggctttggagttgtttccatggtgatggggccagatgtatagtattcagtatatattttgtaaataaaatgttttgtg

SEQ ID NO: 57910 - DNA, 521 bp, Homo sapiens; identical to SEQ ID NO: 24603
  misc_feature (1)...(521): n = a,t,c or g

SEQ ID NO: 57911 - DNA, 445 bp, Homo sapiens; identical to SEQ ID NO: 24605

SEQ ID NO: 57912 - DNA, 738 bp, Homo sapiens
caacctccgcctgctgggttcaagtgattctctagcctcagcctcctgagtagttgggattacaggcgcccgccaccacacctggctaatttttgtatttctagtagagacaggggtttcaccatgttggccaggcctggtctccggacctcaggtgatctgcacacttcggcttcctaaactgctggaattacagtcgtgagccactgtgcctggtctcataaaacttttaaattccatcacattacattcacaccttttgctaaccaggatgaagagccttaaacaggtttaaagagtgcagactgcagttttgttaatacttttttcctctccaagttcttttatgctaacatttccagtggtgggaagtacaagtactattagtcatcttcattctttgcattgccaaagagttcctctttctccgtcttgctctgaaggatgaacaaaagcttgaggtgtacgtatcagaacgtaaactgcagcacgaagaccaccaacgttcacccagactgtatccacctttcgccatacgtgtcgcattccagataacgccttggtaaagcattttgtgtcttgagtaagtagtacagctcggcctgtggtaggtgtgcagacacggctcatctcccgtaggcaagctggataaaggttccagtttcttttcttggatcccatcctttttccaaatggcaaatctgttacaataatatccacagagccagttctcaatgg

SEQ ID NO: 57913 - DNA, 1054 bp, Homo sapiens
ttttttttcttcagcattgtgttttactttttgggagagaggctaggaggaggaaggggtgaaaacagcgtctcactggagtctcaaaagtgtatgaatcttctggtagtgcaaggatgggataagatggccagggaagtcagatggaaaatccccaagattctttttgctactgatttctataattaaaatatgacatatgtaagggactagtgcatgatattcaataaatgtcagttgtctttcctaactaggttcctcacaggctaggttatgcctagatatcatcatcctcctttcagggaatgaagctcacctagaaaactagggaactaaaagtgcaatatggtttgggtaatgcagttggttagctgtctccccatcctcccaactcactattccagggaggggctgaaaacagaagtggctcccctgaagtctagttagcatgtcatgacagagtccacatgaagggctgtgggctgcaactttctagtgcacagtcctctctttttggcgatgataattgtagggaaagaagcgcacacgcatgctgatttcacgagctgtcttcaggatctcaacagccttgctgtgctcaatatcttggaaatccacatcattcacagctagaacttggtccccttcctgcagtcctgctctatgtgcatcagagtcaggaatcaccttggaagatgaagatgcctagctgggaggcctttcctcctcggatgttaaatcccaactgagctccaggaggcttcttcagtgtgatggttcggggcagaaactgggtcaactcattgttgtagtccgggtggtgtaccctctcatgaggaggaatccatgctggaggattctcataggcaggcaagaaaaccaccgggtagtcatcataaggaatccggctgtccaatcgtcgggcaatgcccagtgggcagtccacagcgacctcgagactccgctcactgacaattcagtctgggaaccggaagcggatgctccgcagggtcgaaaagaggccgggccagggtgcaacgagctgaccctcccc

SEQ ID NO: 57914 - DNA, 1888 bp, Homo sapiens
gcgctcagatacgcgacgcgtagcaggcggggaccgaacgggtgcctcagtgtccttcccctcccctcgcctggcctcgccgtcctctccccgcagccggaccggaactatgtgatcccggaagttccggggcctttgctgtgtgggataaacagtaatggcggaggctgcaactcccggaacaacagccacaacatcaggagcaggagcggcagcggcgacggcggcagcagcctcccccaccccgatccccacagtcaccgccccgtccctgggggcgggccggagggggcggcggcagcgacggcagccggcggctggctggactaaacaggtcacctgcaggtattttatgcatggggtttgtaaggaaggagacaactgtcgctactcgcatgacctctctgacagtccgtatagtgtagtgtgcaagtattttcagcgagggtactgtatttatggagaccgctgcagatatgaacatagcaaaccattgaaacaggaagaagcaactgctacagagctaactacaaagtcatcccttgctgcttcctcaagtctctcatcgatagttggaccacttgttgaaatgaatacaggcgaagctgagtcaagaaattcaaactttgcaactgtaggagcaggttcagaggactgggtgaatgctattgagtttgttcctgggcaaccctactgtggccgtactgcgccttcctgcactgaagcacccctgcagggctcagtgaccaaggaagaatcagagaaagagcaaaccgccgtggagacaaagaagcagctgtgcccctatgctgcagtgggagagtgccgatacggggagaactgtgtgtatctccacggagattcttgtgacatgtgtgggctgcagctcctgcatccaatggatgctgcccagagatcgcagcatatcaaatcgtgcattgaggcccatgagaaggacatggagctctcatttgccgtgcagcgcagcaaggacatggtgtgtgggatctgcatggaggtggtctatgagaaagccaaccccagtgagcgccgcttcgggatcctctccaactgcaaccacacctactgtctcaagtgcattcgcaagtggaggagtgctaagcaatttgagagcaagatcataaagtcctgcccagaatgccggatcacatctaactttgtcattccaagtgagtactgggtggaggagaaagaagagaagcagaaactcattctgaaatacaaggaggcaatgagcaacaaggcgtgcaggtattttgatgaaggacgtgggagctgcccatttggagggaactgtttttacaagcatgcgtaccctgatggccgtagagaggagccacagagacagaaagtgggaacatcaagcagataccgggcccaacgaaggaaccacttctgggaactcattgaggaaagagagaacagcaacccctttgacaacgatgaagaagaggttgtcacctttgagctgggcgaggatgttgcttatgcttttggctgcaggtggggacgacgaacttacagactcttgaaagatgaagtgggacttggtttccatgatgagctggaagattttttatgatttggatctatagcaaccttgtgtggcgtgtgaactggtctgctgaccccagacagcagctgtcccctgtgcctggtgtggcagtgcctgtgttctctcctaggtaggcctatcaactcccaggtgttgtaaaaatttttacccagggcctgtcttctcaacccttcacctttccccgaggagtgtgttattttccctgttgaaaacagttaaaacttaaagttagttttttgtaacacaattaaaaaaaaaatcaggtgatctcaaacagcctcaaaaaaaaaa

SEQ ID NO: 57915 - DNA, 1647 bp, Homo sapiens
tttttttttttaatgaaggggaaaatttattatttttttttcccaatgactcccaagtcctactcgcaaacaaatacattgtagaaaaaagtttaattgctggttattgtttgaatcttgaaatacaattcttcactgatgatactggtataaaatggtggttattaattcatgctagcacaaccaaaactaatttaacattattggtaaaaatgagtcatttttgaatctctattaaaatctgaacacataaacaaatctgtgctaaaactggaactgccttctcactctacatataattaaacttccagcttcaaccatctgatgttgaaatctaaagcacctccatgagttaaatgtccccgacaaaccatgtagatggacaaacaagattggtggtctttaattgctggcgacagaaaaggctgcagtttagtactttaaacctgcagttagtggtcaactttctatccaggcagagtaaactaaggagagctatgaaatatcaaaagaaaactagaggccaggacaaagaggcaatgtcagccaagccactgcaagatggtatgcacccctgtatttcagccaagggcaggcaatccaaaattacacactgctttccttaacttgaccaaacagtgtatttttcctctgaaaatcttgtcaaaggttgtattccattgtacctagtgaaatacaaagtcccactctcataaaaatattatatttttcaaaagaaatataatacattgaaaatcactgattgctgcttcttcgtctttttttccgtgaatgtgtaggtgtttgagtctcttgtatttcttcttttacacaggatatgggctgtttgaaaactatttcatcatctttatcatcatcattcagttcagccacttgagattttcgcctctccaaaaatgttggtgtacaaactggtgtggggccctggctatccacagtcttctcaggagtgtcaagagtacctgaaacttttttcttcttcttacgtaaaacctggccttttgtagacgtctgacgattagtttttgaaatactttccgttttctgtaaaatcaaagaaggaaaatcatagtcaattccttttttagctaatttcttcctgagtaatctttctttctttttaaatcgctcctccatccgtagcttttgtgttagtgtccgattccgattatacccgtttcactgatggatatgatggctgcttaaatggaatattccagtctttaaagagttctttatgtactttttcaggtggcataaaatgacactccaagagtctttcaccaaacaggtagttgttcattgtttcagcaactattttggcaacatcctcagactcaaactccacaaatgcatagcctttgctatttccagtccttttacttctggacagcctgaaccgtgtcacagtgccaaactgggagaaatatgaaaagatctgggtttcgtcaagtaggttaggtaggtggcgcacatagactactccaggagtaagttgttcttgtttttttcgctgggttatgcgcttgcgaacctgcgccacctccttttgaaactcgacatcttcctgcggattaagcgacaggattggcccagccgggccagaaaaagtcgccatgcccactg

SEQ ID NO: 57916 - DNA, 2182 bp, Homo sapiens
tcggccactggagctgaggacaaagataagaagaagaaagaaaaagaaaataaatctgaaaagcagaataagcctcagaaacaaaatgatggccaaaggaaagacccttctaaaaaccaaggaggtgggctctcatcaagtggagcaggagaagggcaggggcctaagaaacagaccaggttgggtcttgaggcaaaaaaaagaagaaaatcttgctgattggtattctcaggtcatcacaaagtcagaaatgattgaataccatgacataagtggctgttatattcttcgtccctgggcctatgccatttgggaagccatcaaggacttttttgatgctgagatcaagaaacttggtgttgaaaactgctacttccccatgtttgtgtctcaaagtgcattagagaaagagaagactcatgttgctgactttgccccagaggttgcttgggttacaagatctggcaaaaccgagctggcagaaccaattgccattcgtcctactagtgaaacagtaatgtatcctgcatatgcaaaatgggtacaatcacacagagacctgcccatcaagctcaatcagtggtgcaatgtggtgcgttgggaattcaagcatcctcagcctttcctacgtactcgtgaatttctttggcaggaagggcacagtgcttttgctaccatggaagaggcagcggaagaggtcttgcagatacttgacttatatgctcaggtatatgaagaactcctggcaattcctgttgttaaaggaagaaagacggaaaaggaaaaatttgcaggaggagactatacaactacaatagaagcatttatatctgctagtggaagagctatccagggaggaacatcacatcatttagggcagaatttttccaaaatgtttgaaatcgtttttgaagatccaaagataccaggagagaagcaatttgcctatcaaaactcctggggcctgacaactcgaactattggtgttatgaccatggttcatggggacaacatgggtttagtattaccaccccgtgtagcatgtgttcaggtggtgattattccttgtggcattaccaatgcactttctgaagaagacaaagaagcgctgattgcaaaatgcaatgattatcgaaggcgattactcagtgttaacatccgcgttagagctgatttacgagataattattctccaggttggaaattcaatcactgggagctcaagggagttcccattagacttgaagttgggccaccgtgatatgaagagctgtcagtttgtagccgtcagacgagatactggagaaaagctgacagttgctgaaaatgaggcagagactaaacttcaagctattttggaagacatccaggtcacccttttcacaagggcttctgaagaccttaagactcatatggttgtggctaatacaatggaagactttcagaagatactagattctggaaagattgttcagattccattctgtggggaaattgactgtgaggactggatcaaaaagaccactgccagggatcaagatcttgaacctggtgctccatccatgggagctaaaagcctttgcatcccctttcaaaccactctgtgaactgcagcctggagccaaatgtgtctgtggcaagaaccctgccaagtactacaccttatttgggtcgcagctactgagggatgaacgaaagccccctcttcaactcctctcactttttaaagcattgatattagtatcttctcagatacagaccattttatgattttttaaaaagtaaaagttctaaaatgaagtcacacaagacaattattcttatgcctaagttaacagtggataaaagacttttctgtaaacaactccagtaataaatatcatgaactaatatggtttttgtattcatttgtttctgaaaaatgtgcattatgtactatgaggaaatttctacaaagagatgaagacaattgaaagccagctatctgttattgatctaagcactcccaacatgtctcagaccctgaaccgccagttataccctacactgataggtctcgaagcactttctttccatagctcctaatacagaatctgaaattgtcctaaatctttctgtttaaaaaacaaagcaaacccacaaatggaaaaagcaacaataataaagatttcccttgaacttc

SEQ ID NO: 57917 - DNA, 1848 bp, Homo sapiens
tggggcctggcacgggtggcccagccgcgactgagacagcctccggagacgcttctcaccctgagaccaaagcacgggggcaccacagacgtgggggagccgctctggcctgagcccctaggggtggaacacttcttgcgggagatgggacagttttatgaggctgagagctgtcttgtggaggcagggaggctgccggcaggccagaggcgttttgcccacttcccaggcttggcctcggagctgctgctgacagggctgcctctggagcctaatcgatgggagcacgcctgaacatgcccgtccgctgggtcacagggctcctgaaggagctgcatgtccgactggagagacggtcaaggctggtggttctgtcaacccgtcggggtgccaggcacgggccaagtccacactcctcaacaccatgtttgggctgcggtttgccacagggaagagctgcggtcctcgaggggccttcatgcagctcatcacagtggctgagggcttcagccaggacctgggctgtgaccacatcctggtgatagactccgggggcttgataggtggggccttgacgtcagctggggacagatttgagctggaggcttccttggccactctgctcctgggactgagcaatgtcaccgtgatcagtctagctgaaaccaaggacattccagcagctattctgcatgcatttctgaggttagaaaaaacggggcacatgcccaactaccagtttgtataccagaaccttcatgatgtatctgttcccggccctagcccagagacaagagacagctcctggatccacctggtgacctgagcagggctgcagcaggatggagaaacagggcgacggcttccgggcactggcaggcctggccttctgcgaccctgagaagcagcacatctgggcacatcccaggcctgtggcatggagcacctcccatgggccgcagtgagcttggcctacagtgaagccatatttgaattgaagagatgcctactcgaaaacatcaggaacggcttgtcgaaccaaaacaaaaacatccagcagctcattgagctggtgagcgcggctgtgagtgtgcagagaaacccagttcaggtgtaggaggctgctgtgggcagccctgtctgatggggcacccgtgtggggctgtgctctggtgcctgagaatggctggtgcccaatcgacatgagaagacgagcaaaagacagagggtttggagtctcctcaacagtgttaaaagaggaagtgacctcacagaccagctcagagatgttaccaagaatatcacagcccccagggtagggagacaagcagcagtttgttctgtctcagctcctgtcaaggatcctgcggggtgggccctctgtatagctgctctctgtcactggcccctggagtgggagcagcgtccttagtcactgcaggcccaggcgggcaggtggtcccaggacagaggtggggaagttgtcctgaggaagcagaagtaggcctttgtcccgcccaacccaagggcctccagtggaccagcattcaagatgtgagtgcccgtggtgtgcaaggcactcccatggcaccgtatttattgactgatctgtgaaggcttccctgacccctgcccaggaagagttcactggtcgctctgttgtgccccacagcactttgttatacctctgccacacacttcacgcagcgcgttgtaactcatgtgtttacatgtctgtccccccagactgtgagctccttgagggcagggactgtacattctccagctctgtgtccccagggcctggcacattgtagacgcttaataaatgtctgttaaatgaaaaaa

SEQ ID NO: 57918 - DNA, 500 bp, Homo sapiens
tgacatgattacgaatttaatacgactcactatagggaatttggccctcgaggccaagaattcggcacgagctgggatcatccgcggcggccgggctcgtggggcgcctggagtgagggttctggttcccgccggcgaggattgttaaaatgagtcttcggaagcaaacccctagtgacttcttaaagcaaatcatcggacgaccagttgtggtaaaattaaattctggagtggattatcgagacggagtctcgctctgtcacccaggctggagtgcagcggcgcgatctcggctcactgcaagctccgcctctagactgggggtcctggcttgcctggatggctacatgaatatagccctggagcagacagaagaatatgtaaatggacaactgaagaataagtatggggatgcatttatccgaggaaacaatgtgttgtacatcagtacacagaagagacggatgtgaagacaccaagagagcaacgcttttcatagt

SEQ ID NO: 57919 - DNA, 564 bp, Homo sapiens
gccaaggcaggcatcaaaagccaaagtggccttctgcaccagcatccctcaggacaccctgctggggaaggcccggcccggcacaacagcagactgaggcccccaccctgaaaaagcctaggacattcctgggcactgtcatttagggtgctgtacaaatcacctccgcctagaaaatggaattcaacagtcaggatacagatttccaaggccaactgttggccccaacatgcaacagtgagaccataagcctcccgtgggccacattttgacagtggatgcccttcagggtgatatatgctataaagcagttttctatcacctaagtggtttttcttgccaacaagaatttttacccatcagcactactgtggctgaaaaacttctcttcaacagttcagtgcgccctgtgcaggagtcagcccggcatttgcttgtacacacagctccttgcataggtgtggagttagatctggacagtgaacttcaggaagtcctttcttataggaggctaatagggattgagaataacatgagaagaaaacgctaataaagggaaacctg

SEQ ID NO: 57920 - DNA, 841 bp, Homo sapiens
ctgggcgtacgtcaagatggcggcgtctgtattaaacaccgtgcgtgaggcggcttcctatgctatctctcttccgaggttctcacagagttcaggttcccctccagactctttgcaccaaagctccctctgaggaagattctttgtcctcagttcccatttctccttataaggatgagccctggaaatatctggaatcagaagaataccaggagcgatatggttctcgccccgtctgggctggactaccgccgcaaccacaaagggtggtgtacccccacaagcggactcggaagacatgtattcgtcggaataaaagttgttggggaatccctgccccatctgtccgaagatcacaagttgcatgtttgactttagggaacgtgaagctctttggaagcaattttgtctgcggcccacacgggtattcatctttttatggttccttacacagggagtctgttgttgaaggcaggcacaagcgggtttgacccagggccatccagaaagccagggatcatggtctcctcatttaccacattcccccagggttgaacacggggaccttgacttcagtacctctcatggggctgtgagtgctacttccgccagcccccaccctgtcttcaggtgaccccttgtacccatggtacaactggaaacagccaccggagagagaactgtctcgccttcgccggctttaccagggtcatctccaagaagagagtggccccccacctgagtcaatgcccaagatgccccctagaacaccagcggaagcctcctccactgggcagacaggccctcagagtgctctgtaggagctgtagactgggaagag

SEQ ID NO: 57921 - DNA, 1403 bp, Homo sapiens
caggcatgggtgtttatggaaatggtgtgccctctggacaggcaaccaaacacacacggacttcaatttctttattaattcctgcctcatcatcttttctcattgatgctccttaatgtcaaaggaatctctctctctcacacacacataagaccaaaacaaatatcttgaacatgcaaaaaaatagtctacgcttttgaaatagtgtgccactgttgaaatagtgtgccactgttggatagtgtgccactgttgaaagtgtgaatgtgcctaaggcaacaggatcttgggaaagctctagatttttggcttcgaaataaaactgcatgttgaatagcaggtttttacatttattattgttgtgtatttcctcccctttttgcaatactatctacgctgagttatctattgccaactagcaccaattctccaaatcaaagtgtgtgaggaaaacacactcgtgcaatcctctttaacagaagatacaccaagtaacctgtctgtctacttctgttacccagaaataaaagaacttgaagggctgcttggctggaggggtccgggtgggagagcatcctgccctcagtcggaatccatggtgaacagctggatgtcctgtggattccagtacaggccgactgctgagttgtagacaagagaccagacataggggataaaaaactcctcgggctgctcctcttccacatatttggaattttcaattctggaaatttcttcagtctgtctttgggcagcgcaacgacgccttgcttaatgatttccaggacccgttccactgacagctcagctccagcttgcagcaaccttgagctaaagaaggagatcaccagatcaatattttgcattatatcctgaaatgaaggatgagttcgaaattgttcaaagagatcgcgtttgtaaagcagggcgtatacccaagtttgggttgtggtgaagggaatttgtcaggcaggagttgatgatctcctaacatcattcgaatcacttcttcaatgacatttaggtcttgtgcataatctggtagaggaacatcattagaactcagcgaacctctcaaggactgtgtggcttgttccagaactttgttgtgttttttagacagcaaagaaaataaactgatgatcctctgggcagcatactgatggagagaacgaaactgtgccgacatatttgctaaagctgccaaacaatttgtgtgaaggtacttgtctcgtgtcctagtcatgttgtattgaatggttcttattaccaccaggatcaggagactccccaaggagatttcagttaaaactcgttctgaataccaagtaatattttttagtatcacttcatgaatggatctgttgaagccatcatcttccgtaaggatcaacaatattata

SEQ ID NO: 57922 - DNA, 1473 bp, Homo sapiens
gaaacacaaacccagatgcatgcattgtgcattattttgtagacaagctactttttcttctgtccctttaacaaatttgcagcaattaccctccctttggggtctagagtgaaagctaatttgtgggtagatgagattgcagaagaatggatgtccatggctgtgaacactgcacactgcacatccatctccagtgctcacactgtgcagctaccactccctgggctgcgtgccatgctgtcgggttgcagatttgcacacataaattcctcaggaagagtttgcatgagcatcacctcggcaatattctgtactgaccaaacaaggggattttgaacgtttttcagcacaaaaggataacttccgagtggtggtctgtacgcatactagcaaaggtaatggtgatctagcaaacaaaattggtttctgcagttagaagtgagcaggagcacttgtattatagtatttaaataatcctggttaatctctttttaagccgagtaacccctccagattttgcctttttattattgaggctggctttattttcttctactttttttcccgttttatagcagttaattatttttgtgattattatgcaagaagcattgcccttgagttaaactgttattgtttcataagcagctattaaaataactgagcattgttttatgaacatacactaatctgagatactgaaaagctttggcaactaaaaagcaaaacaacctacattagtcatctagccattgtttggatgttttgagttgattttttatggtgcctcttttagcttggaatattacgtttactttaatccaagtctaggccttttaaagggtccttaaaattaaagttcagaatgtgaatccctttgacatctattacaggttataggacctttttggttgtgattactgttttcaatacgattgtataaatgaagttaactttgtcagaagttaaaatggaggtcataggagttcctggagaaatggctctcctgtttctttcattaccccactgaagttcaccccagtttctggccacaagaatatgagaaaggaaccctgttgttttccaagggaaatcattcctctctgtccccactgttgattaactaaagtcctggacaccttccttcctccactggccaagacccaccttgacccaccttgaacctcttttcagagccgagtggcatgaatatgtgtactgtttctgcttctgttgatggagtggctgtgggagaattaaaggaaatgctaatttgagcttcattcataggggaacctactatatattgcatccctgctggttggaaattatcttcatctctggactgcattgtttagaaaaatgttaatggcttacaattctgagaactttattgtgtggctctggggttaagaattctgtggtttgaaaaaaaataaatattttgtattgattctcacgtcaaaaaaaaaa

SEQ ID NO: 57923 - DNA, 456 bp, Homo sapiens; identical to SEQ ID NO: 14877

SEQ ID NO: 57924 - DNA, 1185 bp, Homo sapiens
  misc_feature (1)...(1185): n = a,t,c or g
attctttgttatattcttaaaattgtttgtttaagtaggtaaaaatatacattcagctgaaagcattacactaacatttacattttaagccttaggaggttattcagcccaattcccagcagtagagagaatactaaacttgtgtctcaaggtttcatggttttcccacgttctttggctattaatttaatttcccaggtcacgtagacaatcattgataattgaaacaagtcctgagttgaaataaccttgagttgagcaaaaatatcctcattttggcagaagctgggcttggtagtacagtaaaattttagtgtaatgtgctcttgtaattgaaaggggatagataatctggatgtttctgcaaaggaaaataggtgtgtacttaacagctttggctctactcagtttcttaaaaagataagagcaaaaaaagttaaatgttaatcaaaacatttaagtttcctttaaattgtagtaataaaatatatgaagctcctttttttactttgctctgtgactggtttaaaggtaagtttgttatgttgttggtagattttgccaggcttctcccaacagagtagaagtgatttggcctcataacttcacagtggtttaccactttgttctatgttctggttttgtaaaggatagtactggaatttgcgtctgaagaccaatattggtgtaactcctgtcagtatattggtaaaatgtagcagaggcaggagtttggatgtttggatgggattcccttaggattctacagccaataaagatcctatttcctatgcatgtcccaggaatcagtaatcctcttttactctgttgggatgagtctttttttgtttctgttcagagtggttactaacttcaccttctttcctcttgctgtcatctgcattcgtgcttcccacctgttgttggcatgtcctttaccttctctttccctgccacatcaacctacacactgactcatcattgacgtggaagatgtggaagatgtcaagtttgtgatcaactatgactatccaaacagctcagaggattatgtgcaccgtattggccgaacagcccgtagcaccaacaagggtaccgcctataccttcttcaccccagggaacctaaaacaggncagagagcttatcaaagtgctggaagaggccaatcaggctatcaatccaa

SEQ ID NO: 57925 - DNA, 2302 bp, Homo sapiens
ggggaggagaacgaaccaagatcttcaaacgcactgcccccaagttttactaaaaatactgacctttctctagaaggcgatccattttctcagcctattaaatttcccataaatggactctcagatgtaaaaaatacttcggaggacagtgaaaacttcccatcaagttctaaaaagtctgaggagtggcctgactggagtgaacctgaggagcctgaaaatcaaactgtcaacatacagatttggcctagagaaccttgtgatgatgtcaagtcccagtgcactaccttggatgtggaagagtcatcttgggatgactgcgagcccagcagcttagatactaaagtaaacccaggaggtggaatcactgctacaaaacctgttacctcaggggagcagaagcctattcctgctttgctttcactcactgaagagtctatgccttggaaatcaagcttaccccgaaagattagccttgtacaaaggggggatgacgcagaccaaatcgagccgccaaaagtgtcatcacaagaaaggccccttaaggttccatcagaacttggtttaggagaggaattcaccattcaagtaaaaaagaagccagtaaaagatcctgagatggattggtttgctgatatgatcccagaaattaagccttctgctgcttttcttatattacctgaactgaggacagaaatggtcccaaaaaaggatgatgtctccccagtgatgcagttttcctcaaaatttgctgcagcagaaattactgagggagaggctgaaggctgggaagaagaaggggagctgaactgggaagataataactggtgacaatagatgtgagttaaactttaggaaaaaggattccctttttttaaaaaaaatcaatacctcaaaagcaggctttgggacaagaaaaccccaaagtggcctgcttttcccatcccaggagctcattatccagtctgtgccaactgaagtaggagactgactgtgagtgctggctaaaagccctgggtggtgaggctcacagtactggtttccaggaggaagagcctttgtgcatttgactgaggccagtttctatgaagagcaagtagctgaggagaggtcgaatttactgctttttccaggacaattctggaagtaaagaaaatgtaattcaagctggttagcttaattttgtgccattctttaacataagagtaagctctattatgaaatacaactttaaaaaattttagctataaattatataaatgattttaaattgctgaggtttccttaggcagcttatttatttgtttacagttagactatctgagtaaatggttctttgtggacctaggcagttcctgactgttccacatgtagtacattgtaccaaagttcttaataagaatattccccacaatcctgttctctaaatgtcaaataaagattattttcactagattcaactttacaaaatttgttttatatctgttagaaaatgtacagacataagtattttcagttgacaaagcatcaaacccagttctgcctagtgataagtttcaccctagagtatgtatgtaacgttttagcttatccatcctttcttggagcgcctccatttccattgaaagccaggctggagcaggacccttttggagtagtgactcagttgcttccaaagcccctgctattgtatgcagcgctgacctgtactcttcttcccaggggaactcctgacgagctctttttgcataaggctgtaaagatgacctctttgcttcttctacagtcacattagcaaagggttcccagaaaatacctttttcctgtttcacacgttccactttggcagcttcagtttcatctacaaacccagtcttctccagaaaggatacaactttgttcttagtttcttcagaactgagacactgtggaactatctcttcatgatttgttccctcagcgaactgagtaaacgcctccaaggtatgttgttctagcagccaactcctgtcagctagcagtaaggcaaacatacaggacaggttgggcagaattctgtcctggatagcttcaggtataaaaagttttcctaaagaagatacaaaatccaacattgccaaacgaacatagtcaggaagctctaatttaagtagcgaggtctgcaaagttactgcctgaagtatcagtttaggatctagagtttgaatgaaaaatcccaacagtggaagtaaaaggctgaatgtctgttgaacataaggttgatctgctacctgtttaatgtttaaaaaagcccaaagctgac

SEQ ID NO: 57926 - DNA, 3010 bp, Homo sapiens
cttttcgagtcagtgctgccgccgctgcccgcggctttgcagagcaggatgaatgtgatagaccacgtgcgggacatggcggccgcggggctgcactccaacgtgcggctcctcagcagcttgttacttacaatgagtaataacaaccctgagttattctccccacctcagaagtaccagcttttggtgtatcatgcagattctctctttcatgataaggaatatcggaatgctgtgagtaagtataccatgggctttacagcagaagaaagcgctaagtaaaacttcaaaagtgagaccttcaactggaaattctgcatctactccacaaagtcagtgtcttccatctgaaattgaagtgaaatacaaaatggctgaatgttatacaatgctaaaacaagataaagatgccattgctatacttgatgggatcccttcaagacaaagaactcccaaaataaacatgatgctggcaaacctgtacaagaaggctggtcaggagcgcccttcagtcaccagctataaggaggtgctgaggcagtgcccattagcccttgatgccattctaggcttgttgtccctttctgtaaaaggggcagaggtggcatccatgacaatgaatgtgatccaaaccgtgcctaacttggactggctctctgtgtggatcaaagcgtatgcttttgtgcacactggtgacaactcaagagcaatcagtaccatctgttcactagagaaaaaatccttattgcgagataacgtggacctattgggaagcttggcagatctgtacttcagagctggagacaataaaaactctgtcctcaagtttgaacaggcacagatgttggatccttatctgataaaaggaatggatgtatatggctacctactggcacgagaagggcggctagaggatgttgagaaccttggatgccgccttttcaatatctctgatcagcatgcagaaccgtgggtggtttctggctgtcacagcttctatagcaaacgctactcccgggccctctatttaggagccaaggccattcagctgaacagtaatagtgttcaagctctgctacttaagggagcagcacttaggaacatgggcagagtccaagaagcaataatccactttcgggaggccatacggctcgcaccttgtcgcttagattgttatgaaggtcttatcgaatgttacttagcctccaacagtattcgagaagcaatggtaatggctaacaacgtttacaaaactctgggagcaaatgcacagacccttacccttttagccaccgtttgtcttgaagacccagtgacacaggagaaagccaaaacattattagataaagccctgacccaaaggccagattacattaaggctgtggtgaaaaaagcagaactacttagcagagaacagaaatatgaagatggaattgctttgctgaggaacgcactggctaatcagagtgactgtgtcctgcatcggatcctaggagatttccttgtagctgtcaatgagtatcaggaggcaatggaccagtatagtatagcactaagtttggaccccaatgaccagaagtctctagaggggatgcagaagatggagaaggaggagagtcccacggatgccactcaggaggaggatgtggacgacatggaagggagtggggaagaaggggacctggagggcagcgacagtgaggcggcccagtgcgtgaccaggagcagtggttcggcatgcagtgagggggcggcactccattggccgcagtggcctgccctgctctgagcacttccgtggactgaaggaaccgtaggagcctgctctcagaaggacaatgattcagcatgtgattgcagcaggggtctctgccccctcgctcccaattcctagtcgtgacttcatttctaaaacagagcctgaccaaccttccatgtatctccatcctcccctgctccagccagggaggactgagggagtgccccgagacccacgcacatgttggggcttctgggccaagagtactttttatataactaatttctaaatccaaaagctcaaggaatagacagtgttctgtgacatggattggtttgaaggagttacccaccatcccagcacgataatgtcatctcccaagttggatggcagcacgatctggccctagggagcttcctgttcccagaagtcattgtcctgggctatccagatgtccctagtaaatcttgcttccttctgcaatgttagtaatgccttaagctgacagttgctattttgcagaacagttttcctctttgcttagctagtaacttgcctctgagcctgggctgatctgagaaacaggtgtgacaagagcatgaaccagaggtgcacctggggcagttccctaataaaactgggttttgtaacagttcatgggtgtttgggggtgatcagaatggaagcccttttcaaaatagactcttagtattttggtcttaattcgcaatgccattgaattccagcccccagaattatttgcccagaaaatagactttcttccccctggtgttgggaaccccaggagggttggaaaagctcaggaaccctgagctggttcatctgtttgccatattgggtaggttaatttccctggagcctgagagtctttggccagatttcagctgcgtctgcctggctcttttgctgcagctgtgagattggggtctggttccagcagtctgtcactggtcagcctgagtatcacaccctgagctctggggctgggagtttcttcccacaccctctcccttgtgccttaagttgcgatggctctgagtatacaattaatcggaggtgaggggtgggtgtcacagctaatcccaaattcaaaaattagtccaaggtgctgcaaaatataaatttgatgtcagtagaaagtcgtatcctaaaatgtaaaaactgtaagtgtacagtagttaatgagctcagaacatctgataactgcaatttaaaatgggcaaaaagtta

SEQ ID NO: 57927 - DNA, 630 bp, Homo sapiens
ttttcattgtacaaaaaaaaagttttattttgaagattacagaacttgtgccatgaccccacctggcttccattcccagcaatccagggatctgtggtggggatgagagtgagaaaagggagtaggaggggaggagggaggcctggtgggggtggggaagtggagtaacatggttgttgagaagctcgtggccccctaggcctgggcctcactgtctttactcctccatactacaagagtgatgaggaaggggatgaggcagatgggggctatgatcatggccaggagtacatcctctggggggtcagagaaggtgggctgcaccagggagcagttggcaaagtggatctggtgagtctcaaagatgatcctctctgccaagggattggggaagcccaggtcaaacaactctggcaaagtgctccaggcaatctcgcagggtgctataaggcctaggggcagaagaggacttgagtgagagagggggtggacccagggagaagagtgccccactctcactcagggtctacctgcaatgagcaggtccaccccctggcctgagccaccctccatcactgaccctacctgctaatcatggcccagtcgcaccaatccttttcgataggatcc

SEQ ID NO: 57928 - DNA, 2808 bp, Homo sapiens
tagtgtgtatagcatgaatactaccaaaggagacgacaaacttgcagcttaaaatgcgcaccagttcccacactggcttaatttatataactgcttggctgtattgcgggtaataatattagaagcaagaagcacttcatttttaaaagagatgttactataatattgcttaaatgctttagcacttggacttcttgagatgcagatgtgtgatttggagtgctggcttatttaaaggtcaagccaaggagtttgtggttcagccacaactactgtttcctaagactattgatgtgaaggacttagtgaagtaatttttatattctgggcttcccagcaagatgtcctttttatgactgccatgcttcttttggactcagtaaatatttgtaatgttagaaaagtctcattatttttataaaatgcatgacattttaagtatgtgttgcataaaatggattatagcagttctcatggtttaggatttttaagaaatagtccatttaatttcagcttaaccttttaaatgatctgtaaaatttctttgatagtttaggaatgttgtggggagggttcattaataaaagttcagcaattttttaactgaaatagtttatctcttttacctagtcacaaaaaaggtatgtaaacaaggccattatatgtgtttattgctctttatttccctatctagattttctaagtatcttagctttcttaatataagtttaacttggtacttactgaaaatgcctttttacccctgttaacggtattttgagcttttgaaaagaacttggttgacactgcttttattgtggataaaggagagatggtcagtaattaatggcttgaagtattattggagtggtttatcatttctgaaactaatcgtgtcagaattgactttgaaaagcattgctttttacagaaatatattaactttttaggagtaatttctagtttggattgtaatatgaaataatttaaaagggcttcgctcatatataggaaaatcgcatatggtcctagtattaaattcttattgcttactgattttttttgagttaagagttgttatatgctagaatatgaggatgtgaatataaataagagaagaaaaaagaataaagtagattgagtctccaattttatgtaagcttcagaagaactggtttgtttacatgcaagcttatagttgaaatatttttcaggaattacatgaatgacagtcttcgaaccaatgtgtttgttcgatttcaaccagagactatagcatgtgcttgcatctaccttgcagctagagcacttcagattccgttgccaactcgtccccattggtttcttctttttggtactacagaagaggaaatccaggaaatctgcatagaaacacttaggctttataccagaaaaaagccaaactatgaattactggaaaaagaagtagaaaaaagaaaagtagccttacaagaagccaaattaaaagcaaagggattgaatccggatggaactccagccctttcaaccctgggtggattttctccagcctccaagccatcatcaccaagagaagtaaaagctgaagagaaatcaccaatctccattaatgtgaagacagtcaaaaaacgaacctgaggatagacaacaggcttccaaaagcccttacaatggtgtaagaaaagacagcaagagaagtagaaatagcagaagtgcaagtccgatcgaggtcaagaacacgatcacgttctagatcacatactccaagaagacactataataataggcggagtcgatctggaacatacagctcgagatcaagaagcaggtcccgcagtcacagtgaaagccctcgaagacatcataatcatggttctcctcaccttaaggccaagcataccagagatgatttaaaaagttcaaacagacatggtcataaaaggaaaaaatctcgttctcgatctcagagcaagtctcgggatcactcagatgcagccaagaaacacaggcatgaaaggggacatcatagggacaggcgtgaacgatctcgctcctttgagaggtcccataaaagcaagcaccatggtggcagtcgctcaggacatggcaggcacaggcgctgactttctcttcctttgagcctgcatcagttcttggttttgcctatctacagtgtgatgtatggactcaatcaaaaacattaaacgcaaactgattaggatttgatttcttgaaaccctctaggtctctagaacactgaggacagtttcttttgaaaagaactatgttaatttttttgcacattaaaatgccctagcagtatctaattaaaaaccatggtcaggttcaattgtactttattatagttgtgtattgtttattgctataagaactggagcgtgaattctgtaaaaatgtatcttatttttatacagataaaattgcagacactgttctatttaagtggttatttgtttaaatgatggtgaatactttcttaacactggtttgtctgcatgtgtaaagatttttacaaggaaataaaatacaaatcttgttttttctaaactgcttcaaataccttatttaaataaattattaaaaaggaaaattttaatagcaaaatggctgtactggttttctgacaaacttattctttcctccattagatggtagtttgagattattaaaatgcaattcttaactgcattgtgagctattgtaagtcttcactgtatatatggaaaaagtaaatgggagtcgcccaacaatgtgacattaaatgttatattttagcactaaaaaaaa

SEQ ID NO: 57929 - DNA, 1412 bp, Homo sapiens
  misc_feature (1)...(1412): n = a,t,c or g
tctatgacatgattacgaatttaatacgactcactatagggaatttggccctcgaggccaagaattcggcacgagccacttattaattagtccatttgctagaagagtggtcaagggaaaaacgagagatgaaatttagttaagtctatgtgagcaagtgagagaaggttaggtaaggggagaggatggaatgcttgcctccaatgaactttggagcttgtatgtgagtcagattgctcccctattgctattatctattactcttgagagctggctgtcctttgaaagaaagaagtaatgttctttgaaagaaagaaaaatctcttgctgtgtcaaacctcaaaatgttgctattggggttagaaggcctcctctttatgctttttaatgctctttcaaacgtgttcttttagaccagttttctaataagctttgtaaaatgtactatccaaattagaagcggatttggaaatgcaaactaacgtgcacttagatatccaagtgggtgagcttagccactcttacccatgctctttccctggaatccctggagacctgtccaagatgatttccatataccagcatagaaaatcagaatcaagagcaaactctgagactggcacaatccaagaagatttcctggctctggcttttagtaatttgggactccaactgccactgtactggactgtaatttataaatccagtagctacgcagggtggaggctgggctgaggattaccataatgaaatgtactaaatcttcatttaggtatgcaattgtgaagtgaaggcatctgctttctttacagtatcagagtccaagaacaggatgtcaccatagataaaagcctcatacaaaggcagaactacactccaaatttaatgtgtttaaattggtggggcaccagcagaaaatacttctagctcagctttactcttcttccacactaggctgggcccagcaatacaggagaggatgaagggaggagctccaggaggcgagggaagagccctagcagggcggccatcacaaccactcactgagagttgcccttcttaaaaatgtattttattttagccagtgggtcccttcctttctcctttcctctctactgctcaagaacagatttgannnnnnnnnnnnnnnnnnnnnnnnnnnnnnnnnnnnnnnnnnnnnnnnnnnnnnnnnnnnnnnnnnnnnnnnnnnnnnttcaagaccagcactgggcaacacagcgagaccccatctcttaacaaataacagacttgaggaacccctctcccttccataattcccctcatccaccgcccactccaggcactcactcaaacttgctcttcaactctgtatacaagcagaagcaataaaccaatctgattttcttttcaaaaaaaaaaaaaaaaaaaaa

SEQ ID NO: 57930 - DNA, 3176 bp, Homo sapiens
gggcgccccgccggtcacttccgcgcggacaccagccttgcagagcccagggagatggaagacttcgcccgaggggcggcctccccaggcccctcccggcctggcctggttcccgtcagcatcatcggggctgaggatgaggattttgagaacgagctggagacaaactcagaagagcaaaacagccagttccagagcctggagcaggtgaagcggcgcccagcccacctcatggccctcctgcagcacgtggccctgcagtttgagccaggacccctgctttgctgtctgcatgccgacatgctgggctcactgggccccaaggaggccaagaaggccttcctggacttctaccacagcttcctggagaagacagcggttctccgggtgccggtccctcccaacgtcgcctttgaacttgaccgcactagggctgacctcatctccgaggatgtccagcggcggttcgtgcaggaggtggtgcaaagccagcaggtagccgtgggccggcagctggaggacttccgttccaagcggctcatgggcatgacgccctgggagcaggagctggcccagctggaggcttgggttgggcgggaccgagccagctacgaggcccgggagcggcacgtggcggagcggctgctcatgcacctggaggagatgcaacataccatctctaccgacgaagaaaagagtgctgccgtggtcaacgccattgggctgtacatgcgccaccttggggtgcggaccaagagtggagacaagaagtcggggaggaacttcttccggaaaaaggtgatggggaaccggcggtcggacgaccctcccaagaccaagaaggggctgagcagcatcctggatgccgcccgctggaaccggggagagccccaggttccagattttcgacacctcaaagcagaggttgatgccgagaagccaggtgctacagaccggaagggaggcggtggggatgccctctcgggaccggaatatcggggctcctgggcaggacacccctggagtctctctgcaccctctgtccctggacagcccagaccgggaaccaggtgctgacgcccccctggagcctgggggactcatccccgcagggcccaatgagcctggagtccttggcgcccccagagagtaccgacgagggggccgaaaccgagagccccgagcctggagatgagggggagccggggcggtcgggactggagcttgaaccagaagagcctcccggctggcgggaactcgtccccccagacaccctgcacagcctgcccaagagccaggtgaagcggcaggaggtcatcagcgagctgctggtgacagaggcggcccacgtgcgcatgctgcgggtgctgcacgacctcttcttccagcccatggcagaatgcctgttcttccccttggaggagctgcagaacatcttccccagcctggacgagctcatcgaggtgcattccctgttcctcgatcgcctgatgaagcggaggcaggagagtggctacctcatcgaggagatcggagacgtgctgctggcccggtttgatggtgctgagggctcctggttccagaaaatctcctcccgcttctgcagccgccagtcatttgccttagagcagctcaaagccaagcaacgcaaggaccctcggttctgtgccttcgtgcaggaagctgagagccgcccgcggtgccgccgcctgcagctgaaggacatgatccccacggagatgcagcggctgaccaagtaccccctgctcctgcagagcatcgggcagaacacagaagagcccacagaacgggagaaagtggagctggcagccgagtgctgccgggaaattctacaccacgtcaaccaagccgtgcgtgacatggaggacctgctgaggctcaaggactatcagcggcgcctggacttgtcccaccttcggcagagcagcgaccctatgctgagcgagttcaagaacctggacatcaccaagaagaaattggtccacgagggcccactgacgtggcgggtgactaaggacaaggcagtggaggtgcatgtgctgctgctggacgacctgctgctgctgctccagcgccaggacgagcggctgctgctcaagtcccatagccggacactgacgcccacgcccgatggcaagaccatgctgcggcccgtgctgcggctcacctccgccatgacccgcgaggtggccaccgatcacaaagccttctacgtcctttttacctgggaccagggaggcccagatatacgagctggtggcacagactgtgtcggagcggaaaaactggtgtgctctcatcactgagactgccggatccctgaaagtccctgcccctgcctctcgccctaagccccggcccagcccgagcagcacccgagaacccctcctcagcagctctgagaacggcaatggtggccgagagacgtctccagctgatgcccggaccgagagaatcctcagtgacctcctgcccttctgcagaccaggccccgagggccagctcgctgccacggcccttcggaaagtgctgtccctgaagcagcttctgtttccggcggaggaagacaatggggcggggcctcctcgagatggggatggggtcccagggggcggccccctgagcccagcacggacccaggaaatccaggagaacctgctcagcttggaggagaccatgaagcagctggaggagttggaggaggaattttgccgcctgagacccctcctgtctcagcttggggggaactctgtcccccagcctggctgcacttgaggttcccgcccaggaaggccttttgcaagaaggagaggaatgggggagaggacgtgagggaccacccccacccacacagctgccgcagcatctcacaccccgagggcctgaggagagggagctgtgggccacgcctgggaggggcccagctggggttactggccccgcatgagcctcggccatctctccctcctgccctctgcttgggggactcagggctccattctggagggcaccacggtgacccgggccatctcagtattgcctgtgggggccacccctccacccccacccccaagtgccttcgctctgtttttataccctgaattggaggtttattttttaatatatattatctaagaagagaaaaaaaaaaaaaa

SEQ ID NO: 57931 - DNA, 855 bp, Homo sapiens
tttttttttttttttttaggtcaccagtttgttaactttattattcagagagcaccttgcagggactacgcacaaaataggcaatcactaagtatttacagacgaaggcaacttcaacttccttattgcatccaaaagcaagggcactaaatggtgtaaaagacttcaaatgcagggaaagacaatacaacggtatttgtcctgctcctagggcaaatcaggaaggaaagaatttccagggtctaggggaggctcaagaatgaagagagtacctaattcacaacaaaaggccaagttctgttcagaggattttatttcaagataaatcataacttctacccatactatgattccaaagggtgaaaaaagtgttttgcctcttctaccctccaaagagggcatggcaatgccaatgtctctaaaatgcctctgcatagttgtcagaagctatatttcagtcattgaaaatacttgtccattttcagctgaggtaaggtttgttaggaaacctctgtaacaacttattcaatttatttggaagtaaactcccagactctcccagggtttcctgtattgatctcatctttcgggcttcctgagccctcgcggcacaatcgaggaagccctggatctcttttctgcacgcatcgtcgcggaattcattctgcttccagcaagccatcatcaccgacatctccgtgatgcaagtcgcctcgcccttctcccggcgccgctccccgacgcggttagctagaatgagaggtttattgggcttcagcacaggcttccgcgggttcccaaaccgcgccagacgaccccgcaggctgggtgtcgccatagcgcaccaagctcccg

SEQ ID NO: 57932 - DNA, 1959 bp, Homo sapiens
atctttccagagaattaaataatcctttttatgggcctgttaaacaatgctccagtatgacattgaaagaacatgcagtcacccttctcctttcccttatctctacattttgggaaatttttcttaacagtgcttcctactaacttctttaaatgtagtagtctttgtgctgtggggacaaaaatatggccacaagtagtaacttttctggttttctttaatagacaatacacagaaatcaagtcaactggatggtacagatggaaaccagctggaagacaacctggagagtagtgagcagagactcttttggcatgaagattcaaagcctggaacattagtctgaactgcagttggacctcctgaccaagcactgcgttctcacactagtgtggccttggcaaattgtatttgtcttccgagaggatgttcgttttagaaacctaaagacatcaaaggttgaagagaagacttagttgccctggaagtgaatcagtgaatcacacaccaagccccacaaagcccctaaaggaggatttggcctttcaaactctaggcactaacgtaactgtagggtctgcccacatgttgaagtattgccaagagaggactcagtgtgaagccttcatcaatagcaagcactttttaagggagtaaaagttgttaaaggcaaacgtcaaaaacatgaaagggcattcaggatgtcccatggcaataagaacaggggaaatctcagagcacaattcagcaggatgagagaaggggaaccagacgctccggagtcattgctcacttcagagtttgaattcgtgagctgacaaagagtaacatgctctttctacacagacatggacaatttagacagtattggaaaattacttgaagctggattttcatgaagttctgaatgagtgtaaatgttttttaggatactataaagagtgatgtttttcataagcaccataaaatgggttctggaaaactgattaccttagcatcctgtaatataacttatggtagcagattggggaaaatgaagcagcccactgaataattgacaaagtctgcttggagaacattctaaggtacaatatcatggagctcctttttcctttctccactaattgcgtgatgagctattgttctggctggtaattctccaactcggctgtcatttgaagtggcagacttaatatggaaagtttttataattatgagtttgaaaaagcattttaagatgatacagaaagtatccaaaacaacagaaaaaaaaagccacgtcattttagatgaattgcgtgccttaaaatggtgaacgttagaaaattaaacaagtctggattccacaagtagttccaagtcaccaagtgacaaaaacaaggttaacattaaaaaagaaaaacaacaacaacgacaaaaagctccaagctgcagtggatttaattatgaggctaaaactacctcatactttccttggaagaactaattagctatggtttattgtagggttttgtttgtttgttttttaaagcaaatgatttccatattcctgattgatcttttttgtcatctttgcttcaaaattacataaaaggtgctcctttcccccttcttttatacaagtttcttgttcatattgtgaatagaaaagtttctgaacaacttttttggaacattttctatctatattccaaagcatgtaatatatacataaaaacgatttgttaaactggtccttagtcatttgtataattagaaatgaagtttgggaaaaaattttggaaaaaagacaagcaaaaaaaaaataacttattccttttttgcatatttgtatagccttctagaatcagaaataacctttttgcatattcttttattgttctgacttttcaagacctattatttttttacataggtcaataaacaaaaggtgtgctactgaaaaaaaaaaaaaaaaaa

SEQ ID NO: 57933 - DNA, 1979 bp, Homo sapiens
  misc_feature (1)...(1979): n = a,t,c or g
ctaaagcaacaaaaattttaaaagctccttcctgtccccctatgattaatggcctgtgaaagaaagcccatgggcttgccatatcccctcacctataagcccccggagaaatgccccctcctatcattctcccatgatcgactttattacctcaatggcatagagtgtgcagcaagtgcccatggagatgagtgccattgcagcccacaacgctgcactccttgcctatcaccgctggaacgggcacacagacatgattgatcaggatggcttatatgagaaacttaaaactgaactatgaagtgacacactcctttttcccctcctagttccaaatgactatcagtggcaaaaaagaacaaaatctgagcagagatgattttgaaccagatattttgccattatcattgtttaataaaagtaatccctgctggtcataggaaaacacacggttctaattaagtgtgaaggtatagctattgcacttatgccatctccaaaatttcttaagtattctttcactatccattaggagtttttcttaaacttgtctgataataagaatcacctggagttaggnnnnnnnnnnnnnnnnnnnnnnnnnnnnnnnnnnnnnnnnnnnnnnnnnnnnnnnnnnnnnnnnnnnnnnnnnnngtaaataaaaataatcacctggagtttgttaaaccatatggattctcaagctcctctcttgaagattctgattcagtaggtctgggagtggggccctggattttgatcaaaattgtagagcattttaaggtgagtacctgagggagaacttaaagacatcttagttggggagtagtccttttgaattttacagctagatataatcttcagtcagataaaatttatgggagctggtgtcttatgcctgactcttagtaatttcataccggtttgaagtacgtgtgcccatgcctaaagccttgactttcagaatgttgtcttttgattcttctgtcttgatttgattaggggtgaaatttagaagtcttagtaatgtaacttgaagatgttaaacaaaaatctcaagtaaaatgaaaagcaaatatgggctactgaattaagaaactggcattctagtattaaatcctcacttcaggagcttttaaaaatactgagacccccccataaccagagattcagattcaaagactgaggataggaccttagcattgtagctatttaaagtttctaatgtgcacccagggttgggaatcaccaatgtgggtgtgaaaatgcctacaaagggttttagtgccttagaagtcctaagaagcccaatctgtatcaaagcagatccattttgcaaggatctttcttttagaactttctcagttctcttagtaagaactttagaagtaatcttgataataagcacagacagcctaacagcagaggcaacttaaataactcctgagcagttggcactagaacagaatacttggaatgacaccaaagttaaccaagtccagcatatgtccaaagagttaagtgtttcatttactgtagcattctgggtgagaaattggttgctgaaatcttaagacagtggtctcaacccttggctgcacattggaaatcacctgtagggttttaaagcatccaaatggtaattaacaggcagcaaaacttcagaactagttctgcatctactgtgcaaagatcatgattaactgtcaagacactggtagaacagaacaagcaaaagattaagagttcaaaagtaaatgcaaccaatttaacatgtagtgttattaaaaaattacaaaggcctagaccagcctgggcaacatgggtgaaaccccatctctacaaaaaatttttaaaaagttggccaggcatggtaatgcgcgcctgtggtcccagctgctcgggaggctgaggtgggaggatcacttgagccttggaggtcaaggctgcagtgaatcatgatcatgccactgtctcca

SEQ ID NO: 57934 - DNA, 1752 bp, Homo sapiens
gcgggagccgcaatggcacgccacacctcaacttctcttcaggcagcacgcccggaccttgtggtacgacaggcccatgtatgtgttcatggagttttgtgttgaggacagcaccgatgtccacgtgcttattgaggatcaccgcattgtgttcagctgcaagaatgccgatggagtggagttgtacaatgagattgagttctatgccaaagtgaactccaaggactcccaggataagcgctcttcccgctctattacttgttttgtgagaaaatggaaggaaaaggtggcctggccgcggcttaccaaggaggatatcaagccagtgtggctgtctgtggactttgataactggagagactgggaaggggatgaagagatggagctggctcatgtggaacattatgcagagcttttgaagaaggtcagcaccaagagacctccacctgccatggatgatttggatttcaccaccaccgtggtctcttgctgtcccgcggagctgcagactgaagggagcaacggcaagaaagaagtgctgagcggtttccaagtggtgctggaagacacagtgcttttccctgagggcgggggacagcctgatgaccgtggtacaatcaatgacatctctgtgctgagagtgactctgtgctgagagtgactcgccgtggggaacaggctgatcatttcacccagacacccctggatccaggaagccaggttctggtccgggtagattgggagcggaggtttgaccacatgcagcagcattcagggcagcatctcatcacggcagttgctgaccatctatttaagctgaagacaacatcatgggagttagggagatttcggagtgcgattgagctggacaccccctctatgactgcagagcaagtagctgccattgagcagagcgtcaatgaaaaaatcagagatcggctgcctgtgaatgtccgagaactgagcctggatgatcctgaggtggagcaggtgagtggccggggtttgcctgatgatcatgctgggcccattcgggttgttaacatcgagggcgttgattccaacatgtgctgtgggacccatgtgagcaatctcagtgaccttcaggtcattaagattctgggcactgagaaggggaaaaagaacagaaccaacctgatatttctgtctgggaaccgggtgctgaagtggatggagagaagtcatggaactgaaaaagcactgactgctctgcttaagtgtggagcagaggatcatgtggaagcagtgaaaaagctccagaactccaccaagatcctgcagaagaataacctgaatctgctcagagacctggctgtgcacattgcccatagcctcaggaacagtccagactggggaggtgtggtcatattacacaggaaggagggtgattcagagttcatgaatatcattgccaatgagattgggtcagaggagaccctcctgttcttaactgtgggcgatgagaaaggtggtggactcttcttactggcagggccacctgcgtctgtggagaccctggggcccagggtggctgaggtcctggaaggcaaaggagcagggaagaaaggccgttttcagggcaaggccaccaagatgagccggcggatggaggcgcaggcgcttctccaggactacatcagcacgcagagtgctaaggagtgagggcttagggcactcacctcctgtttccacaggaatcttttggtcaataaaatagattgactcagaaaa

SEQ ID NO: 57935 - DNA, 452 bp, Homo sapiens; identical to SEQ ID NO: 24687

SEQ ID NO: 57936 - DNA, 866 bp, Homo sapiens
gatttgattcagagtgacatagctgctctccatcacttttactccaagcatctcgaattccctgacaatgatagcctcgtagtactctttgcacaggttaactgtaatggcttcacaattgaagatgaagaactttctcatttgggatcagcgatatttcctgatgttgcattgatgaatcatagctgttgccccaatgtcattgtgacctacaaagggacccgggcagaagtcagagctgtacaggaaatcaagccgggagaggaggtttttaccagctatattgatctcctgttacccaacggaagatagaaatgaccggttaagagattcttatttctttacctgtgagtgccaggagtgttaccaccaaggacaaggataaggccaaggtggaaatccggaagctcagcgatcccccaaaggcagaagccatccgagacatggtcagatatgcacgcaacgtcattgaagagttccggagggccaagcactataaatcccctagtgagctgctggagatctgcgagctcagccaggagaagatgagctctgtgtttgaggacagtaacgtgtacatgttgcacatgatgtaccaggccatgggtgtctgcttgtacatgcaggactgggaaggagccctgcaatatggacagaaaatcattaagccctacagtaagcactatcctttgtactccctcaacgtggcctccatgtggttgaagctagggagactctacatgggcctggaacacaaagccgcacgggagaaagccctgaagaaggccattgcaatcatggaagtagctcacggcaaagatcatccatatatttctgagatcaaacaggaaattgtaaagccactg

SEQ ID NO: 57937 - DNA, 1503 bp, Homo sapiens
ggcggcccccgggagctgtgctctatggagctattgcggcccgtgggtggtcgcgggcgatgcggggctgccagctcctcgggcttcgtagctcttggcccggggacctactaagtgctcggctcttgtcccaagagaagcgggcagcggaaacgcactttgggtttgagactgtgtcggaagaggagaaggggggcaaagtctatcaggtgtttgaaagtgtggctaagaagtatgatgtgatgaatgatatgatgagtcttggtatccatcgtgtttggaaggatttgctgctctggaagatgcacccgcttcctggggacccagctgcttgatgttgctggaggcacaggtgacattgcattccggttccttaattatgttcagtcccagcatcagagaaaacagaagaggcagttaagggcccaacaaaatttatcctgggaagaaattgccaaagagtaccagaatgaagaagattccttgggcgggtctcgtgtcgtggtgtgtgacatcaacaaggagatgctaaaggttggaaagcagaaagccttggctcaaggatacagagctggacttgcatgggtattaggagatgctgaagaactgccctttgatgatgacaagtttgatatttacaccattgcctttgggatccggaatgtcacacacattgatcaggcactccagggaagctcattcgggtgcttgaaaccagggaggacggtttctctgtctgggatttagccaagttgaacaatcccctcatatccaggctttatgatctatatagcttccaggtcatccctgtcctgggagaggtcatcgctggagactggaagtcctatcagtaccttgtagagagtatccgaagttttccgtctcaggaagagttcaaggacatgatagaagatgcaggctttcacaaggtgacttacgaaagtctaacatcaggcattgtggccattcattctggcttcaaactttaattcctttcctatcatggagcatgaaccagtcatatcctgttgaaagcctggaactgaaggataatctggcaaatgagacagcagcagagcatctcctcttaaggatacgtgccttggactcatgtttgaatcgaacagtctcaaagtggaagaacaaattcttgtcacttttttacagctttctttggagctgcttcagtccatctcccagaggcatttggtctgtatctttgctcaactgctaatttctcttggctgtagggtgtgtggttaaggtacaaccacccctaaagctcagttttgaagtgagtgtatttatagcttctctgctggtgctgccttctagagggatgatagatcatttgaacccaatgacaatttttaaccagaaaatttaattgtacctgaatcaacctttccagcctaggacgaagtcctaggcccaagtcagagtattaatgatcatgagaattgtgtgctgaaccagtaaacgagtttaccttttgaaaaaaaa

SEQ ID NO: 57938 - DNA, 952 bp, Homo sapiens
ccctgctatgacatgattacgaatttaatacgactcactatagggaatttggccctcgaggccaagaattcggcacgagatgatatctcctttcagggccccagcttaagggcaaagtgagttaatgtgtagacaaaggcgagggacaagagagagttaacatctagacagtggaaaaagccatggtgtgtggtttctgggaaccaccaacacttgcaggtttagctttttcccagggttgactacaagaaagaaaaccatgtttttgcaagattaaaatgtggttgagtgtgcctaaattaaccatccccatttttatcatatttccaccatcacttcagggttttaagagtcagtgctcacctgggcggagctggtagtacatttttgcttcttagaaagctaagtcctgggttccgtctgattttaggttccaggaacttcctgagaacacccgatcgcagagggtaattttctggaagtttgttttgcagggatagctgggagtatggccaccctgctccacgatgcggtaatgaatccagcagaagtggtgaagcagcgcttgcagatgtacaactcgcagcaccggtcagcaatcagctgcatccggacggtgtggaggaccgaggggttgggggccttctaccggagctacaccacgcagctgaccatgaacatccccttccagtccatccacttcatcacctatgagttcctgcaggagcaggtcaacccccagagacggtacaacccaagctcccacgtcctctctggagcttgcgcaggagctgtagctgccgcagccacaaccccactggacgtttgcaaaacactgctcaacacccaggagtccttggctttgaactcacacattacaggacatatcacaggcatggctagtgccttcaggacggtatatcaagtaggtggggtgaccgcctatttcccg

SEQ ID NO: 57939 - DNA, 567 bp, Homo sapiens
tatgacatgattacgaatttaatatcgactcactatagggaatttggccctcgaggccaagaattcggcacgaggctgtgcttaaaatgtgtactattactttttagaatataaatgtgcatgtatttatgtgtatgtagataaaactcatgtgtatttgtcaacaaaagtgaaccgtctaaccttattccttccttaattttctcttcttacagcaaagttccctgattacaaatcaacatggtccccagatcccataggacacaaccccactcatctctccaacaagatgtggaaaaaccatatttcctccaggaacactacaccgctgccccgcccacctcctggtctgaccaaccccaaaccatcatctccctggagcagcacagcaccccgatcagtcagggggtgggggacacaggactcacggctcgcctcggcctctacctggagtgatggtggctcagttcgtcctagttactggctggttcttcacaatctcaccccacagattgatgggtcaaccttgagaacgatctgcatgcagcatggccactgctgacattc

SEQ ID NO: 57940 - DNA, 1028 bp, Homo sapiens; identical to SEQ ID NO: 14907

SEQ ID NO: 57941 - DNA, 432 bp, Homo sapiens
gcattttatcctcacaagtgtgaaataggcagagtaggtattgccattttataggaaacaaacctgaggaatagagaactaaaaagctgcaaggcactattgaaagagtacagaaacagaagttaggagactgcagagaacagtgtaaattctatgtggaactctatgttgctgctaaaatggataagggaaattctatataaagaagtggacatgactgggccccgtggctcacgcctgtaatcccagcactttgggaggtcgaggcgggtggatcacctgaggtcaggagttcaagaccagcctggccaacgtggcgaaaccccgtctctactaaaaatataaaaattagctgggccgtggtagcatgcgcctgtaatcccagctacttgggagacttgggagaactgcttgaacccaggaggcagaggt

SEQ ID NO: 57942 - DNA, 1279 bp, Homo sapiens
acgaggcagcactccagagcctgctcaaggcctcctcgaaagatgttgtcagacagctgtgtcaagaaagcttttccagttcagcccttggcttgaaaaaactcttggatgttacatgttccagcttgtctgtgacccaggaggaggcagaggaactgctccaggctctgcaccgcctcactaggctggtggcattccgtgacctgtcctctgccgaggcaattctggctctctttccagaaaatttccaccaaaacctcaaaaacctgctgacaaagatcatcctagaacatgtgtctacttggagaaccgaagcccaggcaaatcagatctctctgccacgcctggtcgatctggactggagagtggatatcaaaacctcctcagacagcattcaggccgcatggccgtccccacctgcctggttccagatgaagatccaagaagatcccagcctatgcggagacaaaccctccatctcagctgtcaccgtggagctgaggcaaagaaacactggacaccatgttagatggcctgggccgcatccgagaccaactctctgccgtggccagtaaatgatccagccagctgccagggccactgccatgacccagctgctcatgagtgataaatgtctccccatatgcaggctgcccttgcagctgcagctgacaacaggcaggatggtggggacagcagggggctactgccatccagaagttacagttggattgggaagaagcagccagatcccccgctgttctcactcatcttctttctctttctgaagctggagagcagaagcccccatctttgaaaagctcctgagtgcaacttaattaccaccatggcagggtgagggaacatttgcatcgtcagctgcctctgcatagctgtttgagaaattcaggcccaaatcatgcagcctatccaataagtaagtttatttccaacattagctctaattagttcatttccaatcccagaacacatggagggaatcggacaggtgatgccagcagttcctgctcctctgtcagggaagccaggcagagcccacagagcatggtccatccagagtgttccctgagccccctccaccatactggaacccctcttcagtgtaggaagtctgaaatgggtgctaattcccttcttcatgaaaccagggccctcttccttcatctaatgcagccactcctaggtgaagaagtgggaataattggaaataaacaacagttctaaaacttcaaaaaaagtcgacgcggccgcaagttta

SEQ ID NO: 57943 - DNA, 1779 bp, Homo sapiens
tttttttttttttttcatcgtttccatacagttttatttgcaatttgttggaaccatggagaacaatcggcagatacacatgttgcttctgggaacagcattcaactccagatgctttttctgctaaggagcagggccacaggtggccctcacacccagtgctgtgctgcgcggagggctgtactgaaggttctgaaggcctggtgagtccccctcacggccagaaggagagacccggcttcggcttcatggccggcctcccgcaggtgtctgcccagctcctctgcatcccagcgcccttgctggaggctagccaagaggtggtcaacaatacgtggatagaagggagtggagacacacttcaccagcagcttggcatccaggagcagggaaagaagttcttggtcacaattggaatcattcaccgtagtgactgccgtgatttgctccagtgccatctcgtgcagatgctcatctcggctctcgaggagaagtttcagagatggaagcaggagggactggttaagcagcagcagacacagctccttcacaccctctgcaggcagcatctgcttggtgttatacaaagagcgacacattttcaaaacttcattccccaatccttccttgttctccatcgtacatctggttagcatcactgtagctagtctcacccatggattattggttatgacatattcacttttcataggtggccaagcttgcaaaagtaaaaccaagtgctgaaattcagcctcgtggtgactagattccaggagttccatgaatagacagtagcggttctcttcattctcaatgtcagctatgtctacctgtctctggggccaggaggctttgagaatggcttcagttctaaagaacacgaggagcttgctgtcctcctcagtcaggtgaaatgattgccccaaaatctgcagcacgtgaatgccgcggccgcaccggccaggcgtcatcagcacagaaaggccgcagccactccagcaggtcctcaggtgaaaaccagctcctcacccttgtccacactggcgtggaactgctgcaacaacaccttccaggaccttcagtgggtccccttggcccaccaaggtcagcactgcccaccactcaatgcagaaattattttcatgattgcactctgcactatatccttgggtgagatgtcaagagggccaactgccacctctagcagctgctgaatcattgctagaggctgaccatctaaacaaatagccacagcttcatcatgaagtttctctttttctgatcgggacagatcatagaggtgactgtatttttgcagtgtttcctgctcactattcttcagagaaaggatgaagctgtggctcagggtttccaggtgggcaagtgatttctccagatgattcaaagtatctgcataggtaactttagaatccttagcttcttgagcttcgtcttctgagtttcttttccttggcttctcaataaaatgtttgactgtcttaatagcctttctagtcatctctttacgggcttccacagacagcttggtcacagcttttggagaaaatgtaactgcatctaccacagtgatgaggtcacctgggtggagacgatcaaagtacttcatgcagacatcataggcatgaagccactccggtgaagagcctgggacttgtttaatgagatgagggtctccagtccagaacaacttctgtaaccagatggtgtacagagagcttggggaaagcatctgtccatccttttcagggattttgg

SEQ ID NO: 57944 - DNA, 1064 bp, Homo sapiens
ggctgcgctcaggcccgtggatctcatcgaagatggcggcgcgatctgtgtcgggcattaccagaagagtcttcatgtggacagtctcagggacaccatgtagagaattttggtctcgattcagaaaagagaaagagccagtggttgttgagacagtggaagaagtgaaaaaagaacctgttttggtgtgtccacccttacgaagccgagcatacacaccaccgtgaagatctccagagtcgtttggaatcttacgttaaagaagtttttggttcatctcttcctagtaattggcaagacatctccctggaagatagtcgtctaaagttcaatcttctggctcatttagctgatgacttgggtcatgtagtccctaactccagactccaccagatgtgcagggttagagatgtttttgatttctataatgtccctattcaagatagatctaaatttgatgaactcagtgcgagtaatctgccccccaatttgaaaatcacttggagttactaagcaattcggaagagaaacacattgaaatcactgtctttccctgagcaagggggctgctcattagatcttttgatactttaccatgtgaaatactaccagaactgttctctaaacccactttttctgtagaggaatgtatcatctttttttttctcatattacaaatggacaaataacggactttctattttcatatttgctgaaaccattttttaaatgaaattaggtcattatttatgaaaagttttgagagggcactgtcaacttgggtttaagacaggaggacattgcaagttcacacctttcataagcataaagtagttgcaagaaagtattttcatcctgttaggattcatatctaagatagagttatgcattgcacatacacaaataaacttttattagatagatacctataaaagaaacataaaagtatgttgtgtattactgacagttctagattaatttcttttagaattaaagtagatttgttaaagtgtattgtgtgttgtaaattttttaagtgaaatttgcaacacacaatacacttt

SEQ ID NO: 57945 - DNA, 3365 bp, Homo sapiens
  misc_feature (1)...(3365): n = a,t,c or g
tttttttttttttttacagtttgaaacagaaatttattctcagaataatgcacagaagcacaggttgaggctactcttgggaagcttccctccccttcctcttcctcctctccctcctctctgaatgccagggagaacacagttgaaggaaggaaacatgcaatcacaaacaatgaacaactctaaagacaaaaaggtttggtccaaaagaactcaacataattaatccaatgactgtgaagagcttcactgagtaggattaagatattgcagatgtagtgtttccacagggtggctcttcagtgcaccagcggggcctgcttgaggggagatgaggactgagcgcatgcgggagacatctttggcctgcttgctagacttgggggttaaagtcacacagccgggccacccgttcccactcagtgcctggggacgactcgtcaatgtcatttacaaaggcttcttctgctgccctggaagcaacaacaaaatatgttggtttatgcagaaccccctttgagcaacctggtggctgccttgctacacaagcaactgcctatttgtccctttcttaatgacattctggctttcccaagataacagcccctggcccaggtcagactcaggtagacacgtagctggctctcctaggcacagggtgcccagaccgctgtgtaaaatgttggaatacaggtgtttggttcaaggctcactatgtctctctgtctgtctctgctcctgtggagcattaataaaacaagtccttagccagctacacactgcttttattaataagaacaaagcagcaggctgatcaagaacttgagtagtttatgctgggctgtactgaatttcaaggaaatttagagacttctaaaaagcccacagatcattgcacaatagcctctagatttattcctaaggctggagagaaacggggcagatcaaaaggaattcaagacaaagctcccatgctagcaagcactagagacaaaaaccattctggaagggggtttgttaggacattctccagttcagccaaaagtttgccattttccctccagccaggtgccttggggccactcagggcacactggcaggagagccaacgtgagttgctttttggcaggatgctgctccaacattctttcacatcaaggtcagcccacccccagttcggaattaactggtgggagctacagccggaaaggacagcgctaagacacactatattcatctactccaacaagcatcacgggcaaagaaaagcaatggagatgactggtctgtggggactgaggtggcactatcacagggatggccgtggcaaacaccgctgaagcccagagccactacaacactgcgacttcatggcacacacagttaggggcagtgagaaaggtttacttaactgttctaggctgtagcaaggatggtttatgtttgtgcttaaaggtgaagagaagaaaagaaacgagagaaactttaagtcagatatagaaaatgagaatgagctcaatgcagatggtcagtaagctggacatgcccttgccactctatctgtgcttggggacgtgcagctggctttgctggccacccagctgcccagcaaaaccagactcgacctttccagtctccatttctactccagagagaatgtgcagaaatcaaatcaaacaccacctgtaagtccagcatttcacaagtctcactgcaaatgcatctgggggcccaggaaacccagttctatcttctaaggggatgaacatctcaaggtcataggccctgagaggctctacagacctgagctcatcgcccaccttccacaggttcctctcctcttccattccacccttacttctcatgtaaagccagccctttttttaaggaggagacaatgagaactgtttccaactcttcagcaatactgctttgataaaagaaatcnnnnnnnnnnnnnnnnnnnnnnnnnnnnnnnnnnnnnnnnnnnnaaaaacaccttctccagagaagatgcaggtttcttttgggggggtcagggggagaagcccaagtggcccgtatcaagacactttgactatcctgatctcaaagctgggggcttccctgtgctaggagacaggacatcagaagctgaccactaaatagcaatttctgacatgcaagaccacagaggaacaattatagacacccactggagacaaccccctctgctctggactcttctgcctgagggagaggcaaacgaccccacattgtttgaatgaaccaagtatggaataatgctgccccacagctctgattttggcaatgcaaggtgctgctgctcactggctcctaaccacctgggactgccacctgctcccaggtggggaaacctccttcccacctgaggcaggcaggcaaaagggcatggcagcagtgatggcagccaagagcaagagagcagagttcccccgagcctcaaaccgttcccagataagatcgcaaatgacacattttgaaagcgagttagctttcttccctccaaaaccccaaatatgaaaaatggccatcagaggatgcagggagtcacaaatctggaagattcatcaacagatcataccccgcttatcaattcttaggcagcccccaaagtgccaatttgaaataatttaaaaagcaaagcaacttgtgacataaaaggagcattaactctaaacaaaagtagaaagaatcagatgtagaaaaaggaattagttttgcaacatacacataaccaatcacgtcagcgaagggttgtttgtagaaagcttcatctgccaccctgttgtttgcttttgttttctgtagctgctcgtcctgtcttgcataccattcttctagctcctttattgccttttctttccactctgcttcttgcttccgagaattggcatcaagggcttccaagcgttccatttgttcttctctccatttacggatactttcaggctctgactgcaatcgatccacttgtgaaatagctgcataactgtctgttggaccattactttcctggtagtattcaccattcattactccatcaacagcatccggaccccccggcggctcgccgtgcggctggggcccgggggcgccgccgtccaggatggcgaaggcctcgtcgttctcgatgcccgcaatctcgctctcttgctgcgccaagaaggccgcagccgggtcttcttcgccggcgccggccactccgttccccagcgcgggaccgccaggggcgccggcaggggcgccgaacggatccagctcagccatggcgggcaactgaacggcacggacaccaacggtgagacaaaaaccaaccgacccaccgacaccacagcggtggc

SEQ ID NO: 57946 - DNA, 545 bp, Homo sapiens
ggccgggcagggcgggtaagttgtcgtaggggcccggtccgtgagggactgctaaggaagaggctgcatggcgcggtagtcccccgagtggaggtcggctgcccctgggaaaccagagagtcggagggagtccatctggagcggccaagtggtgactctcaaaaggaaataggatcatggcagcagatgatgacaatggtgatggaacaagtttatttgatgtcttttctgcttctcctcttaagaacaatgatgaaggctcactggacatatacgctgggttggacagtgctgtttctgacagcgcttccaaatcctgtgtaccatcaagaaattgtttggacttatatgaagagatcctgactgaagaaggaactgcaaaggaggcaacatataatgatttgcaagtagaatatggaaaatgtcaactacaaatgaaagagctgatgaaaaagtttaaagaaatacagacacagaatttcagcttaataaacgaaaaccagtctcttaagaagaatatttcagcacttatcaaaactgccaga

SEQ ID NO: 57947 - DNA, 1420 bp, Homo sapiens
tttttttttcttgatgcaaatgtttttatttgccacttaaactacagtttccctgtgctatcctgatggtgtgggggtgtggaacaggctgctggaaccatggtttacagtagtagcaggtagatgattagtagcatgagtggtgaaatgctgcatctaagtgcctgtcactttgctcccaggggaatatcatgcagcccaggaatagtgttagactgggaaggactgtggcaggaacagtcactgtctctcctcattttggtgaggaatgggtcccacataatggagagctcaacagaagcatccagtcttgttctgaatggagcaggtcagtgggcagcagcctcttgctttcatttacccctttgggctgcttgcctaaagtctctcttccttcacctccccaggccttttggcaagagggaagacactgccattcctggctctttccctggatcagtgtctgatctggtggaggtagcttgtggggcctgacttcctccagttccggcggatcctggcacttttcttcctagagtgcagatactgctcactggaggctgtctctgtggcactctgtgggttggccagtgcagagtggggctccaggattctgaggcggctgcagtggtgtagcgagtggcccagggggtttctgccttgggggcctcttcctgcgcagcctcttgagggcctcagccacacggtggtcccctgcacattcccagatgatctgtgcccgttcctcggccaggctggtccccgctgcgttgaaacagggcttggatctgcagcagctcggcgtcctggaagatgttggccgaggcctgcttgcggccccgggcctcaatcggggcctgccaagggggtggctcactgaccaccgaggctggggtacccattgtggatgctcacactgaagggcagctccgacagacctcaaatggggatggggcaagctaagatgcgcccactccaacctcttccacagccttcagaaagggcaggcgcagctctgggcttcctgctgcgaaggtgcttacaagggccagtcggtgatcacgggcagcacaagagcatggcagagggtatcctggccgaggtcctaaggcgacatctgcagcacgaggaggccccgggactcagacgtggccgcttcgcagaacgacggggtcctaagtggatctggcggtcgcgtcccgctggcaccccggctctgactgtcgccctccggctcccaccgcagcgccgagctgggccgccgacctacgtacctggttgcttgaggcaggccgcacgcagccccaaactggtccgggccacttgggtcacagccgcggttcccgggagaaagcgctccctagccccggaacagccaatcctcgccccagccaggtatgagctcccaggcgagccttcc

SEQ ID NO: 57948 - DNA, 1342 bp, Homo sapiens
ttttttttcatagtgggcaccatttattggacatttgccatgtatcagaagctgttccaagcactttatttgctttatctcagctcctctcagcaaccctatggggtaggggatatggtatccctgttgtgtagacatggaagctgaggctcagagagtttacatgcaagggccactttagctaccaggctgactccaaaatccatattcataagtgctagactgtttagctactataaatccctgtaaagtagtgtcactagcctgtaggaccaggatcaaaacaaaacaaatggccacttcagaaatcttgccttcatttgttgccacgatggatgcaagtaatttttctttttggcaggtgctgtgctcttggctcagtaacagcccaaattatgaggagatcaccaagtggtacctgggttggaagtcgatgttctcagaccaagtgctggcacatccatctgtcaaggacaaatttaatgaggcacttgatatcatgaaccgggcggtgtcctccaacgttggtaagtgaggattcccattttggatgtcctggccccaagtttcagattttacacatgtaaatgacacagaatcagagttttctggttcctgtaggcagcctaaaccttaggtcacacttttgcacatagcaacagactctcaccctgctgactggggtacatggtcagctgggcacccactgcccaggtctaccatgactgagaggggcatcttccctgagtggagactgacttaagctggattcagatgatgtcagtctaaccccaggccccgccctcttaaccactgtgctgtgtggccttttaaggctcattcatgcctgagcatgctgcttaggtgacgcatcttacagtgtggagtttggcacgcggtctgacacttggtgattgctcagccttaatcagccccattttacctgttaaacagtaagatctactttataggctaaaagggagagtgagttcatgcttgtgtatagccttcaataggtggtgtctgtgttgtcaaaaacaggcagttcactgttcgtgtactatatctattcccaagttctaggtaagtcattctgcctagatcataagtaagtgagagtatatttatgtttctacatttgggagcctatttcaaccagtcctgtgctccagtgttgctcattagccgattcgcagcattgaaatgggatcgtctagtctgtgttttacagataagcccagcgaggctgagagcctgttcaaggtcacatagttaaagggtggcagttagaactggaatttctatttcctgagtctttaattcttgttatttaatagcctag

SEQ ID NO: 57949 - DNA, 2290 bp, Homo sapiens
ggtcgactctagaggatccgctttttttgaaatttgttggatttatttctttctttctaaagtttgtacatttacatgtatcatatacatattttaaatccttcactattttgcgtgatttctattacataaaaaccatttaaatgcaataaattttgttgccgtaaaacaacaaaatatccccaacttataaaaacacagggacaattatattcataaacatttacacaataaatgtactctatatatcacaggcttctatacatatcagatgactcacttgtctacaagggtttaggatttacttgaaccaacagtggaaataggggtaatatttatatacaactattttaataaaaaataaagcaattgtaaaatgtaaacttaattgtcaaaatattctttaaacactttaacaatatccacacaaattactgttcctttcaaaagaagaccaccacaaacgccatcgttttctagaagacggcatttccagaatctggtaggtggtgatgaggaacaggtttccagtacgtgttatagtaccgcccagcttacccaaaactgctaatgccgacagtttcgccattgaaaaaggagcaggctgctattttgacactaaattactttcacaatttgcaggggacatatggcaccaggactgcaatagaactgaaatggattgggtggagaaaaactttgaaaggtaaaagaaatgttcccacaatgcccaattagtttgagcccacagtgaatataactcagttattataataggctggaaaagttaaaagcttcttttatattaaaagatacaaattatcgcctttctgcctgtcctatggtaatcaaggctgacaatataaattctccgctagtgtacatttagaaatgggttcctaaagcttgagatataagagactgcagggaggtggttaggcctttacctaacagctctgatctggactgaacaaagctgctaagctagcacttgagtattcctcgacccttcccctagaaaggaaacgttagccatttccaggaatctgggtgtggaggcaaagatatcgtccgtccgtagttagaactcagggtgccagtttgttttttgcaaaggtaaaatacgtggtgttaacttcactcaagagaatctttgtccatgaacgtttgttcatgtgcccacgcctccagtgactcagtcactctcggagttgataccttgcctcagcagggtcacgctatcaggacacctggatccctaaagcaggggaagtggcatttgaaaccccaggctgtccttgctgctcagtagaagcctgagtgaagtggcggccgggggagaggttcctctttgcagagatgatgtgttatcaccactctctggcagggctctggtgttcaggactcagagcagtgagcctcagacctgcagtgtggtccttaatcgagccttgggctgggactcttctaggagcgcctgaagacttatttatggcgaccgatgggaaaatattaagtgaaaactccaaaattctctccattaaccaacattttcaggaattgaagttagggtgcttatttctataacactattcctaagagcttagctcctctgccctgcaaagggaaatgcattttagttcggttcctttccatttccatcctcgctgttgttgctgatggaaaagtgctcaactgctcagcatgttcagtcggagctctcttaccagtaaagctcagaggggagtgtggacaaggcacatcagtgctcctacaggaagtgcctccttgtttcttcacttgtactcctctctcaaaggaatgatctgcagagcaagcagctctgccaccttggaaaatgatgcacaccagcttctgggacttcacccaggctacggagagatgctggagagctgctgcttgtgaattacaagaaagccttcaatttggtggtccacaagaaagaatgtgatatggatcccctcatttatgtgttaaaaatataatgcatctcaaagtcagacactagagctcagattccaccctggcccttggaaaacatctgtgatgcagtttccaccccctctgttcatcacctctttagaatattctggctctttgcatcttaaggtcttatgtttgtataacttaaaacattcactgtgtgtgcatgtgtgcaagcatgtgtacacatgtcagaggtcccagacatgtcaacttttctccttatacacctaaggggacagtcaactggttctgaatctcaggaggagaggactaaccacatgca

SEQ ID NO: 57950 - DNA, 1767 bp, Homo sapiens
gtttaactttagaatttcattttattaaacatacttttaaaacaagcacctcttggcaataaaagcaaaaacaaaaaacaaacaaacaaaaacccaaccaaacaatagtactccttccactctatgctaacggaagacttctcacaccagccagttaaacaatgaaattcttaaacacgcagcctgctggggctgcatgcagagcctaaaatgcaggtgtgctgacttcttggagctggagcagaggaaaacatcaaaaagcatatctggaatctatcacagctttctttcttaagcaaataaaaatgcaaattagtttcataaccacaattcaatttatcaaactttttctgaagaattttcatttaattatgtatacataacaggaaataaaactttttcacaaacactctcaaggcttacgattatcaagaaaatgacaaaagtaaaagcaggaggaatattaaacacatggcggggaggtcaatttccgtttctgctcttaaaaagtaaaaaaatcaccatataattaagtacaaaaacctgcattgaatgacaactgctggtgtatttacttgatcagaaatgaagaccaagaatataataaagccctatgataatattcaccgggagcactcccctcagtgtgtgtacactaacaggttggcaaagtttctggagcattagcttatagaaacacaggagtccttggttagctgcattatatggaacgttctcttctgaaatgcacccacgattcagtttcacttacaaattgcaaactaaagttatctcttcagaaaaatatctgtttggcatctcctggactttgttccattggacagtagggacattttaatttgctaccattaaacattttattcagggcatctcttgatataatatgaccacagaccaatttcatgggtggattgttatctgttgtttgctgacgaagaatggggcaggcaaatatagagtgataccagcactttttaccaaggtccacttcaataggtaattcatctttctggttccaaactccagtacactgcctctgttcaatcacggctttgatgttaattaaagctggcagcgccacacaacctgctgagaaactgacactgagaggggactccacggagagccccaggagggcacaagcatcccgtgtaaagatgtcacagatatcagcccactggtttgcatcaagtaggtgaacatatggtgagttctcaatcccttgtctcaggtacacaaggcttcccatcaaaacctgaatgtctttttgatgatttagggcaaatggctgaaaatttttagcatattgtaatgcctctcgctgatttgtggttccacccattaacaagctaataaaatacagtctgtgtagcttaaattccaaggagctgttttgagctataagcatttcccggtttgacactgcccactccagagcaggtctcagaactctgacctttaatgcctctaatattctatttaactccacaaatggttccttctgacttgggtctacagaaagccagattcctgacagagctcctcagccacatccagcattccttgtcgaaagaagtgctccaccatcacttcattgagaagcctttggctgtctgcctgccagcagccatctattcccacactgctaatgtcagaatcaaaattcttatcaatggcttttccaacccgagaaacactgctgtggatgtctttgtggtcggaggccaatttttgaacagtatcctc

SEQ ID NO: 57951 - DNA, 1041 bp, Homo sapiens
gcttcagcaccaaaaataccactactaatgtcccttcctcttcttccccaaagttagggaagaaatataaacactgagattgccccagagctgcagtgggcagcctaggagtgccaagccatgatctacagccagcactcaaggaggagagaagcacattttcagatcattgagagtgaacatggctgcaactgtgaggaaacataggggagccacatgaccaagcaagactctaccaactgaccagtaagcccaagtgccacctactggatcacatcccaaagcttcagcatcaaaaataccttactaatatactcccctctgaaaccagaaatgagaagtcagcttcaaataaagaccctgcacaaagcctcagcctggtgaaaacatccgaaaataagtctacggactgtactcaatctacactgcaattaaaggaaaacccataggtggaaatgagaagaaaccaatgcaagaactccagtaactcaaatggcctctgtgtcatatgtccttctaacaaccacaccagttctccaacaagagttcttaacctggatgaactgtctggaattacataaatataattcagaatatggataggaaaaaaaatcatcaagactcaggagaatggcaaaacccaatccgaggaaaataagaataacagtaaagtgttacaggagctgaaggataaagtagctggtataataaaaaagaacctaaccgatctgaaagcgccgaagaacacaatacaagaattccacaatgcaatcacaagtattaacagcagaaaaaaaaatctgaggaacgaatctcagaacttgaagattggttctctaaaataagatggacaaaaataaaaaagaatgaacaaaaccttcaaggaggatgggattatataaagaggccaattctacaaatcactggcatctctgaaagggaggtggagaaatcaaacaacttggaaaacgtagttcaggatatcatctttgaaagcttccctaaccttgctagaaaggccaacagtcaaattcaggaaat

SEQ ID NO: 57952 - DNA, 2034 bp, Homo sapiens
ttgtaacaagccagatgattattttggtattgcttgacaaggcaaattgattgttttgacccaggcgtatgacccctgtcgttgaacaagctgtgtctaagatctctacttttcatgagaatctgagactctttggagccaggctttctcggttctcagaggaaaagtatgaatgagtgtgaagtgtatgtgagaacttttgtttgcaatatttatttttgtgggtgtcgacttcctatgtgggctttttgggtgacactcccttaagggttcagtttgacaattctgagagttgtcctgcagttggaggccaccagaggtatctgagctccctgcttcctatttcataatcctccagccccagcaggtccactcctggttcctgtgtgtttggcccgggcacaatccccactgctttgctagacgtgctttctgccatgtggctttgggcctagagcttgttgataattgcagcttgtggcagtggaaatatggctgaatgagcgtctaaatcgttgagaccagtgcaactttgggtgcaaggctttgtttagggatcaagccttttgccaccttgggctggtctttggcctgggtgctcactgggaccccatatgtctgcgtaggagcagaactttccatggcagtaagtgtccagctctgtttctggttctttccccaactccagccccgtccagttgttctcctgattgacccgactccactccaggaaggccatctgaccctgtgacagggcatagctcataaactacccctccctgggatcccgctcctcttcagcctccttccccatgaagctgggctaactttctaagtcattttgcttagaaattcagtgtggcccataccctttgtcctcccagcctggcatccaggcagggacaccctcacaccaccagccccagggagcttccctgctataaacacagacccccttgtctttgcctctgatttttacacagtgtagagtggccagcagtgaacaggttgaggatgtgcgggtagatagataactttgggtctggtttgtgtctgtgttcatgtttgtttaagggatatgtgtgactgtgggtggggacgtgtgcttgtggggccacaggtggcggcccctgctggagcccggctgggcgcagcgcctatgtaggacgggtgttctcagtgacctacctcccaggctcctctgcacctgcaaaggaacaggagtgagtcgtgactgacaggggtggttgagactagactaggtagagtagttaccaggagatgtgaatgtgccgtcaggtgatggatgggtttgtcaagggaatcgttaccgttttataccaaaggtattaacatgggcagcctttgacacatgtattccaaaaacgagtttatattttcaaacggtttttacagcttagactttgtacttactgccctgcctgtgacagttgtatgccttcattttgtatccaacagcaaagtctacaataaaactttaaaacaatcatgactgaatgtcaaaatcgtgtattgggcagatgctttttaaactgtcgtgtgagaaacttttatattaggccatttggatttaattaagtgctaaggaaagagggcttacaaaatgtttcgtaaatattttatactgtttaagtgttaaacaccaaccctgtctttcttttgggttgagcttttttagaaagtcgaagtgaatgttggccaggaaaatggaaaagccattgtataaatttttttttgaggcggagtcttgctctattggccaggctggagtgtagtggcaccatctccacttaccacaacttgtgcctcctgggttcaagcgattctgctgcctcagcctcccgagtagctgggattgcaggtacccatcagcccatgcccagctaattttgtatttttagtagagatgggtttcaccatgttggccaggctggtcttgaactcctgaccctgtgatccgaccaccttggcctcccaaagtgctgggattacaggtgtgagtcaccacacctg

SEQ ID NO: 57953 - DNA, 1110 bp, Homo sapiens
cccggaagtacttgttgcctgagcagtgggctgcttaggaagagaaggtcagagttcgcgggggcagaggcattcttgccgctggcccagtcactatgtagtggaggggcagacaccctcccgcaaattctggaaggttcttagtctcgactagggcagtagccccaggactcctagtcgccggcttcaggtcactgccggctgaacggagctgccgtcgccatgtttggctgcttggtggcggggaggctggtgcaaacagcttgcacagcaagtggcagaggataaatttgtttttgacttacctgattatgaaagtatcaaccatgttgtggtttttatgctggggaacaatcccatttcctgagggaatgggaggatctgtctacttttcttatcctgattcaaatggaatgccagtatggcaactcctaggatttgtcacgaatgggaagccaagtgccatcttcaaaatttcaggtcttaaatctggagaaggaagccaacatccttttggagccatgaatattgtccgaactccatctgttgctcagattggaatttcagtggaattattagacagtatggctcagcagactcctgtaggtaatgctgctgtatcctcagttgactcattcactcagttcacacaaaagatgttggacaatttctacaattttgcttcatcatttgctgtctctcaggcccagatgacaccaagcccatctgaaatgttcattccggcaaatgtggttctgaaatggtatgaaaactttcaaagacgactagcacagaaccctctcttttggaaaacataatttgaataaaataatttttaatggattctgaaatttgtcatgttttgaagataactgactccatctaaaagtatgaggtcaaaggatcacgaaacctaagtttaaaaactgcttagagactgaagcttaattaaaaatctttattaaaaattaaaaacattgaaaaatgaaaatatgttcatcattaaagacttttttccccttaagcttaaaataccattcaaaggcaagacattttgttttggctatgattcattttttttacttaaaaataaaacctataccaaacagt

SEQ ID NO: 57954 - DNA, 1360 bp, Homo sapiens
  misc_feature (1)...(1360): n = a,t,c or g
cggccggagcaagcgggttgttattgaagatgataggattgatgacgtgctgaaaaatatgaccgacaaggcacctcctggtgtctaactcccccaaagacaatgagttaagggagagaataagaacggcggtaacagttattggcaaaaagcatgaaaagagaaagcactttgaaatttattactagcttgctacccacgatgaaatcaacaacctgtatctggtatcaggccgggagacagatgaggcgagaggaggaggaggaggaggagaaggctctgggctcctctgcaaaaataaaaataaaaaaataaataaaatttttaaaaataataaaaatttcactatattacacatataaaggaaattaaaaaagaagtctccagttggcagctatttgtcaaaattaatatccatttctttttatatacggtgaatattgcgcaattatagatctggattttgaaccacttaatgaagcggcaacaccaggtgttttgaggtgttggcattcttcgctgatttggctgttcccaatgtttacattatttaatcttgcaaaaatggttctgtgcacttggatgtgaaatgctgtccagttttattttttttatgttgttatccttggatgtacaaaaaattcagaaaatgatctctgtagatattctgttttattttggtcatctttagaagttatcaggaatgtgtttaaaacaagaagagaacttttctaaggaatgatacatagaaaagattttattttaaaatgagttgtaaagcttgtgtttctttgttgctgcaagctatctgcccaagttaatgcaaatggacacattttttatgtcagnnnnnnnnnnnnnnnnnnnnnnnnnnnnnnnnnnnnnnnnnnnnnacaaaggaaaaaaatgcttgagcctttttctaacttccccttgcagtctgttgtgtgagcagcctgtttatttctctaatattatgtcagtttattctctttaatggactgtaaaaaaatgtaatcacaagagtgccaaatatcttgaaatgccaaaaggcattttagtttcttttctctgtgctctgagtccacgtacaggaatgcttggagtgtcttttctgttatttatagggattctcttaaggcacaccagctgcctgttttgcatggtatttgcaaaaatgcctcttgcgtgaggaaatcttttaccattttttgtttgcaactttggacctcaagaggtttcccttcccttccccgttccctcttttcttaattcaatattctgtatgttgcaccttgaaccagcacacagggctatttctccaatgtacaataaaagaattgttcctgtgtctcaaaaa

SEQ ID NO: 57955 - DNA, 701 bp, Homo sapiens
ggaagaagttacactttgaaaaggacgtggacgtcaacctgtttgagagcacgatccgcatcctgggggggctcctgagtgcctaccacctgtctggggacagcctcttcctgaggaaagctgaggattttggaaatcggctaatgcctgccttcagaacaccatccaagattccttactcggatgtgaacatcggtactggagttgcccacccgccacggtggacctccgacagcactgtggccgaggtgaccagcattcagctggagttccgggagctctcccgtctcacaggggataagaagtttcaggaggcagtggagaaggtgacacagcacatccacggcctgtctgggaagaaggatggggctggtgcccatgttcatcaatacccacagtgggcctcttcacccacctggggcgtattcacgctgggcgccagggccgacagctactatgagtacctgctgaagcagtggatccagggcgggaagcaggagacacagctgctggaagactacgtggaagccatcgagggtgtcagaacgcacctgctgcggcactccgagcccagtaagctcacctttgtgggggagcttgcccacggccgcttcagtgccaagatggaccacctggtgtgcttcctgccagggacgctggctctgggcgtctaccacggcctgcccgccagccacatggag

SEQ ID NO: 57956 - DNA, 1723 bp, Homo sapiens
gaacgaggaaggaaaggcggtctggggagagagcggcgagctggtgtgtactaagccgatcccttgccagcccacacacttctggaacgatgagaacggcaacaagtacaggaaggcgtatttctccaaattcccaggtatctgggctcatggcgactactgcagaatcaaccccaagaccgggggcatcgtcatgcttggccggagtgacggcaccctcaaccccaacggggtgcggttcggcagctcggaaatctataacattgtggaatccttcgaggaggtggaggacagcctgtgtgtcccccagtataacaagtacagggaggagagggtgatcctcttcctgaagatggcctccgggcacgccttccagcctgacttggttaagaggatccgtgacgccatccgcatgggcttgtctgcgcgacacgtgcccagcctcatcctggaaaccaagggcatcccgtatacgctcaacggcaagaaagtggaagttgccgtcaaacagatcatcgctggaaaagccgtggagcaaggaggtgctttctcgaaccccgagaccctggatctgtaccgggacatccctgagctgcagggcttctgagtcagactggctggcgtgtcactcagccgcacccgtgtgcactgtaacttttgtgtgctcaagaaattatgacagaaaccttacagctgttgtaaaaggatgctcgcaccaagtgttctgtaggcttggggagggatcgtttctctgttttgttaaatctggtgggtacctggatcttccacacgagtgggattctggccttcagagaccaggagggagtgtctgggccgcaggtgttggcactgtggtgagagtgtgtgtctttgcacacacagtgcagcgggaacggtggggctggctggtgctgaagacagacacactcctgagccaaggtcttgtcttcaacctccccgtcccgttgtcccattttgctctgtgaaggtgcaaatccctttcttcccttcccatctcaggctctcctgttttccctcagggtccagtatgcctttgagctttagctgttagaaaggaacccccgtgacttgacacagctttcacagctggctgctaggaccggcgggctgggtgttcacgtgtgtctgtgtcatggatgcaatgcaggccctgggaggactgtgcgtcacccgtcaaccagagcgtgcctccgggccagcttccctccaaggaatggagtggatttcaaaagggaaccctttaatgcacagactgaatggctttacatgtttctaatgtgaattaggcatgtgaagcagtgggtgtcccacccgtgtccctcatgggtgagccctccagctgtgagcccaggcagtgtggtcaccgagtgaggaccctcctcaccaggaaccgcatccctgtgctgcctccacctgagagttgctagggggttcttgtcgagatcatgtcatcagcacccctaagtcaagtcacgggtttccatagccaggcagttggtatgtacaattcagttcagcgtatgaacttgtatctctaatctgatgtccatttttatattttttgaaactgagcacaatgaaatcctttcttgaatcattttccttttggattataaaaatatgggggaaagtgctatgatgaattttatgcaataaatgtatacatgtgtgcacatgcacccatgctgtgaaaaataaataa

SEQ ID NO: 57957 - DNA, 2371 bp, Homo sapiens
  misc_feature (1)...(2371): n = a,t,c or g
ggcctcgcgcccttactggtgtctggcccagcccgggtcgccccttccgcagtcgggacttggggcaggcaaaaagccgaacgttcgccagactggggacgcagcgccgccctcgctccacccctctttcccgcccaccaggcaattccaggtgaccaagatggagttttctggaagaaagtggaggaagctgaggttggcaggtgaccagaggaatgcttcctaccctcattgccttcagttttacttgcagccaccttctgaaaacatatctttaatagaatttgaaaacttggctattgatagagttaaattgttaaaatcagttgaaaatcttggagtgagctatgtgaaaggaactgaacaataccagagtaagttggagagtgagcttcggaagctcaagttttcctacagagagaagctagaagatgaatatgaaccacgaagaagagatcatatttctcattttattttgcggcttgcttattgccagtctgaagaacttagacgctggttcattcaacaagaaatggatctccttcgatttagatttagtattttacccaaggataaaattcaggatttcttaaaggatagccaattgcagtttgaggctataagtgatgaagagaagactcttcgagaacaggagattgttgcctcatcaccaagtttaagtggacttaagttggggttcgagtccatttataagatcccttttgctgatgctctggatttgtttcgaggaaggaaagtctatttggaagatggctttgcttacgtaccacttaaggacattgtggcaatcatcctgaatgaatttagagccaaactgtccaaggctttggcattaacagccaggtccttgcctgctgtgcagtctgatgaaagacttcagcctctgctcaatcacctcagtcattcctacactggccaagattacagtacccagggaaatgttgggaagatttctttagatcagattgatttgctttctaccaaatccttcccaccttgcatgcgtcagttacataaagccttgcgggaaaatcaccatcttcgtcatggaggccgaatgcagtatggcctatttctgaagggcattggtttaactttggaacaggcattgcagttctggaagcaagaatttatcaaaggaaagatggatccagacaagtttgataaaggttactcttacaacatccgtcacagctttggaaaggaaggcaagaggacagactatacacctttcagttgcctgaagattattctgtccaatccaccaagccaaggggattatcatgggtgcccattccgtcacagtgatccagagctgctgaagcaaaagttgcagtcatacaagatctctcctggagggataagccagattttggatttagtaaaggggacacattaccaggtagcctgtcaaaaatactttgagatgatacacactgtggatgattgtggcttttctttgaatcatcctaatcagttcttttgtgagagccaacgtattctaaatggtggtaaagacataaagaaggaacctatccaaccagaaactcctcaacccaaaccaagtgtccagaaaaccaaggatgcatcatctgctctggcctctttaaattcctctctggaaatggatatggaaggactagaagattactttagtgaagattcttaggcagttttataaccctttttcctcaatagcctgtttcctgtttttaagattttgcctttgttgttgaaaaaggggtttcactctgtcaccaaggcttagtgcagtgacacaattacagctgattgcagccttgaccttcccagctcaagtgatcctcctacctcagcctcccaagtagttaggaccacaggtgtgcacctcatatccagataattttttcaatttttttttgtagaggtggggggtctccctatgttgcccaggcagatctcanactcctgggctcaagcgatcctcacacctcagcgtcccanagtgctgggattacagttgtgagccactgtgcctggcctttttttttttgtttaacttctctcttcactgcatcccaatccatctacaggcatgcacacttattaggaaaggaggtttgaggtaacaacagagactttcactatattttgctttgacagaaggaaagaggaggagtttctattaaaatctgtcacttgagtgatgtcatttaagtcctattttaggagataaaaacagctttggggactggttaaagtcccccagaaactacaataaagaacaacttttgttttaactcttaatcactttgtaattttgactcaatccttttctggaccatttttgttaataaatatcaaagtgtaa

SEQ ID NO: 57958 - DNA, 2693 bp, Homo sapiens
  misc_feature (1)...(2693): n = a,t,c or g
acccgtcagactcctccttcgaccgctcccggcgcggggccttccaggcgacaaggaccgagtaccctccggccggagccacgcagccgngcttccggagccctcggggngctggactggctcgcggtgcagattcttcttaatcctttggtgaaaactgagacacaaaatggctgcaaataagcccaagggtcagaattctttggctttacacaaagtcatcatggtgggcagtggtggcgtgggcaagtcagctctgactctacagttcatgtacgatgagtttgtggaggactatgagcctaccaaagcagacagctatcggaagaaggtagtgctagatggggaggaagtccagatcgatatcttagatacagctgggcaggaggactacgctgcaattagagacaactacttccgaagtggggaggggttcctctgtgttttctctattacagaaatggaatcctttgcagctacagctgacttcagggagcagattttaagagtaaaagaagatgagaatgttccatttctactggttggtaacaaatcagatttagaagataaaagacaggtttctgtagaagaggcaaaaaacagagctgagcagtggaatgttaactacgtggaaacatctgctaaaacacgagctaatgttgacaaggtattttttgatttaatgagagaaattcgagcgagaaagatggaagacagcaaagaaaagaatggaaaaaagaagaggaaaagtttagccaagagaatcagagaaagatgctgcattttataatcaaagcccaaactcctttcttatcttgaccatactaataaatataatttataagcattgccattgaaggcttaattgactgaaattactttaacattttggaaattgttgtatatcactaaaagcatgaattggaactgcaatgaaagtcaaatttactttaaaaagaaattaatatggcttcaccaagaagcaaagttcaacttatttcataattgcctacatttatcatggtcctgaatgtagcgtgtaagcttgtgtttcttgggcagtctttcttgaaattgaagaggtgaaatgggggtggggagtgggaggaaaggtgacttcctctggtgtttattataaagcttaaattttatatcattttaaaatgtcttggtcttctactgccttgaaaaatgacaattgtgaacatgatagttaaactaccactttttttaaccattattatgcaaaatttagaagaaaagttattggcatggttgttgcatatagttaaactgagagtaattcatctgtgaatctgctttaattacctggtgagtaacttagaaaagtggtgtaaacttgtacatggaattttttgaatatgccttaatttagaaactgaaaaatatccggttatatcattctgggtgtgttcttactgacaccaggggtccgctgccccatgtgtcctggtgagaaaatatatgcctggcacagcttttgtatagaaaattcttgagaagtaactgtccgctagaagtctgtccaaatttaaaatgtgtgccatattctggttcttgaaaataagattccagagctctttgatcgcttttaataaactgcaagttcattttaaatgaagggccagcatatatacttgcaagataattttcagctgcaaggattcagcaccagttatgtttgaatgaaccctccttttctctgagattctggtccctggaaatccctttctgctagtggtgagcatgtaagtgttaagtttttaatctgggagcagggcataggaagaaaatgtcagtagtgctaatgcattttgcactagaacgcttcgggaaaatattcatgcttgccatctgttcatttctaaatttatattcataaagttacagtttgatacaggaattattaggagtaattcttttctgtttctgtttataatgaagaacactgtagctacattttcagaagttaacatcaagccatcaaacctgggtatagtgcagaaaacgtggcacacactgaccacacattaggctgtgtcaccattgtgtggtgtacctgctggaagaattctagcatgctacttggggacataatttcagtgggaaatatgccactgaccgattttttttttttcctctttgcagtggggctaggacagttgattcaacaaagtatttttttcttttttctcagtcctaatttgaacaggtcaaagatgtgttcaggcattccaggtaacaggtgtgtatgtaaagttaaaaataggctttttaggaactcactctttagatatttacatccagcttctcatgttaaatatttgtcccttaaagggtttgagatgtacatctttcatttcgtatttctcataggctatgccatgtgcggaattcaagttaccaatgtaacactggccagcgggcccagcaatctccatgtgtacttattacagtcttatttaaccaggggtcctaaccactaacattgtgactttgctttgagacctttcctctcctgggtactgaggtgctatgaagccaactgacaaagatgcatcacgtgtcttaggctgatgccactacccgatttgtttatttgcaatttgagccatttaaagaccaataaacttccttttttaaaatgttaaaaaaaaaaaaaaaaaaaaaaa

SEQ ID NO: 57959 - DNA, 838 bp, Homo sapiens
tggaggcggtagtggtcgtgcctgtgtgtatcagaagggataggtatcttgcctcctttctctcaggcagtgcaaatcaccctgtggaaaaccgatggacaggaaggagtgttacacactgcttaccctgatttattcagtggttttgttttcattctggaaccatactatcaaatggcgacagactgttccgttccacccccgtgaagtaatcatgcaccgtgtgaatagtatcaagcaggattgctttcattgtatggagcatgaccagcgtgtgactcattctgacatttcagatcctaagaattctaagaacactactagaagcatttgttccctcctagtcaatgcttcatactttttcttgggattcttttagcccttgacattcttgtcccccaaacctgtaagtaggtgaattcctaagataagtgtgtattttcattccaggtgaaaagcaggatgtaccgagcactttattcagtgcatagctttaagccagtgttggattcactaagtggacagccagtctcccagctctctgccttccccaaaagggtcgtagtaggtcacccttctacagcagctaactagagtcctaactaatgggatccagcagggccatttctccagagggccagtatcctattaggagactcttggaattcttaggttctactcaagagtggaaggaccaatcacctctgatattctgtggaaggttttggggtcaaattctgccctctgcattctgtgcaacttgtataaaagtcaagttagtattacatgaatttggggtagggttagtgctttgaaaaaatgttgaaccggctgggcg

SEQ ID NO: 57960 - DNA, 987 bp, Homo sapiens
gtagttatcaggaactagggagggggtgaaaagggagtgactgcgtaatgcgtatggggattccttttaggatgatgaaaattggatgaattacagctggtctgatggtagtgggttatcagaacttattaacattagtgtcattaaagttggtatatagcccctcactgctaaatttggctaaaaagaaaatttatttcatggtggttgatgacaaagatgactttttaatagttattcttgtgtttgctccctcagcatttgacattgtgcagcaaagaaatggttatggagaagcccagtccgctgcttgtagggcgggagtttgtgaggcaatattatactttgctgaataaagctccggaatatttacacaggttttatggcaggaattcttcctatgttcatggtggagtagatgctagtggaaagccccaggaagctgtttatggccaaaatgatatacaccacaaagtattatctctgaacttcagtgaatgtcatactaaaattcgtcatgtggatgctcatgcaaccttgagtgatggagtagttgtccaggtcatgggtttgctgtctaacagtggacaaccagaaagaaagtttatgcaaacctttggttctggctcctgaaggatctgttccaaataaattttatgttcacaatgatatgtttcgttatgaagatgaagtgtttggtgattctgagcctgaacttgatgaagaatcagaagatgaagtagaagaggaacaagaagaaagacaaccatctcctgaacctgtgcaagaaaatgctaacagtggttactatgaagctcaccctgtgactaatggcatagaggagcctttggaagaatcctctcatgaacctgaacctgagccagaatctgaaacaaagactgaagagctgaaaccacaagtggaggagaagaacttagaagaactagaggagaaatctactactcctcctccggcagaacctgtttc

SEQ ID NO: 57961 - DNA, 388 bp, Homo sapiens
ggaatcatacaacttttgttcttttttgtctgacttcttccacttagcataatgtttttaaggttcatccatgttatagcgttatcagaatttcattcctttttaaggctaagtgatgttctattgtatgtatgtaccacattttgtttttccattcatctgttgatggacatttaaaacgtcacatttttaattctttggtctcctcatctaattaatatgttcccagaaaaatcagggtttttaaaatttacttctatagatctgaaatcagaagggtatcatcattgtcttagagttcaatttcacaccttaattttgtagaaagagggagatgtgaataatcatacatttttcgtgcttacacatatgcaatcatgtaagtggg

SEQ ID NO: 57962 - DNA, 1371 bp, Homo sapiens
tttttccagttaatttttatgatttattttacaatgtttcccctcccctcagccgcactagaatgtcagctccatggggtcagggatttaaggcagaagagtgaaaatgcccaacctaaaacacaagatctacaaaagcacctggctacatggggccaggctgagcaactgtatgttgtctacaaagggcctcaacctggcctcacatggccacgtccagcaccaaagacaaatgtacagggaaggggagggtgtgaggtccaacactcacctatagaaacatgtttttagctgctttacttccaaaaagaaaaaaaggcatagctctctttttcaattaaacagaaaactacataattacgttcaaacactcactgaagagcctgcctcatgggaagggcagggctgtcgtgggaagagtcagctgcactttggcaccatctcaggtgcctgtccaagccggatctgaatgggactggtcaagtgaggggtcagtcctgcagtctgcgctcacacctcttctccagatctgccatctcctttaggaccagggccacgctgtaccgcagctcctggaacttggctgtggggacctcaaagcggtatgctgacccatctgaaagcttcagctgcatcaggacgctcggctgcagggagcgagccagggcactggtggagattgctacatccacccgccaccgaaagtcagcaacatgcggcagccaggccccctggctggctgggccacagaatcaaggaggggccgctggctcccaaataccacgctggccaagtccccgaccaggtcttgggggatgcagagctcctggagctggtccctgaaggtgtcaggcttcaggctggtggggggcagacggagggcctgctggagcagtgtgtgcatgcctgccagcagggcacccagctgctcctccggcaggttggcgctgaccccaagacggctgcagcagcctctcggcagtcctccccctgcaggctgctgaccacaaacttcagcaactttctgaacgtgctcctgtctaggtcccctagtagccgggccattgctgccacctctggaggaagctgggcccccaagaaactcactcggccactgtgactatcaccaggatgatgcaggtatggagttgcagtccccacagcagacattgctgctgcttcctctttgatcagccagcccaggaggtcggtcccagatgcagatgcctgaggctgaggagctcgctggctttcgtcggcgtccgggtgggcggcggggaaaccgcgagaccttgaggatcagccggagcggagccgagcgggcgtccctgtctcgtgtggacggtctgcgcctccagggttttgagagct

SEQ ID NO: 57963 - DNA, 617 bp, Homo sapiens
gattacgaatttaatacgactcactatagggaatttggccctcgaggccaagaattcggcacgagctgggtgggaaggtaggggcgggagagtgagggggtttgtaatttattaattgcgtattttctaagagttttcaacatagtttggcttcacacacaacttcaggcccctcatttgagagccattatcctcaactccatctaaactgaatcttggggagaacccagatctgaccaattggggtaggagacagcaggctctccaagaacatgggcaaatttatttttttataaaacaaaaagataaaaagagttgaaagacgtgaaagtggtgagagatggaggaaacagaatcaggaagtggtagaaaagagaggaggtggctgggcgcagtggctcacgtttgtaatcccagcactttgggaggccaagttgggcggatcatttgaggtcaggagtttgagaccagcctggccaacatggtgaaaccccgttactactaaaaatacaaaaattagctgggtgtctcgtggcagggcacctgtaatcccagctacttagaaggctgaggcaagagaatcacctgaacccaggagtggagggtgcagtgagcca

SEQ ID NO: 57964 - DNA, 2521 bp, Homo sapiens
  misc_feature (1)...(2521): n = a,t,c or g
tttttagcaggaggatgtacttttattaaggcattattaattcaggatgacatatttatttgtcagagttgaatacttctgtgatgaagggcaatgctttcctatgatctttcaatctttgtatcatcaaaattacaatgccagttaatatactatactcagaatattttaaataactttattcttaaatttaacaagctcttattagaaatgctttggtatcaatagaataaaaaatgctggttttcccccactgaatcgtgtcaagtaactggaaaagttacacatttgttttccccagctttttgggaatttttcacaaataatgactactacttattcacatggcttaatatggtacactgtaatgataattttttggacttcagaaaaaataaacaaaatatccagaagagaaatttgcaaatgcttcttagtttcttcttcaaaggatgtttatataggtggtacaactcttagatcaccttttttcccagctttgccattctcatccttaaagctgttaaggatggatccctcagtcccatctccagttgtctgagcatcaaatggggaatggtggacagggctgcctaagctttcttcttgctctttcagagatatggaatttttgtggggggatttatgatttgtgttttcatgaggactagcttctgatctttttcctaggaagtggtgttggtttggctggctggtacacctgactatggggagctatggggtggtaggacggtttctctgcttctccttcatcctcctcctcctcatcatcaatcacaaccagctcagcatggatgatcccatcatatcctgtcagaaacttcttatcttcttcactgtcttctgcctgctgataccccatgaaaatcattgtcaccggttctgtatcatttatgtctggaggcagggaatgaacgatattatatctgacatcttcctcgtcctcctgacaagtgggtgaagaattctggtgttcagatttcccaaatattgtctctctggggctcagccttggctttggagagggtgcatctttgtcctgcatgacattcgattcttcccaaggagtcattagccttttttgcggggtgtgaagcttctcttctgcttgttgaatcactgatcggggatgaggcactggcggaatgggactgatgtgattgaagttgtttcccctttcctctgaaagaccattgcccatattgtgtatggattcatttacaccaatacccagtccattagttttaatctttatcctttcttgaaagtttggtccaggggtcaccgtttctctctgtggggttgtaggcctgtaaaagggattggcatatacaggctcatgatactctgttggggatttaagagtttcccctctgaggcttgtccttaagaagttccctctacttcaactggtgcccaggccatcggtgccattgtatgctgcactgtgattagaacttactgcatacactgacttttgcccatcatcataaacttttattcctgtacctttaaagtcatctgatggcagaggtattgaagacagaactgtactttctccagtcttcaagtctttttcaactttaatttccatggcatataaagctttcctattttgttcaatccatcttcttnttcttncatttatctccttccttaacctagaaggtatgtaggactttggaaggtcagggatattagcatagatgtcctcaattgactcttctgctctttcttctctttccactttcacagatcttataatgtcttctgttgtccgctcaattgactttagtttctttaaaatggcctcttccttcgttgagatttgcagttcagctttttcaagatcttggatctctttctcaagcctgaggatactttgttctagaacctggatctggtgctggtcttgttgattttgcttcttcatctcttcctgttcttttccgctgctgattccatctaggaaggccatttctccctcaaggcctttttcttcaaatgctggtgctttagtttgtcttcctctattttcagacgcttctgtgagatttcttcctgtatttttcttttatctgtgatggcctggagtcttcccttcaccagctcagcttcttccattctagaagtcaaggacagtcagacggggaagcaagtccaaagctaccataaatcaaggagcctcctgggggagaggagcgggggtgacagaagagaagcagggagaaatccgctctttgcaccagtggagaaatagagaaattcccgacttgtcaaggagcgtctccgagcagatgcacagatcaggccagacagacacatgtaatgagggtgtgctggggaggcagacgctgaggctgctggcatgagttgactgacaagtttgaacggcagcggcacaagcccttttccttcaggagctgccagctctttgttgtaatgtgcacagttagcaaggcacattttcttattaactgttccttacccaattcattat

SEQ ID NO: 57965 - DNA, 2761 bp, Homo sapiens
gaagatgattagccttccttgaaataagtatttgtggatgggtgttaaattaaaatttccagaatacactgtccatctcacacactctgaaatctaatattatgaagtagtaatgaaaatgaagtagtaatttaaccagagttcatttatccttgaataaacctttttattttcacctcagaaaagtgagtgtactggcagttagtgtcactgctttgcacagtccccattaaaggaccctccagagagggacagtaactgtgcatgagaagccgctcccataagcctcctcagccagatgtcatgggtggaactggagctgtgtcggggccagcacagctgaactgtgacaatggcaggaggtggcatgtgcccagcacttccattaatctgagcctaggagttgaattctttggcaaggttggattctgaggtccttattatgttaatgatggtgcaatactctcacctgcagtagaactgagttctgctgcagcttgtgtaaaaagtgggcagtacacaagtacgtcccaaagcctgtgagcagtatacgtggatgctcacccatgagaaggagcacacacgcctcattctctgccctcacccactgctcacctagagcatcgctgagcgttagacaaagtgttacacagaatgattaaaactttcagacttctacctatgctctttagtcctgtaaattgggttgtattgatgtcaactctggtgccttagaagttagtagtttgggaacctatctgtaaaatcagatgttttttctttgtagagaaggatttctggtgcttttgcttactaagagaccgatattcttaagttgttttcttgttttaacagccttgagaaatgtttggttttggccagcagaattcttgtctacttttttctttcccaaaaagtgttttttaatttctctaccaaagaaaaaatgagcaggtttaggtttttacatgacttatatacattagataaaaggagctgtataatttagcaggaagggactatgggagaatactttactgtgagtggaaaatgttagcacatttgactggtttgccctggaatccactgcacctttacactgcaccatgaaacctacactccctggtatcatagcgcgtcatcacctcaacaagtcagtcgtctccattgatatttgtacaaaaggtatacatggggaacacgtgttcattcattaagtccatcttgcgtgcagctatatccctgattggttatttttcctttccttctgaggttctcatgtcattttcttcatcggatgtgactaaaatttttctggtgtcttctgccctctctttaattttgcctcttgaggggtagcagatgtgtcagtgcattttattacttgctgaaacattcaggcttacatttcttattagtttagtattttaaaagatttaattttctgaatgaggcatttgaattgtaccagcaatgggacttttaaaaaattggatgtaaaaccattcagggtgatttttcttgtcagtggacagtgacgaacagagatttgaaatcccttacctccaataataagccattcagcctaaattcatttttatgaataaatctcttctttctcatggtaaatgtggcttgtgccactcaaacactagtgaaagggtatgtacaaccgcaacatcaggccaggacaccatttatttaaccaagtaatggaggagagtgaaacattttccaaggccttatttctttttcagaatgctttaagtgttgattatatgtgctgggtctctagagaagtttttatttgttacaatactgctgctttgagcaattttgtttctcttcattgtctgttagggaaatcaccagctttggcatcttaacaacaaacagtggatgggtaatttttatttctgatacgcatctttagagtcaaatatatcttttccctgtactcctcatgtacaaccaaagaacatacattatgaaaattgtattataatatctggaaacacaacattttcctctggcaggtgacttttgtacgaaatgaaaaaaaaaaaacctgtattttttttgttgttcttttgtgattaaggatatacatttagtagtctttgttattaaaggaacctgctgataagtacaagtgtgaccatctcattcaaatgtttgttgttatgatgcaaatggatattggtttcaatagaagctggatccttaatactgcattttctgaattctgttttaatatttgtgttaaagtagacatagctgaactcacatggaatcctggagttttgttatcagcagctttgcagtttgggaaacaaagaaaccaaagctgagtgttttaaagaatgaacatatctggaaatccttgctctcaaaacaaaacaatataatctatcaaaggtgttttactcagtgttctaatttttaaaaaattttatctgcatatttgccatcaaatatttatgtgtaaaatgtatgttttacctccttaaaatgccctaaaagttagttaatagttacctttggtttaaccctatacacaatgattaagtgcatttaatattggtaatttaatgaaaaccattccttgcccaatggatgtataaatttttgaaagaataagcagaattatataatatgaaatgctatgtaaagttttctatgtaaaaatattatgtataatactattaaaatatcccatgctttgatcaggtggtacatcaataaaattttaaaaagtaaa

SEQ ID NO: 57966 - DNA, 953 bp, Homo sapiens
gcttttttccatttgttgaaagtaacatttctctctctctctctttttttttttttttttttaaagcaaaccattgtatgtgtaagtgtttaagttacctttttgtctattggtctctttgccagccctcccctttcccaatgaaagccatgtcaaattaatcactggattgactgcttcatctttttatttttaatgaaaggtgtaccacggttgtaaagcaataagatttgagatgaacactattgaaacttcgctttttgctaaaaaatagcaagttgaatagtaatcaaaaaacatagaaagattttagttcaaaatgattgctcctttctctacctggacttttaaaaaatcaattgtcatctaatatgagtttatttgtctatagacacaagtatcaatgtctaaaaaaaatcatgactttaaacttccaccgatgaggcaggtaggagataaagatgaattctgaactgttactaaaagtactcattttttaccttgtagggagggtgggcaatggggttacctgaccttatttgagggtatgggctttcttttttatttcatcacttgttatctcaaagagactcggagccagtgatccttttatcctgctacagtctttagggagctaaaaaaaaaaaaaaaagcaggggctgccaaaactcttgatttcatatttccttctctaaatatatatgtatcctgttttttggataaaattttaccaagaatccaaaaaaaaaaaaaaccctagaatttaatcaacaagatcagtctacaggtcacagtggatttcttttcaaactgacaatgtttaggttttaagcaaataaagttccagttaatgtgaaactcagtcacaaagagttgagatttttcctttatgaaatagaattgacattcttttatgctataaatgaaaaatctcaactctttgtgactgagtt

SEQ ID NO: 57967 - DNA, 817 bp, Homo sapiens
  misc_feature (1)...(817): n = a,t,c or g
ctctctcagtgaagactgctcacttgctgtgctggactcaagcctttctgagttgtaagtgtgaagtggaatcctttgggaatcagggaaggggagcaattgatcgtcgagtcattttcctcttcagaaaactgtgttgtgcttttggagaacagattctccatctgtatccgaagggacttggtaatggaagcaggctggctgttgaccctgtccattcctggggcacattcacaaccccaagggacaagccgtgtccttggtagaggggggtggtaggtgaaatttttaagtctagccctccagcgctctcccacaagggggcggcagtctaccctctcacataaagaactgcgtatgaaatgcagcctgctacagggtaaaaggcagcacctggaagacctgaattgtacttccctccttgccgtgatttgctgcctgttactgcccctcatcactgtcttgttctatccagcatttcttcatctatgaaaatagaagactggattggatgactgatgacatccactgtggatagctacactgctatcctggcgatgaggccatacagttggtgaaatgtgtgtaacacacccaaaaaatgtgccccagatgtgttgggttctctttttttctccaggtctgcttttcttgtctctactctgccccgactttttttctttccttctaggtttagaagccaagcccacagagactttgtgagagatgcgactttggtccccgctcaatcactccctgcttaccacagtgggctgggaccatcaggtcggtcnaaccacgttggcccacagaacct

SEQ ID NO: 57968 - DNA, 1008 bp, Homo sapiens
ttttttttttttttcaaaaaacttcatttaatacaaatagttgcttaaacaagtatgaaaggctgaaagtcaaaatctgcctgagaaacttaacaaatctgcaagctggaaaccgcgtcttttccccactctctgccagacagaatcacccagtccactttcaggggcccagcagggaagctgatttaagagaagtcaacagcttttctgactacactgtggattccatcagtgcacaggcacctgcagggctgcagtaagcatctctgatgaggtggtcccgggcactcactcgcagtctccctcctggtttccttgtgggaaggggcttcatgatttcaagctcagttcccctcccactcccagaggtggagcgcatggtcatagaaggagcaggtggccaggaggctgaaggctgagtctgcttcttctgggttcacgccacagtcacgtgtggtggctgctgtagcctgcagccaggtgccattcttcctcatgccctctgtgagtggcttcattccactctggggtctggcatggccctccccatcgttatcctctctgcattcatgacagggtgttggcaactcgcttgcacccttcaggtctgccgtcttggttcctaggttgctaggaaaggaccacgagggggcccgctgcagagaacggaagagcagccaggaccagtcggctccatacaccagcgagtcgggcaatgtgtgagatgtcaggaccgtcgcctcctgcctctcctccattgccttttggcagttgaggatcttaaagccactgtgcatgcaggcggccaggagcaggtggtggtggaaagggtgccacttgattctccataccccaccctgcacaggcgtatctgccaacggctgcttcatgtttcgtgtgtcccacagtaggatgtgttcatcatagcttttgctggtgaagagaaatttgccgggtaccctggtgtcccagcccctcagaaggccatcgtcgccccctgaatacacc

SEQ ID NO: 57969 - DNA, 1658 bp, Homo sapiens
  misc_feature (1)...(1658): n = a,t,c or g
tgacatgattacgaatttaatacgactcactatagggaatttggccctcgaggccaagaattcggcacgagggcggcgctgagggctttgtgcggcttccggggcgtcgcggcccaggtgctgcggcctggggctggagtccgattgccgattcagcccagcagaggtgttcggcagtggcagccagatgtggaatgggcacagcagtttgggggagctgttatgtacccaagcaaagaaacagcccactggaagcctccaccttggaatgatgtggaccctccaaaggacacaattgtgaagaacattaccctgaactttgggccccaacacccagcagcgcatggtgtcctgcgactagtgatggaattgagtggggagatggtgcggaagtgtgatcctcacatcgggctcctgcaccgaggcactgagaagctcattgaatacaagacctatcttcaggcccttccatactttgaccggctagactatgtgtccatgatgtgtaacgaacaggcctattctctagctgtggagaagttgctaaacatccggcctcctcctcgggcacagtggatccgagtgctgtttggagaaatcacacgtttgttgaaccacatcatggctgtgaccacacatgccctggaccttggggccatgacccctttcttctggctgtttgaagaaagggagaagatgtttgagttctacgagcgagtgtctggagcccgaatgcatgctgcttatatccggccaggaggagtgcaccaggacctaccccttgggcttatggatgacatttatcagttttctaagaacttctctcttcggcttgatgagttggaggagttgctgaccaacaataggatctggcgaaatcggacaattgacattggggttgtaacagcagaagaagcacttaactatggttttagtggagtgatgcttcggggctcaggcatccagtgggacctgcggaagacccagccctatgatgtttacgaccaggttgagtttgatgttcctgttggttctcgaggggactgctatgataggtacctgtgccgggtggaggagatgcgccagtccctgagaattatcgcacagtgtctaaacaagatgcctcctggggagatcaaggttgatgatgccaaagtgtctccacctaagcgagcagagatgaagacttccatggagtcactgattcatcactttaagttgtatactgagggctaccaagttcctccaggagccacatatactgccattgaggctcccaagggagagtttggggtgtacctggtgtctgatggcagcagccgcccttatcgatgcaagatcaaggctcctggttttgcccatctggctggtttggacaagatgtctaagggacacatgttggcagatgtcgttgccatcataggtacccaagatattgtatttggagaagtagatcggtgagcaggggagcagcgtttgatcccccctgcctatcagcttcttctgtggagcctgttcctcactggaaattggcctnnnnnnnnnnnnnnnnnnnnnnnnnnnnnnnnnnnnncacatgtacacttggctgtcaggctttctgtgcatgtactaaaaaaggagaaattataataaattagccgtcttggcgcccctag

SEQ ID NO: 57970 - DNA, 590 bp, Homo sapiens; identical to SEQ ID NO: 14952

SEQ ID NO: 57971 - DNA, 1102 bp, Homo sapiens
tttttccaaactgcaaattgccccaagttttatttgtagtccatacaaaagggaaaaaaaattaaggttttctaacaccacctacttggggagatggggaagtgggactgtgccgctcaccatcagctagaacattagtggtcagcagggacttggatacataccaactgactgtcccaacaggaactcagtctcaacagtctacagagggacagtcagggtaccctggactgctggcacagcttggcacataggaaatggttaagctgaccctttcctggcctccttcccatctaaaaagaaaaaggcgccggcgacctcagctgcaggttgcttccccatccagacgaccttaaatatcgcgcacaaaaataaaagggagccaggaaaaaaataaaaacataaaagaaattcccattctggggagacgggaggcagggtagaggggaaaccgcagatctagagccagtagcaagatttgctgctgaggcgaaggaacaaagtaggttactgccgaacacttaacaggatcatctcctggggaaggcccacatggtagagggcatgaaaaaccacaaccaggaaaggtatgggccagagtagttataacctggatctgtaaccctacccacctcttttctccctccctccctgtggtgccccatcccaggatggccctacatgcggcgctggtagccagagtgcatctgagccgcccgcaggtaatcattataggagcccgaatagcgtgcgtaatcggaatgggcatcgggcaggcgacggtaatccagcgaggactttgtcggcgagcggcggaacgaaagctgcgactctgataaacggcggtaatcagagagctcggctaaacgccggtcggaaccatacctagtcgagagaagaagacagttggtgaatgagacaattgaggggaggactccaggtgggcattggggagatgccaatggggacagggagggtgtgatcacagtggtctccaagagattggtctccttttgtcagaaggctcatcaccctatccaggccaaaaaaatcaagcctggcttcaactcagtgggaaatcaaaccctccactgaagtcctc

SEQ ID NO: 57972 - DNA, 1818 bp, Homo sapiens
ccgctcaaagcacagtgtcctgttaactcttgagtgctaagtagatctttgcaacagtaagcttgattgatcatgggttaaaaagagagaatattgaaatagatgttttaatacaggctggaaatcaactattcaacactatcattgatttagtatacaagaaatcatatggattaactgaacttaatagtactcaagtaggatatgcaaaatttatattttacataatctgtgaacatttttagtacctaaaaatgtttcaggtatttcaaagatgggaacaaccagtatctagtcatcatacattaatgtgaacatgcttattaaaagttaacctctttataaaaagtattaataaaccaagatgtgcctaaatattagggtacttcaagctaaaggtcatagtttatatataaaaagtacgagattcaaggaagtaatgtatctgaatgctttgcttaataagattcactagtgcttgcccttaattcatagaacagtattgtttaggttacattaacctgaaatttaaagcataattattagggattccggcctataaatacaataattaaaatctatactatattattgctaccatgaaagtcttatctttggctgtttttcaagtagaaaagtaagtgtactgtgagccttttatttgagatgctgagagctattaggatgagtatttcagttttcttgtcaatagtgatactctggatgatgttgcagttatttgaaggtaggaactggattgtctaaaccagacacacatagggagtgtgctccattgggtcttgtgggagagtgctggcaccattaacccctccctccaactgtggcaatccacttgaggactgggcttctctaagccacagttgttatctgctgtgtaaagtcctggatgccagcactgtggcttcttagagagggcagatgctttgtatatcgagctgcagcattcatcgtagaaaatgctacaaagctgtctctcttccccttctctcatgtttccctcttttcatcaagatgaaggctgttgggtaagaaaaactaagtgatttaacaaatcattatgatttaaacttagaaataaacctagaattttttgggtgtcccttttatcataggtgtttaatgtatattttaatgattgtagaacttgaattgctctagaatgtgaatgactacccttgtgttttactccttttggcttttgttttgtaaagaatctcctgtgaggagttctgtttttagaatttaatattgtttggttacttccctgactttagtgaaagatattagagtatttactatgccagtatctaacttaaactattagtattaaataagtatatcttttacatttagtacaggtaccataaccaagagatttcttagttttgatggattaagagagagcattctgctgtatattatggcaggtacagatatgatccataactgaaccagaatttggattatagaagtgcacttcctagctgttttttatttaggtataggaacacacaatgagaaccttatgtttagaatgtagcagtaacaacagagggtaactacactgcaagacttaaatggtttgagcatgtgacactatccttttgttggggggagcagggtataaaaatatacatacaggagattagtttaatagtaaagttttatatgtatgtttaacttccatgatatttattattttgtagagacatttgtgattgtttagagttcttgtttttattctatttatgtataaggttgactttttttaaataaataagccaaaaattcttaaaa

SEQ ID NO: 57973 - DNA, 925 bp, Homo sapiens
ccgctctcacttttcagcggcaggcgaagggggctgaggaaaggaggtgggtctaggcaggggaaattggggtgccaccagacggagacagcttggactaccagaatcaagcactcttttggaagagggtaatctctctccaaaaactgaggacacttaccttccccatatattgagtccagctgtgtttggtggcccaggtactaatttcaagatgccaggacgttccagttcaaattcaggttcaactggtttcatctccttcagtggtgtagagtctgctctctcctccttgaaaaacttccaagcctgtatcaactctggtatggacacagcttctagtgttgctttggatcttgtggaaagtcagactgaagtgagtagtgaatatagtatggacaaggcaatggttgaatttgctacattggatcggcaactaaaccattatgtaaaggctgttcaatctacaataaatcatgtgaaagaagaacgtccagaaaaaataccagatttaaaattattggtagagaagaaatttttggctttacagagcaagaattctgatgcagactttcaaaataatgaaaaatttgtacagtttaaacaacagctgaaagaactaaagaagcaatgtaagtcaacatgctttgctttggttcggctttttgaaattagggaactgacttgatgaacagccccagttaactgattttataaagtttgcttatctgcttggcttgatcctcattctaagttgcgttttattgttgttgcaattctgtattttgtctaatttttggttcaaatcagcctgctcatttctggaaagccaaccagtttccacaaagtgctcagaaaatttcccagcagctagttatgtgtattgtcacattgctggggagggaaattgggaaaacaaaataaa

SEQ ID NO: 57974 - DNA, 493 bp, Homo sapiens
gcacggagccggcgcttttgcagttgcttctgcggaaaggtggtagttaagaatttgtaaaggccagagaactacctacgattctctcagcggtctctcttctcctcaagtttgaaatgctttatctcatcgggttgggcctgggagatgccaaggacatcacagtcaagggcctggaagttgttagacgctgcagtcgagtgtatctggaagcctacacctcagtcctaactgtagggaaggaagccttggaagagttttatggaagaaaattggttgttgctgatagagaagaagtggaacaagaagcagataatattttaaaggatgctgatatcagtgatgttgcattccttgtggttggtgatccatttggggccacaacacacagtgatcttgttctaagagcaacaaagctgggaattccttatagagttattcacaatgcctccataatgaatgctgtaggctgctgtggtttacagttatataa

SEQ ID NO: 57975 - DNA, 8196 bp, Homo sapiens
  misc_feature (1)...(8196): n = a,t,c or g
cccccagcagaagggcgcgacggctgcaacatcagcggttaaattgtacagcctttcataggccggttcaatgcatccgtactaagattgttaaggctgagggtccctagcctggggaaaaacgaaaggaggcagagggtagggagacgggaaggaagacaaggagggtgtagaaaacggggagaggagggggcgggacagcatggggaaggcctcaggtttactggagagatcgtggcgttcccatagaaacgtatccctccgcccatgacccgcgtgttagtctcttcagttccttccgcgtcgtttcttggctgtttccgcccagctcctttgtgccgcgcagaacaacgagatgacgcatgcgcaaagcgcagcggccgcatatataaacgcgaacccgggctcttcctcgtagtgccgccgggactcttggcgggtgaaggtgtgtgtcagcttttgcgtcactcgagccctgggcgctgcttgctaaagagccgagcacgcgggtctgtcatcatgtcgcgttacgggcggtacggaggaggtaagaagctggagtccggtgagggacgttggtgtgggtgtagtgagcactgcgaggccgtagggttgtcgcggaggttgggagacggttattccgcgtgcgtaatggcggcttaggagcacgccagacgaagccggaggcagcggaggcggggtgctgaagggagacgggatggcgggtgtacatctctgccgagttccgtactcttgggcatttttgtggcccaatccagcctaaagcagggttgagatgacggttttcgcgttgcctttctcggagctgcccgccggcccccctccccccccgccctcggccggcggctgccattttgcgcacattgaggaccgtggtggcgcatttcctcagcgctttcccgccacttcagcggacagatctggccgcagctgtaagatcgtggttgtgtttgagatagaacgaaattggcagctgtgagctgcatgttctcgtcaaacaatcggttaaattgcggaatgggaatggggacgtaatctgcgactggcggctgggtttttttttagttatttccagcgcggtttatggctctggggcggggagctggagtcttgggcgagcctgtgcctgggacgtttgccgcggaggacgagagccggcgcagccctgctctcctggcccggcccctaccgaggccctcccgccgccgacgcgctgccgctgcgggcccgcgcgctcccggtgcgcccggggctgccgggactcatgggtggggccgggccaggtcccgccccacgcctcggtgtatcctaccacgcgtttctgcttgtgttcgggagggtcaccccgcattatttagaacgttaagaattttgtcaaaagtctagtttctcggggatttgcggacttcaccagttttacgactaagttttgtcttggatagagggcattaaatgtgctttacccaatcttgaggatggcccgttttaaggcaagtaagtaattgaaacttgggccagattttgcataacgtgcattcttctatttgcgtttttaaacagaaaccaaggtgtatgttggtaacctgggaactggcgctggcaaaggagagttagaaagggctttcagttattatggtcctttaagaactgtatggattgcgagaaatcctccaggatttgcctttgtggaattcgaagatcctagagatgcagaagatgcagtacgaggactggatggaaagtaagtaagatgttatgaatcttctgttcattaaaatatactgtggctagataatgaacttagtgctaaatttggattctgaagtctggaagagaccttaaatagctggtcatagtgttaaatgctaaaggcacacgaaggttaaagaagatagcggagatggagttagggcttggtaaagaccgccaaagtttgttgggggggaaggagtggttggaaagagtgagtggttggaaagagttctttttaaatctataagtcctgaatatatttttaactttagaattttgttaatttgcttttattagggtgatttgtggctcccgagtgagggttgaactatcgacaggcatgcctcggagatcacgttttgatagaccacctgcccgacgtccctttgatccaaatgatagatgctatgagtgtggcgaaaagggacattatgcttatgattgtcatcgttacagccggcgaagaagaagcaggtatttattttaataaaggaatggttggtattctagttaatcaagtaattcttttattagcaaggcagaaactagtgtttttctataaacttgaatgttaattgtacaggtgtattttacaatttgtgtttaattaaaaaaatgttactatattaataatcaacctggtcaaaacctttcaggtttcttcgtttgagtcagtcgccttgattcagaatgtcacgagccttatgatatcatgctgaggcgccttgcaaatccgacaattaagatcctcctagaccttgaggtgatcagcataagaggccagatcccctcgagtcatctacacctagcttcaccttattctttaaagggcagaaaatttgagacggtgatcgccgtaacagtaaatttggcttacaattggggcccccctccggtttagaaagaggaacaccagattgaccacattcccaactagaaaaatcttcttgcgtcaatcaagcctcacctggctcatttggctgtcagtttgatcgtcgttagattgaagaaaacatctagatgcagcgatcggctatagatacttctagatcgtctagatctactagaccatgggccaaagagggtcgacctgcaaacttgcaaggtttatgttaaatacacattacagtgttttatattatgtaatgctaagttgtaattcagcttttaacaaatctttttttaggtagtaaaaaaaaaaatactcaacaactaataggcccagagtttatttccaaatgagacactaaatttaaatagttttgagatttgatttcagcagaggcacacaaactcttaaaaacgagttattgtctgacattttgttttttctctaacttgaaaaataggtcacggtctagatcacattctcgatccagaggaaggcgatactctcgctcacgcagcaggagcaggggacgaaggtgagatcttgtttaactgaagtctttctgtattattattaaattcactggtagtccaacacagaaaaagctcnnnnnnnnnnnnnnnnnnnnnnnnnnnnnnnnnnnnnnnnnnnnnnnnnnnnnnnnnnnnnnnnnnnnnnnnnnnnnnnnnntgatnnnnnnnnnnnnnnnnnnnnnnnnnnnnnnnnnnnnnnnnnnnnnnnnnnnnnnnnnnnnnnnnnnnnnnnnnnnnnnnnnnnnnnnnnnnnnnnnnnnnnnnnnnnnnnnnnnnnnnnnnnnnnnnnnnnnnnnnnnnnnnnnnnnnnnnnnnnnnnnnnnnnnnnnnnnnnnnnnnnnnnnnnnnngttccccagttgaagtcttaacaggccaaaaaaaaaaaaaactgtggagatggacttaaagttctttattttaggtcaaggtcagcatctcctcgacgatcaagatctatctctcttcgtagatcaagatcagcttcactcagaagatctaggtctggttctataaaaggatcgaggtatttccagtatgtaacactttttttccttacttgtgtttggattgttcacatcttatcagtagagtgtcttaaggacataattcaaatggattgcttcagggaatatttgagatgtaaaagtttggaatttatgtgtaacttgtaacataaatattaccctagtttcacagatgaagaaaagggctactagagattttaaggcttgttaggccgtgtggtagacaagggtcccaagcaatacagctctactcaacactctgggtaggcatgttgctataaacttttctggcttcagattggatgatactagctctgaaagatggtaattgattttcccgacaaaaaggcctattagcaccaggaaaagagatcagaagcaagtagaaacatttctcatttttggaatgatggggttgatttgagacactggaaagttgactagggcagtagtgtgtacacagaaatgaatgtggattttttttttagaccgtttcagacctgaaaaaactaaagaaccagagctttactatttgtagaaggccttaaaaggagatagaatggaaaaaattgtaaaataagtattgcaacatgtaattaacaatattgttatctgtaccaacgataaaaccgtggtacggaatgctactgggagttaaattgctgtttaatagcacaaaacctttaaatgcaggaattctgaatcttgtggtctatttgagaaagctatgaaccatctctttagataaatttaaaagatagatatgtcagtctgatttggtttgtctgacagattgatggctctcaaacataacttgatccgggaagaagcctgacaaatggggggcggctttcttttcgtctggccttatcacctgaattagtctcagttcaggggtctggttattttcannnnnnnnnnnnnnnnnnnnnnnnnnnnnnnnncattgtgtaccacagtgcccagctgagggatctgtgccttaagtgaggttagttttgcttccttcataccagtctcatcaaatgaaaaccatgtatttcccttggatattacacagtgtttgagaatgttatacctgtacagaaactaaccaattgagtgatagaaacaagtaattgaaatgggggttccttatgtctggtaacactttgtttgacagtgtgttagacagaataaggcaagtgttgcatcttgtttagttttagcttctttatgcctgaccaacctaatacagtgttgagtagttaaggaaattcctttggactgattgatataattgtgttttttcactttttttattaagatccccgtcgaggtcaagatcaagatccaggtctatttcacgaccaagaagcaggtagggtaaaaatttgattatccttttctagttatatggcaccaatatccaaagagttcaaagtgtttttaattgttgaaattttaagtgttaactctaaacttaggttttagtgggaacacagtaccttatttgtgtatgtcctatttattactggctgactttccctgaacaagggaatgtaaaactatagtgagaaagaagcttatgacttgggggattatattaaagaggcccttgttagaactgataggtgcatggagaagcatcctgaaatcgatgtgcttaaagcagaatgtaaaagattaatcatgatgtagtaattgagtcattttttgaaaaacagttgttgaaagattggcttttgttagcaacaactggtaggatgtttttcagtttaagtgcagtctgacattttaagcttaggacatttgggggttttacggtattggtgactacaagaaagggattggttagtactctttgtttaatagaatttctcatgttttgacagccgatcaaagtccagatctccatctccaaaaagaaggtaagctaaatgttttgttgccaaatcttgcctgtcaagtgtggcctctgcagaatttgtttgcttactgctttgcagtctttgagctctttggagaattggtgctatatagattaaaatactatgctaagtttctgaaatactttttttttttgattcagtaacattagtttattcttttgctggaaatacttagtcataaaatgttagggtgattattaagatgtgattggtcctgtgagtacttggtagaaattttggaaagatagatgccttttccccacatgtacaatagatacaaagtgtggagaaaagtcttggaaatagttacctgcctagtgcttctttatgaccagaaaacttcaaatagttgtcatatttatctagtgcttcttaatgaccagaagacttcaaatagttgtcatatttaactgcaggttgaccttgcaattttgacaaggaggatagcctaatctttttttttttctgggatggagtnnnnnnnnnnnnnnnnnnnnnnnnnnnnnnnnnnnnnnnnnnnnnnnnnnnnnnnnnnnnnnnnnnnnnnnnnnnnnnnnnnnnnnnnnnnnnnnnnnnnnnnnnnnnnnnnnnnnnnnnnnnnnnnnnnnnnnnnnnnnnnnnnnnnnnnnnnnnnnnnnnnnnnnnnnnnnnnnnnnnnnnnnnnnnnnnnnnnnnnnnnnnnnnnnnnnnnnnnnnnnnnnnnnnnnnnnnnnnnnnnnnnnnnnnnnnnnnnnnnnnnnnnnnnnnnnnnnngggtagcctaatcttaagccagggacaaaagatgaatatatgtaagtttcatgtcatttttaggtctttgctatagggaaattagtacccttaggccacctttgaagttattgaaagttagtacatgtacatgagagtttcaattgacactaattggatccaaacctaatgtttttctttttagtcgttccccatcaggaagtcctcgcagaagtgcaagtcctgaaagaatggactgaagctctcaagttcaccctttagggaaaagttattttgtttacattattataagggatttgtgatgtctgtaaagtgtaacctaggaaagataattcaaccatctaatcaaaatggatctggattactatgtaaattcacagcagtaagataatataaattttgttgaatgtattaacatcatatggtctgaaaatgtgggtttttatttggcacatttaaataaaatgtttctaactagatttttgatttgtgttcaatattaacacttcttaatttgatatatttgagagtcagacattataattgttaaccttattcatacatacctacattcagaattgaaaggtgttggttaagtcttgaacatcactattctatgcataaaacttggccaggatcttaagggactttgaaaattccatcttacccttgtagctctgggtaagatgacctgagtcccttatgatacagcctgaatgcatcatgacagatccttaagttagctaatccgtttgaagttggtgttagtaggtattgtatgatcagtggtgaagcaagtaggaccactgatgtgtctaaatgagcatgacaggaactaaacgaaactgattaaatgtatgagaaatagaaactgatttctggatgatctttatactaattgcagctttcaggctactaggtggcatagtgttaattaggactccccaagatatggggagttctactctcaatggtcttgtttctttgctttctacattagttaaccagttttataccaaaaaatgcatgtttgaggaattgtctgaaattgggacaaaacaccttcatgtaaaccagctttgcaaaattttccagcccagatactcttcatctattcaaatggattgtcttattctgagcaaagacctgttgttaatcttcaagctaggttttgcagttcccaaccacaacattcttctattttgccaggctggtgcaaagtaattaaagatgtcaatcagaaatgtcaatgagactaaagtggttttgtaaatctcagctatatttagcaacactccatgtagctaatattttttggtagcatctggtagaccttagaatgttacatagccagtaggttctttattcaaattttaagtatcttaagaatagtagggcagtaacagttacttttgagagttttctggtcaagcttttaccaggcattctctagccttggtacaaaaaaaaaaaaaacctgctggttgcgcagatacctaggcttgtccattttatgcatttcagcaaagtcattggatactattgcaacttgggaatactggtctgcatcaagtttattcggtagtttgaccgctagtatgttggaagttatttggattgtttttggaattttgactggctgaattatggttggtataaagttatgtgtataactggcaggcttatttatctgttgcacttggttagctttaattgttctgtattatttaaagataagtttactcaacaataaatctgcagagattgaacaaataaaaaaaaaaaaaaaaa

SEQ ID NO: 57976 - DNA, 945 bp, Homo sapiens
  misc_feature (1)...(945): n = a,t,c or g
ggaggaatacatttctgaggagtgatacttaaaccatttgagcttaaatgagtacctgattttgcagccattaaaatgagtcaataactatgtggaaatatagaaaaatattttataatataatactaagaaagaggacagtaggccataaagtgttagcagtgttatgctatgtctatataaactaagcatgggcccattaaaaatagcaaactgaaaacagttcatgtgtggggggcaagtttagaagtaattttaatgtatctaagaagtgatttcctttattgttgtactcaggtacgaagactaaaaatcaggatgaatccagaaaattaacacaaaaaagtatgtattaggctacttcctgtcatagtgaaattaaacactcaaagtaatgtaatctcaggctggggcgtggcggctcatgcctgtaatcccagcactttggcaggacaaggcaggaggatcacttgaacctaggagttcgagaccagcctgggcaacacagcgagaacttgtctctattaaaaaaaaaaaaaggaatgtaatttcaatcntttttcttgatatatggcttgagaatgataatgtaaaaggaattcttctcttacttcaataaaatgggttttaacataactttaaattcagttaaatatacaatattgaatacctatagttgactttgggatggggactttttcaagtcattaagagtgtttgtttaaggtgatctcattgatggtagttctcagccgtctcaaaaactgcaagctaatcagtcagacattctttaatgaccccaattttttcactttaattgttaccatgttttctatttttactgatttttgctaaagcatgtaagagtgaatttattatagcagtaatcttgtgtttctcctgatgtgcaataaatcaataattcaccagcaaaaaaaaaaaaaa

SEQ ID NO: 57977 - DNA, 1637 bp, Homo sapiens
ttatgacatgattacgaatttaatacgactcactatagggaatttggccctcgaggccaagaattcggcacgagggggaggagccttgtcttcttagctgtcacctgccgaggcttctgggccactcaggccagtgcaccccttttcagagccccttaaagctgctgtcactagatgcccatggtccagggcctggtgggcgtgagaggataggtggcagggcagaaactgggcagccctgacttgatagcagcagggggagctcccaagctgctaagcccctgcctccagccttcctgagtttctctctcctgaaccctactctctcctttttgcttcctcagtttttatcaggctttctctgggagacagcagtctctgagcaccagggagcagttgccctcaggcctgtgcccagcatgccctcccctttttatacgaatgttttctaccagtgtgcttgggtttgccatgatgcgaggctgaattgctgtaacggcttgattctctccctgggtctgcgttccctcccctgggcctgactgagcctgctcattgtttttccctttattacacaggacagccaggggaggaggggggcccagccctgggaggctggtgggaggcagggggcaggcctgcggatgcatgaaataatgttggcattattttttaattttttaaaaaataaatggtatcttatttaattgtcctgttccttcccactccccgcctcctaggatgttagcccaagctcagggtaggcccagggggctgggagaaatgaagccacccatggggactggggaccaggggccttcagcatggcttctaggttccctcctccccctaccccatctcctacctccacagtacagactgtccccaacttaacagtggttcaacttaaaccatgtttcaactttacaattggtctgttggggtattaaatgaatttgtgacttaggatattttcatttatgatgggtttatcaagaagtaaccccatggtaagttgaggcatatctgtatatatttaaacctaattaattcttgagctgaaaataaataaaccaggatggcagggaccaacccctaatccctccccagcggcaagcccctcttttcagagtgggcagagggttgcctatggtgggcactaggaatgaggtcccctgcctcgatgcgggtcctaggagaaaaagtcctacttttctgggtccccaggtgcagcacctcccggagactgtttctcccatggcctcctgagtgatgggccctgcctccctgtgcctcatcctcaggctggttggagcagagggtgggcaggagcccaagcacagactggggggtgctcacagcagggccaccttgatgcaggctggaatgttatccctggggtgtgcttggaccccacctgctttctttctctcctgcccctcccctactctcactgtaatttatggaccctgcccgcctgcgtgttgtgtgtatgtcctgtgccttttctcactattgtttgggtgtgggagggggtggtttttcactgaaaaggggggtacacctatagctttcttgatgttcaatcaatcagtcactgtgtcccagacatattcaataaacacagattggtacca

SEQ ID NO: 57978 - DNA, 916 bp, Homo sapiens
  misc_feature (1)...(916): n = a,t,c or g
gaaatttttacaatgagctagttttctttgggtagcttttgaagttaaatagtgaaattctttacaataaaagtgccactcgcaagtacatattcctcaagtcatccagataccattaagcagtaaatcttacaaggatttccttaaggactaattgggtaagatttctgaacagataagcacttttccaaagttaaatacaaatactagaaaaagaatatcattttcacagtattttatgatagggataattcaggtcctaattttggtgttatttaaagggaccttattttctgccccttttcaatccccttagtaaattatttttattgtaattttaacttatgctgaatacattttattttttgaggcagagtctctgtcacccagggtggagtgcagtggcacgatctcagttcactgcaacctccacctcccgggttcaagcaattctcctgcctcagcctcccaagtaacttagactacaggcacccgccaccacgcccggctaatttttgtatttttagtataggtaggatttcaccatgttggccaggctggtcttgaactcctgacctcaaatgatccacccaccttggcctcccaaagtgctgggattacaggcgtgagccaccacacccagcctgaatacattttagagtgcctagcctattaaactttttttccagcccatgaagctgagtcttgaancancttgctnaaaaacnagagccccnaaanaantgcttnaaaaggctttaaaagaacaccaccttncgtaaatngcnnaaanaaactgccccaaatgaactntangagaccgnaggccaatnnntgcaactggacgttgcagaaaggtanccttnaaaatcggagacaagatcaanacctgttacagataactgctatttttgga

SEQ ID NO: 57979 - DNA, 868 bp, Homo sapiens
  misc_feature (1)...(868): n = a,t,c or g
ggtgcttcaaggagtactatagatgagagagctaagattgtagaacactctagagatagttgtgggaagagagctcagttactcttcgtatatttatgtgtatgtcactttctttttttgttgtccaactcccaaggtcgcatcctgagtctcagctggcatccctctggtacccacattgcagctggttccatagactacattagtgtgtttgatgtcaaatcaggcagcgctgttcataagatgattgtggacaggcagtatatgggcgtgtctaagcggaagtgcatcgtgtggggtgtcgccttcttgtccgatggcactatcataagtgtggactctgctgggaaggtgcagttctgggactcagccactgggacgcttgtgaagagccatctcatcgctaatgctgacgtgcagtccattgctgtagctgaccaagaagacagtttcgtggtgggcacagccgagggaacagtcttccattttcagctggtccctgtgacatctaacagcagttgagaagcagtgggtgcggacaaaaccgttccagcatcacactcatgacgtgcgcactgtggcccacagcccaacagcgctgatatctggaggcactgacacccacttagtctttcgtcctctcatggagaaggtggaagtaaagatttacgatgccgctctccgaaaaatcacctttccccaccgatgttttcattttcctgttcttaaaaagagggcagctttttcctntttccagtttggntcatcanttaggaactttgggcgattgggggttccacagtttgcaacagggcaaggaatggggggattantctttccattnttttaaaaantggcaggttcattt

SEQ ID NO: 57980 - DNA, 1168 bp, Homo sapiens
tttttttttaaatccattgctttaacattttgaaatttattttggtttctgttcaacaaaaccaaaccacattgggatggcatttacagaagctcagaaaaacattatgcactgaaaaatacttctcattagaccacaacaagctttaaaaaaataaaattaagtaattatagttaagttacaaaaagctgaaagtataaaacattgtggaaacagtgaccatctattaactgggaaaacacaaaagaagagaaacaatttcaaccattaatcatttatcaaacatgaagtctggtgcattaaaggaatatctatcagagggtgaggggctggcttactggcagtttgacatactatacagctcagacccaaacccttcacagagagactctaagtgtacatctgacttgcagaactagacgagttgagtcactgttagctctggatataccgttaaattaaacctcaaaatctctccccaggactcttgctcaagcaagtcacgccaaatccaaccttcctaacaggggttttcagaaaatggccctgcagaagcacaggatctggtgcctcacagtttcctccatgctggcaatgctctagttctcatcacgcccattagcatctggcatcaggttaccctgtacagtcaacggccatagaagtcgccagcagggaaattccagaggtttagaattctatcagcacatgtgtgcaactggaagcccatcatgggagtactatgtcagagcgtatgtaactagctgtcaggtctttccccgttgcctcagcctttctacacagactggccttcaacttcccctgagtccagaagtagactctttcagcaactctattcaggaatctgcagcaggaaaactgcttcctctattaacatctatgactgaagcacagatgtgtctaatagaaatcacccttcacccaaaagctgggcgcagaaagggaagcccttagctgactataggaggtgcctcttgtggctccacgtgcttcttacacaccaccccccagcttgagcgatgcctcagccagctcaccctcatccacacaatcgctagaaaacatgcttcaaatattctatctttgaaaagacaccatgcagaaaataagctttcctctgatgtgcggtattttcttcaatgctatc

SEQ ID NO: 57981 - DNA, 370 bp, Homo sapiens
cggacgcgtgggcggacgcgtgggtggagctgttagaaatagcaaaaaccaatgcagcgaaagctctaggaacaaccaacattgacttgccagctagtctcagaactgttccttcagccaaagaaacaagccgtggaataggtgtatcaagtaatggtgcaaagcctgaactgtcggaaaaggtaacagaagatggaactcgaaatcccaatggaaaacctacccagcaaagaagcatagcttttagctctaataattctgtagcaaagccaatacaaaaatcagctaaagctgccacagaagaggcatcttcaagatcaccaaaaatagatcagaaaaaaagtccatatggactgtggatacctatcta

SEQ ID NO: 57982 - DNA, 829 bp, Homo sapiens
atcacagagattagtaatgattaaattaatatcttcaggaatattttgggatagggttgccttaaaacattttacttggcttattcaatttctaaagcacttacgttgtgccaggttccactcaagtaaactatctctgccttcaaggagcttgcagtatagtgagaaaagcctgccaagtaaatcagcaggtatactaaataggtagtcatttaggcactcaataaatgttgactaatttttccagtttcctattactgaggaaaacctccatacactgaggcagaaacttgtgtcagttggaggaaaatagacttgagtagtctttggtccaggtaaaatgggtcagtgacactgaaacagtagagtaggagtcaaaaaaccttttctgtgaagtgctagaacattttagactttgttggctatggtctgtattgcaactatagtacacaactctgccgttgatagtgtgtaaggagccatatacaatatgtaaacaaatcaacatgactgtgtttcaacaaggcctgatttgttaagtttcatatatagtcatatgtcacttaatgacagggatatgttctgagacatgtcacttggcaatttcatcattgtgtgaaaatcatgatgtagttacacaaacctagatggtataccctatggtatcctatatgggatagcctattgctcctaacctacaaacctgtatggcatattactgtactgattactgtaggcagttgtaacacagtgctaagtatttgtgtatctaaacatatctaaacatagaaaaggtacagtaaaaatatatatatagatatatataaga

SEQ ID NO: 57983 - DNA, 2120 bp, Homo sapiens
ttttttttttctcgggaaactggtttaataaggacaattccagaggggcctggctgtggccaaagctgtgccaaacggttgggatccagagctaaaggcacttcttgccacgtgagaccatgggcgaggctccccacgctatctccaccaccacagtcatgagagccaagcgagactggcctgtgcctggggctccacagctgcccagctccacctccggcatttactggtctcatcctgagaggcattgggtgcccactcactggctggatgctgggctggttcatgggtggcagagccagggtataccctttggggatgtccctaacccctcaggaccagaggcagcaccaagcagcatgtcacagccagtgctagggtcagctgcaccctttgctgggactctagctctcctcagagggcctcctagggccattccgggcactgtgggtggcaatggggagccccggctccctcattaggccagacaccagtctggcggtgtcagggaggcccagccttgggccctgtcacacgtagtccagaatctctgtctccatttcgttttcactgccgtcggatggcttgaagtcctcctcctcctcttccttcctcctcctcatcctcctcgtcttccccagactcgtacgtcagctgctcttttccgccatcagccttggctgagctggaaaagagagcaggcctcttggagcggatggtctgccggatcatgaggggacatggtgtccctgagctcgtcgctggtcttggggaggcaccacccatcccgttcctgtgcaggaattctctgccccgtcattgcggtgaatgatcttctgcaactcttcccacattcaagtcgcataactggtagaacatctgccgatagggtggcaaggccccttcccggaagatgtagacagagtccttgagcttgtacttgctggaagctggtttccgagcaccactccgtccccgacgggcccaggccctgcttcaggtcatgcatggtgacaagctggctggatgtcttcttgacggtgatggggaggctgtagttgtaggtgctgcgctttgctttgaccggcaagtcactgggggcgtaaccgtgtttcattccacaacggattcggaaatcgaggacttgataaatcttggcatctgggttttttcggggggtcatacccaaatcgaatccaatagtgccccaggggcctgttatcatgtaataggctatgaagggaagcaagaccttgagcttgtctgggtggacgctgatgttggccttgacagcatttcgggaccagatgggacggatgtcaaacagcttcctcagctcctcctccaccttccggtccacggggttagtgcagactctcctccacgtctgggctgcagcctccagtggctgcttgggcaccctccctcatccctcaaaagttgaacaaaaatggcaattgtgggggccgcccgggcctcctgctcaggcccaatcaaattctcaccctgaaaatggggggattgttgtagccttcccgggtgctgggtctctggtcggtaagaaagtagtcccaccggggcgtccaggccgggagaagatgggtggggggatgtagagcggcaggctcctggtggaaaaaggcctccttctcgggccggagcatgagcaccttgtcatacattgacgtatgcttgccgcctgcttccgtatgcacagccaagtactggaagtcagacatcccctgaaatttgtaaatggtggagatgatgccaaggatctccatgtcaaatgtgacctcggagtgggcctcagtgcccagcacccctttctgccgcctcgttctcttcctgatgcggagcagcaggctgctggtactgaagcggttggcgcacactgggtggcagtatgggtccttgggccggaagtacagctccagcctcttggtggggtctgcgtagatccgggagacgccttcctcgccgcccagagtcggcagcatcttagccacatcacgcaccactcccgggtactccacgcacaccatgcgtcgctcccgcctcagctccacggggacggcgggcccccagccccaaatcggccgcctccgccgccatccctg

SEQ ID NO: 57984 - DNA, 809 bp, Homo sapiens
  misc_feature (1)...(809): n = a,t,c or g
tttttttttttttttggatttgaattatctgactttatttagcatgcaatgcaatttattctggcaataaattaatatgtgcagttataaaaaatgttgggtactttttccaagaaaaatgtttctgaatgtgcacactagaatatatgcagaatcctttaaacagtcgacttcatattttaaacttgtaagtgtggtaacatcaagttttggaagaatggactttttctgtaattcatgatttagtttgagtttataaaggttttaattgcaatttcagttcctacaagctaccaagcctgaaattagagaactgacagctgagaaaggcaatcacctgatcgaggtctccctaattgtacagctgaagaatccaatggccttgccaaagattacgaagctaaaaagagacatagcctggattacaagtcagtttttataggtgctccaggaatgtcttgagctaaataaggcacacgtatcacacagaactttagtcgtatctcagagtccagttttactctgctttctctttattttttaggcatgaggtcttgccctgtcacacaggctggaacgcagtggtgtgatcacagctcaccacagcctcaaactcctgggcccaagcaatttgctcaaggccccacaccttgctaattaaaagaagattttttagagacagggtctttctatgttgcccaggctagtcttgaactcctggcctcgtgccgaattcttggcctcgagggccaaattccctatagtgagtcgtattaaattcgtaatcatgtcataacggtctncaaagt

SEQ ID NO: 57985 - DNA, 1364 bp, Homo sapiens
agtggaatgtttgaatgactttgccaggtcagagcaagtaatatttctgtatctgagtttttgtttgtgttttgataaggctaatgaaattgcattccaggtaggggttaacgtcaaatttccatggctggtagctgtgcttttggcatatcacagtgttgtgtcactactacaaggtaaagcatctacagcggagaatgagcttgaaaatgagagacctattgtgaataaatatgcccatgagagcatatttaataagcctctataacatgcagccaaaccagacattcactcctgcagagaaatgttgccctggagaaaaagaaatatataaagataggctatcacccttcttttgctgcagtactaagcatagcaagaaattagaatcatttacattggaaatttgaaaattccctttatatacacaactttactgtgtataaataaaaaatatttattaatgcagtgatgtccgtcaggttgttttaggaatggcttctgcaattagaaaaatagcttgctagaatgtaaatgttctgttactggtaaatgtactgcacacattcattggacgttaaaacaagtgagtagccttttttacctgccagcagcatggctgtgtgcagccactaggctggaggacaataaattaccaaaaattataatgtaccgagctgaaaatgctcagtacattatgtggcatattctggatgtgatgagaaatctcattgccatttggggacactgacatcccagaagtaatccacaactggctttgcaaaagcaaagtgactgctcagatgaacagagcagagtactcacttcactatggtgggcatcagctggcaaagcgaacatgaactgttcccatggatccatgtttggatgggttttctaggatacttgccaacatgttagctctttctggatgctgatggagttttcaaacacggaacagacacccttggatgtggggttttgctaaggaacataggaggaacagggaggaaaagttgccagggttcacacatcccaggaaaaaagaagcataaaaagcattagcagtcagtgactggatgataatgctgcaataatgggaatggttttgtttctaaaccaaattatttctaaatcaaatcatttattgctttgtttctaaagcagttgagtcactaagtttgtgaactgtaggagaacacatcaagattgaatcctgtgttaagcagaaggtaaaaccagagccaggcgcagtggctcgtgcctgtaatcccagctactcaggaagctaaggcaggaggatcatgtgaggccaggagttcaagactagcctgggcaacatagaaagaccctgctctaaaaaa

SEQ ID NO: 57986 - DNA, 475 bp, Homo sapiens
accaaacgccagccagccagtcagtgggtcccgcagtcgcccgcaaccggggcgaatcatggcggccgccaaggtggctttaaccaagagagcagatccagctgagcttagaacaatatttttgaagtatgcaagcattgagaaaaacggtgaatttttcatgtcccccaatgactttgtcactcgatacttgaacatttttggagaaagccagcctaatccaaagactgtggaacttttaagtggagtggtggatcagaccaaagatggattaatatcttttcaagaatttgttgcctttgaatctgtcctgtgtgcccctgatgctttgtttatggtagcctttcagctgtttgacaaagctggcaaaggagaagtaacttttgaggatgttaagcaagtttttggacagaccacaattcatcaacatattccatttaactgggattcagaatttgtgcaactacattttgga

SEQ ID NO: 57987 - DNA, 955 bp, Homo sapiens
accgcttgactgattacgaatttaatacgactcactatagggaatttggccctcgaggccaagaattcggcacgaggcgcgcgtgcgcactccgcagcccgttcaggaccccggcgcgggcagggcgcccacgagctggctggctgcttgcacccacatccttctttctctgggacctggggtcgcggttacttgggctggccggcgaacccttgagtggcctggcggggagcgggcctcgcgcgccctggcagggccctgtggaacgaagagaggcacacagcatggcagaaaaccgagagccccgcggtgctgtggaggctgaactggatccagtggaatacacccttaggaaaaggcttcccagccgcctgccccggagacccaatgacatttatgtcaacatgaagacggactttaaggcccagctggcccgctgccagaagctgctggacggaggggcccggggtcagaacgcgtgctctgagatctacattcacggcttgggcctggccatcaaccgcgccatcaacatcgcgctgcagctgcaggcgggcagcttcgggtccttgcaggtggctgccaattacctccaccgtggagcttgttgatgagctggagccagagaccgacacacgggagccactgactcggatccgcaacaactcagccatccacatccgagtcttcagggtcacacccaagtaattgaaaagacactcctccacttatcccctccgtgatatggctcttcgcatgctgagtactggacctcggaccagagccatgtaagaaaaggcctgttccctggaagcccaaaggactctgcattgagggtgggggtaattgtctcttggtgggcccagttagtgggccttcctgagtgtgtgtatgcggtctgtaactattgccatataaataaaaaatcctgttgcactagtaaaaaaaaaaaaaa

SEQ ID NO: 57988 - DNA, 686 bp, Homo sapiens
  misc_feature (1)...(686): n = a,t,c or g
ggggagtggcactcgcagctgcagcaaatctcaaaataaagaggcaacggcctttctcttcctctccatctccctatagcacaccttttatttcttttcttcttttttttaagcctcacgaaagattttacttgtagatcaactttcaaaatgtaggaagtcagaatgggtgacatcatcagaaaaatatgtggagctgatcacaagaagtgaagaacccagagcacgaaagcggttgtgactcctgggcccagggagttgacagcgtctgggcttcagaggagccagcgcctccgagttgtcttgaagtgaggctctgctgtagtcctgttcttctggctctaagatctgaatgttgtgaccactaatttgctctttcctggagggtaaccccagtttggtccacaaggcttgctgcccaatctttgccaacagttgaaccaagactctgaggctgatatgcaatgtcacttacaacattaatcagatactgcannnnnnnnnnnnnnnnnnnnnnnnnnnnnnnnnnnnnnnnnnnnnnnnnnnnnnnnnnnnnnnnnnnnnnnnnnnnnnnnnnnnnnnnnnnnnnnnnnnnnnnnncgagccgcgcccagcctgaactttccatttctctcccaagtctcctattctacatgctgaggatgccagagggtccccttaccaca

SEQ ID NO: 57989 - DNA, 1974 bp, Homo sapiens
  misc_feature (1)...(1974): n = a,t,c or g
ttttttttttaagtttcacctatttttattagaaggaatcttgaattcaacatggctttttaaacttctttatttcaaatacacatgaacggtcgtggcacagagaaacagtgatgaaggcacaatcaacaggaccagttactaggttttcaattatagcagcaaatctgaaaataaataatcttcctttaaaaatccaacaagtacctaaaatattactacggataggaatcattcagccaatgaagacattttaaggaaaatatatacaatacatttaagaaaaaaaaaaatctggtacaacctggcaaggagattcctcaggcagcttctctaagggatgcttccagaaacatcccctaatgcagacaaccttttccaaagtgttcttaatggggacacttcagtttttccattccataaatgggnacccaattggttacactttgctgatttcctaaatccttcctagaaaacattactgcctacactggaaatgaaaagtatcaaatctactgggcagtgcatcttacagtactgtcgatagcagccatttttaaggctcagagaatatgtcttcaaaagatattttcaccaaatttgagcaaacactgagcatttcaaataaataatggaatgctaatcaggcaaaagtaccaaacccttggttccaggacagtttgctaattactaatacaatgaaacaactaggagcaagtgacacataaaatagcctccctaaagtccaagagtattaaaatattccccacaacaaacaatcttcatttcagaacaattttagcaccacttttttttttccacaattttgactgcaacattaacagtgggaatgttacttcgcgcaaagtgctttcccatcaatgctcagtttactttcttgaatgaggtcttctaaattctcagctcagatgcaccctggagtgccagcttgctccttcctgtttgttcctttgaaaatgatctagttagtgcccaaaccgggtgaaggagtgtttcaggtaagaagaagagtttatatataggtgttgatacagatatgtataacaaaatcctcagtttggttgggtctttaaaaaatacctttttagcactgtatgatcacatgcattaaagaaagtaagcatactagttatcgtagcatataagattcataatttaaaatgcacaactaccaaagtcaaacaaaattttacacactataaatactgcaacataacttggaaaagttccttttctataaaggggattgggactgggataaagttcccttaaaacactaaggtatggttatgactcacatttctcatcttctgacagtcttaacctctcattttctctcttttagttctacttgtctcgtatcaaggacatggcaatacagtaaaaataagcagaaaaattaatggacaaaccaaaataaaacttcattagctattaatggcttggaagcagagaggtatttgcaaaacattctcaaactacaaacatttggctggcccatacaggatttgatctgtgctagatgataaaaagagaaactaagttttggttaaaaaaaattaaatccctcgatacacagattatctgatctctacaaggcaaaggttatttttgctcttaatgtatctaaaataccactgttaatcattcttgaatttacttctgacaggctcagagcagtctaaatcagtataaagtaacacctcttctagaaataaaaaagatcccttacacactgtttcagtcctattcctatagtctcattctagcagttcctttaccaaacgctactcagtaagatgctgcaactttgccaacaaacgtccaatgaagactaattgagatctctggcgagaacatccccaacaaggtccaggtacatgacttgctactaaagactttattcatgcatttaccaagaaatatccagcatactacagggaatcaagtatg

SEQ ID NO: 57990 - DNA, 1443 bp, Homo sapiens
tttttttttttttttttttacattatcgaaaccactggaagtttattcaaatttttgtgcaaaggatttattagcatcaatgccattcatgaaatatgtctctttactacaacagtgaaggaaggaaaaatatgagttcagcatgtattttaatgttgcaaaggaatgacaactcagcaagctgtagaaaatggcagaggagacggggtaataacagaagcaatgaagactcctggatgtacccaaggacaccctatggccagcagcttggtttctcccagaatcagtttacagacttgctcagcctgcgggagggcccagggatcatgcaggaagaaaacggaatacgcttgattctggaattggtcattttaagacgcttttagtaagatggtttcatgtctacacccaagtcttgccaaccaagaagcatcaacgtgaacagctcagagacattcctgcacaggagagcagggaggaggcagcggaaaggtacctatgagcagcagtgcccgggggcgctggccacctccctgcgcaccggataccctcccccgcacccacaggggttcacttacagtttccccaccttgcagcagcagtgaggctcagagtcacccacactccatacatccctctgctcataccctgcctgtagtgtggctccgtctacctacaaagccccacaaagtggaacaacgctgggatgacaaaacctttcctcttagatattatatactttgcaaggcttggaaataagctactgcattggtcttaagctagtccggcatgtgaagaaacaagaatttgcccagaagaggactgtggagaaacctctgaggcctccttccagagtaaggcccgctcacttgaccagattcctcatgatgttcagggaggatcctctgtaccccgatccaaaatgattccagtggttcaagtagtgaaagagctgatacaactgaaggcgcttctcgaatcctggggccttggggattttgccgtggtaggcggagtaaaaggagctgctaaagcccccaaacatgccagctattgccagctcatattccgagtggccgtagaaagaagctgggtcaaaaatcaccggcccagaggaatcctctgctacgtttccaccccagaggtccccgtggagtaaggctgggatgatctccaggtcacggaacaggtcagggatctttaactgcagagcagaccaaagctggagggcctccctgtccccagactccttctccaccatgtccatctggggctgaatgcgctgccgggcatagaacacgacccagtcctcctgccagtcattcacctgggggaggtatccacagcacgtcaccacgtcaaatccaaaccgggccacaaagggccgttcctcctgcccacctcctctccccactgtgcccgcctccttcaggcgcatctctc

SEQ ID NO: 57991 - DNA, 1911 bp, Homo sapiens
cggacgcgtgggctcgcaagcgaggcagccatgtcttatcccgctgatgattatgagtctgaggcggcttatgacccctacgcttatcccagcgactatgatatgcacacaggagatccaaagcaggaccttgcttatgaacgtcagtatgaacagcaaacctatcaggtgatccctgaggtgatcaaaaacttcatccagtatttccacaaaactgtctcagatttgattgaccagaaagtgtatgagctacaggccagtcgtgtctccagtgatgtcattgaccagaaggtgtatgagatccaggacatctatgagaacagctggaccaagctgactgaaagattcttcaagaatacaccttggcccgaggctgaagccattgctccacaggttggcaatgatgctgtcttcctgattttatacaaagaattatactacaggcacatatatgccaaagtcagtgggggaccttccttggagcagaggtttgaatcctattacaactactgcaatctcttcaactacattcttaatgccgatggtcctgctccccttgaactacccaaccagtggctctgggatattatcgatgagttcatctaccagtttcagtcattcagtcagtaccgctgtaagactgccaagaagtcagaggaggagattgactttcttcgttccaatcccaaaatctggaatgttcatagtgtcctcaatgtccttcattccctggtagacaaatccaacatcaaccgacagttggaggtatacacaagcggaggtgaccctgagagtgtggctggggagtatgggcggcactccctctacaaaatgcttggttacttcagcctggtcgggcttctccgcctgcactccctgttaggagattactaccaggccatcaaggtgctggagaacatcgaactgaacaagaagagtatgtattcccgtgtgccagagtgccaggtcaccacatactattatgttgggtttgcatatttgatgatgcgtcgttaccaggatgccatccgggtcttcgccaacatcctcctctacatccagaggaccaagagcatgttccagaggaccacgtacaagtatgagatgattaacaagcagaatgagcagatgcatgcgctgctggccattgccctcacgatgtaccccatgcgtatcgatgagagcattcacctccagctgcgggagaaatatggggacaagatgttgcgcatgcagaaaggtgacccacaagtctatgaagaacttttcagttactcctgccccaagttcctgtcgcctgtagtgcccaactatgataatgtgcaccccaactaccacaaagagcccttcctgcagcagctgaaggtgttttctgatgaagtacagcagcaggcccagctttcaaccatccgcagcttcctgaagctctacaccaccatgcctgtggccaagctggctggcttcctggacctcacagagcaggagttccggatccagcttcttgtcttcaaacacaagatgaagaacctcgtgtggaccagcggtatctcagccctggatggtgaatttcagtcagcctcagaggttgacttctacattgataaggacatgatccacatcgcggacaccaaggtcgccaggcgttatggggatttcttcatccgtcagatccacaaatttgaggagcttaatcgaaccctgaagaagatgggacagagaccttgatgatattcacacacattcaggaacctgttttgatgtattataggcaggaagtgtttttgctaccgtgaaacctttacctagatcagccatcagcctgtcaactcagttaacaagttaaggaccgaagtgtttcaagtggatctcagtaaaggatctttggagccagacaaaaaaaaaaaaaaaaaa

SEQ ID NO: 57992 - DNA, 1770 bp, Homo sapiens
tttttttttttcagagttttctttaactttatcatttataaagccatacaatgcattgcaaagaaacaaagcagctgtacaggagtggggacgcgtcagtgtacaatacattcatgtccaggataaggagcagacaccaggatttatacacggtggcagcggctataggcacgatgatacaaaatataaagtatatttccatctatataaatacacagctggggtggggaaggatgctgggtgatcttgtttcccccgcagagggcctgggaggcagggagggtggtgggaagggatttcttacatttgttctccaatgatgggtctgaagggaggagagaaatggggaaacacagcctgcacacactgatgtgctctcacacacacgcacaaacaaaacacagacacaggagagtttcaaacagcttaacactgattggaaaacaagcttgggacatccctctacagtaactccactgctggcaagagcccaggcgtgggatatgaacagaggtcctccaacatttttgggcctttgaggacagaggggccaagagggacagatctgcccgaggcccccacccttgccctctggtgaaaccacttctcacctggtatcgctgagactccaccaattggttggcctacaggcctcacctcccgactcccctcactgctgggcgacattgaatttgaagttccattgcccagcacctccaaccccggactcccaagttccctaaagaaatgagcaaaacacacgcacacacatacatccacacttgcacatgcgcacacacgtcctgtgttaccactggccaaggaaacgcgagtctcaggattccagggcctggacctggggtaaagggctgctctgggactctgccccccaacctcttggaggaccccgagtgtgggggcaggattgggtgtctgccttgactcacaggatctccccaggtcctaaagctgaaaaaaaaagtgggagaagatccaggaggcaggggtggtggacaaaagtaggagtgagactaaaaagtgggagtgagactagatttgatcacactcaccacccttctgtgccccctggacagcatgctcccctggagcccctgcacaggctcatcagaacaaggcagaatctcctactcactaacctcctgagagccgtttatagggggatcacacttgtccaggagggctgcccctcctgctttcacacaaccactggccccaccatccctctcctggccagtctcagaagacccagggatcctcaaaaaccaggggagaaggaatcctggccattggtgtccacagctttcagagctactggaggagacgctcagatgacatgggtcaaaggcctttcccaaacttaggatgtgatgtatctgtcccttaagcgcctggctaaataagagagccagaacaccgtgatagcaggctgatcaaaccgctcacttcctccctgttttccttcgcaggtcccctctccattgttttctcgcccaatccttccctcttgctccctttgggaaaaagccacgtggagctcactgggcccctcccccagctgaagggacatgaccctcctctgccctcttccctccagacacccagctggacagctggtggcagcacgggactgaacctgctggggtctgcgtcgctgcgatgtccatgactccctggctctttgttgcccatcttctcccagaccctttcccatcccagcccatgttcaaggccagacagcgctctcctggc

SEQ ID NO: 57993 - DNA, 847 bp, Homo sapiens
gcggccgcgcccgttgcacgagcagtccctggggtctgtagtggcctctggagagcccttctccccaggccaggcgggaaggcccccgctccggcctggttgaagtaggggaacgggtcccaacgcggggccgactcccttgaccctctgacttgctggcttcccttgttttacagtcctcggcctggcggaagttttgcaggttgtgaagacccctagtctttcattctctccttgtcacagccttgtagggcgtgaaggggtcattgccccatttagggatgcgcacctcctgatttcccgtccactgctctgcgccctgaagtggctgaaaagtgctcttaaaagggatggggaatcccggtcgccctcagctggtgcgctctccactgggtcgtggggctcctcatttcatcctaagtgaacccctccatcacctgtgtgttaaggaaggcatttcttttcccatcagtaaacacatttcgcctcttcggccgaggtaggaatataaaaggcccctggcctacccaagttttggtccagcaggggagccagggccgggaaagggccaagcccgccacactcggcttgtggggcggtgtggtgccgtgatgcagctgtgggtttggccaccgacagacctgggctcaaattggacctgctgcttttgactgtgagaccttccataagctccttttgctccaagcctcagttttctcctctgtgaaacagagaaaatcgttcctatcagagttcttatgaggatgaaatgggattttggatgtaaaatgcttccatccagtacctgctaaacaaaatgcttactaatggccgggcgcgcgtgtca

SEQ ID NO: 57994 - DNA, 2089 bp, Homo sapiens
cggcggcggcggctgttgaggccgcagtccgggtcctggcttcggcctcagccccaccatggtgacgcttgctgaactgctggtgctcctggccgctctcctggccacggtctcgggctatttcgttagcatcgacgcccatgctgaagagtgcttctttgagcgggtcacctcgggcaccaagatgggcctcatcttcgaggtggcggagggcggcttcctggacatcgacgtggagattacaggaccagataacaaaggaatttacaaaggagacagagaatccagtgggaaatacacatttgctgctcacatggatggaacatacaaattttgttttagtaaccggatgtccaccatgactccaaaaatagtgatgttcaccattgatattggggaggctccaaaaggacaagatatggaaacagaagctcaccagaacaagctagaagaaatgatcaatgagctagcagtggcgatgacagctgtaaagcacgaacaggaatacatggaagtccgggagagaatacacagagccatcaacgacaacacaaacagcagagtggtcctttggtccttctttgaagctcttgttctagttgccatgacattgggacagatctactacctgaagagattttttgaagtccggagagttgtttaaaaagcctcttcctgatgatcccaactcagaattcactgtttaccaaacaccttggtcataataatgtcattagtttctccatttttattttctgaactgtacattcacaacttatgtttctttgagattaatagatattgggggaaaaacgcctttttaggaaaattatagtgaaaatttgacagttgattggcataatttcttgtttgaatgctgcctccattatataggtccttccaggaactcaaacactgtaagtgaaatatgggagtatagtttttattatttcttcttttccttttgttttcataatataatgcagtttgttcaggaaatcagcacaaagcctgatagtactttactaaaatgactgcattctttggattccttcagtctatggttcaagtcactaaagattcatttttgttgagtccttatgagaaacagcagtatgaatcttgacggtttctgcccgtcctaatggcagagctctctgacttgggtgtatgctgccaggctgggtactttcatactttgttttcttgttttgctttaaaactacgactcagcatacattttcccacatacatttttacattgtaccttaggactcagtcatctccacttaaattgatgacacaagcagctaattaaccatttctgggtttctgcctaaccccctaattgtctgttaaagccaattctctgggtgtcccagtgagtggtggctttttttctttccacattggcacattcacttctcccactcttggcatgtaagaaataagcatttacataattggaaaaatctggatttctgatgccaaagggttaaagcttcttggatttcatttcattgatatacagccactattttatttttgatcagtggcctttgggccactgttcagggtactgaccatcagtgtcagcattagggttttggtttttgtttcttttgggtctttcttttttggcacatgtgaatcttgttttgtgtaaaatgaaattactttctcttgttctctgatgatgggtttaaaattaaaagagcatccggttttggtatggggatgatccaggattatgttgtgactgatacatattagttacttgtgctttttttttttttttttggatctttgcaagggcaaaactacaagtaacgagttttatataattaatttaaatttgttacaggttttcatgttcaggataaaccatacttccaccttgggtgagaacacttgcaacagtttattaatgaggtgactttcaccttaggacaactgttgcatgccaagttttttgtgtgtgtgaaacacttcaaaactgatttaaaagatgtaaatttaaaattggttgtatctaatatgccccaggttcggtaaataaacaattctttttaaaaacagtaaaaaaaaa

SEQ ID NO: 57995 - DNA, 727 bp, Homo sapiens
gaagccggaggcagctttaaccagcccccagggatgattgtgaaggaggcccctccccttgtgaggagggggcactcctctccagcccctggtaccacagtcctcacgatggtgcagtgatttctagccaggcgtcaagatgcgctgctttccctctcctgcctcatcccttgttggcagctccagttcaggccgtggagggacgtgatgctgggctgtgtttactaaacccatgggttttcagcctcttaagcccagctccgatctccaattagttgagagcgctgggttgactaacctctggtatctgagcacagacagagggtgctgtgggtctgctgggtggcagaaatggttccttccggcttggcgttctctcctggccactcttcctgctgcctctgactactcagccttgttttcggtgtgtaggccccagctgcccactggaactgccggctaatgcttgctctcccaagatctttaactcctcctggctgcacctgggtagggatggtggcatcgatgcccctctgtctgctgaaggacctgttgctgcttctgtcttttcacccctccttggctgatgacccagagccctctgatgatggcattctcctggcaagagaaaaagacttaactagacttctgaacttgaacagtttcaggttatattttaatttttttttttttgtacaggttctgattctaatacatttcaacatgc

SEQ ID NO: 57996 - DNA, 2130 bp, Homo sapiens
atgacactctgagttccaaacttaaagttaaagagctttcggtgattgatggtcggagagctcagaattgcaacatccttctatcgaggttgaaattatccaatgacgaaatcaaacgggcaattctaacaatggacgaacaggaagatctgcccaaggacatgttggaacagctcttgaaatttgttcctgaaaaaagtgacattgacctattggaggaacataaacacgaactggatcggatggccaaggctgataggttcctttttgagatgagccgaattaatcactatcagcaaaggttgcaatcgctgtacttcaaaaagaagtttgcagagcgtgtggcagaagtgaaacctaaagtggaagcaattcgttctggctcagaagaggtgtttaggagtggtgccctcaagcagttgctggaggtggttttggcatttggaaattatatgaataaaggtcaaagagggaatgcatatggattcaagatatctagcctaaacaaaattgctgacacaaaatccagcatcgacaaaaacattacccttttgcactatctcatcactattgtggaaaataagtaccccagtgttctcaatctaaatgaagaattgcgagatattcctcaagctgcgaaagtaaacatgactgagctggacaaagaaataagtaccttgagaagtggcttgaaagcagtagagacagagctggaatatcagaagtctcagcccccacagcccggagataagtttgtgtctgttgtcagccagttcatcacagtagccagcttcagcttctctgatgttgaagaccttctagcagaagctaaagacctgtttactaaagcagtgaagcactttggggaaaaggctggcaaaatacaaccagatgagttctttggcatttttgatcaatttcttcaagctgtgtcagaagccaaacaagaaaacgaaaatatgagaaagaaaaaggaggaagaagaacgtcgagctcgcatggaagctcagctcaaagaacaacgtgaaagggaacgtaaaatgagaaaagctaaagagaatagtgaagaaagcggagagtttgatgaccttgtttcagctttacgctcaggagaagtgtttgacaaagacctttctaaattgaaacggaatcgcaaacgtattaccaaccagatgactgacagcagcagagagagaccaatcacaaaacttaatttctaattttccatgaatacttttttttagaaagctcattagcagccctctaaagtgactagaacgtttcattacactgccttgcaatccaaacagtggcaattttttccttcatctgtgagtgaatgtgtgaacgtgtgtatgtaaatgtatgtgtgtatatattaaaaaatgtatatagatgtctgagtgttgtctggagacctatacgtatggttaaaaagatttatgttaatgtatgtgctccaaaacctttcgtgtatgcattcacattgagtgtggctcattttctttccccgaacgccatgactgttcagaagcacaatactatctcctgaaagagataagagacattccctagattcaaaggcaaaacagaagaaacaaacaaacaaacaaacaaagcttgcaaaatattttatggtttccaagcttgatatcctttaaaattattttcattgatggaactggagttgttggaaaaacatagatttaaaatgatttttgatagctgacattgtgatgttgatgtatcacatcagtaataggaccagctttgaatttctgacattggtgtggggatacagtctgtaaatgtttattgagaacatcttgcacacaatttgaattatgtagaatgtcaatcaagtttttgtatatttaaaagttggacatcaattttttcccctgatttcatcaagttatctctgccaagtgctcttgataatttcttcagatttttggaaaaaaacactatataaatgcaatccatgctttttttaaagaacaacattgccagagtatgcttgttctaacaatatagatatataaaccttaaaaataataaaatatctcacccaagacttaaaggaagaattctctgaagggataaagattactaaaaaaaaaaaaaaaa

SEQ ID NO: 57997 - DNA, 3168 bp, Homo sapiens
tccctcagcgtccggccgaggcgcggtgtatgctgagccgctgccgcagccggtgctccacgtcctgggccttagcttcctgctgcagacccgccggccgattctcctctgctctccacgtctcatgaagccgctggtcgtgttcgtcctcggcggccccggcgccggcaaggggacccagtgcgcccgcatcgtcgagaaatatggctacacacacctttctgcaggagagctgcttcgtgatgaaaggaagaacccagattcacagtatggtgaacttattgaaaagtacattaaagaaggaaagattgtaccagttgagataaccatcagtttattaaagagggaaatggatcagacaatggctgccaatgctcagaagaataaattcttgattgatgggtttccaagaaatcaagacaaccttcaaggatggaacaagaccatggatgggaaggcagatgtatctttcgttctcttttttgactgtaataatgagatttgtattgaacgatgtcttgagaggggaaagagtagtggtaggagtgatgacaacagagagagcttggaaaagagaattcagacctaccttcagtcaacaaagccaattattgacttatatgaagaaatggggaaagtcaagaaaatagatgcttctaaatctgttgatgaagtttttgatgaagttgtgcagatttttgacaaggaaggctaattctaaacctgaaagcatccttgaaatcatgcttgaatattgctttgatagctgctatcatgacccctttttaaggcaattctaatctttcataactacatctcaattagtggctggaaagtacatggtaaaacaaagtaaatttttttatgttcttttttttggtcacaggagtagacagtgaattcaggtttaacttcaccttagttatggtgctcaccaaacgaagggtatcagctatttttttttaaattcaaaaagaatatcccttttatagtttgtgccttctgtgagcaaaactttttagtacgcgtatatatccctctagtaatcacaacattttaggatttagggatacctgcttcctctttttcttgcaagttttaaatttccaaccttaagtgaatttgtggaccaaatttcaaaggaactttttgtgtagtcagttcttgcacaatgtgtttggtaaacaaactcaaaatggattcttaggagcattttagtgtttattaaataactgaccatttgctgtagaaagatgagaaaacttaagctttgttttactacaacttgtacaaagttgtatgacagggcatattctttgcttccaagatttgggttgggggcactaggggttcagagcctggcagaattgtcagctttagtctgacataatctaagggtatgggggcaaggatcacatctaatgcttgtgttccttatactctattatatagtgttattcatgattcagctgatcttaacaaaattcgtagcagtggaaccttgaaatgcatgtggctagatttatgctaaaatgattctcagttagcattttagtaacacttcaaaggtttttttttgtttgttttctagacttaataaaagcttaggattaattagaagaagcaatctagttaaatttcccatttgtattttattttcttgaatacttttttcatagttatttgtttaaaaagatttaaaaatcattgcactttggtcagaaaaataataaatatatcttataaatgtttgattcccttccttgctatttttattcagtagatttttgtttggcatcatgttgaagcaccgaaagataaatgatttttaaaaggctatagagtccaaaggaatattcttttacaccaattcttcctttaaaaatctctgaggaatttgttttcgccttacttttttttcttctgtcacaatgctaagtggtatccgaggttcttaatatgagatttaaaatcttaaaatgtttcttattttcagcacttacatcatttggtacacagggtcaaatagggcaaataattttgtctttgtataatagatttgatatttaaagtcactggaaataggacaagttaatggatgtttttatattttaatagaatcatttatttctatgtgttatgaaattcacttaatgataaatttttcaacatacttgccattagaaaacaaagtattgctaagtactataacatattggccactaaaattcatattgagattatcttggtttcttggaagagataggaatgagttcttatctagtgttgcaggccagcaaatacagaggtggtttaatcaaacagctctagtatgaagcaagagtaaagactaaggtttcgagagcattcctactcacataagtgaagaaatctgtcagataggaatctaaatatttatagtgagattgtgaaagcaaccttaaagttttgaagaagactgatgagactaggtgctttgcttcctttcatcaggtatctttctgtggcatttgagaacagaaaccaagaaacatggtaattactaaattatgaggctttgcccttttgtttgcttttaagtagaaaaacatgttggcaacattgagttttggagttgattgagataatatgacttaactagttttgtcattccatttgttaaagatacagtcaccaagaatgttttgagttttttgaaagaccccaatttaagccttgcttatttttaaattatttccattcagtgatgttggatgtatatcaattatttagtaaataatctcaataaatttttagcaaaggccacagcacaaaatttattgagattatttactaaataattgatatacatccaacatcactgaatggagataatttaaaaataagcaaagcttaaattgtgggtctttcaagaaactcaaaacattcgttggtgactgtatctttaacaaatgggaatgaccaggactatttagcgtcatatgtgctttgtgtgcgtgagagcatcgttgttgtcatggtttttttagttgtttggtaggtaagtgtgtggggttgctgccggtgagtgtgtggcgtgtgtccttggggttggtgtgtgtcgattccaagtggcggggtaggttgtcgggggcggcggtttattgttaggtggtggacctgggccgg

SEQ ID NO: 57998 - DNA, 355 bp, Homo sapiens
gagaggactcagcgggccccgtctctataatgcagctgtgctctggagtcctcaacccggggctcatttcaaacttattttctagccactcctcccagctcttctgtgctgtccacttgggaagctaaggctctcaaaacgggcatcacccagttgacccatctctcagcctctctgagcttggaagaagcctgttctgagcctcaccctatcagtcagtagagagagatgtccagaaaaaatatctttcaggaaagttctcccctgcagaattttttttccttgttaaatatcaggaatataggccgggtgcggtggctcacacctgtaatcccagcactttgggaggctgagg

SEQ ID NO: 57999 - DNA, 547 bp, Homo sapiens
caggcactgtcctccctccagctgctcaacgttctcttcaggacctgcaaacatgagaagctgaccttggacctgacggtgctcctgggtgtgctgcaggggcaacagcagagcctacagcagggggcacactccaccggctccagcccgcctgcacgacctctactggcaggccatgaaaaccctgggagtccagcgccccaagttggagaagaaggatgccaaggagatccccagtgccacccagagccccatcagtaagaagcggaagaaaaagggattcttgccagagacgaagaagcgcaagaaacgcaagtcagaggatggcacgccagcggaggatggcacacctgcagccaccggcgggagccagccccccagcatgggcaggaagaagaggaacaggacaaaggctaaggtcccagcccaggcaaacgggacgccaaccaccaagagtccagcccctggcgcccccacccggagccccagcacccctgccaaatccccaaaactgcagaagaaaaaccagaagccgtcccaggtgaat

SEQ ID NO: 58000 - DNA, 5603 bp, Homo sapiens
gattgcaaagattttaatcgtactcctggaagtcgtcaagcctctccaactgaagtagctgagcgcttgggccccaatactaatccctcagaaggactgggccatcttcctaatcctacagctaataaaccacttgttgaagaattttcaaatcctgaaactcagaatctggatgccatggaacaagttggtctggaatccttacagtttgactatcctggtaatcaggtaccaatggactcttcaggagctactgtaggcctttttgactacaattcccagcagcagctctttcagaggactaatgcactaacagttcaacagttaactgcagctcaacagcagcaatatgcattagcagcagctcagcagccacatatagctggtgtattctcagcaggccttgctccagctgcatttgtgccaaatccatacattattagtgctgctcctccagggaccgatccgtatactgcagcaggattggctgcagcagctacattagcaggtccagcagtggttccacctcagtattacggcgttccatggggggtgtatccagccaacttatttcagcagcaagctgcagctgcggcaaataacacagccagtcagcaagcagcatcacaagctcagcctggacagcaacaggttctccgtgctggagcaggtcagcgtcctcttactcccaatcagggtcagcaagggcagcaagcagaatcacttgcggcagctgcagcagcaaatccaacattggcttttggtcagggtcttgctactggcatgccaggctatcaagtactagctccaactgcctattatgatcagactggtgccttagtggttggccctggagcaaggactggccttggagctccagttcggttaatggctccaacacctgttttaattagttcagcagcagcacaagctgcagcagcagcagcagctggaggaactgcaagtagccttacaggcagcacaaatggtctgtttcggccaattggcactcagccaccacagcagcagcaacagcagccaagcactaatctgcaatctaattcattttatggaagcagttctttgactaatagctcccagagtagttctttattttctcatggacctggtcaacctggaagtacatctcttggctttggaagtggtaactctttgggtgctgctataggctcagccctcagtggatttggttcatcagttggcagttctgcaagtagtagtgccacaaggagagagtctctatctactagctctgacttgtacaaaagatctagtagcagcctagcacccatagggcaaccattttacaatagtctgggattttcctcctctccaagtccaataggcatgcctctgccaagccaaactccaggacattcacttacgccaccgccatcactttcatcacatggatcctcatccagtttgcatttaggaggactgacaaatggtagtggtcgatatatctctgcagcacctggagcagaagcaaaatatcgaagtgcttcaagcacttccagtctatttagctccagcagccagctctttcctccttcccggcttcggtataataggtctgatattatgccttctggccgcagtagattattggaagatttcagaaacaaccgcttcccaaaccttcagcttagagacttgattggacatatagttgagttttctcaagaccagcatggttctagattcatacagcaaaaactagagagagctactccagctgagcgacagatggtatttaatgaaattctgcaagcagcctatcaattaatgactgatgtttttggcaactatgttatacagaagttttttgagtttgggagtctggatcaaaaattagccctggctactcgtattcgtggtcatgttctacccttagccttgcagatgtatggctgccgcgttattcagaaagcattagaatctatttcttctgaccagcagagtgaaatggtaaaggagctggatggtcatgtgctcaaatgtgtgaaagatcagaatggaaaccatgttgtacaaaaatgtatcgaatgtgttcagccacagtcactacagttcatcattgatgctttcaagggacaagtatttgtgctttcaactcatccttatggctgcagagtaattcagcgcatcctagagcattgcactgcagaacagaccttacctatcttagaagaactccaccaacatacagagcagttggtacaggatcagtatggcaattatgttattcagcatgtactggaacacggtcgacctgaagacaagagcaaaattgtttccgaaatcaggggaaaggttttagccctgagtcaacacaaatttgccagcaatgtagtagaaaagtgtgttactcatgcctcccgtgctgagagagctttactgattgacgaggtttgctgccagaatgatggtcctcacagtgccttatacaccatgatgaaggaccagtatgccaattacgtggttcaaaagatgattgatatggctgaacctgctcagagaaagataatcatgcacaagattcgacctcacattactactttgcgcaaatacacatacgggaagcatatactggccaagttggaaaagtattatttgaagaatagcccggacctaggacctattggaggaccaccaaatggaatgctgtaaattacaggagcaagagaaagaagataatttaaccatgtgaaaagaatttttttgtgcgtgaattatcaaaacacaactcaactatgaatcttcaatttttttttaaagcaaaactatttattgactttattcatccatttgtaaattttttaaggttcttgtgtatatttggggggtgggggatgaattataaattatattcagccctgagtggagacctatcagattggattgctggcaaagcacagaatgcctgtatatgatgtaactgtatcaaaaataaaaagctgtcacatattttgtaaatttttaccttgtaaagtcacaaaaatagtttttaaaggaaaaagtacagtattcttttaataaactggctcacagtctggtaggtctacaaccccatagcacaacaggtttatagagatgtatatagaattatagtccttatttttttcctttgcgtgaaaccttttataacagattaacaatcaactgcataaatattattaatattttaaaaagagttaagttgtattttgataattcacaaactatcatgcaaataacgagtaagtagacaagaataaagtggtttgagatgaaaagaacctaacattatttacagtagatgtggttttaatacaattactgccctaaaatgtctctggcaatgtacagaaatattgtatatacttacatatgtaattgttgtaagagttaaatacaaaatcatggtgacacttccaattaagtgcactaaatgaaaagttaagtcacttattaacttttcagtttggtttgcaatgagaaagagtggaaatttgtattttgttttgcttatagaattacagacatgttgaggaagtgttgagctttattttgctttttcatagaggcagaaagtaggaaccagatagagatgaaaaggggccactgaaaagtgaatttgatagctcagcatttaagcatgattacatattcagatagctctttttgctttctataaatatatgcattgtgtgtgtagtaatagatgtaagtttacactttgaaaggaaatcttgtttcaatgtttattataaaagccttgctaatttagtagtgatgctttccttggttgtacaggtgtacatttgtaaaccttcatgctgtaaatggaatttgttttatctctttgggatacatttgcattttagtgtacatttacgtccctgccctctttgacctggcaatatagtgttgtataatgtaaatttatttctccaaatcgagagtgattttttaaaaattttttatctttatatggtttcagaagtatgaaccagctttctttttattattgtgagatcattttgttttataacatagttgttgactgttaatatggacctgctagaatttggatcactttcaattgaagtcagggtattgtgcataatagaaagtattggactgagatatttggttaccatggaggccaatgcttttttcatcttattaaatgtgatgtgacttttttctttgtacagaagagtactgtatttttgaatagcctactcccaagtaagagcaaatctgtatgataacattttttcctctggacataagacataacagtaacacgatgtacatttacaagcggccttatgtacatttcccaacaatctttttaaggcaaaattgtgaccatatgtgtataattaaaatcgtttttaatcctttgcctatgaaaatattttggaaaaaaacttgctgtgtatattcagtttctgaaagataaagaaagtgctttgtattttgttgaagtcagtattttgtataaacatttatgttgacccacttatgttcagtgctgaaaactaaaatgaacatgctattctgtcagctgaatatggaagagatctttttttactagagatctgcagaagaaacgcaatcttctgagcacaatatggaatctaaaggttttatcacttagttgttcatattatgaacctaaaaataatggcataaagtttggggatgccaggcatactttttcatgtttggtgttgagttattttacttttctaacccaacattccttggtgagaccattaaatccaaacacttgtcaccgttccttctcatagtcactctgggtcatcagcatgtcccagtcactgcaggcaacgccttgtgtttgtttcatttttttaaaacccacacaaagccgctgtctcactttttcctactttaccaacctcagagtatttcgggcccgtatcgaacttttgttctcagtatcagcccatggtttcaggatcaaagctgtcatgttggagattggtaatggctttcctgtctttgtacagttgaattcctagtcttccttcatccttgccctctgttggcacaggcattatctctgcaattttagaaaatgacaagtagagaatactacattgagaaactaaaccctcttcttggggtcctgatactcattcccatttgtcccagtgctgacaacccaatcttcccaatactttcaggcctgctctacaaaagtacctgttcttgtagaaattttacagtctgccattttgggtgcccaccccaatttttaccttttagtaagttggcatgaaattttggtaaaatctgaaaatcacatttcagaataaaacaattgggcaaaactacctaggctttactcttgagtgtctccttttgatagggattgtttctggaccagtttgtctaagtcctggctcttattggttcatatgaaataatgttaacttcacttctttgtatattatgtataaattagaaaatgaaaaatgtgtgaataacattgtatgaaataaacctggtcttgtgtttttctctagataaaatacccctctgtacctcaaaaaaaaaaaaaa

SEQ ID NO: 58001 - DNA, 1810 bp, Homo sapiens
ttttttttttgacagaatgggcaaatttccattgtctgaacaaaccaagtaaaaaaaaccatgaatcatttattctttggttgtatacacagacacttaagtactgtatcgctgttatgcagcggcctgtggaggcccctgggggtggctgggcctgtgtcctgagccctcagccagatccagggggtgcggtgtctggtcatgtccactccaagagcagtagcaccatgtagaaggctgtgagcagggtcccctcggctgagtggcagatgtaggctcactgctctgcagccccgaggggctggcccagctcagagtgcagaagagttcctctccatgggtctagtcacccatccgtctgacctggacgctgtcatagctcatccttgggcttcgattcactgcctgagagagactcttgtgcaggttcgggggggccctgctgggcatccaggggctgctcctgggagaggtcccatctcttctgggctgaagagcatcttcaccaggtcatctgcctggcaccctgtcccgctcgctgtgtcgagggtccagggtgaaccacagggcgatggcacagcgctgccccctggtgacagccttcactccatgtgggttttcagtgcctgaagagaatcccacggctcttccacactgaggctgcacctctgccgtcacggtcttggcatccagttcagtgaaataaaagtttccgccatcgaagtccccatttaggtaaaggatggcgctgtagtcgcggaaggtgtaggctgggggctctttgacacacacgagggtctcggcattcaggatgcagttgtccacgtggactggatgactatcatccttcctctctgcctggacctcttcgatggcagtgcggcacaccagatgaagagtaggaaaagtagaggggcgtatcccaggcggaagtaggactccatgatgcgccgcaccttctccgtcacgttgtagtacaggtgggcactctgcagaggaactttgccttcttgccccagcttgagggctttgaagacagtgacaccatagaacttttcattgggagtatgtggggaggtctgaccccggtagccatctcctgaggttgctgccacattggtcagtctctgcagctcctgacactcgtggtcagagattacgccgtccatcaccacccgctgggaaccattcaggagtttggagttcatggtgagactgatgccttcatacagcagggggccaccttcccgggtcagtctgctcacatccagtgactccttggtcttctcttccacaagggtctcgatttccttcataaggttcccaatctcctgggagatgcgtacggctgtttcccgttctgacttctgtttctcttgcaatctcttgggaatcacttcttctggagtccatgaatccggatccacaaagggaattccaaaaacatcataagcgaagaaaagcagttctttttccagtaggcttcgctgtcggtactccttggcactctcacgggggccgatggatctggtgtgttcttctccaagcatagctgcataataggccaaattttggttcatcacctcgtcattggggaagaagagaagataggtcttggcacattcaacagcctgtgtataattcccaatgttatagtaggcaaactgcagataattataatgcgatgggaggaagtcttcaaagggcttctctcgacttgggtgggaagcaagctccgtgacacagttctgcttacagttgaggacctggatgtaatgatctgtgatggcctggaagaggtcagcgttgt

SEQ ID NO: 58002 - DNA, 1018 bp, Homo sapiens
gcagagcgctgctcccgagaaccctgcacccctcaatggagtaaattaccataaagcctcttccttacccatgctttggggtgttaacagctgaggctattcgtcggtgacctgtgggactcgagctattcctgcagctcagcagacctcctggccgtggcagacttctgcgttatgacccggctgctgggctacgtggaccccctgggatcccagctttgtggctgccgtcatcaccatcaccttcaatccagctctactgggaatgtggttgcacgatggggaacacaagacccgcaagctgagcagggcctttcggatccccctacctgggcctgctactctctaaagcgtcaccatcctgctcctgaacttcctgcgctcgcactgcttcacgcagggccatggctgagccagcccagggatgggagagcctgggacacccccgcggcctaacagcctggggcctcgcgctcctgggactgggcgtcgtgctcgtgctctccagcttctttgcactggggttcgctggaactttcctaggtgattacttcgggatcctcaaggaggcgagagtgaccgtgttccccttcaacatcctggacaaccccatgtactggggaagcacagccaactacctgggctgggccatcatgcacgccagccccacgggcctgctcctgacggtgctggtggccctcacctacatagtggctctcctatacgaagagcccttcaccgctgagatctaccggcagaaagcctccgggtcccacaagaggagctgattgagctgcaacagctttgctgaaggcctggccagcctcctggctgccccaagtggcaggccctgcgcagggcgagaatggtgcctgctgctcagggctcgcccccggcgtgggctgccccagtgccttggaacctgctgccttggggaccctggacgtgccgacatatggccattgagctccaacccacacattcccattcaccaataaaggcaccctgaccccaaaaa

SEQ ID NO: 58003 - DNA, 632 bp, Homo sapiens
ggcctttgggaagaccatatcctccatactccttggccgatttctcttggaacaacatcactgattcattggatcctgccaccctgagtgccacatttcaaggccaccccatgaacgaccctaccaggacttttgccagtggcagccctggccttcagggtccaggccttttccaggtccagccgatcagcccaaccccctcgcctcctgcacacagcagacacctgtcagctagaggtggccctggttggagcctctccccggggaaaccgttccctgtttgggctggaggtagccacattgggccagggccctgactgccctcaatgcaggagcagcactccatcgacgatgaatatgcaccggccgtcttccagttggaccagctactgtggggctccctcccatcaggctttgcacagtggcgaccagtggcttactcccagaagccggggggccgagaatcagccctgccctgccaagcttcccctcttcatcctgccttagcatactctcttccccagtcacccattgtccgagccttctttgggtcccagaataacttctgtgccttcaatctgacgttcggggcttccacaggccctggctattgggaccaacactacctcagc

SEQ ID NO: 58004 - DNA, 1307 bp, Homo sapiens
ttttttttttcagggtggataaggctgtgctttattacatgcataattacaaatctgtgctaagtgaaaatgtataaagcaatggcgacctgggtttaagccacacagagaaagggctggacaatccattaacccttctgccaatgtccattccattgcttttaacatgattgtttccatttcttacaatttgcatagcacttacttgtcaacttgctttgaattcattgtctcagtttatcctcacaacaaccctgtgagggtagggaggggcaattaacactatccccattttgcaggagggggaacactgagggcacagagcgggttaaggatctcgaggctagttagtagaagcatagggaatagaaatcaggtctcctaactccccagtcccacatcttcctttttagactatgttgttccgcatgactagggagtagaataaagcgagcagtgagccctaagctcctggtttcagggctatgccctaggaacaggcgagaataaagctaagaaagcatggctaagggctagcaacactcagataaacaactgctctggacagctcagcaccaaacttcctgcggaaacttgggctctattagctttggttgaagctactttctggatgcctagttactgctgatgtctagacattagcttcagctgaactttcaccaactctcaggcattaaaatgtcgagtcagacaggttttctttgggctactgcagttggagccagccctacaaagagcttactacagagaaattcaaatagtggcccatgggccggaacccagcccctctgatcttcctggcctcattggctcactcaacaggtggtagttttcccatagccagaaatgaatgggcagaggtaagaacaggaggctggccttggtcaaatgaagaagagtcacccacatgacatcactgtcccccttagctgacgtgagcaaggtactgactgggccacctcctttctggcctatacctggttagcagcatagcttcaaaagagtttaagagaacaaaatattaaacacatcattttaaaatcctgaatggaataaattcttaatcatcacaaagtcccaaaggaccaaatatataataaaaagtaaatacatacttataaaaaaaagctgagtgctaaaaagccaggaaaatgggagagaaaggaagaagaggggacaaagtgaaatggaggaaggaaaaggaacacactggaaggaccatgtattttgaggtacccttaatgtgacagtgaggctgaacattcccctctcaggccacactctcc

SEQ ID NO: 58005 - DNA, 3116 bp, Homo sapiens
aaggcgggggaagcactgaaacaacacaaaaccctatctcaagaacttgttaacctccggggagagctagtcactgcttcaaccacctgtgagaaattagaaaaagccaggaatgagttacaaacagtgtatgaagcattcgtccagcagcaccaggctgaaaaaacagaacgagagaatcggcttaaagagttttacaccagggagtatgaaaagcttcgggacacttacattgaagaagcagagaagtacaaaatgcaattgcaagagcagtttgacaacttaatattgcgcatgaaacctctaagttggaaattgaagctagccactcagagaaacttgaattgctaaagaaggcctatgaagcctccctttcagaaattaagaaaggccatgaaatagaaaagaaatcgcttgaagatttactttctgagaagcaggaatcgctagagaagcaaatcaatgatctgaagagtgaaaatgatgctttaaatgaaaaattgaaatcagaagaacaaaaaagaagagcaagagaaaaagcaaatttgaaaaatcctcagatcatgtatctagaacaggagttagaaagcctgaaagctgtgttagagatcaagaatgagaaactgcatcaacaggacatcaagttaatgaaaatggagaaactggtggacaacaacacagcattggttgacaaattgaagcgtttccagcaggagaatgaagaattgaaagctcggatggacaagcacatggcaatctcaaggcagctttccacggagcaggctgttctgcaagagtcgctggagaaggagtcgaaagtcaacaagcgactctctatggaaaacgaggagcttctgtggaaactgcacaatggggacctgtgtagccccaagagatcccccacatcctccgccatccctttgcagtcaccaaggaattcgggctccttccctagccccagcatttcacccagatgacacgtccccaaagtccacagactctctgaaagcattttgatgcaggtctgcaggactgaccccaaggaggaacgtgggcacaagaggtatatcagcacacgtgtgatcaccgtagggtaactggagcgtcaccaccggcggaatcgcagcttctgagactggaagtctggaggaagacttttgcctccgtccaaaagattcctccaaaaaaagatttaaaaaaagatttcggcatcgacacggacgttgttgcacaaagcacttaaagaacgagagcatcttgttcattgcctttttcacctaagcataaggggaaaaactctcagggccctattaagatttataacctttgtaatgttcttcaccacagacaccttcttgtgagttttcagtctgactgtgggggtggggggtgtgaatgaaatggatgtcacagagtgtcatgtgtctgatgcagcctcctctgctgtgtattaaatgtcaaaatctgaatatatctggatatgtactaatcaaataataatcaatcaatcagcatatacatttcagccaaagccatagaagaaaaagcaatagttgcttgaattatgatcatctaccaccaactctgctcagccctgtaacagggtagggagagggtataacaggaagagctttgacttgtccctgtctatacattctctgtatcttttgggggtaacttcttggcagtttttcagtgttcagccatgtcagttgaaactagatttttctgtagattttttacttacccatgtgagcctaacactatcctgtaattcattttctcaggctatgtgtaaatgtagaaccctaatttttctataaaaaaacaaactaactaactgtgtaaagaaagaaaaagggaagtaccaatgggtttttccaccttatttttacctttgatctacccttgcagatttaacctgtcttcttccctcccattattctcattttccttttacctttctccaccatccagagccacaaaagcaaaccttctacctcctacctacttttctctgggacaaggataaaggaatatgattttccagagccccagagccagctcatcttccaggtgctgaaaccactttccaaataaactaaagcctggatttgatattacaaattttgggaaatcttagaataaagaacgagaacaaggaagtcattggctagtataattaagaaaggtaggattcagtgcttaccgatgatgcagtacttgatagaagaaaacagtctgggaggatagcgctcatttttcaggttaccctttaagggagtccctttgtctttgggaaagtagcagaatggtccgcttctttcccatgagtggaaaatgtggcttgtccaactctcctccaggttgcatttcagtttctttccaaaacttattacctcccctaatcctgagactttggaaaaggtggaaggaagaactgttgctttatctatctccccctccctgcatgtgtcaacattgtgatgtcagtatttactaatctacattcagtggctgttacaaataacagctgtagtaagaagagattcaggatgctagaggtgaatatttgggtcatttacatgtacactacatagcaagttgatactcatgttgcatgttcttttaaattagtgattttgtgtcttaagtctttaacttccaatacttcatcatgtatgtaaccttccatgtttgcttctgataaatggaaatgtaggttcactgccacttcatgagatatctctggctcacgcttccaagttgttctcaatgacattagccaaagttgggtttgccattcatcccctaggcatggtaaatcttgtgttgttccctgctgtcctccgtattacgtgaccggcaaataaatctcatagcagttaatataaaacatctttggaggatgggagagaacaggagggaagatgggaaacaaaatagagaattcttaagattttgtttaaaccaaatgtttcatgtagaatgcaaaatgttggcacgtcaaaaatatgaatgtgtagacaactgtagttgtgctcagtttgtagtgatgggaagtgtattttactctgatcaaataaataatgctggaatactcaagaaaaaaaaaa

SEQ ID NO: 58006 - DNA, 2359 bp, Homo sapiens
ttaagttttctaaatgctttaattttttgtcacaaatatttctgcatctctcagtcccttcttgttggaaaaaggagggctagtgatacatttgttaatggcacttttaaaatgtgctttggtatatagaggtaacaatgtacttcttaggtatgttaataataaattaaggttataatggttgccatattagagaaaatgaataagattagtctcagcaaaaataaaaattagtttggaagtagataagctagaaatatcaaaactgaaaaaaatagcttcccagatagcgttctactatgtgcaattttttgaggggaataatattcaattacagagtgtaataccttgcacagcacttgacatatagtagctattcagcaaatgtttgttgaattttattactttttaaacaaattactgagtaatcttccttagtaatcatttctgtaactcagataaaaatagaaatttataagagtttttatttttgttacttgtaaaagtatatttcctagagaaaatatcagcagtggtagagaccagaaaaagtaagtgtgtgtgttctaaacagtgattccaactcaatgtgttcagagaaaacactttgaccctgtctgtgtttacagtccctgctgacagtgtactgtcgtatcctcagccttgttctatttctttattttagctttacagagattaggtctcaagttatgagaatctccatggctttcaggggctaaacttttctgccattcttttgctcttaccgggctcagaaggacatgtcaggtgggatacgtgtttctctttcagagctgaagaaagggtctgagctgcggaatcagtagagaaagccttggtctcagtgactccttggctttcaacccacctagcctcagacagccaggaggcctttttaccactggatactgatgagatgttttaggtccttgcactttgcaaaactcctttctcccagtgggatattattaggacatagccaggctagaaaggccgtgggaagctttggaggtaggaggataggatccagacagggttacaataaggagaagggcattctctttggtgcaactcccaatagtccaaatggcagtccctgagctgaatcccagttaggaaccaagggtggactttccttctttggttctttggcccttttgatttccccagctggggcagggtaaggagcatgaaagaaaccagcctcaggtgtgtctcctcatttctgtctcatctaaacttcagcttccaggcatcgccagggtagttttgcttggactcttggactcttctgggtttttatcagttttctttgattccctcattagggttgctatcattggccttctcctcctttactactttggtttcgatcatttccttctgctgattcttgtttgtaaaagggaaggccttcacataccttttgacatagcaaaatccaagaccagctgcagcaccaaagaagaggagagcaagcactagcagagccgtggggacacctccaaacccagcagcttcattcttgaatgctgctttattttcaacaaatggttcagtttctgtagacatggtgctagtttccataaaaacttctgtgacacaaatcaatttttttctccgtggaatagaagtggaagctggagcaggaggagtagtagtaggggcaggtattgtagagtaaggggatgccaccgagtaggtactgtcactgacaataaattctgttgtttgtgttgcagtttgagtgttgaatatgggatctttggtggtgataatttctggaatgcacgagttagtccaagtatcagatgagttgtaacaataggctgcaaactgtcggctcactggaaccttccaaatcaggacacccaccccatttttcccacacttggggtttgggctaatcctagagatgaccacgaatccatctccaacccagccatagctgcaagtttcaaagctagctttcaaggctgtttcaacttggtccttgccggccaaacttagtcccagcagcctacaggcctccttagcttctgtgaaattcagctgctggttcgcctttttgctcacaagggtgatccccataattctgcatgacacctggatggaaagctcttctgcacgcaaagagccttggaccaggagcctcgtggtccagatggaagtgagaagcaacaccaggctgaagcacctggccatcgtgcctaccccttcagagccagggaaacacctcagatggccactggtgatatgagaggcagatgctcaataactagtccggatggagagttctggaactatgttgaggctcacactcacctcgtgccgaatt

SEQ ID NO: 58007 - DNA, 2049 bp, Homo sapiens
  misc_feature (1)...(2049): n = a,t,c or g
aaagctgnggcgcccaattttttttttttttttttttttctcaagccgtttttattacacttagtgtattaagacaagtacaaaataaccttgtaattaagatactgtatcagtcaaaaaagaagtcactattgtatgaagagatttacaaatgactaaaatatacaggctgtgacagaattaacagtttgaaagagggttgcttttttcttttagaaatgctaaattttccttaacaagacaaaaatacagtgctctaaatatgcattaccatgaaaacgttaaagaaaagcagtcttaacacttaactactattaacagcctttgccaacacatgcctgcctactccctttcctaactttaaagaactgtttcctctaaggaatactagtgcagcataacccttaaataatttcatttatttttaaagttacaacctacagagaaattaacatcttggtcaatctaataacagtggcaaccattcttcacatgcacttctcttagaataaatccccttggctggcaggataaggcttatgctgtagaaccttctcccccacagccacaaatccccttctataagtccctcctaccctcatccccccgcatccccactggcattcacctttcccaccccaaaaagtgcagctcatggtagccttctagaaaatggttttaatgggtatcccagcatacacgcttttttaaaagccccctctgaacaccagaggtggtgaaaatgaattgtgttcttggatttttttttttttaagcctccactgggtcaaaaatatgtgctcttaatacttgagtttttgctttgtgtgtgggttttctttctttttcatttagatatcgtgggataaagtggagaggacatctccattttcccatacaaactgagggtgagaagagaaagagaagcaagctgttgcccccactttggcctgggcttcccagccatcttcccagctctggttctttcataggaactagttattgcttccacaatgccgttatacggaatgttccacaaaggctgtgaacctagtcacagtctacccacaacaagaactctgctctgaaaaaccagcccaagagctcttacccagaagaacaatctttagccctcaaggtcactgaaacttcattagagcagtttagagtagacgtgtaagatttgggcatatattaaatgattattggcacaatgttctccagttccatgtataaatgttgatatgcacatcggccagggcccaggatgaatcagccaatctgcaccatttttatgtcagcaataattccatctcttccctttgagcactgtagggagaagctgcttcatccggttctccaaaggccttggccctcaaggggaggtgctgctttggctcttactgctgccaccactgccactgctactgctgaggccccggttgttgttggctttgtcacttgttttattctctgccccttctgccctgtctcctcgttctacttcacattcaggggaggaggccccgctgcattcacttcgagggcccaacactgggaacatcatcccaaactctgacagggacacagggctgggcagatccaggctgccaggcctcacaaccgcagggaactggtcaggcatctcagacgggcttgttggtcctgaactaaagctggacacggactgggtttccgagtcatcttcagacacaaagttgctacagctgtcatcttcaaaggcctccgaggccacagaaatggcatcaggctcaggtttgctccctggcagatcctccacagatgtgctgctgccctcagcaccaacaccgcatccccgaggccccatggcactggagcgccgccgctcgtggatctcatctgagatcatctccaggttcttcagggccatcttgtactcgccttttgccagggtcagtttggcctgcaggtcatccacagtctttttcagttgctcgagctgcacatagtactttgccttgagttcaaaataaggcttggacttgttgatggctctcttgagtttcc

SEQ ID NO: 58008 - DNA, 2883 bp, Homo sapiens
cgggccggctcaggcagagacgcggcaccatggctagcaagaaagtctgcattgtaggctccgggaactggggctcagccatcgccaagatcgtgggtggcaatgcagcccagctggcacagtttgacccacgggtgaccatgtgggtatttgaggaagacattggaggcaaaaagctgactgagatcatcaacacgcagcatgagaatgtcaaatacctgccagggcacaagttgcccccaaatgtggtggctgtcccagatgtggtccaggctgcagaggatgctgacatcctgatctttgtggtgccccatcagttcatcggcaagatctgtgaccagctcaagggccatctgaaggcaaaccccactggcatatctcttattaagggggtagacgagggccccaatgggctgaagctcatctcggaagtgattggggagcgcctcggcatccccatgagtgtgctgatgggggccaacattgccagcgaggtggctgatgagaagttctgtgagacaaccattggctgcaaggacccggcccagggacaactcctgaaagagctgatgcagacaccaaacttccgtatcacagtggtgcaagaggtggacacagtagagatctgtggagccttaaagaatgtagtggccgtgggggctggcttctgtgatggcctgggctttggcgacaacaccaaggcggcagtgatccggctgggactcatggagatgatagccttcgccaagctcttctgcagtggccctgtgtcctctgccaccttcttggagagctgtggtgttgctgacctgatcactacctgctatggagggcggaaccggaaagtggctgaggcctttgcgcgtacaggaaagtccattgagcagctggagaaagagttgctgaatgggcagaaactgcaggggcccgagacagcccgggagctatacagcatcctccagcacaagggcctggtagacaagtttcccttgttcatggctgtgtacaaggtgtgctacgagggccagccagtgggtgaattcatccactgcctgcagaatcatccagaacatatgtgagtggggccaggcccaggccaggccgcttttttaccccagtggagaccagcagaagcctggggtacctagtcaccaggatctccaggactcccagggagcagagtcttctcatcttttcactggaggacaggaggctatggggcccagctacgcacctggagatcctgaactgtcaagccactggcagcctcatgccaccacatttgccagaaatgcagttgccctgtccctctccagatgtggggctttctccatatcctctgggaggggtggaatcaagccccagtgctgcctgcttggtggcgggggtgatgtatgtggagaagggttgggggagaggccggtagggcaggggctgctagtggctgtctcacatacaccagtaatcctgttaaagggctgaagaagtatcttagccacaggagcgatgaggcaaggattgtcagggaggggtctgggcttctgagctgatgcaggccccaaggacccctttgctgacctctgccaggacccacacagcttcgatggatctcagtgtttgttaacaaaatacaaagatctcaaacaaaccccttttagcttctcctagcaacatctgtgtcctcagaaacctctggttctcccccttccccctcccccagggctgccctggcacccaaattgctgccatgctggcatctgtagctcggtggcttgacattctccccagggacttcccggttcctagttctttgccagctcctccccactctgtggcgacctttccaagccttccctcaccctccccgccagcaccctctttggggagcaggaacttaatctgctgacagagctacacctttcataacaggctcagatcactcagctccctgtgacctttgtattcacccaggcttccttctcagtagctctagctgggggaggtgtcagctggggcccctcctgtgctatctccccagaggacatccctgactccacccctttcttcctcccaaactctgcacctcttcctcagctgctccagaccggccagggtaaccagctaaccatgcctgggcatctggaagccagcaggccagagggtggcccaaaggctgatgaacggtagggaagggtgagcagattcctatgttgggtgggcaccaatattccaagggcagctctctttgctgaatgagggccttctcgtgaggtactgacaacaccagcaactcgagagctgggaaactcaaggaggaggaagaaaatcaaaaccaccctactccctggggtgaggaaagaacaggaggggaggaggaggagtgtgctctgcacttgccttgctccaggatggggtggcagcagaggaatgtcacaggtcagcagcctaggcctccagctataaatagtccggagggccccgaaagaagtcccgcccgtccagcagggctgtcagcttcctgtgtggcagcacctggcacactggctctggccagcattatgctaaaaccctgttactctccaatgaaccagggaggcgggctcctctctgcgcctatcccttgagaattctgtcttaccagtgaagggtggggctgcccagatcaggcagcaggagtgaggggcacagtcaccccaggccttgctgagcccaggtctgggtactgagtgtccagagctgcctccccaggaggttaaggtgggggcaaaggggaagcttcaagcactttgcctacttttgttcactccccagtgcactgtgactcaggccttcccatcaggcctatttgtctacccaataaagcgtgttttttccagaaacaag

SEQ ID NO: 58009 - DNA, 1695 bp, Homo sapiens
tttttttttttgtaaatgatgactcaatctatctcccaagcaccaatcctgaagggaatgctgaatctgaatgcccccataggtggaacttcaaactctcaatgttcaaaacaacatcgctttttcttcacaaaatcttcattatgtatttgatggaaccaatatccttgaaataacataaattccaagctttaggtacctttgacgtataggggataaaagaaagggaacagtcaatcagatgctaagttctcttagttttacttttcttgtttctctccagtgcaaatagcaagcaatacacataggcaagtgctggaataggtgcttttgggaatgtgtattctaatttctgaacctttccttatgcttccaaaaatgctgagagacgttcaagcttttggtagagagaagagatgaactgttgacttggatgtggggggacatttgaggactccacccctatttccaagcactgaggcaagccaaactattctaatataaagttatggctggcaagctatattaagtttattcactcaataaatccagtgcttctacaataaaagaaaggaagaaacacttggaacactcaaaggttagaggggggaaattactgacagtttcatgtacctctttgggcaaagggtcagttatggggatttgaggtgctcagaaaatagtctgtgtactggaagtcataaaacggaatcaggtttatctaagttggaggtcagggctctgacacagtacccttgggcaaatcatctctctgggcttcagtgttctcattttacaaataatgcctaattctcagggctgtatctcgagaatcaaacacatttcctagagtcctgcagtaacaacgatgactaaaatttattggtatgtcttttacgcaccaagcacttttctttactcatttaatattcattattctgcaagacagttactagctcatttacagatgaggacacagagaaattacgtaatttgtccaaggacacaaggctaacaagtagtaacgtatacggaaaagccaacactgtattaatactgtcacactgggaagggggaacagcttggggaaagattttgtgagggagtctccaggaggggaccggctgaacgtgggtcagactcacaaacaccgtggccttggccgctttgcgcagccgcaggtacttcagccggtacttctcattctggctcttcttcgggagctttttcatcctggccttgctggactgcagcggagcccgcggcgaggaagcgaggccgtccagcaggctcatggtccagccccgctacgggggccccaggacgctgccggcatcggatcctaagtcggggagcgggcgggagcgctggctttgtctgttccgggctagcggaatcgggcctctaggaatctagctctccgggacgttcccagggctgaccgcagggccagagacacccgcaaccgaacgggctcccggcgcctcccagcacttccgtgtctgtcttggaagtaagcccttcccggaagttacgtcccggtgtcggcagtgtgtaacttccggggcagggagagtagggtggtctgggcggtgcgatcgtgggcaccgggaggaaagagacagctgggggctagtgctggatgaggagaggagggaggccggcggccgtgtgcttagctgaagggtactatag

SEQ ID NO: 58010 - DNA, 1032 bp, Homo sapiens
cccctttgaaatcccagctatgacatgattacgaatttaatacgactcactatagggaatttggccctcgaggccaagaattcggcacgagagtacagcactccagcctgggcaacagagcaagattttgtctcaaaaaataaagtttattatgccaggagggccaggtgtggtgccacacccatgtaatcccagcactttaggaggctgaggagggcagatcacttaagcccaagagtttgagaccagtctgggcaatgtggcaataccttgtctcttaaaatttaaaataaaaaaaaagtttattatgccaggaactgttaatgtgtccaaaaaaactccagtgtggttctaggatgagataataaaaacaggttgtctagggtagtgtggaaggtcctttcagtcttcctgtgcctatcagtgatcctcattgccatgttcccttctggtgctcaaccggaggctccctgacagatgagtcctctgccagaggaaggctaagatgtagaggacaaatcgtgtcaaggaaaagaagcttgaaggagctaagaatgcttagcttagagaagacaagaggaaacaggacatggctttgggaagttcaaggatggtccagtgaaatacatactatacttttgcaccccaggctaagctgacccatgatcagtaagtaggaaataaaaggccaatttctggctactcttgcccccaaccccatttaagtgaaaaatgcatttaatacacctaggctaccttaaacctactcagatcacttacattagcttacagttgggcaaactcatctaacacaaagcctattttataataaagtgttgaatgtctcatgtaatttattgaatactgtactgattgtatggatacttgaagtactgtttctaccgaatgtgtatagcttttgcacaatcctaaagttgaaaaactggaagtcaaaccatcattatgttcaggcccatctgtatttctggaccccctactaggactaggctccttgagggggaagggggccaa

SEQ ID NO: 58011 - DNA, 2481 bp, Homo sapiens
tttttttttttttttaagcagtctggattcgtgtttattgaagccagtaattagagacatctttttttcccaggactagaaagcaaggttccacatgactgcatactgcacccggacagagccacacccctggactaaggctggtgggggataatctgcagtcttacttttaagttagaaacaccaataaatttagtatacagacgacagtgaactttcacttacagcattaacattgttaaggtcatgatgtacagagcagtcactttcaactttgttaaattaataaaacatgacaatgtccttcagtttaaataccgattttaaaatgccaatcaaaaaaaagtgcaaacaaaataacaatctagcagcattatctgttgcatttttaggaaagaccaattcttggctgttatcttcaggccacggtattcaaaggtgggcttttctctgatttttttttttattttaaagacaaaaagcagatgtaaccattataatgtgcataaatagtcataaaattgtctttaacagtctaccatacaagtgtactctgcaaataaaatgaattttactttaaaaactaaaggctgtttattatttggcctttggttccaatgcttgaaaaccccaaaataacaaaactcatctcccttcctcccacctcccaaaaagaaccctgcagctccccaaagttggtagactttggcaaccactgagcacatgacactatgtatcagcttcttctgatactaggagcttccacttctcatgagtaaataaaagtggtctccaagaaaccttccttcacaagacatgtcttagcatttcatcagttttagtatattttatattgacacaaaaagtgcttatcagttcaaatgataaaaaataaagacaaattaaaattttgcattaaaatttaaaattataccataattcctcttcgggcatggtgcctttccaggaattcttgtttctgaggtcactcattttactcccggggactaagcgaccccacctttagtgaggccacaagctgtttggcatctattggtcactataccacaattatcattctacagtcagtttactgtcattacctagacaacctggtaactggaagccacaatacatttgtttttttaaaaaactgaattaaaaaaggaaaaaaatagtatatctcaacaataaaactggcacaagaaacatttctatcagaaaggcaagttgatactcagctttctccttaacagtgttcagacctttacgaaagcaattcaagaaagtcttcaaagagtcttgacacaacataggatattaagttatccccagtactacattagtggtcagtcaaatctggtatgtaaaagtaatgacattagggaagttatgcttagacacagtacaacaaacattcatataaaaaaagtaaactccacatggtgaactgtggttttttcccttggtttgacaacattttatacattaaattcatggtagtgtttgcatttaaatgctgtcatatataaaattaaaagtgcaatttcaaatccacagaaatcatttccagaatggtggtataacatgacaatgtgcatgaatttgccctaggtggggagacacctgaaactcttatttccataagaaaaaaaatgctacattttatgaaaacacctaacaagagaaatgtatcatttccattttctgtataaaacattcacacttatctgtccatctcatagcactgatcagaccaggaagctaggaaaagacccttttgcatcagtggaactccttgaagctttccacaagtcataaggcagggcttggtacgagccaattaaccagagtgcaattacattaaaaacctcccccaaactttccgtggcacattgcattatggtaaaaccagaggttcatcacctattttgtattagttaggccagcctgtgatagtaaaaacaaaaaatttaatttaaaaaataaagcaggagctatttagacaacaaaattcaaagtaaactaattctgtaactgctgactttgaagacatcccacagtgactgtctgccccacaacacatatccgtggaccccagtacctctcacgaggacatagcctgggccaagcacatgggtcctgggcagctgccatcgttcccacccctgggtcagctccgcctgacttcaggcacccccacaattagtacatctttcgtaagttaaagatgcattcaaaataagcctaattcccattttgcttagtgttttgtttgggaaatgcttctaacaatgattcttcaacttctactgaatgcacagtatttactgacactgctcatctcctccttcctccaccttccctcaacattcagcttccccaccatcacttgtctcattactccttctggtctttctttcctggactttctgctacttaatctgcttcccaagaacaagtgaatttactaacatgaaa

SEQ ID NO: 58012 - DNA, 1202 bp, Homo sapiens
atagatgttgaggccgagacgcatccagagctttcgtgaccggggactgttctgaagcaggcctcgtggatgacgtatccgacctgtcagccgctgagatgctgacacttcacaattggctttcattctatgagaagaattatgtgtgtgttgggagggtgacaggacggttctacggagaggatgggctgcccaccccggcactgacccaggtagaagctgcgatcaccagaggcttggaggccaacaaactacagctgcaagagaagcagacattcccgccgtgcaacgcggagtggagctcagccaggggcagcccggctctggtgctcccagaagagtggaggtgtgagcagagactggattggcgtccccaggaagctgtataagccaggtgctaaggagccccgctgcgtgtgtgtgagaaccaccggcccccctagtggccagatgccggacaaccctccacacagaaatcgtggggaccctggaccacccaaacttggcagagtacacaggctgcccaccgctagccatcacatgctcctttccactctaagccgtagcctcttctgttaataacacacagagagctctgccaagcacctgagtaggcccttgacacttgtgtgccctgggatgcctcctggcgcgaatcaggaggttctggaaggactctggctatattctgcaaatgtggctcatgccccttaccgtggctcggcgttgtggtgcctgagggacagccggccacctgcccagtactggtcagcttttcaacactattccctttgacctactggccatcttcctcacagccctcagatatcaacgggcacaaataagaccaactcaatttccacttgaatttacaaccaaaagcctgctgagttgattacagctgggccaatacagtacgaggcaataacaaattagtgtgggttgattctggaattggaaaagcttttgcttgtatggatacagcaaatccagatgtctctgaacaaagcaacaatttaaagcaacgacattttctgtcctttaagcacttaaaatcaggtgtggtgtgttttcaaagggcagaagtctgcattttgagcaaaaggtggcttcccagctctaacaaggtaactggttagcatgacattaaagcttgggcaaggcttcaaacttaaaaaaaaaaaaaaaaaactcgagactag

SEQ ID NO: 58013 - DNA, 1140 bp, Homo sapiens
  misc_feature (1)...(1140): n = a,t,c or g
ggatgcagtttcttaatatgtattacagaaatactactggtatttgcaaatatgtagtttaattgtattattgaactctcattttgggggcttgggcacattaacagattaatccatctgtatagggcttttgctgttggatagaatttaaattgtctacataaatatttgttttaggacccttagattttatctgaatacacagattaggctttaaaaacagatatatatgtcatttttggcttaaggagtttggctaagttagcttttcaactggcactgtatggcagcattttttggtatggttagcatggcacatggcgaaacataaagcattttactgtacaggtaaggaatgtgccatgttgttttacctatctctctttctctctcactcccatgcacacatcctgtgtgtattcagagaccttcagaaacattcatattcattttcatgagtcagcaaaagccctacgcttgattccaacagaatatttcctttacatactttcttctcttaatttttacaaaatttgtatggtaggtgtaaaagaaaatcatagtaactgtaccatattattaacccctaaatcaaactttttttgtcttgtgtatcttgatttttctgtgtgctttatagtgaagcagccgacacgagtcgttgttcataaaacagcttttgaaagttgagagcacacccctggagaaccgactgtgcttgcttacgtttggttcatgacttaaaaatcgagtacaggagttattcctgatgaagctaaagctttgtctctgttggcaccagctaatgcagtggcaggtcttctgcctggtggtggactcctgcctactcctaacccacttacccagattggcgctgttccactggctgctttgggggctcctactcttgatcctgcccttgctgcacttgggcttcctggagcaaacttgaactctcagtctcttgctgcagatcagttgctgaagcttatgagtactgttgatcccaagttgaatcatgtagctgctggtctcgtttcaccaagtctgaaatcggatacctctagtaaagaaatagaggaagctcnncaaagagtacgagaagcacagtccctaatttntgntgctatagaaccagat

SEQ ID NO: 58014 - DNA, 727 bp, Homo sapiens; identical to SEQ ID NO: 15038

SEQ ID NO: 58015 - DNA, 1625 bp, Homo sapiens
  misc_feature (1)...(1625): n = a,t,c or g
tccagaattactttgccgatggggttctcagcctgggggagctgcaggaactgttcagcggcattgatgggcatctcaccgacaatttagaaacagaaaaactgtgtgactacttctcagagcacctgggtgtctaccggccggtgctggctgcattggaatcgctgaaccgtgcagtgctcgctgccatggctggcggtcagatgcagagagcgtggaggcgcagagcaggctctgcggcagccggcgggcaggacgccgagccctgaggagtgtcagccggtcatccacctggtcccccggctcttctgacacagggcgcagctcagaggccgagatgcagtggcggctccaggtgaaccgcctccagggagctcattcgaccagctcgagttgcaaggttgagggccgtggggcaaggggcaaaaaggggaggaccctcctggtatccaccagagccaggcccatgctggaggcccggccacactctgtgccctncaggcccccggctggaacccctgcgtgaagaggacctggccaaggggcctgacttgcacatcctcatggcccagaggcaggtccaggtggcagaggaaggcctgcaggacttccaccgagccctgcgctgctatgtggacttcacaggggcccagagccattgtctgcatgtgtccgcccagaagatgctggacggtgcctccttcaccctgtatgagttctggcaggatgaggcctcctggagaaggcaccagcagtcgcctggcagcaaggccttccagcgcatcctcatcgaccacctgcgggccccggacaccctcaccactgtgttcttcccagcctcctggtggataatgaataacaactgagccagacctgcacacgccgagggccccgggaccctgcctgcctccctctggagccttctggactggccagcccagcgcaaagaccagggcttgtctcctcctggacttgggcctggtggaagggctctcagcccagggatcagggactgggctgcttgctttctatttattattgatttatttatccctgtattttattgtttgtcacttcagcctccaagctactttggcttctgcctggctcaggagacctggattctggtccctgctgtccctgcctggctgagcgacccagggcaggtcccgtccctgtctggggtgggcctcaggccatctggccgcctagcgagggtcctgctttcttcctgctgtcttgggaccaggcttctgctcctcctcagccagcggcagaagcagggctgatgctcagggaccccccaaccctcaaaccttgcctccgaggctgggcctgagctgggtgccccgtcgccctcccaggccactaggctctgactcttccagcacccatggatgtgccagaggcctctgggttggtttgcatgtcatttgcatatcgtttgcatgccctcatcccacccattctcagggcagtatgggaagccccaaggtgacctggccaagtagcaataatttgggtccagggtcacctattgcccccagaggcctctgaaccccaggctgggaccccagcacagaggcaataaaggcagtggtcccttccaaaaaaaaaagtcgacg

SEQ ID NO: 58016 - DNA, 1125 bp, Homo sapiens
tttttttttttttttttttcattctgcttttctttattgtctggctaacttacaaagatgcagatgtctagggtagtctctaccctaccacttacactatcctgatgacacagatagcaaaatgtgtctgtttacatagtgcatgatatgaaaaaaaagtttttcttcctctacggtccttgactataaggagggaaaaattaatttcatgccaacatttttggggaactttaacaatcatcccatttctgctactaaaataacaaaactggtattacactttaaaatataaagacctaacagtttttacaaatatgcaaataatctactacttagacataaaaaaaagttgatttcttttaaatcacaaagtaaggcaccattggattaaacatttctcctggcttttactaaataaaatgcatagtgaaataaatactgaacactgagttttaatactgtaatacatttcaatataaaataagaggtgaatgttaaaatactgtattacatgttgaatacatttatctgaaaatgttataaaaaaacacacatgtaagctctgatttcagggaagaaaaattcatttttgtaattttccatagtttaagattttaccacagaacttattcatagttttagatgcaattaggttgcaaactttcaaagaaagggtgtaggtgtattaatgaaacagtcacttaaacactacattctaaaacaatctattctggatgaatggcaactttgagctatcaccctgtttcagatttagaacggtacctgccaagttcagatatgcaaaggaattgtccaattcttactaccccttataaaattcagactcactttctctgagtcagacttttctccgtcatattttctaggaagggcaaattccatcttttgtgaaatgggtcattaggctttatcatagggatgtttttcactgttgaaatcagataaaagaatcccaaataaatgatgctgctaaattaccaaactgctagagattaaaaaaatttttttttaaaaagccaacactttgccaagcttgttatatcttattatttcttgattctctttgagtaaaaagcccaaatgactgtatggaagagagatgaa

SEQ ID NO: 58017 - DNA, 1055 bp, Homo sapiens
cccgggccgcggtagggtgggaacccaagcgggagagccgcgggatttgcggccgccgccatgcccgtcgtccccgctgcgggtggcggtggtgtgctcgagcaaccagaaccggagcatggaggcgcacaacatcctcagcaaacggggattcagcgtccgatcctttggaacagggactcacgtgaagcttccaggaccagctcccgacaagcccaatgtttatgatttcaaaaccacatatgaccagatgtacaatgatcttcttaggaaagacaaagaactctatacacagaatgggattttacatattgctggacagaaataagagaatcaagccccggccagaaagattccagaactgcaaagacctgtttgatctgatcctcacttgcgaagagagagtgtatgaccaggtggtggaagatctgaattccagagaacaggagacctgcccagcccgtgcacgtggtcaatgtggacatccaggacaaccacgaggaggccaccctgggggcgtttctcatctgtgagctctgccagtgtatccagcacacggaagacatggagaacgagatcgacgagctgctgcaggagttcgaggagaagagtggccgcacctttctgcacaccgtctgcttctactgagcccagcgcccgcatggagccgcctctggagcttcctgttgttcatactttttccttcctgacatttgtttttacttacaggtgttctgctggtgacggtagcattacccaaataaactgtgcatatgaaatgggagaggagatgccaaaacgccagatgaaagcaatcaagtttcttcttttccacttttacttatgagcaggatattgattacaaagtttttcttctttaaccaaaaaggaaagacaacggtttgtgtgcacttcccgacatacctgtgtcttcgtgtgcctgccttccctccctcctccccaccgggccggactgtacagagccctgctgcggcgtgttaggaatgacctggaattgtcaataaacagatgctgctgtcaaaaaaaaaaaaaaa

SEQ ID NO: 58018 - DNA, 1434 bp, Homo sapiens
  misc_feature (1)...(1434): n = a,t,c or g
ttttttttttttttttctactcaaactataagcttttattattgtattttacagatcattcattcaggacatgctgcatctggggttggcatcatttcccttttgaatgacagaatgtgcataaaagtctcttgcccacgctgaactcacacgtgcccggcaggaaggagctctcacgaagtgccagctggatgtgagcttgctctggcagcagcagtgctgtccttgtttctgagctgccacctattcactggagttaggtgggtcaaagctgaaatttagcttggaatttaagtttctaattttatacttttcattgtggtctggtcagattttagtctgcttcaaaatcaaaaggtcactcagtcactctaatatgatcattttgaatatggaaatttgttatttacatgctgtacctcaaatcaaagaaaaagcacgcgtcaatatcacgcgtaggaaaaactagaaaattgttccttttccattttgccaccctgctcagttttcctcataaacggttccagcttggaaaacacagagcttcccctctcagacagatgcagcagcgggaggaagggctttggtcttaaactagaagctgcagctgaaactctccccgtctaatcctgctgtgtgtatggctcacaccatctttcctgagtggggaaaaccgcctggcactgaatagctgaaaggccccgcctgaaatctgtgcttcaagaacgacgttaaagacaatacaataaaacacatagacactgaaggggttcaactaatgtccatcacttattctgctaatgtcagtgcctttcaataaacttctcaacatctgtgttggtaaacttctcaatatttgttctagcccaaccacggtgacaaagctcccttgcccaaagatcgtgagcctagacaaaggtggataagaaatatgaagtctaaagctatagaatatagcagttagtgaagtaaattaaacatgcccctcgcctgcatgctgatcagagtgttgaaactgaagacgacattggcaaagtgactcagacccacagcacagatttgatcaagggcacagctcataaaaatagcaacaatttcgaattctcctatccaacgtttaggaaacaatccaatggcaagaaatgagaggagttcaatgccaacagtttgacctgtgggcaatcaacctataagtcctcaaaagaaaatttccttgctttccctgggaccaacagagatggggaaaaaaataaaacaaagaggctgcagggttaggggcataggaatcaacacagaggaggttggagagctatgaattcaacaagagaattcagcagagacctggacattttctcgtgccgaattcttggcctcgagggccaaattccctatagtgagtcgtattaaattcgtaatcatgtcatagctnatggg

SEQ ID NO: 58019 - DNA, 747 bp, Homo sapiens
ttttttttttttttggtatttctggatggtttaatcatgaatggcggtaggcagtgtaagaaaaaagttcctagagcatgataaaccttggtttctggcacaggataaacctttcatttcatggtgtacatttcacaatattaaaaaaaccccagcctggttttcatgattaaagccgtggggaaaggacaatgtttccagggagcaacgactcgcaagcacacccctggggctgtgcggttggccgtcgcggggccagcttcaaagtccaacccacaaggcacaggttttcaaatctttacctctgtgtaacaagaacgtacatgaactttaaaaacgtgtgtttcctcgtctgtgtttaacaccctaacgatgatcagtttgggggagacgtacccctccctaatcacaggtaggaccacttcccaaatcaatgaaacgaccgtcctcttttgtgtcttgacttcaggtgtccggccgaacgacggagtcttttcctttcttgtcgatgcagtttctcagcctcctgttgcttccttctgctgttcagacctctttaacgtgaatgtcaattgtttgctgccaacggtggtgtcggatacactcaatgtcccattttttgcttcaattttcaaacgatcttcaagggttttgttcatcagtttctgctttgtggcagaatctttgaagcttctaaattcttctcctgctttgatctcataaaactggggctttaggactgtctgc

SEQ ID NO: 58020 - DNA, 1893 bp, Homo sapiens
  misc_feature (1)...(1893): n = a,t,c or g
agatggcggaggagcccgcagtctgtgttgcagcttcctacttcaattgctgctggaggggaaggacttacggatgtctccccagaaacaaccaccccggagcccccgtcttccgctgcagtttccccgggaacagaggaacctgctggcgacaccaagaaaaaaattgacattttgctaaaggctgtgggagacactcctattatgaaaacaaagaagtgggcagtagagcgaacacgaaccatccaaggactcattgacttcatcaaaaagtttcttaaacttgtggcctcagaacagttgtttatttatgtgaatcagtcctttgctccttccccagaccaagaagttggaactctctatgagtgttttggcagtgatggtaaactggttttacattactgcaagtctcaggcgtggggatgaaccacaaagaaaatcaacttgctactacatgaaatggattttcacggaagagacagctctgaaaagttttgatgcttgtggcaagagacttaacagatgtgatctatttagtatgtgtctactctatgtttatgcataagaaaacatccatagcatgaatggactcagaaaaatgtgatttgtattaatgcaccagtcatcataaaagatggtcatgatagtacacccattgctcctacttgttactattattgctgcagatctgcctccaaggttgaaaaggagactaagactgtataaacatcttcattgtcagttctcaaaatgactgaaattgttttcatggtaaaagttaatatactaaagggttcctttttttttaatgtttacatttatctctatgtttacctttttagtcacattgacctgctggctgaatacctcaaatagtccagtagagggcagtccaccaggcagaaaaggttaggcgttttggtttcacatctttgctggggaataataggggaaatggctgtttttgctaatttttagctaatatctagccaggagagcaagcacataggacagactgaaagactgtaattttacacaatacacatggcttaattattttattgggatacagaaaaatataaattctggacaaataagtcatatacctgttttcagtcctaacatttaaggattcttgagtcccaatcacataactgtggtgttactctgtcatttatatggtgtcaaaagcacttgatgagtaaacccagtagcatctttttgagtgtttcataatgcattttccaacttgaaaacaataattgaaaaatagccttattgtatattttatgccatgactaaaagtgccatttttactgatgctattagactgataatttcttgaagtgaaatttaacctttttttctctttagtattatgtttataatgccatatttttagaaagcattccagatcaggcatggtggcttanacctgtaatgcccagcactttggaaggctgaggtgtggggantgcgtgaagccacaagtttgagaccagcctggttagcaaggcaagatccccaactctacaaaaaaataaaaattaaaaaaaaattattaggctgcagaggcaagaggatcccctgagcccagaagttcaagggtatagtgagtcgtgattgtaccactgcattcctgnnnnnnnnnnnnnnnnnnnnnnnnnnnnnnnnngnannncaaaggcattctagtaaatcgaatgtaatgtgaatggaatttcaaaacaggatctaagatggtatgtagtagaattcaaagtaatatcattttaaagttaaatgagtatggaaaaggtctgttctctagttttgtccagttcagtttactgaaggaatatatttaattatattcatatatttaacaaataaaaatatgttgaattttccaaa

SEQ ID NO: 58021 - DNA, 2044 bp, Homo sapiens
tacaagccagtgaagtgggtgataagcctgactccactatctcagccaggtccttcttctaatattattggccagtctgtggaagaagctatcagaggggtgtttgatgcttccctcaaaatggctggcttctatggattgtatacctggctgactcatactatgtttggcatcaatattgtcttcataccatcagcattagcagcaatccttggagcagtgccattcctggggacatactgggcagcagtacctgcagttcttgacctgtggctgacacaagggttaggatgcaaggccattttactgttgatttttcatctcttgccaacatactttgtagatactgcaatctactctgacatatcaggaggtggccatccttacctgacaggcttggcagtggccggtggagcatactacctaggcctggaaggagcaatcatcggtcctattcttctctgcatacttgtggttgcttccaatatctatagtgccatgctagtgagtcccacgaattcagttcccacgccaaaccagaccccatggcctgctcagcctcagcggactttccgtgacatttctgaagatctgaaatcttcagtaggttgatgtggtttcctctgcagtgatttttctaggaagttcaaatttgacagcgagttcagctcagctgtggccctctgcccttccagctgtgcctagcaagcaaaacccaggaaagaagcagaagcctcctggccttacatacagaatgcctggacaagagagaacttgctgcgggctgctttgtattttaaaacacagcttgagagttcagagttggtggtttgctcacttaactgttgttaagatggcttgaaaagtttcattttatacactggtaccctggcttgaaatttttccactttggttatctatgttactatattatatatttataaagttattttaagaactctaaactacctgctgttaaaagaatagatggtgtaattttttcctggtttaagaaatgtattgttaaacttttctaagacagtcacttttcaaggaagagggctttcacttttgagtgtgtagttgagtgagcaggaaaaatgaatcttctacccttctcccacaatgtattatacgctctttaagaaataataaatcataagtataagggtggggtggcttatttgatgttcagttttatattataaccctgggagatacaaagactgaagctcttcctcctcttccttttctcttcacgcttctttacactattgccaaattataaaacttggctgaccacgttgaagtgaaatacttattaagctgctatgaatggtaacagtatgataaaattcatgctgttattaggttttctccttccaggtggttgaagtgaaaaatctcaggtgtagcaatactctgatttgttaaatgtatccgtttcattatttggaactctgccaataagttagttttcagcagaattttgtatttatgtagtattttcccatctcttagcacagtgcccttgcacatgactctaaatgaatgcttgttgaattgaattgcaactttaaaaatatctcagatatcacaataaccagcatagtgctttacattttacaaagtccttttgcacatactatttcacaagtacatcacatcagctttcatatagctttatattattttacatcagttttacactgatggagaagctaaggttcagaaaagtgaccaactcaaagtcgtaaagtgtagtaggatttggcctcagatctttgactccgttgtgtgcagattctgctgtattagtgttccttctaaatattgtatgcagttttcccagtgttacgagattggtgttgctatccatttgttgtgaatgaagacttgtcctatagtacatgacagggctgagagtggactgtagttcttagctgaaccctttctactgtttaaaacaatcatcaggcctatcctctgctcccaggggaatgtgggagagaaaagggttcttggccaggctgtaggtggtggc

SEQ ID NO: 58022 - DNA, 1604 bp, Homo sapiens
gcggcacgaggagggagtacctgatgtctggaggtatctgccctgtcagccgggacaccatagactatttgctttcaaagaatgggagtggcaatgctatcatcatcgtggtcgggggtgcggctgagtctctgagctccatgccctggcaagaatgcagtcaccctgcggaaccgcaagggctttgtgaaactggccctgcgtcatggagctgacctggttcccatctactcctttggagagaatgaagtgtacaagcaggtgatcttcgaggagggctcctggggccgatgggtccagaagaagttccagaaatacattggtttcgccccatgcatcttccatggtcgaggcctcttctcctccgacacctgggggctggtgccctactccaagcccatcaccactgttgtgggagagcccatcaccatccccaagctggagcacccaacccagcaagacatcgacctgtaccacaccatgtacatggaggccctggtgaagctcttcgacaagcacaagaccaagttcggcctcccggagactgaggtcctggaggtgaactgagccagccttcggggccaattccctggaggaaccagctgcaaatcacttttttgctctgtaaatttggaagtgtcatgggtgtctgtgggttatttaaaagaaattataacaattttgctaaaccattacaatgttaggtcttttttaagaaggaaaaagtcagtatttcaagttctttcacttccagcttgccctgttctaggtggtggctaaatctgggcctaatctgggtgggctcagctaacctctcttcttcccttcctgaagtgacaaaggaaactcagtcttcttggggaagaaggattgccattagtgacttggaccagttagatgattcactttttgcccctaggggatgagaggcgaaagccacttctcatacaagcccctttattgccactaccccacgctcgtctagtcctgaaactgcaggaccagtttctctgccaaggggaggagttggaagaagcacagttgccccgttgtgtgagggcagtagtaggcatctgggaatgctccagtttgatctcccttctgccacccctacctcacccctagtcactcatatcggagcctggactgccctccagggattaggattgggggttggcattgacaacctgcaggggaaaggactgccccccatgcaccattgcagggaggatgccgccaccatgagctaggtggagtaactggtttttcttgggtggctgatgacatggatgcagcacagactcagccttggccccggagcacatgccttactggtggccctcagtttaccttcccccagatccctagattctggatgtgaggaagagatccctcttccagaaggggccctggccttctgagcagcagattagttccaaagcaggtggcccccgaacccaagcctcacttttctgtgccttcctgagggggttgggccggggaggaaacccaaccctctcctgtgtgttctgttatctcttgatgagatcattgcaccatgtcagacttttgtatatgccttgaaaataaatgaaagtgagaat

SEQ ID NO: 58023 - DNA, 2122 bp, Homo sapiens
ggtcgactttttttttttttttttcataagcacaaaaaatttattctgaataaatcactttacaattactgaaaaagatgttcattaccttagctatgtacttaatgaaccaaattacccaaacaaaataaacatggcaatataaaaatgttaagaatttacaaagctgtacaaaataacttaaaatttaaaaattagactgatacagtctgtaagatctcttcgagagagctgtccaattacagatctatatacttttcttcagaaggtcaaagaaaggatgctttaaggcttctctgagagtaattcttttggctggatcatactccaacattttctgaatgaggtcaaagagacgctcatgttcaacatcttgagaaagcataaattccttcagaggtttacagcgtcttgaaacatatctgccggcagaactgtgttcatcccagtctaatcgatcgtggtgaaaatatttacgtttcctggttttctgtatcatatgttttggtagaggtccaagaatcctttccatcattgctaaatgctccttactatcgtgtgttggaaatacggtaaacccaagatagtattcaataagaatgcatcctatgctccagacatcacatggttgggaccaccctagggctaaaataacttcaggtgctctataatgtcttgtagataccaatgtactgtgatgttcgtcatcatatgttgcactaccaaagtctacaactttaatatctggatttattaaggtgcgttcatcacgttttattttgggattatacgcctctgtgtagtcagactgcacaaataagatgttttcaggctttaagtctgtgtgagtcaacttattactgtgcaaaaaattcacagacttgcatatctgatatgccatctttctgatatgatccagtcgaaatggtagaaaaccattttctttaatgaagtcgtaagtactaagtcccaatagttcaaaaacaatgcaaatgtgaccatgatgctcaaaccattccaacatctggacacagcggaaagtactgttggggtctgttgtattcagatgttccagaacttgtatttctgagcgagcagcttcacagtatctatccacatttttaactatttttactgctacatgtctacctcccgctttatgatcgatgcactccacaacttttccaaaagctccttcacctaaagtatcaacaatttcatatcttgcacttagtacgtctccactctgacagatcaggtgaccctcctcatcatcctctacactcctggttcttttccttcggtgactcttctggaaacgtcaagtgggcggcaccaagatcatccagccaatcaatatacccgagtgaattcagggcagaatacgaaattcattcagcggggagatattcaggcattcagatacacgccaggccacaaacggttggcaggagcaatttcaaattcagtccccagaaattcacagggcacatagtttatgttaacaggagaaaaacatggcaaggaacagattttcagataagatactcaaagtggcaaggcaacaaaacataatacaattgtttttcttaaaaaaaaaaatgcttagttgtagcattcactgaaacataattttttagtttctagtgttctaatttaatgttgcaaaatcgtatgatgtaatatttacttgtcaaagtaggcggtggccaaattaagatttcctacctaatctaagaaaaccaatattataacagtaaataaaattaaagtgctaattttggggaaaaaaagatttggcatacaagaataacactacggcatttttaatgtcatctgagctgatctccatactaatatataacccataacagttcaaatctgttctggtttgcttagtgaaagaagggttagaaaacatgacttgttagagcaaagaagcatgcctaatcctaaattatacaaaaataaaatgccctgttctacttttgtgatttcaatagatcaaaactaatcaggtttcttgaagtaccacaaaaaacccttttagaatattttgtaataattttcaactaatctaaattaaatcaattaactcccatcatttcactggaatgtcaat

SEQ ID NO: 58024 - DNA, 2570 bp, Homo sapiens
gactggtcagcctgcattagtatgacagtaggggggctgttagaattgctgctatactggtggtatggattatcatggcattggaattttcatagtaatgcagatccaatttctttgtggtacctgcagtttacaaaataatttgacttcagtgagcatattggtatctggatgttccaatttagaactaaaccatatttattacaaaaagatattaatccctctactcccaggttccctttatatgttaagatataatggctttgaggggggaaaaaataaacctaggggagaggggagtttcctgtagtgctgtttcattagaggatttcagtaaattaaattccacagctaattcaataaataatggtacatttaagtgttctgattttaataatatatttcacatttatccacacagtaacaatgtaatatgttaatgtaaataaaattggttttgatactcagaaataacaagaatttaattttttaaatttgttatacagtcctgggaaaagtaagaattatttgccaaaataagaggaaagaaaaccttagtattattaatgagtttaccatagaattgttggaaatacctgaagacaggtgcaatttactaaacttttgtttttaaactattgtagaggctgcattagaagaaaatgtttataatgacagagcaactatgactatataaaaaagctgaaattagaactgtgtttagaaatagatcagtaacccagtgccaaggatgcccaagcctgccaccatggtcttggctctcccacaacccagtgtttctggggtaagtttcacagtttctaggccctggaatagcaggcagtgtaagcctttgataactttagttcgatgtttttcttgtttttgtttgttggtttggtgcatatgatagtgggtgttatgctattttgctcttcccatcaaaataaagaaacttccagaggtttactgttaaaaatactgatatttccataaacgggtttaccaagggtgtagtatttcataccgcctgaaatgatcagcattggcacaaatcaaaattcagccgcctttgaaatgcaaaaatacctttgactagtaagtacatcctaggagtttgaaaacttaactaaggtttaaaatttaccttgtttaaagaacttctgacttttgaggaaaatctagctttccaagtaactaaaatgtacatgagataaacctctcaccactatgtgtcccttgagaaatgcaacacttttttagtcttcatacttgtaatctataaaagaaattctgaagtttagaccaagttgcccatttctgcgtaattgacataagttctgttaaaaatattataagtaattcgtttcggtttgtaggatgtttcccctgacttgttaaagaggaaaccaggaactcagtcatgtttttgtcctgggataatctacctgttatgccagtactcccatccgaggggcatgcccttagttgcccagatggagatgcagttcagtagatttggggcaaagtggctacagctctgtcttccattcactcaacacctgttcatgactgagccaggtgcccaggacacatcctaaacagtcagcttctatcctgtgtcctagtcggggagacagagtgccagccagcaaccctcccaggtttgtaggttttaggggttttcagttttgtttgggttttttgttttttgtttttgtttctacatccttccccgactcccaggcataatgaggcatgtcttactcaatgttatgcaatgggtttaggcaaaaattcattcttagtgtcagccacacaattttttttaatgcagtatattcaccctgtaaatagtttgtgtaaaatttgacaaaaaaagtatatttactatactgtaaatatatgtgatgatatattgtattattttgcttttttgtaaagccagttagttgctgcacatggataacaacaaaaatttgattattctcgtgttagtattgttaacttctttttgcgactgcgttacatcatttaaagaaaatgctgtgtattgtaaacttaaattgtatatgataacttactgtcctttccatccgggcctaaactttggcagttcctttgtctacaaccttgttaatactgtaaacagttgtacgccagcaggaaaaatactgcccaacagacaaaatcgatcattgtaggggaaaatcatagaaatccatttcagatctttattgttcctcaccccattttcctccttgtgtatgtacttcccccacccccctttttttaagtaaaatgtaaattcaatctgctctaagatatgaggagttatttaatttcttcagatgtatcgagctctgttttcttccccccgagtcctcccaatcttttgaaacattaaggccattttccttaaggatgtttttggctctcctactccccgtgagaaagatctttccatttccagaacttctccacactaaaagtgaaatatttttgtgaaatgcttttttagggcctgccaaactcaggtgagtctgttctctgggataagctggcttctc

SEQ ID NO: 58025 - DNA, 516 bp, Homo sapiens
  misc_feature (1)...(516): n = a,t,c or g
tttttgncaattggaanaccgtttgacatgattacgaatttaatacgactcactatagggaatttggccctcgaggccaagaattcggcacgagaagaagactttgatcttaaatctaaagaacttggctaattcgggagatagccatatgaaaactttaaaacagaagtatgggtagctgacttgaagtaactctatgtcaaatagtcgtaggttaagtatcttcaaagaacttcgatattatttcagaggatacaaaatataaatacaaactggaaaataaagattacagagaaaaaaccaacaccttcctgtgcagtcctgttggaatttggacttgccatgaggtgttgaagccttgtttcactgagttggagagactggacctaaatggcgcagcatgactttgctccagcctggcttaatttccctactccaccatcatcaacaaaggtcctgaccancagtttgaaatcgncattgaattttgagaagcattctgaaaactttgcatgg

SEQ ID NO: 58026 - DNA, 1942 bp, Homo sapiens
gcctactgcaccgccgaccacaacgtgagccccaacatcttcgcctgggtctacagggagatcaatgatgacctgtcctaccagatggactgccacgccgtggagtgcgagagcaagctcgaggccaagaaactggcccacgccatgatggaggccttcaggaagactttccacagtatgaagagcgacgggcggatccacagcaacagctcctccgaagaggtttcccaggaattggaatccgatgatggctgaatgaacttgagacgcttcagcaaaggcagcattggtcacggagttcaagggaatagatgagtaagcaacgtttcaaatttgggatgaaaagactgccaaactattggctgaccaaggtttttaaattcagaagagcaattctaaatctaaagaaatgtatcattaaagtaattacgttacattgaaacctgctgctgctgtgactgtgaggagggtgggagtgtggatggggaggaaggttctaggctctcttcttatttttctcatttcccaatgcctctctgtgggagagctccatgccagttttcaccacgctcaggcaaatactctgcagctgttattggatgggccattccgatctgccttatgaaattccacaagaatgttaggggcacctatgggatctctagtggggtgggcagggtgctgatggggacgctggccgcagggaggaaggaacatctcgggagggccctctgttcctctcccacgggcagatgccctcctctgtatgcaaatcagcacagcctttattgagctttacaactaacaacctgatagttggcagttaattcatagttacagataatgcttttatttacataaatataccaagtagtaccctcttattgtattcacttcatctattttcttagaatacttgcaattactaatgaccccttccctttcctcctgctgccctgtccaccctctttccccttctaacatccttagagggatgaaatctcagcatatgttgcaggacaccaaaaggaagaaaacaatcaagcaaataaaataaacagtcaaacaaaccaggagtttaaaacaacaaccccaacaacagaagccttggcaaagaggaataagtgatcagcaagtgaacacactctatgtcaactctccttttatccagctgagatttatggtaacttatttaattaatggtcctgtctgatgcatccttgatggcaagcttcaaatctgatttggtatcaccgaggaaaccttgcccccatcactcagcattgcacttagatacagaatgagttagataaacttggcttggtctagagacccatgtcatcttaacctaaagggaaatcttattgcgttatcataaaattgatgatatcttagggtcagaattgcccttttttttttattttgaatgggaagttctcactaaaacaatcctgagatttcttaatttcatggttctttaaatattataaacacagagtcaacatagaattaaattgtatttgttaaaatacacacattggaggacaagagcagatgactacttttcgaagtaatgctgctccttcctaaaagtctgttttcaatcctggtaatattaggggcactgcggcacctaagaagccttaaatgagagctaatccaatctagagagcgatggtgtcagcatttcggtctgcatatctgtgtgtccgtatctgcgtttgtgtgcgtgtacgtgtgcccctgtgtgtgggcccagttttcaggcatgtagaataagcatggagtcatattgaggaggactcacttcttgaagatatgcttgttgctttacaacatatgtaagctattctttagcataaatgcattcattctttaataaaaatatgtttgcattaataaagctgaggagtttcataaaaaaaaaaaaaaaaaaaaaaaa

SEQ ID NO: 58027 - DNA, 2038 bp, Homo sapiens
taagtctgtattagttttaaaagtgagaaaaggtaataaaacaacatggaaaagccagaaatttcttcttctatatgtgccttgctacaaataaaccaaaaagaaagcaagatgggtattttaaaagccaatgtggggaacatccaatgataatgcccattattttactttatacttaaattacaccagtagaaaagttatgcttattaatagtttaatgtatgaaggaaacatccagatttctgaatatgaaggtacatatctcacattaatttaagtctacataaagtagagcctctatactgacatattgaaatttactttctgcttagccttttctgttatgtaaacaattgtacatttatttgccattctaaaacttcaggatcaagtttacataattttgctaaatttccgtgtttgctcagaagcagtttacagtactaaaaccaaccagccaaagaacagcttcaacagaaagttatgtccaaaggggaagagggaaagaaaaaaagaaaaatgataagaaaaatgctaactaaggtaaaacggatgatgatggggaatgggcagtcacaaatgttcacagaaaataggtcagttagtaagatcttctgcaaaaagcctacacacttcagtcaagcacatcagtagaatgatttgggagcataattttttttttcggccacttgtgatttcctccaaatgaaaaggaatctgcaggctaacaagctgatcctcatcagccaagctggttcatatgcacactgttcatgtgaggtgcccagggtccagtccacaccgtttgagggccattattttccgtggagctggaaaccatctttatcagtgagttccaagaagggtctgcagcatgagggccattaaatatgggtcctccagcaccatcagggataggtgctactggaggaatcattgcattcccatacacagaaaaagggcatacccccaactttaggaaagtccatgtagcctgcaggaacatgctgatggaatgtaccagaaggagttacaattcctgtactatctcgctccattgcttgatgttgtgaaaatactcctgggtcagacatcggtctgtggatcataggatttcccatcccagggttacaccagtctactttgtcttgattgccaccaatcccttcaaaggaccagatgccactatgtcctactgatgtagacaaattgctcccaataacagatggagctgacgttccagtttgcctgatacgtgcagaacgttcagtcccaatagggactggaactttcctgtcctgagacacattgctgggcttttctgaccctaacggtactgatgatggggcaggagatggtgcacgaactcccgaggatactgactgtgcagaagaatcatttgatgctgatgaacacggagtcaacaaactaagcggggaaaaatgttgtctgttaaagttagcagctgcgggtgctcctccaaggggtgccccaggtccgtacatctgacctcctgaaatgtttgaagcaaagtttcccaaatgtgttgaagaaggtgttacagaaccatatggcgagtccatattgacaatacctgagggacttggagcaggtctctgtaatggtggtctaaaacctggagctttggaagtatcagactgatgtaaaggatctgaatttggcaaatatgaggattttcctgatagcatagattctggtgttgactgagatgaaacaacagatcctccccagaaggcatgagcagaagtagggctgttttcaaacaatgtgctaaagggcccaaatggtaagggggcactgaaattgggagcaataggcttatttgctggatgtactgaattctgacaagcactttgtgtacttaaggtcgaaggtagctggacagaagagggaacactgtgaggtcttttaatgtgattgacactgaggactgcaacagatgaattttgcactgaagctgaattcttgtgaggggcagttgtgccatgagggggtggtctaatagcaggggtttccc

SEQ ID NO: 58028 - DNA, 1828 bp, Homo sapiens
  misc_feature (1)...(1828): n = a,t,c or g
ttttttttttttttaaattttaaatatacctttatttctcaaactcaaagctttatcaagttctaacacattttgcattgacaagtgattttatctgcatcaagtaaggttagtgaccaccacgaaagaggaatccccagacctcctaggcactaagaaatatttcaaagggctatggcaaatatagaacaaaaagctttcaatttagtctaattggtatctatttttcatctatattaatttggaaataagttgctaccttagaaaaattacatttttatccattaaaataaaacaccagataggttgagtttttttaaaaacacccacagatctgtatttagctacttcctctttagtagatggtcatctcaccttcctatgcaaacacacacaagaatttgcaccaactctcactagcccaggcaaaactccaagcattttatttagcttacacttcaattatttttttaaagtgataggtaaacaagatttaggcacttgaacacacacacgcgtacacacacgacacacggtgttttaatgtctgggcttaacctggagggctcctcaaataatactgaaaagttgccagatctttaaaaatacctctcctcaacaccgcccccctcccccacgacttggtcctctgattttaactggttgaattggaatatgttccaaagcgagctgtgaaattctagtctctgcaagattaaggatgtgaatctaaccttggaaactggattcttacaaagtccacccagaaggttttccctgacacagagccctggtccgacacccaggaaggaatggcctctatgagcgtcagggtctcgtctcaccattggataactactttgctctcaaaaagaggacatttgagctaagaatatagctgtatcccaatacaaggcaccaaccagtaccagaaagtaaactacaaaggagttattcctcaagttaggaagttgcttttgagtggcaccatttcccaaagtcaacaaagcagtactagttaaaatcctgacgtaccataagggtaaggggttagtgcagaggtgaagctgaagaataagcagattcagggttttagcaatttgattattaatgtgtcaccacaaaacacaagttcatacacagcttgctgtgactcaaaccccagtgaaaatcaaactggacaaaaactgaaattccaaactacatctgtagcatctatcaggaactaagcatcatcttccttacccaactcaccccatctgccaggtcccccaggtgtgggccatcccacaggcatccccatcaggaactctgattggaaggcattagtaatagagttcagtttcagcattgaaattattgaatgaggaataatgtgttactgccaaggtaagatttaaaggggagactagagctcaaggtcaggcatctagtgcgtgctattctgccaatgtgagaggaaaaggtactgtcttcatctcactgatgctcaacctgactccaagcagcaggctaggagaacaggctgcagacatgccgaaagcatcagaaaaagagtcaaatcagagtcccgaaacaaataagagactgcttaactttagattagaacttgcatgtgaancttcagtgctctctgctactgcccaagtttcatgttactcaacacacacacatacacacacacataaaataggaaccactggactcagtataagctcagggtaccctcgtgccgctcgtgccgaattcttggcctcgagggccaannnccntattccctatagtgagtcgttngtaatcangtcncaaanggtnntcaaacaanggc

SEQ ID NO: 58029 - DNA, 3724 bp, Homo sapiens
ggggaaatatgcttcgagtcagtaaagctgcgcaagtgcacagtcaaggagagagtcttgggaaaaccaaggatagttcccggagatgacttttggactgcggaaacgtttgtcagaggaaagaggcttcagtttaatgtgagatcattggaagttgaactattcaggcggcgagcagagcccctttctccatcttcccactgtatggtcttgtcccttagcctataatttcttataaagagcgttttgaagactaggtttttactgggcagggccctgattcaggctcacagtataaagagagaagtcagagaatcctagaaatttattgcttgaagaaggggttggtgtcctcatatctcaccttcctcaggctggggctttcatcaccaggcctcctcacagattcctgtcccttctgtgtcctggactccggatacctcaactctcagtactttgtgctcagcccaggcccagagccatggctatctcctcttcctcctgcgaactgcccctgggtggctgtgtgccaggtaacatcgacgccagacaagcaacagaactttaaaacatgtgctgagctggttcgagaggctgccagactgggtgcctgcctggctttcctgcctgaggcatttgacttcattgcacgggaccctgcagagacgctacacctgtctgaaccactgggtgggggaaacttttgggaaggaatacacccagcttgccagggaatgtggactctggctgtccttgggtggtttccatgagcgtggccaagactgggagcagactcagaaaatctacaattgtcacgtgctgctgaacagcaaaggggcagtagtggccacttacaggaagacacatctgtgtgacgtagagattccaggggcaggggcctattgtgtgaaagcaactctaccatgcctgggcccagtcttgagtcacctgtcagcacaccagcaggcaagattggtctagctgtctgctatgacatgcggttccctgaactctctctggcattggctcaagctggagcagagatacttacctatccttcagcttttggatccattacaggcccagcccactggggaggtgttgctgcgggcccgtgctatcgaaacccagtgctatgtagtggcagcagcacagtgtggacgccaccatgagaagagagcaagttatgggccacagcatggtggtagacccctggggaacagtggtggcccgctgctctgaggggccaggcctctgccttgcccgaatagacctcaactatctgcgacagttgcgccgacacctgcctgtgttccagcaccgcaggcctgacctctatggcaatctgggtcacccactgtcttaagacttgacttctgtgagtttagacctgcccctcccacccccaccctgccactatgagctagtgctcatgtgacttggaggcaggatccaggcacagctcccctcacttggagaaccttgactctcttgatggaacacagatgggctgcttgggaaagaaactttcacctgagcttcacctgaggtcagactgcagtttcagaaaggtggaattttatatagtcattgtttatttcatggaaactgaagttctgctgagggctgagcagcactggcattgaaaaatataataatcataaagtctgtgtctggacatcgcctttgggaactagaaggggagttggtattgtaccagctggactaagctccagttctagacctcctggctcattcaacatgcctccctacctaaataaaagtgcaacactcagtgcatgtcccagccccattctcccaagcatgggagtgggcgtaggagtggaggagggggaaggaaaaaggaattacttcacttacacctatgatgccctttgcccaagccagaagaaagcaaaggggaaaagggctgcagggtacattatttattttcacttgaacatggaaagaaagtgtcacactcccccttcccctttatagggggagtgtattttaatcagcaacctcttctccatccaccctgtgtatgtgtgtacacatataccaccacagttgggaggcatgactaggctgacccagtcttatctgttcctcctttgaagagggtttgacaaatgggaaaaaggaaggagccacatcaggcagaggtttcaagccatggaatggaggaaaggcggcagagaggagcagcaccagaggccaggagagagtggaaagggccacagcttgtttttaaaaaattctataatttggaagagggtggcgattaattttcaaaatacacttcagagtcccactttccacatagctcccttactcacagccctttggttttttagacaaaatttaagagctctcataaagccagaagtattgataactccttagtgcatccaaaaaaaagtgttcacatcaatcccttacaaagactatgtgctgtagactttgcttcttcctatacatttgtcttacggctcagtggtaaggtagctgtagagacacattacggggtaaatggaaaagggaaataaaggggaagcccaggcacatgggtgcagggaggggtggggaataccacttccactttcttttgtctttttctttaaaaaaaaaaaaaaaaaaggcaggggtgtgattggttggaagggtagagaacaaaccccagaacagtgtaagctccagaggtgggtgatgggaacagtccccaaagtgagaagagggaataggtcaggggcaaagcttgccagcatcaagttcctcaggagtttcctgtcggccccagctcatagtcctcctcgtctacatttacccagcagcttgatggcttcatggccccacagcttgcttgagggagtctgtgatgaagacacctttaagtgcctctaataaagagccattgatgtagtcacgccagaatgcatcgagcccgtctcctcttgagggtgacgtagggcagcaggtcgtggcgagtgatgatgcgcagcagctgcagcacctggcgaaagttactttcatcacagcggccctggcgctccagtgccaataagaagtcacgtccatttcggatgagtccacgctcgtggtcatcaatgacatcaacaaagaggaaagaaagcacggcgcacatctctgtgtgtcagatgagtgcccacgatgtcaaacatgcggtgcaggctgtacagcccatgttcctgctcaccatgctcttctggccacacctggcttgcccgccgctttaggcccgccatgctgggggctcaggtacgcaatgctttccagaatccctgctcagcagctgcaatccccaccgtactccgcaagaaacttaatttcccaggtctcttcctagcacaagtttcacagccagcagcaaaacaaaaacaaataaggaggggaaaataattaattttcaagttttactttgaaacctcagaggcccatagaattagacaatctcgttgcaaaagtacacagacaagcctaaaaccatttagagaactcacccccaacaagtctccaggcttccctaactctctattagtcaatttacaaaaacaataccaactccaagaatttccagtctcaatggcttgcggcaagacagctcccaaatttaagaacttctgggaaaaccaattaccctctggcagcttctcatcttcctccacaattccttattcctatttgggacaatattaccgta

SEQ ID NO: 58030 - DNA, 1721 bp, Homo sapiens
tttttttttttttttttttaacttgaacagggaaagtttaatatagagaattactggctttaacagtgaactggaataatgagggcttcactggtaaaatgcttctgaattgacttggaaatccatttggggtgctggggaacgttattcccagagaggtgcctcagtggaggcgctgtgtctcctacgcaacttctgagggctggagggtgccaagggaggctgctgaccgcctgggggcttcaggagctgggtgctggggaagccacatgcactgcggcgtccagaggcaagaagcacaaccaacaagaaccacgaaggaggcgcctttcctcctataatgcctgtttggtgccctctactgacaaagcttatcccctttcaaaaaacagccaactgaaaaagctgaatttggaacataaagtcaataaatccataaccagcaatactatggggcctggggtgcgctggcctttagtgagtggagtggggcgaaggatgctgcatgtcctgcagtgggcacagcggccctgcacgggggagaaccatccctgtaaagtgtcagtagtagcccctgtgtcagtcagggtccctgcaagaaatggcagtgcactcacataaggacagtttgagaagagtctcctgacaaggtgagtgtggctctctgcggctactaacagcctgagcctttacctccccaggcctgaacaggggcatggaaagggctgccctgacagggtgacaggagctgtgacctttagccaagggcagccaggaataaatactgggaactcacgctctctcctgtgattggccagcaccactcccccaccctgacgttgagtgaagacaaatggaagccagaagtgtggtgagctaccagacattccatgcagcccgctgagaagccacgtgagtggggacagggctaaaggctaggcagggacagggctggctgtgtcccgaggctgctcctccggccctgacttcaggccctcagcccagtcgactcccacaacctcgcaattgggcagcatctcctccaccaatatctgagtgaggccagggttggacacggcagggaggtccgagatgtccagcctgcggaggttctggaggtggtggaggcaggcgaggccccgttcggagatgcgggggcaaccggccagcgagagctcctgcaacgagtcggccagtgggtagaggcggctgagacaccagtcgtccacgtgggagcagcgctgcagcgacaaggactggagctccttcaggcggaggaggttatccaggccctcgtagttgatgtcacagtcaccggcatccacagcttcgacaggcacttcacagaaattccagaactcctgagagaaatggccatacttatctggcctgatccactccttgtctcgaaacttgactgcgcctccctgcttcagggatgaaaaaggcacctgcgccgtatggaccaatgttgcttctccagccaggtgtaagatcgatttttctcatgcaccttgtacatctccctttggagcaagtaatccctcagagcctccacatcgtagaaatagttggtcaggaactggagtattgtccttttcttcttctgattgccctctggggccactgccgcacccaggcgatggatgcccctgatacgcccattccacatggggcgaccagcgcaggacgcccagggagccgccatcttgctaaggttt

SEQ ID NO: 58031 - DNA, 2471 bp, Homo sapiens
gtcagaaaaaggaaaccacagtgagcctgagagagacggcgattttcgggctgagaaggcagtagttttcataacacatagttaaaaaagaaacaaatgaaaaaaattttagaacagtccagcaaattgctagtcagggtgaattgtgaaattgggtgaagagcttacgattctaatctcatgttttttccttttcacatttttaaaagaacaatgacaaacacccacttatttttcaaggttttaaaacagtctacattgagcatttgaaaggtgtgctagaacaaggtctcctgatccgtccgaggctgcttcccagaggagcagctctccccaggcatttgccaagggaggcggatttccctggtagtgtagctgtgtggctttccttcctgaagagtccgtggttgccctagaacctaacaccccctagcaaaactcacagagctttccgtttttttctttcctgtaaagaaacatttcctttgaacttgattgcctatggatcaaagaaattcagaacagcctgcctgtccccccgcactttttacatatatttgtttcatttctgcagatggaaagttgacatgggtggggtgtccccatccagcgagagagtttcaaaagcaaaacatctctgcagtttttcccaagtgccctgagatacttcccaaagcccttatgtttaatcagcgatgtatataagccagttcacttagacaactttacccttcttgtccaatgtacaggaagtagttctaaaaaaaatgcatattaatttcttcccccaaagccggattcttaattctctgcaacactttgaggacatttatgattgtccctctgggccaatgcttatacccagtgaggatgctgcagtgaggctgtaaagtggccccctgcggccctagcctgacccggaggaaaggatggtagattctgttaactcttgaagactccagtatgaaaatcagcatgcccgcctagttacctaccggagagttatcctgataaattaacctctcacagttagtgatcctgtccttttaacaccttttttgtggggttctctctgacctttcatcgtaaagtgctggggaccttaagtgatttgcctgtaattttggatgattaaaaaatgtgtatatatattagctaattagaaatattctacttctctgttgtcaaactgaaattcagagcaagttcctgagtgcgtggatctgggtcttagttctggttgattcactcaagagttcagtgctcatacgtatctgctcattttgacaaagtgcctcatgcaaccgggccctctctctgcggcagagtccttagtggaggggtttacctggaacattagtagttaccacagaatacggaagagcaggtgactgtggctgtgcagctctctaaatgggaattctcaggtaggaagcaacagcttcagaaagagctcaaaataaattggaaatgtgaatcgcagctgtgggttttaccaccgtctgtctcagagtcccaggaccttgagtgtcattagttactttattgaaggttttagacccatagcagctttgtctctgtcacatcagcaatttcagaaccaaaagggaggctctctggtaggcacagagctgcactatcacgagcctttgtttttctccacaaagtatctaacaaaaccaatgtgcagactgattggcctggtcattggtctccgagagaggaggtttgcctgtgatttcctaattatcgctagggccaaggtgggatttgtaaagctttacaataatcattctggatagagtcctgggaggtccttggcagaactcagttaaatctttgaagaatatttgtagttatcttagaagatagcatgggaggtgaggattccaaaaacattttatttttaaaatatcctgtgtaacacttggctcttggtacctgtgggttagcatcaagttctccccagggtagaattcaatcagagctccagtttgcatttggatgtgtaaattacagtaatcccatttcccaaacctaaaatctgtttttctcatcagactctgagtaactggttgctgtgtcataacttcatagatgcaggaggctcaggtgatctgtttgaggagagcaccctaggcagcctgcagggaataacatactggccgttctgacctgttgccagcagatacacaggacatggatgaaattcccgtttcctctagtttcttcctgtagtactcctcttttagatcctaagtctcttacaaaagctttgaatactgtgaaaatgttttacattccatttcatttgtgttgtttttttaactgcattttaccagatgttttgatgttatcgcttatgttaatagtaattcccgtacgtgttcattttattttcatgctttttcagccatgtatcaatattcacttgactaaaatcactcaattaatcaaaaaaaaaaaaaaaa

SEQ ID NO: 58032 - DNA, 1921 bp, Homo sapiens
tttttttttttttctttcttgcgaaacacctgaagttttactcatggtacaaaagtatttaataagtgacacatcagtacagaaacacagagcttgtagcttgtcctttaaaaccagaatggccaagtgaaaagtcagtacagattcttatttttactattaaaaaaaaaaaatcaaagggacacactgggaattgaactactatgctttttcttcgttctagagatgacatatatgttttctgataagtaatctaccacacattgcactaaaccaaagcatacaaacagccagtaaaagctgtgctctacctgctactcatgctgggctggacagtggaacaccatcttggtaggagagattttgacaggaagaaactgcagagtccctacctaacccagagaaccttacaaactggtttatacacaaaggattttcagcaaacatgcaaacacactaacatgctataggaatatgttttagtctatttctagcacacagcatacattcataggtgcccagtaaaataggaatgaatgtcaatgtagaaagcatttttgccttcacagtactaacaaacacctaaaaagcacacagcatataatactttgatctttaagtggataatcatggaagttccaagatcacatccactaggttagcctgagtattcatctataaaaatattttttttttcaaaaataatgcttaaaagagacttctagaaacagtgggactacatcaggaccagaagacagtgacacaaggactgcaaatgttaagactaggagtagcttttcacatggagcttttatgtagaggacgtctccttctgttgattcctacagccgagacaagatgtgatcacaggagactccaaaatctcaaactgggcttgagtaacaccctagataaacatcaggaaccccactgaggctgaagtactgaaactgtggcccatgtgaaaaagaggtgcaagtgcacaaagattcatgcagagcctgctggaacagagggtggtggcggcgggttagtccacacttacacaccagcaggtatgctggggaagggccccccaggtggagtgcctgacatagggctcgctccagaggcgtctgactcagaagctcctgagagaggtgtctacttgaggtggggaggagtactatggttaatgaatacaagaaggtgtttcaggataaataggtccaggagggttaggtcattttggttttgacctattaatacttaacataaatgaagagttacataacagagtcagtctttcccaagatgtgttctgtcatcatgagctgaaccctattgggctggtgacacccagaatggatccccattcattggctggaggtaggacctagtgccgcagattgttctgggaagctggccagagaagatgatttgcacaatgaagtcaccactaagccactgcttaagtccagtcctcggccttctttttctgctctgtagtccaaaaaacatttcctttaaaagccaggaaaattctgtgaaggtgagcagcatgtcgaatatgtcacccagccacttcatccttatggtgcctgcaaacgggaacagatggtgtaatgttgtggtgaaaggctgccatgttgaactcaggaatcccgctgcagcagctgttcttcaatgtatttttctaccaaagaaatgtattcattaaaaataggtgtgtagatgagtttattctcttctgtgtcttcaaactccaggtagtacttgtccatgaaatttctctgtaataactggaactcgtcatccatgataatgtcctctaaatatccaaccacagcattaaattctgcatcagaggcggaggagaaagacacgcgcaaagctctctccttctaaggcgtccatcgcagtcgccccgagtaggctccaa

SEQ ID NO: 58033 - DNA, 357 bp, Homo sapiens; identical to SEQ ID NO: 15077

SEQ ID NO: 58034 - DNA, 358 bp, Homo sapiens; identical to SEQ ID NO: 24932

SEQ ID NO: 58035 - DNA, 2266 bp, Homo sapiens
cagcaatcttgctacttccgctctgccagctggaaatgtttttaatgctccaactaaacaggcagagcctgaagaaaaagtacctcatcttatagaccaccagatttcttctggtgaaaacaccagatcagtgattccaaatgatatttcaagtaatgctgcaattttaggaggacagccgccaaatgtgacaagcaattctggaattctgggagtccaaagaccaaatgtatcaagtaattctgaaattcttggggtccggccatctaatgtttccagtagttctgggattattgcagcccaaccaccaaatattctaaataactctggaatattgggaatacagccacccagtgtgtcaaatagttctggacttttgggagtgctacccccaaatatacctaacaattctggacttgtaggagtacagccaccaaatgttccaaatactcctggacttctgggaacacagccaccagctggacctcaaaacttaccccctttaagtatccctaatcaaaggatgcccacaatgccaatgttaggacattcgtccgggactaataccacaggcacctgggccaagattccctttaatacagcctgggaattccaccccaacggggaatcccacccccatcggtacttgattcagctcttcatccaccaccccgtgggaccttttcctccaggagatatttttagtcaaccagaaagaccttttttagctcctggaagacaaagcgtagacaatgttactaacccagaaaaaaggataccacttgggaatgataacattcaacaggaaggagatagagattaccggtttcctcctatagaaaccagggaaagcattagtagacctccccctgtggatgttagagatgtggttgggcggcctatagatccaagagaaggtcctggacggcctccactagatggtagggatcattttggaagacctcctgtagatataagagagaatcttgtgaggccaggtatagatcatcttggtcgaagagaccactttggctttaatccagagaagccctgggggcatagaggagattttgatgagagagagcatcgggttctaccggtctatggtggtccaaaaggcttacatgaagaaagaggtagatttcggtctggaaactatcgatttgatcctagaagtggtccttggaaccgaggatttggacaagaagttcacagagattttgatgaccgcagaagaccctgggagaggcaaagggatagggatgacagagattttgatttctgcagagaaatgaatggaaatcgtcttggacgagacagaattcaaaacacttgggttccccctcctcatgctcgggtttttgattattttgaaggggccacttctcaacgaaaaggtgataatgtgcctcaggttaatggtgaaaatacagagagacatgctcagccaccacctataccagtacagaatgatcctgaactttatgaaaaactgacatcttcaaatgaaataaacaaggagaagagtgacacagttgctgatatagaaagtgaaccagtggtagaaagcacagaaactgaggggacataatcatcactcagtaggtaaaagataccttttgtaaagttgtcatctctctgtaatagataatggctgactggaccatagttgttcacttttgtctgccagaattaagttaatctgatgttcatgttcacctttctcttaaaataattgtacaactgacttgtatagacattgttcttaatatgaacatggtaggtaaactttttttttatttttttctgataaaatacaaatgttggccccagattcttttaacgtcaaggaaatgaataacagcttgtcagagacttcctatggaagaaagaattttttagatactatcattaggttggatatggtaatagatatatttcagaatagcaagtggtggtatatcttatccatatctttaggctgctgcagaattttaaggttatagataaagctgtgatattttatgcaaagactggctctaggtatttgaggagcacaatacagagattttaaaaagtgattttgtaaaatctacactatggtctctgtttctccaaagtaagtgtttgtgatttgttcctcatactgcagtgagtaaaaaagaaacaagaaaacaacaacataaatattaaagtacgtttcaatgttgggtgaattttgtttttagatgccaataaaacttatttgtttgataacaaaaaaaaa

SEQ ID NO: 58036 - DNA, 474 bp, Homo sapiens
cagctatgacatgattactaatttaatacgactcactatagggaatttggccctcgaggccaagaattcggcacgaggatcttttccagcagctgctgcctgccagagaggcgccttcagagacccagcgcttacacaatacccaccatgtcccaggctggtgctcaggaagcccctatcaagaagaagcgcccccctgtgaaggaggaggacctgaagggggcccgaggaaacctgaccaagaaccaggaaatcaagtccaagacctaccaggtcatgcgagagtgtgagcaagctggctcggccgccccgtcggtgttcagccgcacccgcacaggtaccgagactgtctttgagaagcccaaagccggacccaccaagagtgtcttcggctgagaagtgtgcgccactccccttgctgccgaatgctcggaaacaggagccttacccaggaactcttttttatgccagaac

SEQ ID NO: 58037 - DNA, 1441 bp, Homo sapiens
ttttttttttttaaatgtttaaagagaatttattctatagagtgcattcttgcactctataggtgacagaaaaacaaactgtgctttaaataccaaacaagtaaatcagaaagcttattttctatttaaaatatatctaagacacacttatataaaaagaaaacagaccctcctaacatgtaacattaccgttcgtggcaattgttctcaacctttcactctccttttgaccttagcattaagctcctttgctcacttctgagctctcagttacagttcttgaggtggcatcctaaccaatttgcactatctttcaggtgaagcgctggatatttaccagataattgaactcacccaaaggctccttggaaaaacgaagccagcctggaccatagcactgcctggaggctctgtatttgctcccgtggagcttcatcggggtgggtgcaggctccccaaactcaggctttcagctgtgctttttgcaaaagggcttgcctaaggccagccatttttcagtagcaggacctgccaagaagattccttctaactgaaggtgcagttgaattcagtgggttcagaaccaagatgccaacatcggtgtggactacaggacaaggggcattgttgcttgttgggtaaaaatgaagcagaagccccaaagttcacattaactcaggcatttcatttattttttccttttcttcttggctggttctttgttctgtcccccatgctctgatgcagtgccctcttcattttcatcttcaccatcctctcgaagaaccatgtctaggatgtttcctttgatcttgaagtctcgtgaggtgctgagcttcatgtgctgcatcaggttcaccttggacttcttagaaaggtggatgagaaatttttcatactgttctatggcaaagatgaggttagggattggcttggtttcccgaagaactctggccatggctgtggcaacggcagcaggtttctcctttttctctcccgtatagttcaggctcttactcttattctgtacgtaagaaatgaaagaataacacaggggggtcagatgagaaccagacagcttcaccagcttttccatattttttggaattcctccggagctctgacacacctggagatactgataaggtttcttggctcacttgtcccttaagcttggtgattagccagtccacttcttctagaaccttctcggctgactcagaacaagtaaacagacagtgggggcagccgttctcaaaattcactattgcaaagtggtttgttttctccacctctacatcctggtctatatctcccagatgcccgtggatatcctgggacaagtcacgcagcagaatgacaggactcttatacgaaacatgcaggctgaagagcaagttcatcaagctcttgcaaaacaaggcatctcccggctgttttc

SEQ ID NO: 58038 - DNA, 2595 bp, Homo sapiens
ttttttttttttttaaaatctattgccattcatttatttttgcacaaaaacgtataaatatgtcaccagcttttcttaacttaaaaaacttaaataaaagactccagatgaaaactaccctttgctgccattttttttaaagtttttttgtaggggttttttattttttgtgttttttttctttttcggcttagaattgggtttctagggaagaaaagcccctgcattaaaaacagcccatttaaaaaaaaaaattcaaagttctgatgaattccgggaaaaaagcaaccccaaagtggtaaaagattacaaatatctactttacaatttgtcttctcaccaagataattttatacaagtttacaatcttcatcttcttatgctcttcaaaaggccttgagaattttcctttctgattaagaaaaaatagcactgcaatatttttaaagtcaattttacactgtacacattagatacaaatggtttgatatatcagattttttatcctatacattgcgaaagtcaacccccccttcaactggtggtacagagaacaaaattatccatttacaagttatttctctgctttcacattcccaccacacaactttttttttaatataatgttttaaactttagattatttcaagaaaaatacttttacaaaatcatatcaattattacatttttccttttttgttaataaccaggacatggaagtctcttggaagaacttttaaaatttgcatgattctctccacagatgacaagagctcaaaggcctggtcacagtggctcccgggaggccagtacacacccactgtcctcagacagaaacacacaacacaagggttagaaacagggtttcaaagacaaccctctgggccaggaatgaggagtcataaaatacttcaattagccattaatgctttaaaaaggcatttttttaaaaagtcccaccacaaaggctcaacttcaagtactaatttaatggttaagttgtaatatttctttgaaataatattcctatggtccagaaaaaattcaccatatttataactgatttcatgagcaaacactttcaattgttgtatgtacataagtcccttttgatctaatgagaggagagacctggcttccaataagaattcactagaaaatatatttccgttgtgactatataaaactaattaaggtacttgcctccatggctctgagttgagcttgactgccttctgtataaaaatgttatccttcatgaaatgctggccacttaacatggcagaacttttaaaatccagtttgttgttaacaaaacctactgctgggtggttttgaatatattacttttaggcatgatctccccaatgtgtttttactccttttccggcttcctaggacagaggtatgtagtcaaagaatccctatggtggatctgaattgggtttcagctactgtacctggtccttgtgaattaaaaaaataaagtcacaaaaaccatatgacaaaacaaattaaaataaataaacaaaatgaagctgtctccagaccttctgcattgacacacaggtttgaagtcaaccaaagcactcatgctaatctggatgggaacactagggagacagaaaccccagtatgaaaccatgtacttgagctggttcttaattttaaaaaagtcccccgatttatggagttcaggtaacccacaggcccatacaccagtaactaagaggatttcatccaaagggctagactgccctcaattgtatacagaggctgaaaacacagactcttgtgcaaaaggacactgtctcttctgtttcccgctgaaaagcccatcaaccaccaccacttcctggggaccagtggttggggctacacacaccaccgcactggctgaaagtcaccacttatggaagtttccaggtccatgagagaagtgtcaaggagtcactctggtaatgaacactgcagaattgacatgtgcctgctgagaaggaatcacagtgcaggactgtggagagtggtctgaagaaaaggatgtgggttatttgcagagtgtagcaggttccttggactgaggttgcagggagaaggaactgagccagagagaacaagtgcttttccaattaaagtatattcatgatggcattgtacaactgagtgagcaccacaaagtggaacgggaaggcaggaagtacggtcctgggtggccggattgcacgtgagccaggacagagcgttgtactgctccaaaacaaaccttaaaacatccgacgtggttttggagtcaagagggtgtggaacccgctgagaattcctggcaggcagaagttcgtctgtctgtgctactgaaatgtggtgatgcagcgaagcctttaagaagagagggcactggttttgagcctggggacacgatgaccaaaaccactggggaagattctcagctttggcagttgatacaaaatacccaagggccaggggctgctgctttagctcctctggtgcttctctagaaagaagacgctcaccctggctccgactatgctggaagtgagagcccacaccaattccagaaggagagcctggggaggg

SEQ ID NO: 58039 - DNA, 481 bp, Homo sapiens
  misc_feature (1)...(481): n = a,t,c or g
tnnnncganacanannntangnanngncnnnngnannannnnnncagttgnannctcganggnnnngncgnngnnnggncagcgcnctccttgaacncctntggacaccnttgactgatacgaattaatacgactcactatagggaatttggccctcgaggccaagaattcggcacgagaacagctgaaggcccaaagcatgctctgcggagaaattacacatccaaagaacaactattcctcaagaactccctgcagctccctgctgcctctgctgaatgcgcacgcagcaacctctgggaaacagagtaacttttcccgaaaatcatccactcacaataagccctctgaaggcaaagcggcaaaccccaaaatggtgagcagtctccccagcaccgccgacccctctcaccagaccatgccggccaacaagcaggtaagccgacactggtgcagggtgccagaggaaaaaaaaaaaaaa

SEQ ID NO: 58040 - DNA, 1614 bp, Homo sapiens
aaaaaatccactcatataaaaggtgagctcagctcactgggttccatttctcagtggcttctccatcctcatttgcaaacctcagagggataaggcagttgaacctgatgagcaagaattataacagcaaggaaacattaatgcttaggaattctgagatccagcacaactcagtctgtggggagctcagctcgctgcccggggatagggtatgacctatgtcttgccttaggctttctgggagatgccattctccagttttcaggaggcagggcaggggcaaaggtcaagactgtggtattggggtcttttggctctgaaggatcctgggaaccacttgatttttggttttatttccctccagggttttaaagaggaacaagaggtgctagctcttaccaaaacagatggtagagagagttgctggctatttaaaaagctctttcatcttttaattcacctcttcttttcacctctttaaccactcctcaggaacagaacacttctaggactgggggtcttttagctccataagcaagtgagcagatgggacaagttagtcttttctccctagaaacaaaggggatgcccagtggtttccctttgcttcccaaccctaaaatttcaagtttaataaaatagcaattagcagaagtgaccaaattgggagataattatcagtcatgaggaaagacacagatttcggtcataaagaatgtaagggctataagtagaaactttctataacctaaatgatgttatagaattatttttgagcaggagcagaaagattaaatatgatcacttcatacttctaaatcagaaataggaagattaaaaccacagaacagtttgtgatttctattgctgtagctaaggtatcttactctgtccactcttgttcaagtatctaactcttcctggaaaccaaataggctttagaagagattatcctatattcctatcagtataatactaaaatgtaacttttttaatcatctgggtttttaaaaggtaaacagtttaggcccatctctcccaggggaggcaacataggggatatggacttcagggaggcctcctagggggtttattcctccggcccttcacaccccgcttccccctccaacccacaggcctttgcttccaggtgggcagggattactactttgcctcttcaggcagcatctactctaggggctatttgattccattttagacactgggagaagagaacctcaaactaggaggaaaagacagagcctccacttagttttgggaggggatggcagacagtcaaggagatgagcgtcctaaggcatgttgggatagggtcagatgcaccacccatggagaggtttgtcaacacaaagacatggaaggttagaggtttgtcaacaaaaagacatggaaggttaggtttgtcaacacaaagacatggaagattagaggtttgtcaacacaaagatacaggaagaatgggctgcagaagatttagatgttttccatttgggcacattttacttagctggagaactaggtttaaaacagcctgggtaggaaaattagaagcaagctggatgcagtggctcatgcctgtaatcccaacacttt

SEQ ID NO: 58041 - DNA, 2705 bp, Homo sapiens
gcctgtctcctcggcggacgtgctgcccgtcctgccacctctctgctctgttcttgtctctgccttcattcccgaatggatctggtaggagtggcatcgcctgagcccgggacggcagcggcctggggacccagcaagtgtccatgggctattcctcaaaatacaatatcttgttctttggctgatgtaatgagtgaacagctggccaaagaattgcagttagaagaagaagctgccgtttttcctgaagttgctgttgctgaaggaccatttattactggagaaaacattgatacttccagtgaccttatgctggctcagatgctacagatggaatatgacagagaatatgatgcacagcttaggcgtgaagaaaaaaaattcaatggagatagcaaagtttccatttcctttgaaaattatcgaaaagtgcatccttatgaagacagcgatagctcatgaagatgaggttgactggcaggatactcgtgatgatccctacagaccagcaaaaccggttcccactcctaaaaagggctttattggaaaaggaaaagatatcaccaccaaacatgatgaagtagtatgtgggagaaagaacacagcaagaatggaaaattttgcacctgagtttcaggtaggagatggaattggaatggatttaaaactatcaaaccatgttttcaatgctttaaaacaacatgcctactcagaagaacgtcgaagtgcccgcctacatgagaaaaaggagcattctacagcagaaaaagcagttgatcctaagacacgtttacttatgtataaaatggtcaactctggaatgttggagacaatcactggctgtattagtacaggaaaggagtctgttgtctttcatgcatatggagggagcatggaggatgaaaaggaagatagtaaagttatacctacagaatgtgccatcaaggtatttaaaacaacccttaatgaatttaagaatcgtgacaaatatattaaagatgatttcaggtttaaagatcgcttcagtaaactaaatccacgtaagatccaccgcatgtgggcagaaaaagaaatgcacaatctcgcaagaatgcagagagctggaattccttgtccaacagttgtactactgaagaaacacattttagttatgtcttttattggccatgatcaagttccagcccctaaattaaaagaagtaaagctcaatagtgaagaaatgaaagaagcctactatcaaactcttcatttgatgcggcagttatatcatgaatgtacgcttgtccatgctgacctcagtgagtataacatgctgtggcatgctggaaaggtctggttgatcgatgtcagtcagtcagtagaacctacccaccctcacggcctggagttcttgttccgggactgcaggaatgtctcgcagtttttccagaaaggaggagtcaaggaagcccttagtgaacgagaactcttcaatgctgtttcaggcttaaacatcacagcagataatgaagctgattttttagctgagatagaagctttggagaaaatgaatgaagatcacgttcagaagaatggaaggaaagctgcttcatttttgaaagatgatggagacccaccactactatatgatgaatagcactaatacccactgcttcagtgttaacacagcagtgattgtcagctgccaatagcaaatgaagttatgggtgacttgaaataccaaaacctgaggagtgggcaatggtgcttctgtgcttttcccccttgtaacccatgtgccagatgtgtggaatttttagctcagcattgagagaataaaatgtcactacctctcatcttatgaacaggataatataattctttaacagctataggttatctggctgaagtagacctaattttatgtgacttgtggtgtaaaatgtcttgatgataatttttaaaacttgggtaacacttccaaatatgggaggaaaggacagatgtgtttacaagggaggattttacaacatacttgctttattcacctccctgttttgtgttgcgtctttccttgaatattttattggcccagagttagcctttctcaattatgtttccagactgtggccgtgattctaaaggaaaatgtgtgctctttagtgggtagaacaaatggaaatttggtttcagaatggctgacagaaatcgacataagtcatgtaatttttgttgatatatcatgaaaatgaacagaattctttttccatacttatatctaagaaaaggcatcataggtttctgaaagagataactatataacagctttttaactatccagtcaactttcagcttttctacatttaggtaaaatggttaggatataactcatggtgtggctaatctacatttatcaataaaatgtaaattatctgaaaggacagaatataagatttaaccatgtttgacgtattttaatttagttaatgaagcaaaattcagtttatatttcactagaactgtgtacttgattgattttcagagaaatatcacaaattagaaatattaaatctaaggatgaaaggtatatataaaacaatttggggggccagggcacgatgggctccaaacctgttaatcccaggcactttgggagaccaaggcgggtggatcacttgaggtcaggagttcaagaccacctgggcaacatggcgaaccctgtttta

SEQ ID NO: 58042 - DNA, 2384 bp, Homo sapiens
tatagactcctgctgtcttcaagtacctgataaaactttaaccagggaagcattaaacacagtgcagcagcttttgcccaggcttctaagttcctgccggcagcatttatcaatgtaagaactaggatgcttcctgcagtggcactaccttcccctagagctggagcatgctgcttggccttaagccccagcatgatgaggcttccctcctgccaggtcagtaaaagttagagagctcagaattgggtcttgcctgggtgcaggtggcagggtttgctgaaacccctaaagagaagtcaccaagggaggcaggtaatgaatgtttccagaatcagtcggatactcatagcaatttctggctatctttcaaatgttgaatttctggatgctgagagggactttgatttgatatcattaaatccaggacagtcccaagaagtgcttggagtctcggctctgacagcccaagaagggaaataacttgtattaaggaacaactatgagccaggccctgagctgtctcttagataataaaacagatggggagtggaagagtcatttgcttcaagttatacagctaggaaatactcaagccaaatcttgaacgcagctccccctaattctgtggacaggcactttgtaccacacaccatggtccacctaaaaacagaaggataaaaagacttcaggttttcccactgtgtgctgaccatcccaatttatgaatcttcttcaaaatgacatttcacagttatagttagggctcagaaatggcattgaggtagccttatttctcccctttagcagatgctttaagtacacattgctgacttgagcccacccccaggagttaggagaacatttcctttttcatgccatcttccataaataaggtgtttcttggccttcaaagatatagaactttgcagcagtagtaaaagtgaagggtgttctgctctctactcaactttatttgaaaatgtctgcagcttcactcctgtagaaaaggaaatcttcatattttagtaaacttagccgccagtgtactctgtgaggatgtggcaattcaaagtccagtgaatctggactctcttactgattcctggttttagtgtgtgtgtcgggggagtgtgtacctatatataaaggacaagtgtgatatgtgtgtatatgtatatacatacatacatgtccacacacacacacacaatatttgagagctaaggaaaactcaaagcagccccttcattatcttgcgtactacttcaaagatttctgtcagccctaattacaagtgtcaccatatagttggggcttaggtacttgcttacaggaagagcaattccctagcaaaggtcattagctcctaaggcactgagtcaaagtgacagccctggaagggaaattgcactccagccctcctccaggatgtctaataagatgggaaacttggatgcccagccattttggtgacctgagagtctaactactccagttagacctaagggcacaaatgcagaattcatgaccttgtagttgtggcagggtctaggaagtcctctctccccaagtagaaaatattctcttgccattcctgaattccacattcatataatggctgtgcaatacatgcttctcaataagaaaattaactgcatgtttactgtgtgctgatcacatcagatttttatgtttaaaaaaatctcattatggattgagtccagcccagctctaagagaaaaagaaggcccatatgggagacttcagtctcattattattgcctttatccagcagtgcttatgaagccccctaccctgtcccattccagaaaccataagactcaggcagttcttgattctggaggcctgcctggtaagataagatagtataatttggaactgagaacataccagaaacagcagaacgagggccagagcagaaaaatgaaaataagtggagacacttatggatacattggtgcaaaaaaagccacgggaacccatactgggcttgatatgactttgaggggacagcagattaatacttaatgagggttaaacctgaccagtctttctacagtgacaggccacactgcatgaatggggagaaccaatgaatccattgtcctctgcctattttcctgtgcacagtcacattccctccttaggaatcttccccttccaccctttacattaaacaagggaacactgaatctttcaagggaattacacgtttgggttaatgtttcagtatatcattttcatactgtaaattattttgtaagagagatttactgctatcccaggatgttcggacttggtgcccctgtgcatttggaaatcaataaactattactggaaatgccaaaaaaaaaaaaaaaaaa

SEQ ID NO: 58043 - DNA, 1705 bp, Homo sapiens
  misc_feature (1)...(1705): n = a,t,c or g
ttttttttttttttacaaagagtttgattttattgatatttaaatatattaaatatttcactgaaatacatggttcaccatcctcccccacccccacagtggttacattataaaatcaaagcccacggcctcccacctcctgactcctctaccaactgggtgaggaaagggacaatggtagcccaggggaagggcatggctggcactgtggtacggggatccagggtgtggacaggccctcccacctggcaagaagcagagacaagccacccaaggctgaggtcttcccactctgatctacttataccctcacccctaccccatggcaccaagtagtctcttcctatccctttcctatccaggggatatggctggggacagggggagtagattttctgtctggaaaacaagtcttttcccctccttctgccatgactaatgaagtacctgatggcccatttggttgatgcatgaagatgcccaagggaggcattacccagaaaccaggcctccacagggagctggtgtcagaaggggcatgaggaggggcaagtgcactgcctgccccttccactcccaaacctagcaactctggaaacccttctcctctgcctctctagtcatttccaagacaaagtgatcttcaagcaaaattcaggctaggtcctttggcttaaataggtacagacagagaaactgaggcaccaacaaattcaggccagagtcaaggaggttgcagggaaaggggtaaaaggaaggcaaagacaggaagggaatctagagttcaacctcctaacccttctgccagccctcaaggcttcacaagggactggggagctagaaacatgctagactcaggctgaaggctggggaaagccaagtttaaggttcctcttccccaccccgtagtaccagtatccaggtccctcagagggattccatgctaccccagccccaaagcataccatgtcccaggacactatctggggaagccaggaaattcctcagcctctgtccatcaaaccccagacagttcaagtgctggcatggagcactggggcttaagcaagcgcttgggtccctgccacagacagggagagtcatgctgcacacatggcccccgaacggcacttagggatttggcacaaaaaggactcctctccctccttttgctaccacaccccatcccactcctgtgcaacctgggcatctctctacatcccctgaagtaggaaaccctgctttattcccagaagacagaggcccacaggagagaggcaacctggggtggagagctgaggagcaggagcacaaggactcacatagacctggaaaacagatatgcacacaaagaccaacatgcacacacagttacacaaacacacgggccctccccaacaccagagacttgggagggcaggtttgggatcagggtcacctttctccatgccctgacccttttctatttggcaacagaagaggaagagatgctccatgcccccttgtcagcagacagcaagagagcactggggcagagtgacctgatcntgaccccgacggggtcctcagatcagagtctggcactgccccagccctggccggcctgctctttggcacctgcaggtgaacttccagctcctgacctgacatccccacacacaggcnttntctctgagcatttttcacagtaccagtgaggccagac

SEQ ID NO: 58044 - DNA, 962 bp, Homo sapiens
ttttttacaaagatattcttacatttcttaatttatttttaataagtaaaaaatactcattgaaactgtacaaaaatcaaatcattaatttttgcacctggtatttcagtcatcaacagcaatctcatggtacagaaataaaataatgggaattatcattaacttcaccctggctttctagcttagtagaaccaaacagaagaaatcatggcaataaccattaactatagaaaaaaagtaatggaaaaatggttgcaggtttaatcacaaaatgaacttaatttttgttgattttgttttatctgctaaaacactaatatctataaatatgaactgacagcatcgttctaaatttacttctgaagagctgtcgagacttcaataaaatataagcaagttactggatcatatttatggactgctgaattaactacccgaaaagtatcagttactttcaaagaacacaaaacaaagtgaacgtggaaaaaagccttctttgcaaaagtccttttattagtcctatcctctaaaattccaagccacagagccttgatattcctggattctgttttaagtaaccttagttttaaatatgacacttgggatatgcacaatgggaaagggtaggatatgtgaacaaaatttaatttcttttttccaaaggtagtcattttctttaaattcatcctatccacttttgcccacttccccatgtacagattatcctttagtcatacaaattcactctccacttccacatacattttccccacttgatggtacttttacaagagggaaacaatacagctggttgataaagtaatttaaactatttgtaaatgaaataaaaagaaagtaggtataatacatagtgtaaaagataccaaattggagtaatattgatgttaatctagttttttatttaacaaagtacctactaatgggtctgagcaggagagtag

SEQ ID NO: 58045 - DNA, 1877 bp, Homo sapiens
tatgactgattacgaatttaatacgactcactatagggaatttggccctcgaggccaagaattcggcacgaggaatcatggctgctcgcagagctctgcacttcgtattcaaagtgggaaaccgcttccagacggcgcgtttctatcgggacgtcctggggatgaaggttgctgcggcatgaggaatttgaagaaggctgcaaagctgcctgtaatgggccttatgatgggaaatggagtaaaacaatggtgggatttgggcctgaggatgatcattttgtcgcagaactgacttacaattatggcgtcggagactacaagcttggcaatgactttatgggaatcacgctcgcttctagccaggctgtcagcaacgccaggaaagctggagtggccactgacggaagttgcagaaggtgtttttgaaaccgaggccccgggaggatataagttctatttgcagaatcgcagtctgcctcagtcagatcctgtattaaaagtaactctagcagtgtctgatcttcaaaagtccttgaactactggtgtaatctactgggaatgaaaatttatgaaaaagatgaagaaaagcaaagggctttgctgggctatgctgataaccagtgtaagctggagctacagggcgtcaagggtggggtggaccatgcagcagcttttggaagaattgccttctcttgcccccagaaagagttgccagacttagaagacttgatgaaaagggagaaccagaagattctgactcccctggtgagcctggacaccccagggaaagcaacagtacaggtggtcattctggccgaccctgacggacatgaaatttgctttgtcggggatgaagcatttcgagaactcttctaagatggatccagagggaagcaaattgttggatgatgcaatggcagcagataaaagtgacgagtggtttcccaaacacaataaacccaaagcttcaggttaacggaaggacatgatgccagagcaaggcctctgtgattcctgccccagcacctgttgaggcctgacgtgtcagttcccaattaaatgctccttctgattttgttttcccgttacaggccaaggaggcttgggtagttgcagatttgttgtattttccaatcttttgaaaagctctggatgtaatttcaggaaattgaaatccaatcatgagtccaggtagagaacgcctgctgtaatctacactgttgctgggactgcgcattctgtatataactgtgttggatgagtgacagatgattgtccagactaggacagcggcatgaacatgactttggttgggattgcggatagttagggttacctctgaatcgtgtagcttttatgagagcagctgtgcaagtgaatccacattaatgccttgtcgtggtgccattcccagcgcctgacgatacgctcttctattgtcttattctggcaggttttgacgttttaaattttttaaagaaattttattccttggaccaaaaggtttggttaaccacccccctcttacttgctttcacattttgagtgtccagaggaaacagaaaggaatgagtgtgtgacgttgctgcacgcctgactctgtgcgagcttctttctgtgtatatattttgttttatttttttcccgtgtatatttttaatcccgacagaacatcatgtgagattttctttaaaatggattaaacgatttcttcagcctgaaaaaaaaggttttgaaaatgttttcttgtagttttgtttggttctaaacaacaaataggttttaatcactcgaaatggaattatattgtgtattcattgaataaattttttttgaaagtaagcttctgaaatcaaaaaaaaaaaaaaaaaaaaaa

SEQ ID NO: 58046 - DNA, 424 bp, Homo sapiens
  misc_feature (1)...(424): n = a,t,c or g
gcggcacgagccacagtgggaattgtgatatgccacgtgacatagctcctatgtgatgtgactcctcttcattcttgacttcttccaactgggttgattggaatataaagctgaacccagcacctaggctatgtctctcctcttgtctatgagccctacccacaagagacattgtgacatgtctctaggcttctcacctaggtaatgtgacttgtttgcctaggccatcccctcaggggtattgtgaaatactgctggaccaagaacctaggtgatgtgactctctgctactgcttggggtgtgattaagaggaaattgtgatgtgcatttgggcgcatccagcacctaagtgatgttaactctcctcttgtgcctgagacctgcatgcatcatggnatttctttaattaattaagcgggccgc

SEQ ID NO: 58047 - DNA, 1587 bp, Homo sapiens
gtcgtatttccaaggactccaaagcgaggccggggactgaaggtgtgggtgtcgagccctctggcagagggttaacctgggtcaaatgcacggattctcacctcgtacagttacgctctcccgcggcacgtccgcgaggacttgaagtcctgagcgctcaagtttgtccgtaggtcgagagaaggccatggaggtgccgccaccggcaccgcgggagctttctctgtagagcattgtgcctatttccccgagtctttgcttgccgaagctgtgactgccgattcggaagtccttggaggagcgtcagaagcgggcttccctacgtcccagagccctattacccggaatctggatggggaccgcctccggggagctgtttgggcaaagatgaacagcagagaatttcaaagggacctttgctaatatctgtaagacggcagctacagcaggcatcattggctgggtgtatgggggaataccagcttttattcatgctaaacaacaatacattgagcagagccaggcagaaatttatcataaccggtttgatgctgtgcaatctgcacatcgtgctgccacacgaggcttcattcgttatggctggcgctggggttggagaactgcagtgtttgtcactatattcaacacagtgaacactagtctgaatgtataccgaaataaagatgccttaagccattttgtaattgcaggagctgtcacgggaagtctttttaggataaacgtaggcctgcgtggcctggtggctggtggcataattggagccttgctgggcactcctgtaggaggcctgctgatggcatttcagaagtactctggtgagactgttcaggaaagaaaacagaaggatcgaaaggcactccatgagctaaaactggaagagtggaaaggcagacctacaagttactgagcacctccctgagaaaattgaaagtagtttacaggaagatgaacctgagaatgatgctaagaaaattgaagcactgctaaaccttcctagaaacccttcagtaatagataaacaagacaaggactgaaagtgctctgaacttgaaactcactggagagctgaagggagctgccatgtccgatgaatgccaacagacaggccactctttggtcagcctgctgacaaatttaagtgctggtacctgtggtggcagtggcttgctcttgtctttttcttttctttttaactaagaatggggctgttgtactctcactttacttatccttaaatttaaatacatacttatgtttgtattaatctatcaatatatgcatacatgaatatatccacccacctagattttaagcagtaaataaaacatttcgcaaaagattaaagttgaattttacagttcgtatattcatgtggtcctttgaaagggtattctagaaatcactggaaagaggagaggaaagaaccaggtaggcaaatggtctgtgaaacccttgggtcctggaagcagtgtgagtgtaaatgtgtagtgtttggtttcatctaaataaacaaagatgatttctttgacacttgaaataaaatacaaattcaacaaaaagtagatc

SEQ ID NO: 58048 - DNA, 714 bp, Homo sapiens
gaggagataagccttggacctgcctgctggctctgggattttttaagacgaagtcaacaggcagggtttttgctgcccttgagtggcggggtggacagcgcagccaccgcctgcctcatctactccatgtgctgccaggtctgcgaggccgtgaggagtggaaatgaggaagtgctggctgatgtccgcaccatcgtgaaccagatcagctacaccccccaggatccccgagacccctgtggacgcatactgaccacctgctacatggccagcaagaactcctcccaggagacgtgcacccgggccagagagttggcccagcagattggaagccaccacatcagtctcaacatcgatccagccgtgaaggccgtcatgggcatcttcagcctggtgacggggaagagccctctgtttgcagctcatggaggaagcagcagggaaaacctggcgctgcaaaatgtgcaggctcgaatacggatggtcctcgcctatctgtttgctcagttgagcctctggtctcggggtgtccacggtgggctcctcgtgctgggatccgccaacgtggatgagagtctcctgggctacctgaccaagtacgactgctccagtgcggacatcaaccccataggcgggatcagcaagacggacctcagggccttcgtccagttctgcatccagcgctttcagcttcttgcctgcaaacatctgttg

SEQ ID NO: 58049 - DNA, 3052 bp, Homo sapiens
  misc_feature (1)...(3052): n = a,t,c or g
tttttttttgtaagtacaagtacacattccttgccaaactttattgtgattaaaattccagagacagtaccagctccacatacctctagccctgtctttgccctagttcccgagtgtccttcacccccatcttccaaatcatctctgggtttcacggggaagaaaaaacctagggctgctgtgaatgtgccctctcaggtccctgagttgggccccagggtagagctgtaaggagatcagggaagagggcctccctggcctgacggcgatggatcctgggagggcaacgtgtggagcagaaagagaagtcgaggtagtgaaagggagtcaggccttggagggatgccccacaactccagcagcgtcgagtattgacgattgcagagtcaggggattggagaggtaggggctcccaactgggcagcgagtcggcgctctgcagccagagctctcttctctcggtcactgaaggcggcaaatcgccctgcttcttctcgttcacgctcctcctgctcctgctgcctctgctgctgttcctcccgttgccgccgggctgccttctgctcccttttccgtgtagcctgccgtgcctccatttctggtgtcaatggtcctggcacctgagccttgttgtaatcgtaggcatctggattcttctccatgaaccttcggaactcattacgtgttgatttgtcagccgcaacagtataaggtggccgggcccgagagtcctgcacagtggggtcagcaacctnttccagcagcagacgaaccactgagcctcttccagctgcagctgctgcatgcaggagagtaaagccaccggagcccaagggggcactgagcagagacagaactctagggtctgcagggctgggagctagctgcagctttagcactccaacatctccagctcggcaagcagcaagcagtgcattccagagctctggctgaccaggggctttggcctcatccagcaaagggcccaagggggcagcaactgcctgggatgactgtgtggaaggctcctcttcttgagtttgctggagaagagtccgatgtgccccagcctcctggtctcggcttttctccttcttattcctttttctcctcctccgcttgggcaatacttcagactcacaaagatccagagtccccacagtcaactccactagctccaactctacctgaaagccatcttctccctccgaccctgaacctagggaaaaacctgacatgtgaaatccatctagggagtactcagagggtagaagcagatgcataagaatgaaagcctgaaatgaaattgtttttattttgtcacccagataaaagtagcacatcaagagctgagtcccattatatcacatgcagaaatgagctctcagcccagacaagaacaagtccctggactctccgtatgagtagccttagggtgccgcacaatagaggaaagcatggaagcagccctcagcctcaaaccacagcatccaatcaaagataaactatgtgagatccatgcaacacatccacgcatctgctccacacaaagattttcttagctctgggaaacatccataacaaaagagataatagatttggaaaggtcactaaacatgtctcagtaattgctaagatagacactgtgggtgtgtgtttaaataaggaaatgggtcagttatgagagtagggaatttgccagtgcatttttaggacagaaactcagatctgacagttgccagatagtaatcaaaccctgtttgggagattcctcattctgccccagcgcttccttttcatccctgcagatctttcttatttcttcctcagtaggcttctttctctcctctcttactgttttccagtgtgtctgaggtgagtgcagtctgactgcttcccgaggggtcttcttcatagacatgcaaagtggtcagcttatggagcagcacgctgtagactcttggaaggtgggtcctggcgggtggtcgagggggatattcccaaagggtcggggatcccccctttgcaggggtgctcccttgcctccaaagaacgaagaccggccagagcggggagcacgcaacagtattgtaccagcctcctccagcgccttagcccagcttggccctgccnagcaggtcacgaccatccttatatagtgtggcttcattgtagcgcctcaggttggctccagcagagtgtgatggcccacctcgggcatcccgaaagccccctggctgtgccccgcttggcccgaaccgtatagcggtgaaaagttttgtgtgtcaccacttctcttccttgaaatatagcaccagcaaagtgcccagctgcagccatgagcaccacgcagtctctgggacctctactttgcaggttctgtagcagcagttctgcctcttctgggggatcctgatgagggcctaggacacagcggtaggcataaagaaaactggccctgggcattctggaaaagaactcgatgagggtaaaagcctgggggtcggctcaacttctcaaatgtagccctctcccgatccagtgtctgcaagtcctcctcactggctgagtctgagtcttctgatcccgagatgctggaaaagatctcctgtggagctctgcttttcaaagtcccagggcagacaggagaggcttgtccttgagacgttgctttaggttaaaccgatgccagtcaagcttataatgttccctctgttcttggtggttctggaaggtctggtcacaagttgaacaaaataacttctctgaaatagtccataggaccctggagtagctttctttctgggctttctctctcccctgagcctgaacaggaagtacgcggagcccgggccagagcctccccaggcgcgtggctcaccaggctcaggccctgaaagaccggagcatccgcgctgaggtcaaacagggagatcgacgcaggagccggggctgcatctggagccggcgacatggctgagcagaaattatttagcagcagctccaaacgtcccgggagctgancggctcgcaagtcctcaggtcgattgcc

SEQ ID NO: 58050 - DNA, 608 bp, Homo sapiens
  misc_feature (1)...(608): n = a,t,c or g
gaaatccttatgacaacttctcatattagtgtccaacgggaaatttatgattctaatttaaaatgtaaagttgaatcaattaagttaaacttgtgattttagattgaaatctcactagctgtataaatattattaggatatttaagataacttgaggttcaacatattataagttttttagccaggtgtagtggcgtgtgcctatagtcctagctgcttgggaagctgagatgggaggactaattgagcccaggaggtcaaggctacagtcaacagtgattgcaccactgcactccagcccaggcaacagagcaagaccctgtctcaaaaataaaaaataaaatactacaagcttaatttgtaaaagtagttgaaaatgtttaaaagaacttaatcactaggagtnnnnnnnnnnnnnnnnnnnnnnnnnnnnnnnnnnnnnnnnnnnnnnnnnnnnnnnnnnnnnnnnnnnggtgtggtgatgtatgtcttctcgnnnnnnnnnnnnnnnnnnnnnnnnnnnnnnnnnnnnnnnnnnnnnatctgnnnnnnnnnnnnnnnnnnnnnnnnnnnnnnnagagaaagagcagaagcccnagggcttcaaa

SEQ ID NO: 58051 - DNA, 1322 bp, Homo sapiens
ttcatttttgctctgattaaaatttttattgaaatctctcaaaggtcgtcaagaaatagtttttgtgaaaggggggaaaatagctaacaaacaaattcaacatgggagctccctctgctggtctgcagtaggttggtatgttacaaacacattcccagagacaaatctaatttgctggagaagtggacaaaagacaggtgtgttgggctttgcctcaggagagaaacactgggcatgcagtgaagcgggataggtgaaagcaggaggaggtagagcaggcgctaactccgctgggtacagagggtacggggcccacacttcagggctactggggtaaagtgcaggcactgtgagctcatatggctctctggcaatgaactgaggtacagtgttgggcagaggagtactggggtttggagtccctacgagtttgttcttggccatcttcgtgtttgccttagcaaactctagtcgtagtgtttgcggaatttcaggatcgaagcggatgccattcaaagcattctttgcagcctctgcttctgagcgactgtcaaaactgacaaaacctacaggctgtttagatgtgagctttataagagaaccctcatagcccttaaatggtctgaaaagcagatagagctcccgaggtttgatatccagaggaaggccactgacaaatagggtccggacctcctcctcctgaaggttggcctcgctcggggtgttctccttctcggctttgccgccgttgttcatcttcccggtccttcctcgccgggccgggcagggctggggcgcggggctgggcgagggcgcgctagcccactggagccttccccgggcgccggggctccctcgggcgggcgccgcgggctgtggggctggagctggagccggggcagtggctgtcgggctcgggttgggctggggctcccgcggcgagtctgcgacggcggcggcgggcgactcaggaagtgcaagggagagacggggcagggcgcgggccggcagcggggaaccgagacaatcgggccccgggagggcgacctggagagggagggcgggagccaggggaggaaggaagaaggaaggaaggaaggaagcaaaggatggggcgaggacgcgcgtcccaggagtaagcgcggagagttggggctgggggctgcagccgctggaaggaggggacgggggtgcctagagaggaggaggaggaggaagaggaggaggaggagcggggcggaggagcgcgggccgcggctgggacgctgggacccgagagccgctgagtacgcgctccaggcaggctctgggaagtccgggat

SEQ ID NO: 58052 - DNA, 1637 bp, Homo sapiens
gcggccgcagttatgactcccgtgcggtgcggcccagcagccaccaagcttcccgctgccattgctccttgtactcccgccgtcactgccgctgtccaacccctcccccggggcttgcgcggcggctcccacacccctcggcccgtgtacgcgctctgcacctgcctgcccgaaaacatgttgcagacaccagagagcagggggctcccggtcccgcaggccgagggggagaaggatggcggccatgatggtgagacccgggccccgaccgcctcgcaggagcgccccaaggaggagcttggcgccgggagggaggagggggctgcggacccgccctcacccggaaaggcgcgagggccttggcggccaaatccttggcaaggcgcagggcctaccgccggctgaatcggacggtggcggagttggtgcagttcctcctggtgaaagacaagaagaagagtcccatcacacgctcggagatggtgaaatacgttattggagacttgaagattctgttcccggacatcatcgcaagggccgcagagcatctgcggtatgtctttggttttgagctgaaacagtttgaccgcaagcaccacacttacatcctgatcaacaaactaaaacctctggaggaggaggaggaggaggatctgggaggagatggccccagattgggtctgttaatgatgatcctgggccttatctatatgagaggtaatagcgccagggaggcccaggtctgggagatgctgcgtcggttgggggtgcaaccctcaaagtatcatttcctctttgggtatccgaagaggcttattatggaagattttgtgcagcagcgatatctcagttacaggcgggtgcctcacaccaatccaccagaatatgaattctcttggggtccccgaagcaacctggaaatcagcaagatggaagtcctggggttcgtggccaaactgcataagaaggaaccgccagcactggccagtgcagtaccgtgaggccctagcagacgaggccgacagggccagagccaaggccagagctgaagccagtatgagggccagggccagtgctagggccggcatccacctctggtgagggttggtgaaaagttggccagtgggtccccgtgaggacgaactactgtcctgagtcataagtaatatgggtggggcgagggtcttatttctgtagaaatcgtgtgactttaaggatttagattttgtatcttatgttttgtaacatttaataattactgttaaaatgctgtttgtaaatgagattggtctactttttcctgtaggattttattgtagagttttgctggttttgtaaaatggatggaagaactttgtatttatactgtgattttgaacagattatgcaacattggaaggaaggctgtactttgatggtttgaaggaactcagcagtatgatgatctggttccaggggaaaaaaatagctggttggtgtctagccccccaacacttttgtctgttgtgtataaaagaagaaagactggcatgtaccttcatttgcttagctatttgagtatctagagaaaaattaaaatgcaatgagttagcagtataccctggcacacttaataaattaaacatttgtggagcaaa

SEQ ID NO: 58053 - DNA, 2429 bp, Homo sapiens
  misc_feature (1)...(2429): n = a,t,c or g
caaaagctgagcatccaactgcaaatgaataaggaggataaagtttggaatgattgtaaaggagtaaataaattaacaaatttagaagaacaatatataattttaatttttcaaaatggccttgatcctccggcaaatatggtatttgaaagtatcattaatgaaattggtataaagaataacatctccaatttttttgcgaaaattccctttgaagaagctaatggcagacttgttgcctgtacaagaacctatgaagagagcatcaaaggaagttgtgggcaaaaggaaaacaaaattaaaactgtatcatttgaatctaaaatacaacttagaagcaaacaagaatttcagttttttgatgaagaagaagaaactggagaaaaccacaccatcttcattggcccagtagaaaagttgatagtatatccaccacctccagctaagggaggcatctctgttaccaatgaggacctgcactgtctaaatgaaggagaatttttaaatgatgttattatagacttttatttgaaatacttggtgcttgaaaaactgaagaaggaagacgctgaccgaattcatatattcagttcttttttctataaacgccttaatcagagagagaggagaaatcatgaaacaactaatctgtcaatacagcaaaaacggcatgggagagtaaaaacatggacccggcacgtagatatttttgagaaggattttatttttgtaccccttaatgaagctgcacactggtttttggctgttgtttgtttncccggtttggaaaaaccaaagtatgaacctaatcctcattaccatgaaaatggctgtcatacagaaatgttcaactgtagaggacagttgtatttcttcttcagccagtgaaatggagagttgttcacaaaactcttctgccaagcctgtaattaagaagatgctaaacaaaaaacattgcatagctgtaattgattccaatcctgggcaggaagaaagtgaccctcgttataagagaaacatatgcagtgtaaaatacagtgtgaaaaaaataaatcatactgcgagtgaaaatgaagaattcaataaaggagaatctacatcccagaaagttgctgataggactaaaagtgagaatggcctacagaatgaaagtttaagttccacacatcatacagatggcttaagcaaaatcagactaaactatagcgatgaatcacctgaagctggtaaaatgcttgaagatgaactcgtcgacttctcagaagatcaggataaaccaggatgatagcagtgacgatggattcctcgctgatgacaactgcagttcagaaataggacagtggcatttaaagcctactatctgtaaacaaccttgtatcctacttatggactcactccgaggcccttctcggtcaaatgttgtcaaaattttaagagagtatttagaagtggaatgggaagttaaaaaaggaagcaaaagaagtttttccaaagatgttatgaagggctctaatccaaaagtaccacagcaaaacaacttcagtgactgtggtgtatatgtattgcagtatgtagagagcttttttgagaatccaattctcagttttgaactacctatgaatttggcaaactggtttcctccaccaagaatgagaaccaaaaagagaagaaatccgaaacataattctgaagctacaggaagatcagagcaaagagaaaagaaagcataaggacacttactcaacagaagcacctttaggcgaaggaacagaacaatatgtcaatagtatctcagattgaccatttctgttacttgtcatttctactttcagaaactaaatgactttcaaatttgggtatagacaataaagaactgaagtgctcactactcagtgatttggaaattttgatgcttgtataaatgtcagataattaatttccaaaggcgtatgtattaagtaaaagtctgtaaatatgttaatgaggccaatttttccagcatttataattatttttttcacttgttaggaagcttttgttatgtattttctgttaatagtacctaaaattgcaacttctaaacacaaataaaaagaaaatatttataggaggaaatgattaatttgatattctttagtgaacttgtttaattcctcagtgggtgtgacatatttcatgggaatattcaaatatctatggtaatattttgaccctttatatttgttctaaaataagtcaaaatgtgaaaataatattaaatctaaggatattttgaactaagcatctttatatgcttgtgtaacaggaacaaagtaacagcctttcaattcatatactgccttgtgttcagtgaacccaagaaatgtaataaatatttggtaattttacacaaatttttaagggggnaaggggtatttaggggccntttc

SEQ ID NO: 58054 - DNA, 1054 bp, Homo sapiens
gggagggacgtgggcattttggacaccaggggaaatggaaatgctgctttcaaaacttagtttcctttccatttcttcctagtctggcctttgacacaaatctggtagaaagaagcctgataaattgagggcacttgtaccctccctgtgcccccagaaggttcttggagagaagtgcaagaatttgtgaacacggcggtggagggcgggtggatggccatgggctgggcctccgtatcaggcctgctcaccttgctgggagctttattctgatctcattttgaatgttccagagggagcatcataagagcccagagctccgatttccaaagagtgatattgacatttatggagattggtgttgtaacatattttgataaatactaacttattttgttggggttttggttgtctcttgtcttaggacctggtagttatttgcttgatttttttttccgttattttctacataggcaaagagaattcgagggatagacagtctccaagaaaagtgaagtggtgggagagaattgcttttttcttttttttcttttctctagtttttctttctggctgagatttccgtgcaagacagcacccaatagactatttagagttgacatttgacattttaatgggcgccatggctcattttgtagattgagaaggtgcgtctcccctgctccaagtctcatcatgacagcgtgctgacagctgggagtctgtggccttcctcacgcagaggccttaaagctggacacagaagcacgcctaggctgggcagggatgggacccatgccccctccttagaggacgggcttcctggttaggaaaggacacgtgggggtgccttgcataatagttcactggtcaccgtgcttttatgagtagtgtttttgtgcacttgccaggggttttctctctgtgtgcgaggggagtgatttaagcaatggtgtctggagtaagccttacaattttaatagactttttcttatcatatccctcatttctttccctgaaataaaaatacacacaagcaaaaaaaaacctggtg

SEQ ID NO: 58055 - DNA, 2725 bp, Homo sapiens
tttttttttttttttttaagcattcacttcaagttttattttgcctcttgcatggtcttttacagttcgttttctacaggaactgagctctgatccaaacaatcaataaaaatgtaattccaaccttaatattcataaccaggaaatagcatagcacttcatgatcctagagtgatgaaagcaagaccagggcatctgtttcacagtcacctgtgaccagaccagccaacatggattactaaaagccaagataaaaccaaaagcaaacttgctaaaaaatcctgaattccatgaggttaactctgaaatcctccaaacaaaatgctagaattgtccactagtgttaagacgagaaaactgaggaaaactcagctgtcttactatctggtaagagtcttcccttcatctcaagccctcaaaaatgcaaacttggttccagctttacaacataccatatccttctatcggttaaaggtttctaacctaaaaaccttctctcctttcttctcacctatttagtgcatactcaaaggctttggttggaagtcactaggtaccactaggtacaatgctttagggctctctcaaagcccacaatggtggagttctgtgaaagaaaacttaagtttctttctctttacccctctcccctcactcagctcaaagttaaacagctgatgcaaaactacagagaagcaagataacaaaatactgttatcaatctatggagaaatcagccagccatgatgaaaaaatgagtcctgccgactatctgccagcttcatgctcagaacccttaaaaacacagaatctaaattaaaatacatgaagctttcacaatccggttaaaggaaaaaggtaactgtaaataactggttaaagtgtgctcattcgttcagaaattagatacaaacatgcaagaattaaagactctgatttaataaaatcagtagtaacaggtcttgagattaaacaactgacctgagggcaaatgggaccaatcagtccctgaaccctacctgacatgtcaaatccaacatttcacatgctgacctaatattgaggttaatttccagaagtaactgcacttttcaacagattaagtcctacaaaattaggctctcgtaccccaaatggtcatggcctacgcctaggtgggaggcactttaaaaataataaaacttcaaaaagaacaaaaacaaccccaaacccaaagacaaaagtaaagaaaatccacttttcactggtttacattattcaaagtgccattctgaaccaacaccctttcatttatagaggaaaaaaatttacaaaaacagtaaacacaaaggatagtcaggttacagctagtttatatacaaagaaatttacaagtttgtcaattgtaggcttttgccacaaacaaatgcacatttgtccctacaaagtacaacatgcctgaaccaacagtcattacaggagacaattggccacggctttacaaaaagcagaataactgccccaaattgaaattatttattcagcttaaactaatgccacaaccatcccacttggaatcactccaccctgacacttctgaaacccactctttctttctttcatctctgccatgtcccctaagactgagaggcatttcactcaataaaccaaggaagatgacagatgttatcttgattactctcaggtgagaaacgcaaccacactggatgcagaaaatagtgctgactacatttattgaagactctctccctgtataagcccatgtaaaaggtctcagcacctaacacaagactcaaaaaggaagcccacatctctctttcatacaggatttgctgcaatactatattcttccaaccagtgagtagtctcaaagtgtgatgggtgagttttacatagtcttctttgtttcgaatccaattggctgatttgttaccattctagaggctgaactgtatgaagacctcaactaccattcacaaggtgcagttaagagacttttggacagttcacagtgtcaacaaatgtcacaggctccgaccaagtataaccacatcctttggaaatccttccatttttgcaatttcaaaacatcctaacttgctgtaaaattccagaattcttttatcatctggtctcacttcacagaaagctccccgggagccattagccttcagtgaagacaggaggcaagccatcatgcttttggccacacttgggtcagttacttttttgtgaatgtccatctttatcagagaagggaaattagcaaggaaagtttctggcagtacttcctgttcttcatggaaactcaacattattttctcagcctcagagagttccttgtcaccatttggcttggtatacttctcctgcatgaaggggatccaggaaattttacattttttaataaagggggtcacatctacagtgcccaaggcataaccacatatgccatcttcatcttctaggacaaagcagtaatccaggctgagggaaagcagccctcctactaacttgtctccaataagatcaggctgactttgaaagggtaaacccactccatcgtcatacatttctctgcaaatcttgtacacggatgcctcatccttaggaaaataaggtctgatagtataaactttggaggtaggagtcagtggaggtggctgaaaaaagagatcatttgccccatcaattgggcaggcaaacgctggaactctcctgctac

SEQ ID NO: 58056 - DNA, 1093 bp, Homo sapiens
  misc_feature (1)...(1093): n = a,t,c or g
aaatcttttttttttttttttttttagttaaaagtttaatgtagttcccaaatacatttcatatgacaatcttacataaatgttccaaaacacatgggcgttatctcgttgtactcgtcactagctggctaaggcttaaagcagagacgtgtgactgggtctctcgggagggcctctggttcttcccgggctcaggcttgctgggggctgggggccagggctctggcgacctagaggtgtggacggcacagctgcaggaggccttctcttaaccctccgagagtgggactgggagatttcctctgaagtcccaaagaggccctgtgcccaggggacctcctcctcggcctcccaggtgggtggtgcaagctggctcttggccatgctccaggctcgggtgggcacaggcgtccactccagtgtgctgcgtgcttgtgagactgcctgttctgggaccagcccctgggctcttccaccaagatttggtgagggtccccctctgcctctcacagaagcccctggccctggactgtcctgggggcaggggacacctgtggctggggaagggatggccaacagcgggaagcagtttgcgcctggtgcctgatgatggtgaaccacgtgacagatggagacgggagtcaggggaccctggggacccttccaggtccagtgaccttttcccagacaggcactctccaggcctaggacagacagggccccaactcctcatcaccccatgacttggcctggaggaaccctggggtgggaaacaaagtagtcccccaacctcagaggcccagaaccacaggtgggggaccagggacctcgacagagctgtgcctgctcaacgctcgagagcatcttaacctaagaaaccaaaacaaagccttcgaaaataaaaagaaaaaaagatgtaaaatatacacccccaatcagagaggggaagtgggaaatgaagatagtagttaacagcacgtccaatgggcccagtgtctacactcgtacgagcatgccccccaagctgggcgggggtcccaggcctatagttgggganncctgggcaggggcagagggctggctgctccccagc

SEQ ID NO: 58057 - DNA, 1238 bp, Homo sapiens
  misc_feature (1)...(1238): n = a,t,c or g
agatggcggcgcaacagcgggactgcgggggtgctgcgcactggcggggccggcggcggaggctgaccccctaggacgcttcacgtgtcccgtgtgcttagaggtgtacgagaagccggtacaggtgccctgcggacacgtcttttgctctgcatgcctgcaggaatgtctgaagccgaagaagcctgtctgtggggtgtgtcgcagcgctctggcacctggcgtccgagccgtggagctcgagcggcagatcgagagcacagagacttcttgccatggctgccgtaagaatttcttcctgtccaagatccggtcccacgtggctacttgttccaaataccagaattacatcatggaaggtgtgaaggccaccattaaggatgcatctcttcagccaaggaatgttccaaaccgttacacctttccttgtccttactgtcctgagaagaactttgatcaggaaggacttgtggaacactgcaaattattccatagcacggataccaaatctgtggtttgtccgatatgtgcctcgatgccctggggagaccccaactaccgcagcgccaacttcagagagcacatccagcgccggcaccggttttcttatgacacttttgtggattatgatgttgatgaagaggacatgatgaatcaggtgttgcagcgctccatcatcgaccagtgagcagagtccgtgcttgctatctgtctcatgttacagagcttccattacatattaaacgtgaaatctatgactcctgtaccttacctgttcaacagacctgaaaatgaggccatggcattgggacagggtcacttctgacaggggaagtggggtccccagggtcagcccttctcttccctttggggttcttgcccaaagctgtcttcccctactgttaaccttgtttgtcacacggtcgagttcgtattggttctcggctacttcctgggagcttctgccgcctcctgtggaagataatctagcttctccacctcttgtttcacactcattcctcccatccagtgtttgtctctcgggtccttcaagccagccaggaccttttctgggtcatgaatagcacaatgaagcaagtgtctcctttcccttgtccccaaggtgtgcagactttggcagccatgcacctgaccaaaagctgaagctcccgctgggctgnggggttgcaaaagctggggttgcatcccggngtacatgtcacaatcctcttggggtt

SEQ ID NO: 58058 - DNA, 765 bp, Homo sapiens
  misc_feature (1)...(765): n = a,t,c or g
tatgacatgattacgaatttaatacgactcactatagggaatttggccctcgaggccaagaattcggcacgaggacacagaccactgatctcaagcatgtccagtttttagcattaaagacttttctattctttgctgatggcagctacaccgctgaaaaaggaggggcagcctggcgtgttctcaggacccccggaggatcccatattgggtgcttttctttccctggctctatgcagaggggcctgagttggtgtgtatgcctgagtgtttgccttgcgaggcacagtgggtggctgtcttgcctttgttttcgaacctaaaaccattttcagccttttagatatgtcatgtgctgctgcttcccgaagtggtcttgctttctgtttcgtaagatgtcttgtttacacactgtatcagggatttggtgatacttgaaaattcctttggagaaaaaaacaaatttaattgccacactgcctgtcccacatgagggctgttaatttgggaacccaagtttgaacccaacttgtgatggacccgcaggtaaccacagagcttcctttttgaaggcatatggttggagagaaccattttcccagctctcggttccggaaggattccacgtcttggagggctgtgtttcaccactaggaactttaataactacccgggggaggggaggaagctcgtttgaaaggggaggacaaaggtttttaaacagtttccccaccctttttttnccaccacatactttacaggggg

SEQ ID NO: 58059 - DNA, 1121 bp, Homo sapiens
ggcacgaggttcttggatctgcgggttatggccggtcccttgcagggcggtggggcccgggccctggacctactccggggcctgccgcgtgtgagcctggccaacttaaagccgaatcccggctccaagaaaccggagagaagaccaagaggtcggagaagaggtagaaaatgtggcagaggccataaaggagaaaggcaaagaggaacccggccccgcttgggctttttgagggaggccagattccattttacatccgaatcccaaaatacgggttttaacgaaggacatagttttcagacgccatatttaagccttttgagtctcaatagactgcagtatcttattgattttggggtcgtgtttgatcctagtcaacctattgacttaacccagctttgtcaatggggagaggtttgacccttccagccacttaaaagggattatggtgtccagctggttgaggagggtgctgacacctttacggcaaaagttaatattgaagtacagttggcttcagaactagctattgctgccattgaaaaaaatggtggtgttgttactacagccttctatgatccaagaagtctggacattgtatgcaaacctgttccattctttcttcgtggacaacccattccaaaaagaatgcttccaccagaagaactggtaccatattacactgatgcaaagaaccgtgggtacctggcggatcctgccaaatttcctgaagcacgacttgaactcgccaggaagtatggttatatcttacctgatatcactaaagatgaactcttcaaaatgctctgtactaggaaggatccaaggcagattttctttggtcttgctccaggatgggtggtgaatatggccgataagaaaatcctaaaacctacagatgaaaatctccttaagtattatacctcatgaattcccgtccaaggaagcagagttgttaaagagtactggaataggggctgaaggatctatattcccttattgcattttccttatgtataattttccagatggtgatgttacttttcagtgtactcatatgtctcattttcatctaaaattaaatggcaggaaacaaggactgcatagagaaactgaaaaaa

SEQ ID NO: 58060 - DNA, 706 bp, Homo sapiens
gaagtaatgctttatgtttatacactgctatgtacttgtcaaaatggtttccacattcttatcacatctgagccttaccaggtagagaaggtactaaatacactttagaagtaaaaatatgaagtaccgagaggctaaacccactggcctaagatctcaccaaagttcatgaaaaccaggactaggacccacggctcccaaagcccgttcttgctgtgttgtgctgcctccatatccgtcaggaagagcctttccagaatgattctgggcatatactaagaagagcaggtatggaaagatctattgtcagggaatcttagaattccctacacgagtgggagaaagatgtccaaattccttacgcagtggtattcatgatggtgccctatctaagtccaggactgttttcctacagcgtgcctcaaaagtgttgtagagggcaggattctacattcacagcctgttccatctacgagattttccagatgctacttgtggtagacattcctaactcatggtacttagccaccagagatcatgatggaatgagtgggtggcttttctacctgccattccctcagaattcatgaggggtgggggacagggggaccggaattgtcttagcaccccaatgttatgacaaaactatgctactttagaaacgcagtctgtttttcaccaattgacataactactgatctgaagt

SEQ ID NO: 58061 - DNA, 1613 bp, Homo sapiens
tttttttttttttttttttaaaaacaaagtactacttttatttggctcatttctccatttattagaataaccacatttggagaggcatgaagcacttaagttttacatgactacaaagttatcacaaatctcaaactttttagccacagatatttcacctctgtttaaagaaaaagctttcaaaacatctgagttagcttaatacacagagaccctgaaatatatgggaactacatattttaaatgcttgtacttcctgctctaataatgtcttctttaaacggaatccagcataaaagggattgaaatgtataaggtcatgatgcaaatgctttggagatagtgaaactgatctgcacaacatggaaaaagatgtcatgtgcacagaagttctgcaaggattcactgagccatctgggcttccatggcttgtgctgtccattctggtgctgtttgactaattttctccaaaaggttattcacttggaaacaaagtgattggatctgcttatcccacgttggcagggcttctcgtgtttcaaaatgaactattccatcaatctggtcaataaatccattcatacgtccttcggttatcatttgagatgctatcttttccgccttagctgcagggatctctaaaagagctccaagttcttcgaaggtaatattattatataatttgcttgcagacaacaaattgtgttcaataacagctctgtccaagatgctggaaccatcagctgtagttgctttttggtgaggcatcagcatggcagcaaattcttgaagttgatttcctctgatgatcctatctagatacattttctctaggatcccataggcagcaagttgctggcacctttcatccttaaaaagagtagctagcatccgagaacgctgctgccctgctgatgctaagatcgtacagtgcaaagcatgttttaaggcctctagtctttcactttcgtggactattgtcttgtaagagagctcattgtacctttgtgcagcttcaatgaattttcttctataatcaagaacacgtgcatagcataccttataatgtatctgtaattgttcattggttgattcattctgaagcaacgatgctcgatttatgtaagcctctgcctggactggatcatcatcctccagatatagcctagcaatcttcaagtaagtctccagtttataatctacattgtactgtttttgtcctgtttcccaaaaggaattcccaccaacacttgggctgcatttctccaatcttcttctttctcatatatagatgcaagatgctgtcttatggaagcaacctgctcctcaaatgaaatgactctagggctggatcttttccaaggtgaagtgatagatttctttggctgtgctatcagggcaagttaggaagatgtgtgcaaaaatcaggtcagcaactgccgcgagatcacggagactgacattctcatttaccattgcttccacaaaagctttcaaagcttctagttgttctgctccagataactgaatggctttttccaggatctgacgatacttgccagccagatctttatgagagccgctcgaattcatgagctgggccaaatcctgtc

SEQ ID NO: 58062 - DNA, 1622 bp, Homo sapiens
taagaagctacagtccactgaaaaggaagtattatggtttttctgagaagaaaagttgctaaatactgcagcaaactcaggcttttcctgagaaaagccacaaacaaaatcatctctgaaattttttaagcaacaacttcctgaagcgtggaatttatggggccagtgagacactaaaatttcacaactctcacatacattatctatctaggactcagtgaagatgttcttcagatttttatttaagttaaattggtaaaatacaaaaagaaaatctggattgagtttcaaatcatcttaaatagcaatcctatgaacaattataactgcaatttcaaacactaagacttaaatatacaacttgatcatacaattatctcaaaacatatgatcaaaaactttggtcaagagcttctttcatgaattcttcaaggacagctatcacatttttggcttcaggcatttcttcatgttccactttaacaatcttcaaaagtatatctccactaccacagttctttaggaacatgtaacatttaaacaaagcataatgattcatttctgcctgtcggataaatctcttcaaattgtttgtgtcttgtatggcctttagtttaaagttctccagtacttgtcggaaaagaaaagggttacctcctttggcaccatttaaaaaagcttgcatccaatcctcacaaaaccggttacttcctgcattgcagaactgaggctgggagctgctgcaatcgatgaccacagacttatgctgctcctctgtcatggccatgcacaaagaagtcatggtgccttcatgaataagtccttgaagactggccacactcagaaacctgttaatgtctctctttgttttttcatctgattctttaacttcaacaggagtgtaactcaaagcagcatgtagcagaaaggtaagcttttcctgaaagagaagaacaaccctttggattgggcatacaacatcctcaaaccagctgctcagataggattttatgtgactctccaggccccttgcctcacaattcatgttatttttcagcccttgaatgtacttgtccaattcaagcctgaaaaagctcaagtcctttttcagaccctccctaaaaaacagaccacataatctgaagggttacgttcagagtctatcgttactgtttcaggaagcagtttttcattttggaaaaggcagtaataacaaccaactcggtaacctggaatttttagctcccacagatgcaaacattacccagcccttcaaagactgcaccttcttgaaagacggcttagcaatgaaactgcgcaagctctggctcccacttcgggatggtagattagtatctgcccaaggagaggctgaaatcatcaccaggagggagtttctgcatttgtgccacttgggcttccgtcctcactgtcccctcgttgctgtgccaatctgcttccgcgatagctgtaaagacagtagtggctgctggaccggcggctcgagtctccgctccctcgggctgagcctccctcttcgctgctctctagttccttttcatctccatccatcgactcctgcaaagaggggagcattgcggcggcctctgagcggccctgtg

SEQ ID NO: 58063 - DNA, 1338 bp, Homo sapiens
gaaggctcaagatggcgtgcttgttggagaccccaatccgcatgagcgtcctttcggaccaggaatgaaagttactgggagataacttcgaaggattttgcaacaaattcgagctgtccgactctgagaatggaagtaacagctagcagtcgccactatgttgacaggctatttgaccctgatccccagaaagttctacaaggtgtcatagacatgaaaaatgctgtaattggaaacaacaagcagaaagccaatctcattgttttaggagctgttccaagattgttgtacttgcttcagcaaggaaacctcaagcacagagctgaaaactgaatgtgcagtggtgttgggaagtcttgctatgggtactgaaaacaatgtcaagtctctactggactgccatattatccctgccttattgcaaggactactgtccccagacctgaagtttattgaagcttgcctccgatgcctgcgtaccatcttcaccagtcctgtcactccagaggagctactgtatacagatgccacagtgataccacacctcatggcactgcttagcaggtcccgctatacccaggagtacatctgtcagatcttctcacactgctgtaaagggccagatcatcaaacaattttatttaaccacggtgcagttcagaatattgctcacctactaacctcactgtcctacaaagttcgaatgcaagcactgaaatgtttctcagttttagcttttgaaaacccccaggtatcgatgaccctggtaaatgttttggttgatggagaattgttaccacagatttttgtgaagatgttacagagggataagcctattgagatgcagctcacatcagcaaaatgtttaacttacatgtgtagagctggagcaattcggacagatgataactgtattgtattaaagacattaccttgtttggttcgaatgtgcagtaaggagagattactagaggagagagttgaaggagctgagacacttgcctatctgattgaaccagatgttgagctacagagaatcgctagcataactgatcacctcattgccatgcttgctgattatttcaagtatcccagctcagtgagtgccatcactgatattaaaaggcttgatcatgatttaaaacatgctcacgaactccgccaggcttgcattcaagctctatgcctctcttggagcaaatgatgaagacatccggaagaaggtgagtctgggagaaggggcgtcccccagtcctgacagccagcaggcagggagtgacgtcaacctgaaagtcgtgggtgaagagcactaacagtgactgtttgaatataataaag

SEQ ID NO: 58064 - DNA, 807 bp, Homo sapiens
ggggaggagccttactgttatttccccccagcttccatcacccttcccttaatgccaggagcgccgaggtttggaactgaggctaaaccgaaggcatttctcctgcttctgtcaccctgtgctgtctcccaggcatctcctcactatctgggtccaggcccgggtcctccctgcagactccctcccctccagcccacaaggactccagcctgctggctggtgaagaagcttggaatgaagcagtaagaagttaacgccaggtcaagcctcggggcccaagggttccctgggcacaggctgacactaggagctgctctccttggccggggacaagctccagcagctcaggctccagccctccagtgagccgcctctcctggagagtagcaaagaatggagaaaggcctggcttgagaggaaatggagaaaacattgcctggtagctgcagattcaaacccaccacacacaccacggggctagagtgactcacctgggctcacaccaacttctggccaatgcagggaccatgctctgcagacagcagtcctctagcatggccccagcattcagccagtcggtcacctgtgggccatccccatgtgtgaggaagcaggagtcagccaccaagtgtctccacatcggagcttgcgggtcagacctgtgggccaggggatgggagcagggctgagggtaggggctgaatgtgtggctctgtccctgtgttgccttccacagaggagcaaggcctcaggctgaggaaggaggggcacgctggaacagcctagtctcctccccgtggattcccc

SEQ ID NO: 58065 - DNA, 1797 bp, Homo sapiens
  misc_feature (1)...(1797): n = a,t,c or g
ttttttttttttttattttgtattggttttatttaaattttacagaaacctgatcagagttaagtatgtaattataagtccagtaacaatttctacaaaaatgcacatacaatgccagaactccttaaaagcaactaatatcatatttgtcgttttgcataaaacatgcattaatatgttgggccaaaatcagtctctacaagaagagacagtccaatacagtcaataagaaaactagttgtgaacaacaggtaaaaaaagaggtttccagttaatgtgaaagaaggaatagtacctttcataaaacaagcccttcagcgctgagttaactgatcgggtactattgtgctgcacgtaatgtaacacatcacctccaagacttggtcctgattggtcataggaagtaagggactttctggtagttacatcagatatttgagaagattaaaagttttccggacatgatggtatactaatagtgcaaaccttgcaaaaagggttcgaaacattgtcagacttggaagagttccccagcttgataaacaacctcaaagacaccccgagcctttgaacggagccctctgcacaaggccagctcagggctcaccagcatgtcctgtggccacaagaccttccagctccacataccacccttcgtgaggatctgcaattaggagcctgagtgccgaagaacatggttgtgccatttctttgaggctttgactttttataaggcctagttcatctcatccagggattgggcactcgaatgaatacacagatgctggacacataaggagtattaatatacatggtggccccacagcctgaaatgcttttattaacatacatcaaggtgtgtctccgactgtcaggaaagaccttggtccctccagaggcagagagaagctgagggttctctatgtatcacaaggcatttcctacatagactgaggggtgttaaagagatctcatatcaactgaaaggacttcccctcaaatgtggggctctgtacaaccttccatgaggatcttcaaaaaaaagatctcatagtcgttagggaagtggcggtggacattaacattatatacacaaaactcatcattcgtgcagcctcgggccttgtttgtaatctcttccacagtctgtctcttccaaaacagggctccctgccctgcttatttcaagtaagctaagtcaggatctgttttctttagcagattcaagggggaaaaataataatttattggggttctaataacattttcataacagaatatcaaaataggtccatttttgatatatgcttatgaatatccctgataatatcaagaaatccagaggacttcgtaaaccaccaagatttcacaggggtgagacccggtctgttttctaggcagcagagaagggactagtatacgggcaaatgttctccaggaagccctgtgagcactacagtactgaaattctaattctagtgccaatagaatcatgaacgaaaatttcacttgaactgtattagtaaaattcataacaaaggcttgcttcctcaaccctgtcatctgttaatctctccgcctgtgacagacatccagaccagaaaaccatcagtcctggctactctggaggttgggcctagagaaaacaagccccaagatcctttctaagctatgaccaaacctcagaaaacagggacgtgaaagaaggagcagaccaggcttgaggaagctttgacccaaggcaccacgatcataggggcgaggggacctgtagaggtnctaggtgacgggaagaga

SEQ ID NO: 58066 - DNA, 1411 bp, Homo sapiens
tttttttttttttaaaactgtaaacattctttttttttttttattaagaaagcatgcaaaaaaacaatgacaacaacttgtgagaccatatacccccttcccaggatgcagcaatgcaaagcattatgggtggtggcacaaaggactcaccaaaccagaaacatgaggagcagggactgaggagagaaaggttgggatgggtggatctataccaaataattactccttttgtccctctcctccactttctctcttatttcctcttataggcagtgagcttctgcagttttgcacacatcacccaatacaacaataatgactacactttgtgtccagcaatgctagaccaacaagaaaaagtagtattcttttcatttcatgaaggggaggggaaactgaggcccaaagggagtcaggtttgccctgtgccacgtagcaagactgggcttggtggaagggagctgggaatctacaggaagcctaatggccaatctccagtcccagacccaaacttcagctaccacctggctgcacgaccagaattcttcatgagactagtttgcagaagacacagatgaaccaaggggcatttgcatgtatgatcctacccttgcaaatcctgtatggatctgaacaggaaaagggtttagaaaagagaagtgatcatttacaaatggggaatattgaggagaacttgatgggaagttttgtataggacacaccctgactggaaggaataaggaaggaaaagatgcctaaaatagggacacttgggcaaaggcattttgccaccctctaagagaaattctcctttccccaatgggaaatattatgtcatacttcaaccccactaagtgccctccaacatcatgggagattcaagccactcgcacccccatttctttcttagaaaggcttcaaagaaataaagtgctctttagttaactgccctatcttgcccctttacttcagcctcactggacttcttcaatgaactctcatatataacccccttccaaaaaaaggaaaggggtggatgaaagaaaaaagcaggagagcggaacgccaaacctcttggaaattatgggtaaataaaataatatgcatgaaaagcagaaatcacaaagaaagtggccttgtctattccatacattttgtcccacagcttttcagcaagtgaaataaggacagaagtaaaattgttcttccctctcgtaactaaaattcaacaatcaacattaaatatacactgagtactttgcaacagtaagtcatggccaccccttgtaaaagagatgagttagctccatacctttttctgggggtcccccttggccctcactgaactcttgcctctagattatttactctcctccaccaatctccttcacccctcaaagcctacttgcac

SEQ ID NO: 58067 - DNA, 521 bp, Homo sapiens
ggatggccaagcctctggctgcactgtgccccgtgtgtccccagcatcctggtggggctcaatacacagagagctcataagtagcatttgaatacatgaatcaaagtatggaatggcccagtttactgcagcctttttgcaggtgcaaaagatgatcttttagaaagcagaaacagggggtctggtgcatgagatctttttctcaatgtgactgtgctgtgcagaccttcacgtggtgtcttgtgaaagactttgaccactgtgtggactttccttcagtgtatctttcagagtgcaagactgggaatggaaagaactacagagggacgatgtccaaaacaaaaaatggcatcacctgtcaaaaatggagttccacttctccccgcagacctaggtcagactttccctttcatctttgtgttcatctactgtaaagtgtccgtctgtgtctgtgagggattgggttccaggacccctgtgggctaaccaaaattccatgcttctcaagtcccctttatggt

SEQ ID NO: 58068 - DNA, 1384 bp, Homo sapiens
tttttttttttttttaggtagtagaagattcttttattttaaaaaaaattacacgtggttctacaataatttttccttttaaaaagcttcaagatatacagggagatgcactagtccaagaaatccagcttgtcctttaacaaattatacagtttaactttcttcacatattgccacaatagttaattcacagtataatcttatttgtatttggaaaagaagaaataaatatacaataattgaaataggttcaagaatcaagctcgatttgtttccaagacttggaagaacttcttttgtactgttccagttccagatccttctgaattctcatctcatcgacttcattttcagcatactgaggatctctcgcagggtccttgatatctttcagcgtgttaatactctttggtggaaagagcttttcatacacttttttccacaactccataggtgagtgggcatgaagctttccaatgtcattttcaggaacagggaggagatcctatttgaccgaaagaatccaatcctgctgtgataaacagcggtttattctgatccacacatattgatttgcttttgtcaatgccaaatgccaactggttgataactccacgtatttttagtaatagagcttctgatttactggtaaacattaatgatgctccataataatgtgcaacaaatcgaagtgtcttgcatattacctttctcttctcagactcaaaatcctgaaaaacatcatatttacttccaattatgaccagaggtaccggaaatgggtcaattaattcatgatcctgaggatgatccttcggcatattattccagatcttctgtctcatttcagaaactgctttagcatttgtctttcccagtttcattatcactttgtctacatggctttttgtggcttgcaagagattttccatggtgggccagagatcattaggttttgaaaagatccagaacgagaacaagagaaaacgtccgtaagggtgtcacctgtgatgggtatgctgattaaggtcccaattaaaagaggttccttccaccggagttccccaaaagtgagcggatatccttttggtgtgttgtgcccttttgctccttcttccatatgtatattccaaagctaaggttggttttggtggttcatctctgtcaagacaccttagaataatagtagtctttcccccatttttactgccaatgaagaaaacagatttttctgcaatttcagctccatcaccttcacttccattaattccccttttttccacttcagcttttgcaatttcccagagagtttcactgggcatcgtcgacggcctggctgccgcaaacgtcacaggctcggagtagtgaccagcctagaatcagg

SEQ ID NO: 58069 - DNA, 1427 bp, Homo sapiens
taggctttctattttctttcattttaaaagcgtaatgacagtggaacaataatgggatatgcagaagcacccttcacaagttatttctgaatgatttttagggtaaataatacagatgccttgtttgttaactaacttgtggaaagcaggaatcagtgtctctaaggctgcatcctattaccacaatggggtgtgctataactgctggtattagagagggaactttggccctttcacgtttttcttaatgtttgtaacactacttcagaggtttataacctcaaagcagaagaagagcctcaacaacccgggacttataagttatttttatgttactagacttgcataaagattcttgttttccaactcttcattttgttgcaatgtgttattacaggatatatgaaccaattaaggtttttcactacagttcttgaataaaatttaaaaatcattttttattttaattaaaaatatttcccatttatagaatgcatatatttgcaatggacttccactttcatcaactttccatctcatcgctttaaacaggaacttgaacaagcactgttagtttagacctaaaggataggaaagcattaaataatactttggatctcctgaggaaaagataagtttgcttgcaatttacacattccatggggaaagaagagccatatttccttaaaaaaaacattaataaagcttgttattgagaaaaattgtagtgaaaagccttaagtaccaaattttaaagcagcagtaacttaatttttatatcagtgtttttgttttgcacaaactaaatgcagtggtaggtgggtttatgagtatattaattgcctttatccatttgtgaagttaagttgatgagggcaaggtttttgtttgtttaatttgtatatgtctaaaggtatttggaactttttacaggaattaaacatatatgcaaatttgtatataaaaatagcatggccatcatttgaatgcttgtaaatgaaaggattatcttttttgagatctatatataaatagaaatagaaaatccagctggactgattaggattcttttttaattcatttgtgtataacatttttattacaattacacatcagttttgacacagtcatagcaacattaatattttcccatgatgcagatcctttttgtaatgggcttgttctttgagatctctgtaaagaaccctgtgaactagaaaacataactcacagagatacttttttaaaaaatttatttactggaactgaaagttccagttggggatgaagcatttcatctcacttcataacacctctttgactgcacttcagtgaattgttcttatgtgcactgtgtagcaacttacattataacaaagcagataagggcggtagctgctgcttatgttgaaaagtgggttcctcag

SEQ ID NO: 58070 - DNA, 2289 bp, Homo sapiens
agagatggcattttttagttgattatttttaaccaagtgccattaacattcatcccccacatcccttttctaaacaagcttagtgttacttggggaatgtgttgggatggacgatcacatgtaaggcaggaagaataggtcaaaggttgaaggccaaaggtaagaccagagggtttgcgaatgtgggtttgtaggatactgagaaagtgaataaagaggagaaaaaaccatggtattacacatcttgctgagaaaggaaagcattcggatctgctgcaaaaacacatatatccataaaagactcatgttattcagaaaacagattgtgaacacaatcacattcgcatgaatcctttaaaaggaagaagaccttaaagtatctgcaaatctgaatttctatttattccttcactgaatatagaaacaatggttatctgattattagagatattattttggatatgttacttattaacttgctatggctggtaaccatgataaagtctgttattaataacaacataattctttttttaaagaagaaaagcttatttttcattgacagtgtatagatttatctacttagttgtgttttgctattagtgttttaattttttttttaagttgagtgtttgataaattttaagaccctgtccccaccttgttttgagtcctgtgttgactacaggtatatagctcaatttaaaaatcctaaagcaaaagaattttatttataaaagaatcaaacagttgcatgcatgaggctgtgaagtcagatatttagtaataaaagcagcagtgcctttttttgtatttacccattgacccccaccaaatgcaactgttttatattaagaaaatagtaacaattttaaaatctcagagtaaaatctatttcactacatgcttttccccccttgttctgatttaagcagtgtgtacttggcatctctacattgtcctagggacagtggtgttctacaatattatcatgtatgatgttttattggtgctttttattcatagtggcttcttaccagaaacagtaggaagaaacacatgaactgtgtacaagacatgaaacattgctgctgatatgttgttttttcacatggcttttgagttttcactttttaaacgagagccagcaaggcaaaatagatgtggctgggtctgcctgtccgggcggctctttgcaccgagctctcaaatcctgtgtattgagggttcctttttggtactcaggattggagctacagctgggccccccctctctcccattcgtttgaagagacactgagggaaacaagggtttcttttgaggtgtccttggctgccttttacgggatggggagccttctccggatcttttgttcttctgcacctcttgtaggctacttgccggtgcaaggttgtagatgttattccccagggagcctgggctggggggctgagctgggctgaatgcaaaagcatgcaaccagaaggcgggcaaggggaggaaaagcaggcctggcctcattggtcccctggagatgtctgtagcagtcagctccagcttgggcctggggaagcagcctgaccaaggcgctcaggtgtgcctgttacaagaagaacctgcagaaggataatttgcacatggagctgtgataacactaatgttgattttttttttttttacaagtcatcagagatgtttgcaaagtgagttttatttttttgtaattcctttatctttacttaaaggtgaatgtgtattcctctgggaggaataggaagaaaacaggaatgttaataatgtcgaacagaaaacttcctcccttattaatatataatcctcatgtatttatgcctaatgtaagctgacttttaaaaagctttcttttgttgcatgccctgtgcaggcatctgtattgtacatgcatgcctttcgtcctgttttcctgtataaagttagtgaacaaagaaatatttttgcctagttcatgttgccaagcaatgcatattttttaaatttgtcatatatggaaagagcatgtttgttacatgtaaaagctttactgatatacagatatactaatgtttgaagatgctgttctttgcaagtgtacagttttcaaatgttgttaccagtgaaacacccttgtggtttaaacttgctacaatgtatttattattcatttcctcccatgtaactaagaatcatggctatatttcatatcaacgttatattgaaagtgaagggaaatgattaatacaaggttttgtaacaaaaaaaaaaaaaaaaaa

SEQ ID NO: 58071 - DNA, 1189 bp, Homo sapiens
gcggccgcggcgtctcctcccgggcgctgaggggcccgaggagaccgtgaggctctggcctgcagctcgcgccgccatggacgctgccgaggtcgaattcctcgccgagaaggagctggttaccattatccccaacttcagtctggacaagatctacctcatcgggggggacctggggccttttaaccctggtttacccgtggaagtgcccctgtggctgggcgattaacctgaaacaaagacagaaatgtcgcctgctccctccagagtggatggatgtagaaaagttggagaagatgagggatcatgaacgaaaggaagaaacttttaccccaatgcccagcccttactacatgggaactttacggaagctcctgtttaaatcatgctttcagacaacatcccgaagggcaggacgaaatccggaccctggtcaaggatattgtgggacattcttttagccaaactccgagtgtctgctgacagctttgtgagacagcaggaggcacatgccaagctggataacttgaccttgatggagatcaacaccagcgggactttcctcacacaagcgctcaaccacatgtacaaactccgcacgaacctccagcctctggagagtactcagtctcaggacttctagagaaaggcctggtgcaggcggcttgctgggggatgtgagcgctcaggacgtgatgaggtactcgtggttctggagctctagaaacacttctgatgcatgaaaaatgtgtgatggtgcaaggaatggattcaggatgttgttggagaaacaagtttgtgattagtccttaaaacttagctccctgggacattcttcaattccacatctgtttctagaaaccagccctttttccccccacttttgagaaataaaaaagccttaggtaaataagtcattctccctagcagagccacttgggtctcctgcatggaagccatcacacttgggcaggtgttcagtgactggtaggtgtagatacagcaggagtggccatgtggtccacggctttttaccccttcttgatcctgatttcttgggctgaatttagactctctcacagaggtggctcacagagaaggatggcagatggtgcagccaacaatgctgaccggtgcttatcctctaagccctgatccacaataaaaatggacccaactcaaaaaaaaa

SEQ ID NO: 58072 - DNA, 1932 bp, Homo sapiens
ttttttttttttttttttagagtaaaaaaggagtttatatatttataaatgccaaataaataccagaggccacccaacgccccctcccagacagggctgtctcccccagccctaggcttctagggtgtgagacatcttggccccaagctatagcccaagagcagctgtcagtctgtgctaccagggaactgagtgaggatgatctgtccagccaagtttcactccccctgtgtgaggggcccccatagccacaggcctgggtccctgtataggaccctaagggtgaaagactcagggggagaaggtggccatctcgagtgagacccgctgccacagctccttggtctgtttgctgcgcttgaggttctgtaggatgtcgttgaactgcatcatgcccatgggcgtcaggcagaaggcgctgcgggcactccggatcgcattcacaaagtcgtcgtagtccgcaggagtcaggtgaatcaagcggtggtggatgtactgcatgtatgcctgctggccagcagctgcaccagttggtggaaggccggggcacgcaggtggttgtgggcatgagcgggactcagccgctgcagcgtctccatgacgatctcctgcagcacaaacgggctcagcacccccttggctgcccccacacagaactggtgcacgtagttcactcccagctttgctgccagccccagcaaccatttgacatcatcagtgtaggggggggagcgggagaagttgttggggtgatcgttgtgtgcccggcgacccagcatctccagtgcccagcattccgacacggtaggcagcatgcaggtggtgcaggctgtggggattgactggctgactgtgtgtctcctcctcgggcggtggaaaacctccgctcaccagagggctgggctgtgtggtcagggcaggcagtgaggcaccttggatggctggaaacgtggatgctggatggacactgctcaaggccacactggtgggcagtggaagccctggctctgtgtggtagggatgtactgtgatgggtgccatggaaggaacggggaaagacacagcagtggcagcaagtgagggaggagtcactgaataagggtactgagcccctaggaatgcaggatgcacaccctgtgggtatgcagagctgggccacagggaagacggcaggccggggcatgtgaggcatggggtgggcagggtgagctgggtgagtgagatactgagggctacagggcaggtggggctgtagagcagtgtaggggtgcaggccaggggagtggccatgccccagtcctggacccgggtataaactagaccccaccgatatgacgggcaccactgtggctgctgctgtcaactgctgccgctgccactgtaaccggctcagtccctgggccccctctaccctcaggcataccgcgcccagcttccccacctgccctgatcccactggcactacagcttgtaagccccttcacgggctgtggatgagccacctgcagtttgctcatacagccagaaccactggtgagcaacctcaaacaacacttcagggtacacgcccccacccttagctgcctcttccactgccatgcaggccttctccaacatcaggttgtcctgttccttgcactgcaccagggcccgctggatctcattagggttcaatgcatgggcgtgaggcaggcagctcagggccagctctgctgccgccctcaccatattggagtctcttgcccgtgatgccctgtcagccagggatgcaacctcagggggtgtcaggtgcccatcccagcattctaccagtatagtcagggctgcgctgcctatctccatggcctggcctgtaatccaggaaacgtgggaagaataagtacgtgagagccagttgggagaaacaaagttgtgcaggccaagggcataaag

SEQ ID NO: 58073 - DNA, 1132 bp, Homo sapiens
gggaaggtggcgagcctgaggcgaacaatggcggagctgggcgaagccgatgaagcggagttgcagcgcctggtggccgccgagcagcagaaggcgcagtttactgcacaggccacgtgcccgtagaaaagatactcatccactgtgggttttggtttcgccgtcaccccactgcctcactggattgtgaggatcatatgcgacaatgtatttgaaaacgactagaacattatcggaggaaggtggactctgaagtagtcgctgtagactatgggatgtaggaacaagggtttggagcccttcggacatggttctaacgcggcctgacttcttgctggctacatgaccttggactacataatcacgcctctttaaatgggaggtgatgacagctatccttgaggaccttagagagaactgatttcttagtacccagcctcacaaatagtgcatcacttcatggagttatgttgggataaatgtgtggagaagccagggaatcgcctagactctcgcactgaaaattgtctctccagctgtgtagaccgcttcattgacaccactcttgccatcaccagtcggtttgcccagattgtacagaaaggagggcagtaggccatcccccaggagaatgacagaagcaaaggacttgttactaagcagatttaagggtcagtgggggaaggctatcaacccattgtcagatcagcatcaggctgttatcaagtctgttggtgctaaaaagtaaaagatgaaatgttcaaagagtgaaatttatttatttggaattcagaaattccaggttgtatgacatcagttactcaataagtgtgaattctccaactcttcttttaatcccattttagaatttaatatagagatctctgattggcaggaacactagaaataaatgttccatggccagtagtgcaaatgggggattgtaggttttgaaaaaccaccctaagccatattaagggggttggaagaaccatcgaagcctaaggcatagaagaaaatttggggttaagaaagatgaagaacaaaaaacagctttattgcttatacatgaccaagaaaaggaaaacatgggcaaaaaaaaaaaaaaagggcaagttgtgtttttccttgc

SEQ ID NO: 58074 - DNA, 677 bp, Homo sapiens; identical to SEQ ID NO: 15147

SEQ ID NO: 58075 - DNA, 1261 bp, Homo sapiens
  misc_feature (1)...(1261): n = a,t,c or g
aaaactctttttttttttttttacagaattccccaaactttaatgctgtgctctgaaaacgggaggctggaggttgtggtgggtcacagtgttgctgacacctctggcctccagccctgcatccctaggcaccatgtgaccaggcagtgagaaggacggggcctcactcccatgccagactgctcctcgggctgagcaggacctgaagctctcagggcttccaccaaagcccagcaaacttgggggaggcctgagggggcatcagcagtccttaaaggcctgagcttgcaacactcaggcaggactcggctgagggcctctgtggtgccaccatggggtaggaggtaaagagagaccctggttccagcctgggaaccagtgggtgccctgaagggaggggaggcctcagggagttcgggacaggagtgtgcatggtactgggcggcccatgggggctcctggcctcttggttcaggcaatccctgagctggggacacattccatcttaggtccaagagacggaggtcaggagcatccctagaacgacctcccaggcacgaggaaggcccggggcagggccgggcgcagcgtggctggcttcagtaccctcgggcatcttgactcctgcctctgggactgcaaagggatctgcgggcgcctctgctgagtcaatcgtctggtaggcactacggtcctgagaagacccaaggaaaccagtgtggaccaggagctcacccccgcgctcccggtacatgtggtagacgaagcagcaggagagcggcttgagcagcaagcttgaggattgccatgccccacgccaaaagcggcccttgttccgtgaggcttgacccgcgggtagaagatgctgatgtgcacgatgtccaggaagatggtggccagcaagccacccagaaacatgcttatggcgtcgatggagtcccgctgagccacagcccacacgcccaaggccaggatggtgaagttggcccaggcataggagcctgagaatacaatgcagcccagctgttgccccttncgctgcacttcgaagtttgcaaagtgcacaggtgagctcaatggtttccagtcttggtttggcagagaaatgtctccagaagcaggttgtcagcagccagtgacctaggagaatcaccttcaggttcacagcaggcagctccatcccgactcagncgagggcaacctgcgncagccgcggggggctcctaggctccgaactcgnnaacaaacttgcccgccccgc

SEQ ID NO: 58076 - DNA, 5237 bp, Homo sapiens
  misc_feature (1)...(5237): n = a,t,c or g
tcttttttttttttttttttttctgaaatactgaagtatttattggtcttagggtattctcgggaaggtgacagtgaggggttcttcaaaggagaacagaggataaaaggctcaatgaaaggataatctccatattagtgctaccaaagtgtcattaatttctatttgttggaaactttactaaggaatgactgctttgaggtaatggataaggacagagcttgaagggtcagcaattcagtcagccactggagtagttttcacatgaagtgagaagaaaagctgagatggagtttgtagggcagctggagttcagatctctcctaagtcctcttctgttcagatattttgtcacctgcagcaacacacacagttattgtcattcctgggttcagtactgtaagcccggacccatcttccccactccctttgcacccgagcttcccatttctctgccctgttcaggtcccagggagaaggtggtcatccctgcacatgccctggtcctcccaggtgaagagcacataggagccaaggagttcacgaaagtcattgaatttcaccctcaaaccccagctgactgtgaggccatcccacatgcttcatgtctccaaaatatacagacaaggggaagggccacattactgagggcagagaagaagcttaaccctggaatgagaattggaagggacaaatatccaaaccatatcaatgacggcaatgaacgaaggatacttgctcacattgtgtatactgctctttgaaaggatttcaaaaaccaaggtaaattttctaaaatgacctctgttgaacatctgacagcagtacttcctccttcctgaattctttaattccttggctcatgtgacagcatattctcctaattcttctgcttctctgcttctccatttttgttaaatactcctctttggatgttttgttaatcatgtatctttgcattaattttgccttttcaagatatttcattaaaatatgatttattactgagttcttttggtatcccccaaattttgcacctaagccaggtgcatcccctacatcaccctagtcccagccctcttttccattcttcctcttaacatctgacattctacattcacttcactctgttacaaatcattatagatataattataaatgtgtgtgaactaagaaaaataaacaagaatttgtcctactggatactaacacacactacaatgtcatagtaatcaaaatactaggacactggcacaagaagagacaaacagaacagtggaacaagatggaactcagacacaggcccacctataatgggagctttcagtatagcaaaggagacactactaacctatggggaaaaggtgaactatttagtagttgtgggaacacactggcccattatataaagaaaaataaaacatgatccccatcaaacacaaagatgaatcccagatgaattaaagtagtaaatgtgaaatttaaaactgtaggagatgttttaagagtatctttgatatctcagtatagggaagacttcttttaaaaaagacacacaaacaaaaatacagttgatggacttcattacaaaatattaaggatttctcttcaataaaggaaaccaaggagacagttgccagaagtcagattagaggaaaacatttgcaatgcctaaaactgacaagggactactagcaggactatataaggatcacctgcaaatcaataagaaaatgatggaagcacatagtacaaaaatggacaatgaatgtgaacaggcaatttatagaaaaggaacccccaagtggctaatcagtcctaattatagccccaattattagtaattaaagaaatgcaaaataaaacagcatatttctttatgcacatgaaattggcaaaagttagaaaactggataatgtccagtgttgaagtccatttaggagttgcaggacaattagagtactgacaaaggaagttcagatgagtacagccattctgatgagaagatgagcagtgtttagtcaaattaaggagctgcatctccagcaaccctgcaacccctttctaggatacatacattccagggatgcaggtcaggcccacatgtatatgcagttccatgtgagatacaagcattgcttgcaatagtagagaaccaggaatgatgctggtatcccaggagcaatgtagatatgtggattaatatgatttggatatttgtcactttttttcagtcatggcggaaggtaaagaggtagcagccaagtcatatggggatagcaggagcaagagagagaggagaccctcatgaatggctttggtgccctccccatggtaatgagtgagaactcactctattagtgcacatgaaacctggttgttaaaaagaggctggcacctctttctatgtctctttctccctctatgaccatgtgatgcactggctccacttgccttccaccatgagtaaaagcttcctgaagccctcaccagaagcagatattggcaccatgcttcccgtacagcctgcagaaccgtaagccaaaataaacctattttctttataaattacccagtctcaggaattcctttatagcaatgcaaaatggactaatgcatggacatataaagtaaaatactatggaagatttggaagaaacaaactggatgtacaaaattagatctataatttaatgccattttggttaattaaaaatacatgtacactggacactactacatattacagaggatctatgcaaataaaaggaaacatcaaattcattaaaatgtttacctatgaggtaggggtaagaggttagatatgggagtaaggactggagataaaagggaccaaataaatcaagggagagagagagagctcggaggcaccaatgatgatcatataatgaactgagaagttcttaaccttttgtacctgaggtccagcatgaataacaataataataatgaattagatgtggtcatctgcatggaagttcactgtctaatgctaagagaattcccaaaacatataaaaatataaagcatggtgagtgttatgataaatagaaacctgtaagatctctggaggggcattttttgtgtgaacattgccatggaatgagtccaagtagagacagtaagtagttacaggcacccaccacactgtgttgtaattatgtatagaaatatagatctgactccattatttggcaatggactctggagaatttgaacttggtcttttccttcacaaaatagggtgaataggacagtggataaacagtcttggatccagactttctggattggaagctagccctactacttcatagctgtgggaacttgatcaaagtgcttaaagtctctgtgtatgtaaaaagatgtaagtatctctcannnnnnnnnnnnnnnnnnnnnnnnnnnnnnnnnnnnnnnnnnnnnnnnnnnnnnnnnnnnnnnnnnnnnnnnntcctcagaatagcgcctgaccatattaactactcagttagttatcggtgttgttgttgttatgtggctgaatgcttttaacccattagaagatcaatgaacacttatcagattgaatttttcctcccttccttacattctacaaatcctagggcctcctctttacattcccacctttacagtatttcacagggtcccctgggcccgggggtcatggccagaacgcagagactttatgatgaggacggtgcccacgatgatgccgactaggcccagcaccaggcccagggcacagagcacagtctccgttgtctcaggcatctggattggctcttgggcctctgggggaagaatgaagagatagggtcaggaggtgcagtgagggtggtgatggcctgggatggttgtgggaattgaaggttatggaccagttaattggatgttaggacgaggagaggactgagacccagccagtgcggaaagctggtgcagaggacaccaggtctttggaatagaggatgccaggagattatggagagaaaagcagttgcataccccagagcttgaggagcggctggtccaagccccagtgctccaccctgcagtcatagaagtcctctgctgagggcacaaaggtcaggtaatggaacttgtggaagctgtaatctgttctgggcaggaagaggctctcagcgacaccctcagtgaccagctccccgttgcacagccacgtgacgttgagcactggtgggaagaacttgtcaatgtggcagatgagggtgttgggctggcccagcaccacaggctccttgggaaacacggtcacctcagggggatctggaaggagacagcaccaggttaggcccctcttctgggatgaatcacaaaggctccacctcttaggggagggtggtcctctacctcagccttagattttatggcagctctgaatcacagagaggggtatcacaccactgaccagcctcactctgctcacctttctctctcctgagaagagaggatgcaagcccttgctgtagtgggatcagcccatggccactaggggaagaggatcacacagcagggggcacttaggcttcctagtctgagggtggcagagaggccctctcatcccttccagttgggctacagaggaagaggcaaagatagggcgtaccgttggtggcctgagtgtggttggaaacgcctggatcaaggtattcaagttgttgttcaatatagcaatgttagccagcccgccctgagcctcaaaggaaaaggcttggccaaactcctccagatgcccagacggtctccttcttgtccagatccacatagaacatctcatcttcatcaaattcaaacataaactcccctgttggtctatgcgtctgtacaaacgcggcataagttgacacatggtccgccttgatggccccagctcctcggagactcagcaggaaagccaaggagagggctctcaagatcacagctctgatatggaacattctgtcttcagggcgcatgttgtggggtctataattgatgactgtgagcacaggaacagtgatgaggaactgaggccgagtggaggcagatgagactgaaactgtgggcctctagcactggaaatgggtggagaggaatcagcatggctgggattcaccttttccagggacggcaggaaatntacgcgtttaatgggacacagcgcttcctggagagatacatctacaaccgggaggagttcgtgcgcttcgac

SEQ ID NO: 58077 - DNA, 5465 bp, Homo sapiens
  misc_feature (1)...(5465): n = a,t,c or g
tgatttctctcatttctaatgctagggcagacagacagcactgactacgactgtggagttcagtcttcattattctaaatgacccagcaatctattgcctagataccatatccactctctgtcacagatccatgaagaagcacttctaccagaaagttacattgaaatttgtagataacttgttattttgacattttttatcataattaatgtgggggcccaaacttctgagggtaacagtaattcagccaagccactgagtagatgatatacaaaaagagacaaatgaaaatggactgcgtgaaacatcagatccaagcagcagaaacacaaggacaaggaaggagtaaaggtgttacacacaaagaggncaagcaggggttactcagaaatcgggtcttcctgccancagtttttaatgtcaccgttcagatgcacagttaaacttcgcacagcctgtgagaggggaaaaacagggtagaacagagagaggagaagagacagaacacaactacaagatgttagaaacttgaggctggagtggtgaaatgcactaagatggcacacagaagaacaagcttctggggggaaggtcagatatgtaagagatgaaatattaggtcttaattctacccatctgcaaaatgcggaagcttttcttagttcgaataatgctagctagtttgccctccttaccaatcaagtgcattcttcctgtgaagagactgatctctaatttctgtgaaactgtggcaaaggcacataagccagtacctatatttttttcattcttctcacccagatgcccaagtcttttcaattcttgttctaatatgactaaaagctctttcctctgtgggaattttttcagcaatcactaataaacagagctatatttggaaagtagattatggataaaaaactgaattgtaaggttattcattttagtatgccactcccatacttaaaagtaacaaaattctacaatggctaagaaaatgtattagcttcagaaactgctaaaacaccttagaatttcatccaggaaatctcagcctaatattaaagcctaagttccaaatcccaaatgagcaagtcatataggccacacagatgtaacttttcactgtaattccttgaaaaaaagtaatttcacctaatgggagcagtgagcccaccgattctcattatcactccacttcccttttcacccagattcttcagtgtacaacacacaggctgtgttctggtcagctagtctcccaacccgccttaacaggcttttgtcccaggtatggcaacatctccattttattgtttttggacgatgatggttgctttattaccttgacctggagcagaaaggcttggtactgaaatggcaccatcactggtgaaggctgaatagaggttgtcactggagggagatggcttaaggggctgtaacagctgattctgcccggactctgggatgttgccaggagggtggagggtctgctgggggtgcaagactgaagctgcactctgaccagacaggttacctgaaagctgggggcttttattccccaaggaactgcttcgactagatttgctgcctttgcttttagtgggtcgtcgtcttctccctgaaaggggagcagctgggggaataataacagcagggggcaccttgcccagtttggtatacaaagattcaatttcatgcttctggcgactctgcaggtcctgaatctctttgagatgtttatctcgtagtcgtcgcagctctaactttaagtcttcatcttcgatatctgactcattgtcgctactcatgtaagaggagttaaatgaattactaaggctttgacttagattctggctaggaaggctctttgagctcagctgatggggcgagtgtggactaccggaaccatcatccacatccctacttaaaaaagcggcctccgggtcagaagacggcccatttagatgtgaaggctctgacagttcaggcttctctttctttggtatcacagcaggaagaacagcttgttccaaatccataaaaggaggagatgccactggtccttctttctttgtgtcagtgatcttgtcctcagtttttgatacagagaaacgacccactttgtttgctgtagttgtcacctgaaaacgtccaaccttggtaggctgcccagtgtctgactttgcctctgaggcagtagttttgtgggcactctctggcacatctgaagagataccagggatggttatgccattcggctctggtttcaccaaggtactctctggactactacttgatagcactgaggactctgaggtgctggattcaaaatgaacagactttgcatcttctgacttatttttaccctctttctgggcaccgtctgctgcaacagaaacctgaaatcgtcccatcttaaaaacaccagctcctgaactagttgctaggacagggccttctttgacttgagaaacacccttctgaggctgtgttcctgcttctgtgattgctgttggagccgccatggacacaggaccaaccgcagaagtcactgtgatcatctctggactaagtgttcttctcaattgagcatcaagatcctctagaggttgctgggactgggttagagaaggtcctggaaaaggtggcagctgctcgctgggtagagtacctgctggaagttcagtacccactggcagcaccggagccttagttagaggtggcttggagggagcagttccaggtttcactcctgatgtagtagtgctgactggggtagaaacttgcccaggtgtgaccactggtgtaactggcaaagcaactgttcctagtggtaaattggttggtggtaagcaagtacttgtggtagaagtcaggagtttgcttggtgcaacagcagtagttgggatgcctggtgtgacagtgctctctatgactagtgaggtctccagtgagacagaggcatgctgagctccagatgagctgtgttcactgaacagagaccgcagcttttcttctagagtctttatgtcatcaattccaggagctttgggttgtgtatcagaatctacttcaggacaatgagtatggggctggttgggaagcaaagctggttgaggctgactatgaattagtgtctgctgtacagcaggcacattggcaacaggctgtaccaagggtgggatactaggtacttggggtaataaaggtgtagaagtaggtcctgctgcttggggaagaataggagtagaagctatcactgatggaatgaccaaaggatgcagcccaccaggctgagaaatataactagacactcctgctccaggagaggaagaggaagatggtgcagagagggagaaagccaatccagttgtactgctatgagatgtcttatctagtgagtgtgcgctaactaccacggtttcagctaaagtaggagtagaagtactgctgctaagctgaatggacagctgtgaagctgtgcttgggaatgaagtggtggtagaaactgatgttaatgtggctcccacagtagtgctgcctgctgcctgctgagatactacagctggaggcttaggacctggggtagcagtactgccccctgcagaggctgaagttgctgaaactgttactgaaggatacagtgctgtactagaaacaacgatctcagatgtggatgtggggacttgaagtgacggggatgtagtagatattgagacaactgcaggtattgtgatacttgaaactacgctggaaagtactggtgattcagacacaggtggtatggggagaccacctgaagttaccacacctgtgctggtggcaactccagcaatcccctcttcagtgggcactgtaacctcagactgaattactgatgtggaaatgtcattaggagggctgcttgttgcagggactggtgctgtggctgctgctgtggttgggactccagcaatgctacttaagaaaggaggtactactggaaatgttggtcctgtatgactaaagtttggaggtgctgtgttgggtccttctgtcatttgggcacgtctaagttcagaaaaggcctgttgtagactaagggatgatgcagagtgagacaagttcattccagggctctgagctgtagaggcagcaactgtatctgttatttcactggggaaaacttttgattctcgtaatcggctttctggcacaggactcactataaaccgccttcccgcagaatgaacaacttgagttaaagaactggtaggaatgcctatttgctgtggcatggaagacgcaggaattggttgtttgaactctccttccaatttctgagaacctgaaaagccatagtcatcctttccttgtagactctccaatccctgatcaccctctggttccacactgacatcctcactgagcatttcatcagctttttcaataatttctcgcacttgatccacaaacgactctctctctattgctagaataaagtcattgttcaccataattgttgctatctcctcggggttgtcaccatctaggtcaaatttgaatgtaaccattttcctattatgagtctctaattgacattctactactcggtctcctttatttgaaacattcaaaattcttaattttgggcgtgaagttttttcatgtcgagagcgactccttacagattttcggtaatgccgttttgtagttcttccttcatgccttccactggaagatgggacgttctcattgccatcactcatacctgaagcaacatctgaatgtgcactgtctacagaggaagccaaagtggtcggctgggtagcttggggctgtgctactgcaactggctctgcaggagcaacctgagagactccctgagtactctgttttccagctgatacttgaggcaagacttgtggagcttgaggctgactcactggctgtgcagttagtggcctcactggaggttgatgtctgtgaaagtgaatactgcactgtctgttgaggaggggctgtctgctgtattccctgctgcacacttgagggtggatataccccatggggctgagactgtgcttggacagtagaaggtatatgccctgggactgtgcctgtagaatgtgcctgttcatgttgggaacccatatgaaactgtctgttggctgctcacttgtagattctgtggaagacagaggatccctgaccactgtcaaccgtcccatcagataacacagatatactgggttgctggtactgtagttgttgatgttgatctgcctcaggttcttcaggttctacttgtgtagaaactgaagctgaagtggtagaagcagtaggtatgccggtgctagcagaagggagctgcttgattcctgtctgggaagcactggattgttctacctgctgtttgagactgctctcttcctgcttttttttttcttgctcctcccgtaccgaactgccgctgctc

SEQ ID NO: 58078 - DNA, 1364 bp, Homo sapiens
gacggacgcttcggcccgtaacgatgatcggagacatcctgctgttcgggacgttgctgatgaatgccggggcggtgctgaactttaagctgaaaaagaaggacacgcagggctttggggaggagtccagggagcccagcacaggtgacaacatccgggaattcttgctgagcctcagatactttcgaatcttcatcgccctgtggaacatcttcatgatgttctgcatgattgtgctgttcggctcttgaatcccagcgatgaaaccaggaactcactttcccgggatgccgagtctccattcctccattcctgatgacttcaagaatgtttttgaccagaaaaccgacaaccttcccagaaagtccaagctcgtggtgggtggaaaagtgttcgccgaggtgtgcatggtttcccagccacgtccctgttttcaaagatagtttcactttggtctctgaattgaaatgctgtctactgaaagggtttcaggagcgtttatgtaaggggctgtgatgaaattgcattccccatagataaaagaaaaatcatttctatccagagatctgagcagaaggattggcttgttagtttaacacagccgtatttttggacattcagtgttacttgctgagtctgacagcctctgggccccggccaggggccctgttaacaaactgctttcacatcccaacagggtctgcttggccactcagtgcagctgcgattaaccctaaaggctttaaggaacgggccacctgtaacagagacaccagccttcctgtatagacactaaattgttagcaagagtgttgagctagttcctggtgaagtgtttccacagaagacatgtggagcagttgtggggatattaagggaaactttcctctgccttgacccctttgttaaataaaatgactttgggagccattcattgtacagttgcaggaatgagagtgattttatgatgtggtacattgggaccatgttctaaaaccttgggtttctgagtctgctttttgagtaggtgattttgaggttgaaaaaccaggggccttcatctaggaaatacagcattttccagaagcttctttgaaagggaatcctggttttgttgccaaaatgaaacgcccggggttggcgctgaatcccacaactgtgtgatttgcttgttgagttttttgttgtctggtttttttgtttgtttgtttataccaataagaatgagcctgaatgttggtggtttttgaaatcctgacttggaggtaaacctggaggaaggaaaaaaagtaaatatgcaggcttttaggactgagtagccttgaaaataaacctcatttctaaaaaggaaaaaaaaaaaaaaa

SEQ ID NO: 58079 - DNA, 673 bp, Homo sapiens
cggacgcgtgggtggggaggtaggtgacttttccttgcaaatctccctgcctcatctccagaaaattgcatacctgcatggcctctctgcattatttatgcaggaagagacacgaaacagcaatggccacatggtatgggggcctgctggcaccagaagtgaatgaaatcagaaccgtcccactgagtcttccaaaaggcacataatttttttttttctgtcacctgcctttggtgacagggtcaaaggcacagattgaagagaaaatcttgatttgggagaagcatttatatccagatgcctacccttacactccctagcttactttctacataatttagttttaagagcaggaaatgcataacatggtttttagtcttaacaagcacttaaattcattagacgcatagaaaagaaccatttattattttattatttttatttttattttgagaggaagtctctgtcacccaggctggagtgcagtggcgcaatctcagttcactgcaacctccgcctcccaggttcaagtgattcccctgcctcagcctcccaagtagctgggactacaggcacccgccaccacgcccggctaatttttgtattttagtagagatggggttttaccatgttgggcaatatgggctcgatctcctgacctcgtgatctaccc

SEQ ID NO: 58080 - DNA, 6540 bp, Homo sapiens
  misc_feature (1)...(6540): n = a,t,c or g
acagtgctgttggccaagcctccagcagctgacgggacccagctgtagtgaggttgcagtgattgagtaggattggcctgcttcaaagcagaggtttctcatgggaatatgcttattaaactcccactggtgcagaaaccatgaacagaggatgaacaagtgaagttgcaatctcctccatcacagctcagttccccaacaacaggatcacaagctggagatgcctttaaggaagatgaagatccctttcctcctactgttctttctgtgggaagccgagagccacgaagcatcaaggccgaacatcatcctggtgatggctgacgacctcggcattggagatcctgggtgctatgggaacaaaactatcaggactcccaatatcgaccggttggccagtgggggagtgaaactcactcagcacctggcagcatcaccgctgtgcacaccaagcagggcagccttcatgactggccggtaccctgtccgatcaggaatggcatcttggtcccgcactggagttttcctcttcacagcctcttcgggaggacttcccaccgatgagattacctttgctaagcttctgaaggatcaaggttattcaacagcactgatagggaaatggcaccttgggatgagctgtcacagcaagactgacttctgtcaccaccctttacatcacggcttcaattatttctatgggatctctttgaccaatctgagagactgcaagcccggagagggcagtgtcttcaccacgggcttcaagaggctggtcttcctccccctgcagatcgtcggggtcaccctccttacccttgctgcactcaattgtctggggctactccacgtgcctctaggcgtttttttcagccttctcttcctagcagccctaatcctgacccttttcttgggcttccttcattacttccggcccctgaactgcttcatgatgaggaactacgagatcattcagcagcccatgtcctatgacaatctcacccagaggctaacggtggaggcggcccagttcatacagcggaacactgagactccgttcctgcttgtcttgtcctacctccacgtgcacacagccctgttctccagcaaagactttgctggcaaaagtcaacacggagtctacggggatgctgttgaggaaatggactggagtgtggggcagatcttgaaccttctggatgagctgagattggctaatgataccctcatctacttcacatcggaccagggagcacatgtagaagaagtgtcttccaaaggagaaattcatggcggaagtaatgggatctataaaggaggaaaagcaaacaactgggaaggaggtatccgggttccaggcatccttcgttggcccagggtgatacaggctggccagaagattgatgagcccactagcaacatggacatatttcctacagtagccaagctggctggagctcccttgcctgaggacaggatcattgatggacgtgatctgatgcccctgcttgaaggaaaaagccaacgctccgatcatgagtttctcttccattactgcaacgcctacttaaatgctgtgcgctggcaccctcagaacagcacatccatctggaaggcctttttcttcacccccaacttcaaccccgtgggttccaacggatgctttgccacacacgtgtgcttctgtttcgggagttatgtcacccatcacgacccacctttactctttgatatttccaaagatcccagagagagaaacccactaactccagcatccgagccccggttttatgaaatcctcaaagtcatgcaggaagctgcggacagacacacccagaccctgccagaggtgcccgatcagttttcatggaacaactttctttggaagccctggcttcagctgtgctgttccttccaccggcctgtcttgccagtgtgatagagaaaaacaggataagagactgagccgctagcagcgcctggggaccagacagacgcatgtgggcaaagctcaccatcttcactacaaacacgcctgagagtggcactggggaaacataactccatctacaccttggatttggactgattctccattttatcacctgaaggcttgggccagagctcaacagctactcaactggaggggtgagggggataaggtctgtagtatacagacaggaagatggtaggtttatgccttctgtggccagagtcttggactcatggaaatagaatgaatagaggggcattcacaaggcacaccagtgcaagcagatgacaaaaaggtgcagaaggcaatcttaaaacagaaaggtgcaggaggtaccttaactcacccctcagcaaatacctatgtcaacagtataagttaccatttactctataatctgcagtgatgcaataaccagcataataaaaaggcaatcacataaaaaagagtttagtcgtctaaacataagtaactttaaggtgaatgaaagatcttctttaggaataatagatgatggtaagttccactntggttattggaaggcaagtcattattattggtattagttaaaacacatatcaaatgcttgctcttcatcatatatatagttatgcatacatacacacacacacatacagtatattctttcctcaaaagggttaagatgtctaaaatagggacctagaagcttaacactatttaagtaaatacagtagaagctcacaaatagatttctttgcacaatgattttttgcaaaattttacagtaataataatcccaaggcaaatctctcctgaactgctttccattccataatttgtagtataattcttggattccactgttttctttggggaatggaagttctgaattaaaagcccactgtggagatgctgtggttcatggaatctcttccagtgtaattcagaatcattggcctagaaagtctctgatatttggaggggaacaaaaatcactcacaagcaatccatgatctatacacataagcataatttcctttagttctagttagtcatcagagaacagtcatgtatgcaagttttgtgactgagaaatttctgtgcttccaatccacaatgagatgcatgattttgttttcatcccatttcccccaagcccctgtaaatcagggaaaatgcgcaactgatcgcctaggagagggcctcgtagtggcacagctgggagatagtttcaaagtctaaaccaccagcccatcctgaggaaagccctcctatgggaatgtaaagtgcaatcatttcttcagatataagactttccccaacaatgtgattgggattcctttatggcaaaatcgagagaagctgccatccacctgcttatgcatttatctcttttgtggacttgtctgaccaccttctatttgcccagagtttgctcaattccaagacagtgcccatgaatgggacacctgtaatgtaacccacacagcggtttgcagagaatgttagccatgacttgggctttctgaaagttggctataatttctctatccctacccacaaccctgggaagttggagcaagaggggcatactattgggctgggaggatttgacagcatttccccagttgccctttaagttcttctatttcaaacgttaattttgcttctctttctaaaaaaaaaaaaaaaaaagaaagagaagaaagaagtgattcctacccctacctccagagttgttgaaagctgaaaagcatacaagattcttccttttaacttggatttctcgttccagaaattgtgggataatctgtattcttgctttagaaaacaattcttagagagggtactagcttactgatgatgtgttaggattgctactgatgctgtcatgtggaaactatttaaaggcactattataaatttatcctataagatgacaatgtttactcaaagtctaacatattcaatgcaagtaagactttctgaaaacacttgatgatgtggaaatgctgcaggattaaataacttgaagagcctttatagattatatgaatgcctatttgtgtctagaaccagttatttaacctgtaaaatgtcaatagcaaatgaaggatgaagtatatctctagatgcaaatacattgagtttaaaagtgcctcaaaataattgagatcacatttcaggacatttggaaatcaggtcgatttgtggtaactgtagtcatcttaaatttcaaaccatttaccatctgaaagttttgatttgaatgtaaaacaggaaattggaattcctttgtccaggagaaacctcacaaaccttctttaaggcatagttttgttgtttgtttgcttgtttgttgcaggctgtaaggcatggctgcttgtttacaaaacatctcattcatattacctgtggagttgcatatccaaaccttagtgagttttgaagctttaagcaaattcttttaaaaaattcttgtatttctagcattactagatattaaaagttaagcaaatagattaatgacgtatacataggcatcatttcacaaggtcagtaatgctgcaggaaaagcaaaattgcaatctacgtatctatggtactaaggaagtcctgtttttcaaaaatggaagcccacttctcagatttttctgaagggcatacaatgaaaagtgaaggggaaacacacacacgcaaaaaaacaagtatttggcttgtcacaggaatctgattgcattaagtgaaaggattatttagaatatgttaatgcaaagctaaaataaaattttccttggcaattaaaaatgctgtgcgctaataccctgctttctatcgtgactcaattcaacaatgtggggaatgtttactacatttccaacttgatgtcaagcaatggggaatacaagttccagttctgcaaagattcgtcaactttcttagctcaagagagaggctgagaaatgcagagaagaataagacataaaatagctccgacctccatgatccgagagtgggaaaaggcccgattattacccataaggcacactctctaaggccttttaaggggcctacaaaaatgttttattttataatcagaagaaaaggaaatgaacattggggattgaaaatcatattggtatttgcaccaacatagtcataaaatagtatgttaatatgtttttactttatatatttatatattaaaatatatttaatatgttttgcctttgtggcccatgaaagtcttactgggccctggggaaggtatcctaccctggtgaagcagctgctttgctctacaaatacctggggcagaaatttgatttgaaaagtattattctctcttctctttgtttcaactggattcctttggaaaaccaaactagtatcagaacaaaccccgaaacagtaagaaattggagtgagaagggcatggtattgggactaggatcggctctcattcgatcgagctattctcttaaaatgacaaaaagtgtccataaagaggctgctggagagtgcgtggccatagggagccgacatgcccgggaggaaaggtgttgattacatggatacttctaaaagctaaagccttgttgccttctctttaatgcctagagaatgggatgtgtgatgcaaatgctcaaaacctcttaaatcatagctgtctgacctctacggacctcacatccatctgaggcttcatggacaaagattctccacttggccaaactttaggccaagctcctcaaccttctcccaggcccaatctgggcacttccttgtaaaatctagttttggcaagaagtctattaggtcagtttagcaagaacacctaacccccccatatctgttcaacctcagtatctgatcaggctcctcagcctccaccatcccccaggtgatgtcgggtcaactggcctaccttcagctgaactcctgttaggtcggtttagatgaatgctccctgaatatttcctcttggtaatcttccatccactgcccctgaccctgttccctgtctataaaatccccagttttcccatgggtgtaattcagagctgaggcccagtctctctccccctacctacaagtcccccattgctgtggtcccccgtacctgtcatgatggtccctaaataaagtccttactgtgctttaataggtagcattgaaaaatttttttctttgacatcattcatgacaacatgaaacctattgggacagcatgactgtgcagggtctttagagctcagctttctgaggccctgagcattcttggttttccgacatcgtgaacctgttctgtgttgcaagatatcactcaagccagtgttgcttaataccatctctttgtgtaatagatctgaataaagtaattgtaatacaccaatattttactttgttgagtattattttaatgggagcctttccaatgaaggaaacatcagctttccttgttagaatccaagcagcttaaaaactacccatgtctttctggaaaggaaacattgccatgtaactatgtatcagttttctaagaacttcatgggccttccata

SEQ ID NO: 58081 - DNA, 2692 bp, Homo sapiens
ttttttttttttaacaattttacattgacttttatttaataaaaccacctatttacaattcaaaaaagtcctactttgatacactttactaaataaaattaaaggttaactgtacaagcaattaaaacatgatatgtagcaagtgttatcaggagttttcagcaaactatttaaaatagtcaaaaactgagcagttaaaaagtaccttctgaagtgaatgccgtttctaaatgggatcccaatgcctggcgggagaggcagcctcactctactgtgcaggctggacaaaggtcccggccctgaagtcttagactgtgagagtcaacggcatgtgaagtggagtgtgcagacctctggaggagcagcacgtcaatgtctcattttccagtttacttaaaccacacacagaggcagcctctacacttgccaacagcctctgtgccgaggtgttaagggaccctggccggggactcagaacttagaactttctggcctctgaagaggacccaggaaactggcgagacctcatgtgacccctgaacaggtcatacaagccacttctgaactaagattgggaaggtgttccacactggcatgggatcctgttcagaagcggaatacatcgtagtgctatctggagagactgatgtgaaaactgcttcaccaggaacacgcagggctgggcgctgaagacacagaagatccccaggggcaatctgaacacactgcacgaggccctttgccgcgcccaccttctgtacgacttaaggaacatctttatgtacagtaagaaaatatatacatctttaaggaacggaacgcccgtatcatgaacaaaaataagtacatctgcgaggacaacagcgcacaggcctcaggcggcccctcccacaggcccagctcagaccagattacattcaacatcttgaatgtccaggaaaatggctaacgtctggaaggccaccggaacccccccgtgaaaaacaggacgccctcctcccgaaaaggaggtgagtcagcatttaaaaggccgaaggcaagaaaagtggtctcccacgaatgctctgccagcctcccctggagattcagctgagatgtaggggcagagtccgggaaacgtgacacatgatagtgctgggaaggagggcacggggccagccactggctcagcaacctgctcctgcacctcgaggagcatttagcaggtatggcaggcataaaaagtccagagaacgaatgccagctcggctttccttccccagcccctagcccaaggctcctgttacaagctatacagacagagccaaacagccctcaacatcagaaatgagatcagcctgggggcacccctggggtgggaagtgtggctgagaagggccgtggagtgcagagcaccccaaggcacacatgtacgcatgactaaccaagcccgtgaccgggtccgcagaatgctccccaggaccagcctgccagcggaccgcccacgtgggccctgccttcccagacactggcctgccctttaagactgcgcagctgcaaaacggttcatttctgtgattttggataaccaaagtcctcacacaaagttctacaattagtcaaggaaaagacagaacaaaaaatttgccaacgaccctgggaaagtcagctaaaatggggaggctgatggtccagtatgagcatctgacgagattgtctaggctgttagacgtgtgttgctcgctcctccgtctgtacaacgggtcatgaagcacacgttctaaagtcaaatgtgtgagggactcactggcacttaggatgggtccagctgtgcagggctcaaaggcagagaggagccactgctggcacaaggggccacctcccccacatgtgctgttctgggctgctgcctgggcctccactgaacaggcaggtgggagagggcccagccacacatctctttctctaccctttaacttacagggggctgattccactctgtgttctctccgcttttaagcctatctctattgcccacagggcttccttcgcaaatagctcctcctctcggaactttcccacctccgcaggaccgatgcccagggagcaagtctccccagagcgcaagtcccactgggagcccacgtgtgcacctgcagcctcctacactgtgactgtgtcaaggcaacatggcccggagctcacctgcaggctgggtcgatgcccaggtatccacaaacacacatcagtggccatcctcagagagcccctgttcctttaatgctatctttcgtaggtgagttttagaaacgtgacctccagctctggaaaaactatctcaataactcaatcagcgatccctttcttatcgaaaacatgtaaatatcagccaaagcatctcaagtctcccaaataacatctctcatgcatcctggctaagactgtaacatacttcccagtagttgacatagaaacattacaatttaattagcttttgctgaaataaaggagtgggggtgagccactgcccatcgttcaactgtgcagcagatgcagtggctggctgtggtccgcagcagctcatccttccactgagctgcttaaggctaagccttggtttaattctttaaaagtttttgtgtttgttttgtttaaggccaactccagtgttaggaatcaaagtcctcacacaaagttctacaattagtcaagg

SEQ ID NO: 58082 - DNA, 626 bp, Homo sapiens
caaggcgggcgccgaggtttgcaaaggctcgcagcggccagaaacccggctccgagcggcggcggcccggcttccgctgcccgtgagctaaggacggtccgctccctctagccagctccgaatcctgatccaggcgggggccaggggcccctcgcctcccctctgaggaccgaagatgagcttcctcttcagcagccgctcttctaaaacattcaaaccaaagaagaatatccctgaaggatctcatcagtatgaactcttaaaacatgcagaagcaactctaggaagtgggaatctgagacaagctgttatgttgcctgagggagaggatctcaatgaatggattgctgtgaacactgtggatttctttaaccagatcaacatgttatatggaactattacagaattctgcactgaagcaagctgtccagtcatgtctgcaggtccgagatatgaatatcactgggcagatggtactaatattaaaaagccaatcaaatgttctgcaccaaaatacattgactatttgatgacttgggttcaagatcagcttgatgatgaaactctttttccttctaagattggtgtcccatttcccaaaaactttatgtctgtggcaaagacta

SEQ ID NO: 58083 - DNA, 1246 bp, Homo sapiens
caatccctaatatgtaatatttaagcaatatgagtgtgaaaataatacagaaacagcctgcagagtcacgcgacttaccaaattcacactagcatgagtgcacattttcccttctgtgtatcaccttctgctcagtttacccaaagcagtttataaagtttatgaccattttggaagactggctgataacattttactgacttgggctttgaggaaattattttcaagagaaattaaataacgactcatagtaaacaaatacaaaacaaaagcttttttttttttagtttgtttcacagtatctaaaatggcagagatttcaggaaagtctaatcacacttgaccatgagtgttgagttgcttttccttcctctgaggccaagagttacttatatccaagaccgtgaagaactctttttgacctgttggatatgatcttgtgactgggtcgaggaaaatgaactcccagggttgttggagtagagctgtttccaccaaaagacagaactgtatgcagctaataagagctccagcacagtgaagatgagcatcaccactaggacacctgttaaactgacactggtcaggagacaatctttgatttcatatattggataatagtactcccgaataaggcaatgaggatagataatcccatttctgagccacaatgttgagaggcagtcctcagggctaccatgctgtcagcaaggaggaagaggcctgctcctgcagtaacagaactcactgcatttgaggtcaagctgctcaggtcaaagggcttagttgattgttttccagagataattgagagggatccagtaatgccaaaacacagagctcctaaaaatgggtaccccagacatcaaagtggtggaaattgctggattgaagtgggaggggtagggagcaaaaaccaagatggcccccagacttgaaatcaacaggcaacacaggatctggacagtcccaagaacggtggtttctgttggcagcccgttctgcaggtaatcttcgttttggtacatgtgtccaggtttctctctttgagggatagtgatgccctttggtgtaaagctgtgagaaacccccatggtttgggattgtaatagcatgatgctgatgatgctgttctcgcagcctggtcctgtgtgctgtggctggggatcagctcacctctggggagcgctcagctggaacctcccactggctgttcctgccagaacgatcttggtgctctgctctc

SEQ ID NO: 58084 - DNA, 1735 bp, Homo sapiens
ttttttttttttttctttaaaagttcagctttaatgacaaagatctattacatcagtctttttcttcaaataagatagatgtgaataaacaacttcaaacaggaggtactatggcctcttcaatacactgtagccagtgcactgggcccttggggatgcccagtgatatacacgttgaagcagtaatgtaagtctgtgagccactgttcctgaacacttccactcttcaatgtcgtgatattcttgatgatctgctgcaccaagatcgcattggtcaacatatgagtcctgaggggtgcatgctgaagcagcagtcgaagcagctggcccacaacaggcagctcctcaggcccaactctgttcacccgcaggctctgcagcatcaacctgaggactcgaggcaagagagccaggatggagacacagaccccccacagcttgtccctctttcttagatgttctgcttcccctttctctatagtgagcagaaaataaagaagactgtagcaacaagaagccagaaatggcagtagagtctcactaactacacaagtatgatccaggagcttacagatacaccaaaacacagccagccgtgctgtcaggaattacagtcaacccaaccaaatgcttactgatggcactttgcaagatgtcaaagttctgacttcgggcaggaataaccaataaactgtgaaaaactgcctctgttacatcccagtggtgtaaaaattgatccaaatctgtaaggtagagaagcacaggggaaagctgtgtctggatgacatgaggaactccctcgaaggctctgaagcccaagtcaactcctctttcgaaaaccctgtaagtgtggaaaataagaagctgaaatagtctacatcactcatcaaccagtctttagctgaatacttccacccagaaaatgatgatctcatgtgcagtatcccgataagcatggcagccaaacttgaactgagtcttcccataatacagcaacgacttaaccgagaaagcaaatcagccggcagactgggtaggaaatatacaagctgaaccaaacgctgctgagagtctgcagggagaaccaccacagcaccttcttgtggatcataaattcggagggcagtagcttgtaaactttttagtaattctttatttgctcgtgctgcagcggtatgaatgatatcgataagctgtgtagagagctcaggatttcgggagccaagatgagcaagttgcaatggtaagccagccagccaacgggataacactttactacgatatctgaatctacaagatctcagttcttctgtctgatagattttactgaaaaacttcaataacaaagtccgaactggaaggataaggcccctctgctgatataatgtataaactgccttaataagagtctctgtgtcctctctgtttggctgtatttgcattaacctccaggatactcccagcaatctgttcagttgcttactatttagcctagagccatcttcaagggtctctgttacaaatttccttatcatttctatccaactgcaatccttctgcaaagttgacgcatttgccagggagaccatgatatcagacagtgttaaattcagtaagagatgatctatgttattggagagaactgtgcaatgcttgatgcttttatttggctctttccttttgtgcttggttatttcttttaagacatatggaaaacgactcataaaatggtgtt

SEQ ID NO: 58085 - DNA, 686 bp, Homo sapiens
ctcgtcggcggcgccctgcaccgcgcctcgcaaagccaaacaccagagcaccctagaaggtttaactaaaagaatgctcatgtttgacccagttcctgtcaagcaagaggccatggaccctgtctcagtgtcatacccatctaattacatggaatccatgaagcctaacaagtatggggtcatctactccacaccattgcctgagaagttctttcagaccccagaaggtctgtcgcacggaatacagatggagccagtggacctcacggtgaacaagcggagttcacccccttcggctgggaattcgccctcctctctgaagttcccgtcctcacaccggagagcctcgcctgggttgagcatgccttcttccagcccaccgataaaaaaatactcacccccttctccaggcgtgcagcccttcggcgtgccgctgtccatgccaccagtgatggcagctgccctctcgcggcatggaatacggagcccggggatcctgcccgtcatccagccggtggtggtgcagcccgtcccctttatgtacacaagtcacctccagcagcctctcatggtctccttatcggaggagatggaaaattccagtagtagcatgcaagtacctgtaattgaatcatatgagaagcctatatcacagaaaaaaattaaaatagaacctgggatcgaac

SEQ ID NO: 58086 - DNA, 1272 bp, Homo sapiens; identical to SEQ ID NO: 15172

SEQ ID NO: 58087 - DNA, 1788 bp, Homo sapiens
tggtatggcatgagaaaagtactttattcgtgcataatttttcagttccattcaaaattacagtacaaaaaaattcccttgcttgcagagtttttgttactttttacttaaatatttagagttaagaaaaaaatcaaatttaaaatcactattgatggaagcttatattccttatgaatatatacatgtatgcatatatacatctctgtatgaatcactcaaagcaattttaaacatcattcttttttgtatttaaaattgcccttttaaacatttagaagttccagaggtggaggctttaatggaatttttcccagagtaaatttcttggattgaaattgttccagttcttctactgttagtttatctctgggtgtgaataacacattatctgttgcaatgatgctgcttgaggctgacagagaagtggatatgctgctatttccaaaagtgtcactggatggcttagaaaaagcagtgtgagaatgtgagcccggactaccaaaaccagccacagaactgccacctccaaaggctggggcccactggagctctgacaggacctgttgccaaggaagctggaagtcctgaaaatccaggtgatccaaaactggaagctgccagggcttttgaatgaaaatgatgcagccgatgtgacttcaggcttcccaaatccaaaagctggagcagaagtagagatacctgaactggtagaggctgcagctccaaatgctggggaactcccaaaaccagcagggcttccagaagaggcagcagcaaatccagagtttgttttaaaactaaagttctgagcattatcactgctgctgttattgactggaaagcctggcgacataaatgttgctgcttgactgctgccaaatccaaatgcaggtgctgcttgatttactccatcctttacatcagagagcaaagctactttagttgatatatttagacttttcagttcatttaccctgttcctccattgatttattaaacgttggacagaatttagataactctgtaagttattgctggttaagaagttatggtattcaagcctcaattcctctggtgaaatgtctgtaaaacctgaaatattaggtttctttttcactggtgaataaacagaaaacatccactgccctgatgattcccaaacctccatatcttttacaattccttccagaagtttcttttcatctttctgctcatcaggactaagtgaagcaaatgggttctcagacaatccaaagccttccttcctgttagttgaagctccagaatcaaaagaactgaaatatggcttttcttgatctctgctgcccccccatggtgtggatttggagaaactggatggctggatgacattggaatatctctggctagttgtattccatccacgtctattattacctgaagggctggctgctgcggttgctgccgtcctcctcctgcacccctagcaccgggatgttcgttccagcaccgatctccaaagcggcaccggccttgaaggaagaattgacaaatggccattgcgacggcgtcgctgacggagggcgtcttcagtctgcaccgttcgatgcctgttactgggcagagagccctaaggcaacctcggcgcccggccgggctactgtgacgtcatcttctcgcgcctgggaaggcctttttccgcctctcacccggcagtgccatgagacgcatggacttgagccaataggacttgagaagagcggaccgctctgacgctttgagtgtgtcctgggaaggagggatgct

SEQ ID NO: 58088 - DNA, 2203 bp, Homo sapiens
ttttttttttttttaaacaaaattcacattttatttagattgaaataaactatacaaaattgattttcttcaccaaaaataacagcaatattttccatatttttctagataaaccacaacacttattttgtaggttttccaggttttgcttataaatcaagatgaggcagtatataagagtcatggaaaaagacagagaaaaaaaacagacaaatcagttgtcagtatccatggcctctgattctgtctcaaccatgaaacagaagtgttcaacatatacctgctaaaaagcttaggaagatgtaggctccacaaaggaatgtaaacagcaacgagatgtggaacaacagcaggcttttcccattcaaactttgtcatttgtttcctttaagttcaagaaagacaaaatctacactgaaatccttgtttggtgagctcacaagcttttctccggtaatttcttgtaactgtccagtatagatttttaacatacttaaaactccctattagtcaaaggtcaattgtgggcttcactacaacattttataaaatgtattccttcctcccacacctcttcaaaatatatttcttcaaagaattcataacacccaacaagtagagatccacagtgataataaatgctatgtctaaaatgacttaactgaaaccaattcccggagtgccatcaacagagatcacgcaaaaggaaacatggcactttcaacgttctcttctgggaaggaacaggtaggtcttcaaagcttgagagttcaaacaggggccattttaaacaggtagattatcaatggctaatgtattcaatggagtcctatagggcaaagatatttagtgattaagtggtctacatacaccttacgggctttttcttccaaatatcaaatataagaaagcctatttttaaaagtctcttaggtattttccacagtttcggaattatctgtaggaagctctgacttacttgtatagagtttaatatatgtgtccaccattaaatccagggtcgtgttttatatcaaaatttatgttaagcaaagcccaagttacttgacctttggtctgtcaaagtgttcctcaaatatgctttaagacgctttcgtcccattttcataccgctcattctcaaccttcatcacaggaagaatacacaggaccttcagcaatgcatacacattaggaaaaaacttgatgtcaggcaggtggagggcttcatagatggtggacggaagctctatatctttccccctgtgtttccatttgattctccaacaatgaagctcagctgacagcgtgtcaggattgggtaagtcacttctatacatgtcagcatggtgttcctccgacgtattgaatttgagttgtcccatgactgagggtaccagagataagcatttaagagctttgaggtgctgttctgagaatatatctttaagttcctgaataatgtgctccactgttgggacacttagggtttctttatagtaactctcagaggttagctgagattccaagttaccctggtgagctctgcggaatttcccagggagtttcatttgaatatcaagtttggttgccaaatttgtggcttcctcaaaccaaaattcatgataaacttcaatattttccatcacttcgttgagtgaatgcagtactgcagtcaagctaccggccgcaaagaagacatcagaggtttgcccctggaggtttttcccaaaggctcttgtaaaagataggacatttttaagaacaacaatagtaacaatgaaatcaaaatctgacactgcactgcagagtacaaatgctcggccagctatatagttattccatctaatatttgtgtcactatttataccatctaaacataaaacaagtgcttgcaggagttccactaaaatttcaaaagcatcatgcctgcctgtccactgagaatggcagatttccttcagttctttacccctttctttactgttctgaaaaagaacagaaattacgttgtcaagttctaaaagcagttgtggtgatcgatggaaaaaagaacaaacttcctcaattgttcctaatgcaacagatactcccataacaggtactgattttgccaaccacatatttaaggcacaggaagagcagagtgtgtagatagcttggggatatttctctaaaagtctagaagcaacaactttcattt

SEQ ID NO: 58089 - DNA, 394 bp, Homo sapiens
gctccatctcaaaaaaaagaaaaagaaaaagaaaatcctaccaactccatacccgaggaacccttgaattgaatgattttaggaattccatttctcctaccagatgtttgtttgttttggaaactctgcatacttctcttttgttgctccttacttcattttggaaagagggtaatttatgccatgagaaactccagatgtttagagctgggaagtaggaatgtttgggcaagaaaaaagggaaaacataaataatcagaaatatgcttgttttagcatctaaaatgattattggatactgttcataatcatcatgggagctacaatttttaattgcttcaactcaattttagtataaatatgacctaatcatttgttcagctgaagaaacttt

SEQ ID NO: 58090 - DNA, 832 bp, Homo sapiens
tttttttttaggtgggcgggggtctttatttgagtttaggcatgattcgaatgaagaggatcatgctaatgaagatgaagcagacgataatgagcatggcccagagcagccagttgactgacttctgcgtgtgctgctccagacgctctgactccgtcttcagtttctccaggttctggtccgccattttcagtgagtgtgacagggtctggttgtccttcttgatgacactctgggcggccagggtattggtcttgaaggctccgggccagtcctaagcatctcttccgccagcttttcctggaggttctgatgtcgctgcaggacgaggtctagctcagctgccgactgcttctcactcactggctgggaccctgccactccagttctcttccttacgtccatctcaggctctgcagagtccgtgcctagtagctcactccgcatctcgctggtgtaccgcgcccgtgactgcagatgcaccgtctttgtggcgggcactcgctctctggctgtggttggcacacggccaggggccaggaactggttggccagtgctttctctgaggaggaggtcagcttctcggcttgcagcatccccttcagaaaatccaccttccaggaatattcattgatcacctcagaggccggtttgctcgcgtggaccttcagggcctgcaacatgtcctctagggctcccacgtacttctccaggcgccactcgtccgggtcccgtttctccgctgccatcgcctcgcagcgggatagcagccgcaccaggtttagctccagcctcgacgccgccattatcgcccgggccctacaccacccc

SEQ ID NO: 58091 - DNA, 1624 bp, Homo sapiens; identical to SEQ ID NO: 15177

SEQ ID NO: 58092 - DNA, 4075 bp, Homo sapiens
  misc_feature (1)...(4075): n = a,t,c or g
cgcgcgctgcctgaggacgccgcggcccccgcccccgccatgggcgcccctgcctgcgccctcgcgctctgcgtggccgtggccatcgtggccggcgcctcctcggagtccttggggacggagcagcgcgtcgtggggcgagcggcagaagtcccgggcccagagcccggccagcaggagcagttggtcttcggcagcggggatgctgtggagctgagctgtcccccgcccgggggtggtcccatggggcccactgtctgggtcaaggatggcacagggctggtgccctcggagcgtgtcctggtggggccccagcggctgcaggtgctgaatgcctcccacgaggactccggggcctacagctgccggcagcggctcacgcagcgcgtactgtgccacttcagtgtgcgggtgacagacgctccatcctcgggagatgacgaagacggggaggacgaggctgaggacacaggtgtggacacaggggccccttactggacacggcccgagcggatggacaagaagctgctggccgtgccggccgccaacaccgtccgcttccgctgcccagccgctggcaaccccactccctccatctcctggctgaagaacggcagggagttccgcggcgagcaccgcattggaggcatcaagctgcggcatcagcagtggagcctggtcatggaaagcgtggtgccctcggaccgcggcaactacacctgcgtcgtggagaacaagtttggcagcatccggcagacgtacacgctggacgtgctggagcgctccccgcaccggcccatcctgcaggcggggctgccggccaaccagacggcggtgctgggcagcgacgtggagttccactgcaaggtgtacagtgacgcacagccccacatccagtggctcaagcacgtggaggtgaacggcagcaaggtgggcccggacggcacaccctacgttaccgtgctcaagacggcgggcgctaacaccaccgacaaggagctagaggttctctccttgcacaacgtcacctttgaggacgccggggagtacacctgcctggcgggcaattctattgggttttctcatcactctgcgtggctggtggtgctgccagccgaggaggagctggtggaggctgacgaggcgggcagtgtgtatgcaggcatcctcagctacggggtgggcttcttcctgttcatcctggtggtggcggctgtgacgctctgccgcctgcgcagcccccccaagaaaggcctgggctcccccaccgtgcacaagatctcccgcttcccgctcaagcgacaggtgtccctggagtccaacgcgtccatgagctccaacacaccactggtgcgcatcgcaaggctgtcctcaggggagggccccacgctggccaatgtctccgagctcgagctgcctgccgaccccaaatgggagctgtctcgggcccggctgaccctgggcaagccccttggggagggctgcttcggccaggtggtcatggcggaggccatcggcattgacaaggaccgggccgccaagcctgtcaccgtagccgtgaagatgctgaaagacgatgccactgacaaggacctgtcggacctggtgtctgagatggagatgatgaagatgatcgggaaacacaaaaacatcatcaacctgctgggcgcctgcacgcagggcgggcccctgtacgtgctggtggagtacgcggccaagggtaacctgcgggagtttctgcgggcgcggcggcccccgggcctggactactccttcgacacctgcaagccgcccgaggagcagctcaccttcaaggacctggtgtcctgtgcctaccaggtggcccggggcatggagtacttggcctcccagaagtgcatccacagggacctggctgcccgcaatgtgctggtgaccgaggacaacgtgatgaagatcgcagacttcgggctggcccgggacgtgcacaacctcgactactacaagaagacaaccaacggccggctgcccgtgaagtggatggcgcctgaggccttgtttgaccgagtctacactcaccagagtgacgtctggtcctttggggtcctgctctgggagatcttcacgctggggggctccccgtaccccggcatccctgtggaggagctcttcaagctgctgaaggagggccaccgcatggacaagcccgccaactgcacacacgacctgtacatgatcatgcgggagtgctggcatgccgcgccctcccagaggcccaccttcaagcagctggtggaggacctggaccgtgtccttaccgtgacgtccaccgacgagtacctggacctgtcggcgcctttcgagcagtactccccgggtggccaggacacccccagctccagctcctcaggggacgactccgtgtttgcccacgacctgctgcccccggccccacccagcagtgggggctcgcggacgtgaagggccactggtccccaacaatgtgaggggtccctagcagccctccctgctgctggtgcacagccactccccggcatgagactcagtgcagatggagagacagctacacagagcnnnnnnnnnnnnnnnnnnnnnnnnnnnnnnnnnnnnnnnnncacatccgcgtgtgcctgtgtgcgtgcgcatcttgcctccaggtgcagaggtaccctgggtgtccccgctgctgtgcaacggtctcctgactggtgctgcagcaccgaggggcctttgttctggggggacccagtgcagaatgtaagtgggcccacccggtgggaccccgtggggcagggagctgggcccgacatggctcggcctctgcctttgcaccacgggacatcacagggtgggcctcggcccctcccacacccaaagctgagcctgcagggaagccccacatgtccagcaccttgtgcctggggtgttagtggcaccgcctccccacctccaggctttcccacttcccaccctgcccctcagagactgaaattacgggtacctgaagatgggagcctttaccttttatgcaaaaggtttattccggaaactagtgtacatttctataaatagatgctgtgtatatggtatatatacatatatatatataacatatatggaagaggaaaaggctggtacaacggaggcctgcgaccctggggggcacaggaggcaggcatggccctgggcggggcgtgggggggcgtggagggaggccccagggggtctcacccatgcaagcagaggaccagggctttttctggcaccgtcagttttgttttaaaactggacctgtatatttgtaaagctatttatgggcccctggcactcttgttcccacaccccaacacttccagcatttagctggccacatggaggagagttttaatttttaacttattgacaaccgagaaggtttatcccgccgatagagggacggccaagaatgtacgtccagcctgccccggagctggaggatcccctccaagcctaaaaggttgttaatagttggaggtgattccagtgaagatattttatttcctttgtcctttttcaggagaattagatttctataggatttttctttaggagatttattttttggacttcaaagcaagctggtattttcatacaaattcttctaattgctgtgtgtcccaggcagggagacggtttccagggaggggccggccctgtgtgcaggttccgatgttattagatgttacaagtttatatatatctatatatataatttattgagtttttacaagatgtatttgttgtagacttaacacttcttacgcaatgcttctagagttttatagcctggactgctacctttcaaagcttggagggaagccgtgaattcagttggttcgttctgtactgttactgggccctgagtctgggcagctgtcccttgcttgcctgcagggccatggctcagggtggtctcttcttggggcccagtgcatggtggccagaggtgtcacccaaaccggcaggtgcgattttgttaacccagcgacgaactttccgaaaaataaagacacctggttgctaaaaaaaaaaaaaa

SEQ ID NO: 58093 - DNA, 1414 bp, Homo sapiens
tttttgaaattttgacttttttttttatttggaaaagagacagttgaatcccttttctttaccagcataaggcagtcaggcaaacctaagagttgcttatttcggcaacataaggcggggtcattgcatgacagcaagaaggcacgaggtcccctcatctgtcctttcccagctcgcaggccttggaaccccgcccagggccccgctgagggaggcacaggcacagtcctaccgactcctgcctgggcagctggaggagcccaggttccagcacaaaggagtctgtggacaggcaggggcagaatcctggagggagcgcctgagccaccatcccatgtggcagctgctgggcgtacgagtgcctcgggctggcatcgttttggaagcaagtgggttcagtgaagtgtgttgccacgaatagcacccgctgcttttggctttattaacgtggcaaggagaaattcaaaattaagtatgtctcgaattctgtttgtggcagatggtgcggctctggagctcagccctcggcggcctgattcccaggggtccaagccaccctcattctctgagtcagggttgggcagccacttgtgtcctgagaaggtgccagaaggcctgaagcccaggcaaggggaacgggcagtgcctgtgcctcgggggtacctccagcatggcctggagcacatccagccatccccttcccccaaactccagcccttctcagaggggctctgggggtcattcaagggggacttctagcttctctctggaaccctttgtccagagcaaagccaggtttccaaggtccccacggcaaggctgttgggtgctggcagcaagaggtacacagcagttctcccagctcacagcagtgacctcagatctccagcagcaagggccgcactctcgtgcccacaagggccttgcagaaatgctccggtccctgggcctcccccggcaggaggggcggggctcctgcctgcagtgaggccacagcactaagcggcttcagtcacatgcttttcaggtgaatcactccaaattcagtgaggagggccacgacaaggaagttcaggtagaagaggagcaggcagaagccatagactctgctgagctggaagcactgcaatgggactgagaccagggagaagacgaggctgagccccagggcgcctgccaggacccacaccagcagtccgtctggctccagcttcacttctgtgtggcttcgggagatctggagcaggcagcccagccccacacccacgaggatgttgaagatgatgcgccaaagcaggcggagaacgccatccgtgggtagccctggcgagccagtgtgaaatccgagaaggcatctccaatgctgttcccccaggccagcagcgtgagccccagcacagtgttgctcagccgg

SEQ ID NO: 58094 - DNA, 347 bp, Homo sapiens
gggaaataatcttcatggggctggcccgtgaaaggcatggccccagcttctccctttcacctcagaattgtcttcggatggtagccactcagcccattcctaaaggccatgagattttcaacacttatgggcaaatggctaactggcaactgattcatatgtacggttttgttgaaccatatcctgacaacacagatgacacagctgacattcagatggtgacagttcgtgaggcagcattacagggaacaaaaactgaagctgaaaggcacctagtgtacgagcgctgggatttcctatgcaaactggagatggtaggggaagagggagcctttgtgatagggagg

SEQ ID NO: 58095 - DNA, 2260 bp, Homo sapiens
tcccagttatgcatttcaagtttggggtttgttcttttcgttaatgttcctctgtgttgtcagctgtcttcatttcctgggctaagcagcattgggagatgtggaccagagatccactccttaagaaccagtggcgaaagacactttctttcttcactctgaagtagctggtggtacaaatgagaacttcaagagaggatgttatttagactgaacctctgttgccagagatgctgaagatacagaccttggacaggtcagagggtttcatttttggccttcatcttagatgactggttgcgtcatttggagaagtgagtgctccttgatggtggaatgaccgggtggtgggtacagaaccattgtcacagggatcctggcacagagaagagttacgagcagcagggtgcagggcttggaaggaatgtgggcaaggttttgaacttgattgttcttgaagctatcagaccacatcgaggctcagcagtcatccgtgggcatttggtttcaacaaagaaacctaacatcctactctggaaactgatctcggagttaaggcgaattgttcaagaacacaaactacatcgcactcgtcagttgtcagttctggggcatgactttagcgttttgtttctgcgagaacataacgatcactcatttttatgtcccacgtgtgtgtgtccgcatctttctggtcaacattgttttaactagtcactcattagcgttttcaatagggctcttaagtccagtagattacgggtagtcagttgacgaagatctggtttacaagaactaattaatgtttcattgcatttttgtaagaacagaataattttataaaatgtttgtagtttataattgccgaaaataatttaaagacactttttttttctctgtgtgtgcaaatgtgtgtttgtgatccatttttttttttttttttaggacacctgtttactagctagctttacaatatgccaaaaaaggatttctccctgaccccatccgtggttcaccctcttttccccccatgctttttgccctagtttataacaaaggaatgatgatgatttaaaaagtagttctgtatcttcagtatcttggtcttccagaaccctctggttgggaaggggatcattttttactggtcatttccctttggagtgtagctactttaacagatggaaagaacctcattggccatggaaacagccgaggtgttggagcccagcagtgcatggcaccgttcggcatctggcttgattggtctggctgccgtcattgtcagcacagtgccatggacatgggaagacttgactgcacagccaatggttttcatgatgattacagcatacacagtgatcacataaacgatgacagctatggggcacacaggccatttgcttacatgcctcgtatcatgattgattactgctttgttagaacacagaagagaccctattttatttaaggcagaaccccgaagatacgtatttccaatacagaaaagaatttttaataaaaactataacatacacaaaaattggttttaaagttgactccacttcctctaactccagtggattgttggccatgtctccccaactccacaatatctctatcatgggaaacacctggggtttttgcgctacataggagaaagatctggaaactatttgggttttgttttcaacttttcatttggatgtttggcgttgcacacacacatccaccggtggaagagacgcccggtgaaaacacctgtctgctttctagccagtgaggttgaggtgagaggtttgccagagtttgtctacctctggggtatccctttgtctgggataaaaaaaatcaaaccagaaggcgggatggaatggatgcaccgcaaataatgcattttctgagttttcttgttaaaaaaaaatttttttaagtaagaaaaaaaaaggtaataacatggccaatttgttacataaaatgactttctgtgtataaattattcctaaaaaatcctgtttatataaaaaatcagtagatgaaaaaaatttcaaaatgtttttgtatattctgttgtaagaatttattcctgttattgcgatatactctggattctttacataatggaaaaaagaaactgtctattttgaatggctgaagctaaggcaacgttagtttctcttactctgcttttttctagtaaagtactacatggtttaagttaaataaaataattctgtatgcaaaaaaaaaaaaaaaaaag

SEQ ID NO: 58096 - DNA, 674 bp, Homo sapiens
acctcttgacttgattaccaatttaatacgactcactatagggaatttggccctcgaggccaagaattcggcacgaggagaactcggcgccgccaaacagcccagctcgcgcttcagcgtcccggcgccgtcgcgccactcctccgatggccacagatgtctttaattccaaaaacctggccgttcaggcacaaaagaagatcttgggtaaaatggtgtccaaatccatcgccaccaccttaatagacgacacaagtagtgaggtgctggatgagctctacagagtgaccagggagtacacccaaaacaagaaggaggcagagaagatcatcaagaacctcatcaagacagtcatcaagctggccattctttataggaataatcagtttaatcaagatgagctagcattgatggagaaatttaagaagaaagttcatcagcttgctatgaccgtggtcagtttccatcaggtggattatacctttgaccggaatgtgttatccaggctgttaaatgaatgcagagagatgctgcaccaaatcattcagcgccacctcactgccaagtcacatggacgggttaataatgtgtttgatcatttttcagattgtgaatttttggctgccttgtataatccttttgggaattttaaaccccacctcagattggtaaca

SEQ ID NO: 58097 - DNA, 2344 bp, Homo sapiens
ttttttttttttttttcctccagaagatttttatttttaaatctaaaagaatgaatgtttagaataatcttcagctactgtcagcagatgggggaggtattttaaagcagaagagccgttacctaaggacctattagtcttcccaaagtagatgactgtctacttgtagggccagatcaacttctgaaatcaaagtttcactttaaagcagttttttctcagcacccaatggttcaaataaactctctgagacactttgttggtacagattttaaattacaagcttgatttgataccctcaaatacagttcttaaggaagattagttacaaatagttgtcagtactttcaaatgacagaaaaaattacattttagtaaaactggatgaatttttcatgtgtgaaataacaatcctttcaccaccaggtggaattactccagttcatgcaatagataactatgacatttttaaaaactgccctaatttttctagttgcgatttcatgcctattgtaagtcaaaacatcgttatgttcccgagctcacctcaccctccctgggaagtggcgaggacacccatggtttctctgagacaccactgggcccctgcttagcaagctattgtctcagtgctttcctcttgctgcgaaggtcccccaggagatgttgggttcagaggaagtggctctggttgcctatgggcaaatactacaccagaggttacacaggatagagacccaagaggtgaacaggagggaagttttaacttattttgacataaaattggcaaaaataagcatcaccaaatttctgtaactagaaattgaggataaaacagaggaggtttgtctatgatgaggatgtccatcacagtagaacttgtgaatagcttttatagaaccacttaatatagtaccgtcaacattttacatattttacatacaatttgaatacaaattcttaaaatttataatagaacattaaaataatcttctaataaaatcagccttaagtataaggaatctaaatttcattatcttgtacatttctaaataaatatctttgatctataacccttgaaaatattacagtttatggtgacatgatagagacaagtcaaacagtattataagtgaaaatgaaacatcaatttaaaatgaacaagtgtaaaaacacgcggaactgaaattatagaaaatcaaaacactaaatacacagtaattaaatatctagcactggaatcaccaaatcatgcgcagtaacacactttcaactgatataaaaagccctttaagattcacataatctaaataaataagcagaaacacaaagggaggtactgtgccagccagtaacaactagaaagtaagttctccctttttctttcaaatgatcctaacagaagacaggagataaagatcacttgttaaaaactataattcatgtttggtttttctttgttgttttttttttaatgctgcccgataaagtcaaagcaaggcttcctaaatgttagaccactacacctcagataaggaaaggccacctaacggacagatttaaacaaaaatcagacatttgtctatggaaggtatgattgaattttcgcgtaatgaccccgcaataggatctaaatcaagcccacaacaagaatgcacattcaagcatctgaatgcatgatctgttaatactgaattctatatggtgatttcactcagcaaagtactggtttattctatataagaccaggattaaaacacctacagtgggaactgtatcttacttaagtttgcattctggttctcagaatctcagaacataataggtgtaagcgtttgccaaactgagtccagcattcatgatttcaggaagctttgcatccatgacaaaactgttgcctgagactcaggggagctttttctttggtctctaggcctgtgattaatttctggctaatcaagttaattgacacagatctgtcacagtttctcattgcagggtcaagagttctagaattcatctattccacagttaagccttctccaaagatttgtgcctgcacatcatcatcaagttaaaagaagaaagatcatctttgtgatgttgggtatttgcttatgttaactgccggaagcacatgcgcacgcacacacacgcgaacacacaatcacttcataagtggagaacagaagtgaaataatacgcaaagcctaaattacacagctcccaagttaactaaagaatgacactgaaaccataaggtaactccttctgattacacacaaacttattgcgtgatggcggaaagcaacttctatgacccaacaagtgtaaaccaaaagtg

SEQ ID NO: 58098 - DNA, 531 bp, Homo sapiens
  misc_feature (1)...(531): n = a,t,c or g
cttctccattctgtaagctttccgggaacatccaaggcaagactggcacccagcacagcagtgactgaccacataccccactctccaggacccatggagtccttcagctcaaagagcctggcactgcaagcagagaagaagctactgagtaagatggcgggtcgctctgtggctcatctcttcatagatgagacaagcagtgaggtgctagatgagctctaccgtgtgtccaaggagtacacgcacagccggccccaggcccagcgcgtgatcaaggacctgatcaaagtggccattcaaggtggcttgtgctggcaccgcaatggctccttttggccccagtgagctggccctggcttacccgcttttcgccagaagcttgcggcagggtgccattgaacggcatttaagttttggtaaggtagactttcaccttcgaggctgctgttctggctgggcttgttgaaccaattgcccggatgtgttgttagagtttngtgggancacaccttaacgtcccaagtnacatgg

SEQ ID NO: 58099 - DNA, 2127 bp, Homo sapiens
tttttttttagaaaattcactttaatcttatatttgtaatttactttttttctgaacagttaaaaaaaacccaaaacacactccattatcatgatcctaggttgtgaacatattggtacactgactacacatcaccataacataatcacaaaagtcaaagcagtcagtacttaagagtctagagaacaaagaggtgaaccagctgaaagctctcggggaagcttacatgtgttgttaggcctgtcccatcattggagtgcactggccgtccctcagatttgtctgggctggcctgagtggtcaccgctttgagaaagctgttagtttccttggtgcccagagggctaagcaccctagttggccttttccttcagtgtccaagaaggggaagggttaggaggggaggtaacactttaaaatacgacttaactgcactgatccttaataaaacacacaaccaatcaggagctaagagcgccagctgtgctggttggaaagcacatattttagatgtcatctgcctccaggacattttagatcacaggtactcaacttccaacagaaggagcttctaaagatcaatgcattaagttccacctgaaaccaggcagccatcatcatgctcttttgatttctctcttcagctccaaggattctgacaccacagatgagctaaagaagcgaaactgttttattcccctaagaaatggctctctttccgatactatgttgacactgtggttaaaggaggtctggtctgttggtgaacaactgtgtggaggaagaccagggaggctgcaccctaagcctccgggctgcactaatctgggttggactgctctgctacagactggagggtgttgccatctaaggcaaaagggagatgctgagaaggtcaacagtaccaaggtatctagtccaattatgggaaagaaaaaaattgccctgattatttccagtattccccacccctcccacctttgtttccccacacaatcaagtgctaagtaaggagtagaccaactacagctgttcagaccaatggtaccaggagccggcaagggaagagtgcatttttttttctctgtagctttagactgtacagaagaaaaataaaaaaggattgttcttactcaagcaaaaaaaccagaatgatgtaggggtctcacagacttttctagttcggaaacaagttatgagggccagacttttattacttgtcaatagagatccaaaaagagtccctgtctctgaagttaggagacaccagaaagaattttgccaagggacatgtacaaatggccttccatccatgattcacatcctttcaaattgcacaccaagttaaaggatgttctcagcagtgaaatacacacacgtgcagcaaggccatgctggtcttgtccaagtagctccagtgtgcaccaaaaggtcacgtgtctgtacctcctcatctgcctttgaaggggtttcagcctgtctttaagaaaggtttcctttaggccctacgttggaaagtaaattttagtgagaagagactaatctacaatggggacaccttcagctctgtttctaccactccttggaatgtgctgagactttgtctctcttttcgttttaaaaaggtcaaactttacatttattctagcccagttggggattagtgataatcaattcccactgaaatcatgcagagatggtaagtggggtttaccttctctggaaatgaacttttaacttacctgaattatttcttcctacaacaaactggtaaatgaccccccagagctgagaaatgtgaacgattcaagtttttcagaccacttaacttcattccccatttcccatcagcaggagagaggacaacttggagaatatcctcaactgggctaatggctccacatctgcaggggtcgccccgatctcctttgtgatgtactggacatgtctcaaaacagtcttagaaacaatattccttcaactgaacctagattggagagcaaaaccctgggcaccaataaacattcaacagcttccactttgtaatagcagcatatgacagaaaggctggtaaaattatggctattgggcaatattttgagacagctcgaaacccatgccttttaa

SEQ ID NO: 58100 - DNA, 1529 bp, Homo sapiens
cagtgccttggtaatgaccagggctccagaaagagatgtccttgtggctgggggcccctgtgcctgacattcctcctgactctgcggtggagctgtggaagccaggcgcacaggatgcaagcagccaggcccagggaggcagcagctgcatcctcagagaggaagccaggatgccccactctgctgggggtactgcaggggtggggctggaggctgcagagcccacagccctgctcaccagggcagagcccccttcagaacccacagagatccgtccacaaaagcggaaaaaggggccagcccccaaaatgctggggaacgagctatgcagcgtgtgtggggacaaggcctcgggcttccactacaatgttctgagctgcgagggctgcaagggattcttccgccgcagcgtcatcaagggagcgcactacatctgccacagtggcggccactgccccatggacacctacatgcgtcgcaagtgccaggagtgtcggcttcgcaaatgccgtcaggctggcatgcgggaggagtgtgtcctgtcagaagaacagatccgcctgaagaaactgaagcggcaagaggaggaacaggctcatgccacatccttgccccccaggcgttcctcacccccccaaatcctgccccagctcagcccggaacaactgggcatgatcgagaagctcgtcgctgcccagcaacagtgtaaccggcgctccttttctgaccggcttcgagtcacgccttggcccatggcaccagatccccatagccgggaggcccgtcagcagcgctttgcccacttcactgagctggccatcgtctctgtgcaggagatagttgactttgctaaacagctacccggcttcctgcagctcagccgggaggaccagattgccctgctgaagacctctgcgatcgaggtgatgcttctggagacatctcggaggtacaaccctgggagtgagagtatcaccttcctcaaggatttcagttataaccgggaagactttgccaaagcagggctgcaagtggaattcatcaaccccatcttcgagttctccagggccatgaatgagctgcaactcaatgatgccgagtttgccttgctcattgctatcagcatcttctctgcagaccggcccaacgtgcaggaccagctccaggtagagaggctgcagcacacatatgtggaagccctgcatgcctacgtctccatccaccatccccatgaccgactgatgttcccacggatgctaatgaaactggtgagcctccggaccctgagcagcgtccactcagagcaagtgtttgcactgcgtctgcaggacaaaaagctcccaccgctgctctctgagatctgggatgtgcacgaatgactgttctgtccccatattttctgttttcttggccggatggctgaggcctggtggctgcctcctagaagtggaacagactgagaagggcaaacattcctgggagctgggcaaggagatcctcccgtggcattaaaagagagtcaaagggta

SEQ ID NO: 58101 - DNA, 3357 bp, Homo sapiens
  misc_feature (1)...(3357): n = a,t,c or g
ccactatatttgtaaaagttatgtgattgtatgactacagctcttctgtggtacctacaggttgatacaaatcattaaaaatcaaaacatcaacgtatctaagaaccaaatggtgcatgtgactccccggagaaggatatatatgccatgttgccacttgaaggagaatcttccaggcatcaaatcccgtggattctcttattttctttcacattccctctgcttttcctcacagtcggctaccacgctctgaggagccccgtgccatctccatttcccccatccctttttcactttgcctcacaccagtcaaatccaaatatccgagagtcagacactgggagacttgtctgcttcattggcaacttcccaggtggttatgatacgcttcccggaccgcaacacttgacctacggaactgaaatgatgaattcatgtcagaagaaataggatttggggaagnattcattacctggaccattttcagcagctggaataaaaagtacttaacaacaacaacaaaaatcacacacaaagtccaaaaagtgttttgaaaaagtgctttgagaatttactgtacagtttttttaaacaatttatttatatgttggcttctacatgctcttacattcgtgtaaaacatttatacatattctttacaatttgtacatatattaaatggctatagcataaacattgttctatgggattttatagaagaaaaatcaagtggggagaattacttatgaaacattaacaaaaacccgtgatattgaagaacaagatgttctcatattcatttgatttcatctacttatttttggtgtcattttattgatgctggcccagactttccatttcccgtaattattaggtcagaaaaatgaaagcagcgggagggaacgcgggtaaggcacctgtgggagacgggagcgctcctccgcaggggtgagacggtggctgccagtgttgagttcgagctgacggtgtgccaaggtcctgttttgctttatgccgttaagtgaagcgctggaagtgctggtgctcagaaacaccctgtgtgaagtttcggatgtagtcaggaagggcgctggtctgttctttctctccaacctcagagcgccggggactctgtacactggctgaggctgcagcccttctcagtccctacacttttccatctaatggggagctaacctgtgctttttctctttgctgatgacaccaactggccatgaacccgccacccaagccaagcagtgtgccgtggccacagcagcgcttctcatcacggtggatgaggagccaaagaataagaaagggccagagacgccggggtgctgggtgccctccttcccccaggccctcccgaacacaggcctccgcacagcccactcacccgtcggaccaaagccacaaaattctctacaaagtccctcaattcttctaatgtattcttcatggcataaaacatgccttaaccaagattaggaaggaagtgcaaagagagaaagcactggtcctcacataagagcagcacatcagaaatgtcgctgaggacatgggtggccaggggtatctgctcatctgcccaggcctgtggggtcccccctggagggacatgggatggcccacctgccacacaccacgatgggcactagcagcccccaggggccccccaccgtcctccctcttgaagtgtaagcacttgagctgtaactgtggcagtgaaaggccgtaacgacttcccctcaatgacaggagcccccagaggactgaaaggagttataaaaatatacaaacatagatattttttattctggcatagttcatgtttttaagaaagtaattagtaattaattatctgacactgggtaagaactggaagattgtgggagacttataaattatataagacttataatttataagacatataaattatgactctatgtaaaatatcagtggggagaaacccctcattttccattgaaaattctggtaacttttaagtactttccaaaaatagagacaatttccactggtttaaataatggatgcggaaatgaacaaaagaccatccctaaataactgacgcatttagggtggctaataaaataaatgcagttttttgcaactctttctttttggttttgtttccttttttttctgaataataggggaaaaaaagttttgaattgcattgccccaagtcaggagaaagcacgcggcattctcttcaaggcccgttctgtcctacatcactggaaagcggctgagggcctgcctcagcttttctgcaatcgtttcgtaaaattgcacttgctgctccaggtacaggcggatgacactgttgtaatcatagatccggttactgtgaaagtgattcatctcagcttgcaacgcgtaagacatgatgctgactctcttcaccatgttctgtttgtcttgtagggtgattttacttgttgcaactagtttgtcactttctttcactttttctattgctcccttgtgagtgccaatgatgtcagggaagcagccaagaaaacctttatactcgtgattacattccatcaggaaatggagatctttctttggctgttctgccacgagactggcaatttcttcataagtctttcctgcttctgttattgcatcattgagatctgtttcaccttgatagccactggaactgaacactgtggccaaactctgcaaggcctttcctatcttctgatattccttgggtaatgggcccgtgcagcgcttccagtgctcctgccccaccgtcagcagctccttcacgccgtcatccatggccttggtgaacttccccacagcctcgcacttctgctctatttctactaagtccaagtcaggtgcctctggttccatggtggaaaatatcatgactcccgccagctcatctctctcggccttcctctttccagttttccattccttctcatctcggaaatttaggaactgctggaaaacttcactttctgagattactggatggcgacacatccctggtcatccaggcctgaagtctctccatgcgcattttgataaattcctcttcaaagcggcctgtgacttgtttgtctggaagagaagggattggaatggctgacccaaacttaaccaggagacgctcatataaccagtcaaagtgcttatacctgtggtttacagatcgattagtgttagtaggtgttagctgatattcgatgtagctctttagaccatacattttggagcctttcctgggatctgctaccacacagtcaaaagtagaggtaggataaacccacattgggccataatctccaacaatgatgggaattttct

SEQ ID NO: 58102 - DNA, 1266 bp, Homo sapiens
  misc_feature (1)...(1266): n = a,t,c or g
ttttttttaatttaatcagtaactttattataacaaaacctgtatattacccatttaaactcatgtgtaacattcagtgatgtgagctgtattaaacccaggtattagtgaaaatttgcattgtaaaacctggtaacagtagacatctatcgggtggtcagtaattcaaggacaccttttattttaaacaattttatataattcatatcaatatgcaaaattaccataaaagatacaaggattaatacatatttacatttttaggaaatagttactctgaggttgacagctgtcacttttctaaatatttacagaacaaactgaaagagacatttttcatagtcagaattgttcgttaagtcttgctttccagtaacaattatatagtgacttcttatgcccaacatgtgagagttaaagatcagtgggtgttnnnnnnnnnnnnnnnnnnnnnnnnnnnnnnnnnnnnnnnnnnnnnnnnnnnnnnnnnatgcgtgaactgaggagtatgagccagctgggcaacatagtgagacctcatctctagaaaaaattttaaaaatcagccaggtatggtggtgcatacctgtggtggtgtagtcccagctgcttgggaggctggagtaagatcacttgagcccaggcagtgagcttaagctgcagtgagccatgactgttcccactgtactctagcctgggtgacagaatgagaccctctctccaaaacaaataaaaccagtgggcatttaaaattgcattctcttagtatctcaaaattctaggtaacaagctgtagccccaagtttaaatgtaatatcaatcagcaaacatgctctaagctactggactgtaagaaagatatttactgaacatttaagacatcttggtaacccaagatcttgagtcaaacccattcttagatgcaaaatattatcagacagacactgggaatatcttcatgctttgtcaagtcaattccacagaataaacaaaatggactggtataattgttagcattaatattggggttcttgtgtgctctatggcataccagggagttcccactatgtatgttttgtttatggaactagagaaactcacctgaacactttgggactggattcaatataggacaaaggatttactcaaagtttgcttagtaaaacaaactggaagaagaacactttttctaaaatgtacctggacagtaatcaatcaatcagactgttgtaaattttagtaaaatgcagacttcagagaaaatac

SEQ ID NO: 58103 - DNA, 620 bp, Homo sapiens
  misc_feature (1)...(620): n = a,t,c or g
cttccgttatcacatgattacgaatttaatacgactcactatagggaatttggccctcgaggccaagaattcggcacgagcaatgaagccgagtgaatgggggctgaatgtgcgagtccatagctgaagaggagcgccagatggtggaggaatacacttatttatgaaactgtcttgagttcttcttgaattgccagttttcagcctcctcatgcctccgtctcctttagacgacagggtagtagtggcactatctaggcccgtccgacctcaggatctcaacctttgtttagactctagttaccttggctctgccaacccaggcagtaacagccaccctcctgtcatcgccaccaccgttgtgtccctcaaggctgcgaatctgacgtatatgccctcatccagcggctctgcccgctcgctgaattgtggatgcagcagtgccagctgctgcactgtggcaacctacgacaaggacaatcaggccaaaccaagccattgccgctggaccaccacactgccatggaactctaccacctgcctgttaccagatggtcaacaatatgagatncagcttctaggccataangtggggtgggaaccctgtntaagggacccca

SEQ ID NO: 58104 - DNA, 1531 bp, Homo sapiens
tttttttttttttttaaattatttttattttttgatgaaaacaagaaatacggtagtgacactttatttttccttcaagcacatgggagaagacaaaagtactaaatgatcattgagtttgacagagaaattctactggtacttacactgcttaggaacataaatgtcaagtacattactagggcaagaaatatcaagtaagacaacagagtcgtatttttctttttgaggttattttcacaagacatagctataatttgtaaaatattcagactattgaaagatcacattcaaattatatttctaagaatagagccatatatgaacagagagcaaaacaagctaatacattaatgaatattcactgaattcttcatactgcacaggacacaaatttggtatttttgcacatgttgtcaattataagcaaaaagcaggcctgtaaacatcaattttgtcataggctgaaacagagaaaggaaatggattttactcaaaaacagtgacataaggagcatataccattaatcttccacacatataaaggtcactcctaggataattgagagaaaacatcgacttacattttgtttacaaaaatctactggtgaattcaaggacttaggaaaaattgaaggaaaatcttcctccaagcatgctatttaaaccccagcccctcttccctggagagcacctcaggggcctcccctcccacccctgatcctgcaggttctttcctgtgagcctttccaaacccacgccacagcaggctcattcctgctctggacttttactcagtttcccaacctagattaacctctccactgtgtgtgttcagacctcctaaaccctcaggtagcttagggcaaggcccttcaaaaccaaaggggaaaagggtgatggtggatggtctttatcaccacacatgatcataactaagccttgacggcatcactgtcccacctactggaacttgtccgtgaaaatccacacagatgctgcacatccccttatcccctacaaggaggctggagatcttccacaatgcaggctgcagcctgcttcttcatttgttaggagcagggaaggaaatgcagaagctgagaaatgagggccaagaaagccaggcagtaggatggagacccaagggacatcagggcagaaacaaaatagtacaaaggagaagagtgacctacaaaatgctaccctagaagcagtccaaggcccaaaaaagaatttccatctttagaaaagtggagtgaggctaagttttggttgcctttgctcacatcacaaaggcctttgcctttgacccgtcctgaacccatcactgtgaggcccttctctctctttccagcttctcaaactaaaaactcaagaaatacacaggttttggtagaatggatggggtaaaaagataaatatgtcaaaatctgcctaatttaacactgcctataactaaacaattaacctataggtctccctttgaaactttcagaccttgctaaaagaagtggggtggaggaataag

SEQ ID NO: 58105 - DNA, 1678 bp, Homo sapiens
tcgcggtcgcgagccatggaggaggaggcatcgtccccggggctgggctgcagcaagccgcacctggagaagctgaccctggggcatcacgcgcatcctagaatcttccccaggtgtgactgaagtgaccatcatagaaaagcctcctgctgaacgtcatatgatttcttcctgggaacaaaagaataactgtgtgatgcctgaagatgtgaagaacttttacctgatgaccaatggcttccacatgacatggagtgtgaagctggatgagcacatcattccactgggaagcatgggcaattaacagcatctcaaaactgacttcagcttcacccagtcttccatgttattcactttcctaattgcacccactttgggcagacctgggaggacgatacacatgaagccagtgcatgatcagccagagaagcctcactttgactctcgcagtgtgatatttgagctggattcatgcaatggcagtgggaaagtttgccttgtctacaaaagtgggaaaccagcattagcagaagacactgagatctggttcctggacagagcgttatactggcattttctcacagacacctttactgcctattaccgcctgctcatcacccacctgggcctgccccagtggcaatatgccttcaccagctatggcattagcccacaggccaagcaatggttcagcatgtataaacctatcacctacaacacaaacctgctcacagaagagaccgactcctttgtgaataagctagatcccagcaaagtgtttaagagcaagaacaagatcgtaatcccaaaaaagaaagggcctgtgcagcctgcaggtggccagaaagggccctcagggaccctccggtccctccacttcctccacttctaaatcctcctctggctctggaaaccccacccggaagtgagcacccctccctccaactccctaccagctccagagtggtggtttccatgcacagatggccctaggggtgacctccagttttgcgtgtggaccgtaggcctctttctagttgaatgaccaaaattgtaaggcttttagtcccaccgacattagccagggttcgtagtgaggcctccagagcaggttgtgctgtcccctgcctctggaagcaatggggaatttggaatcttgtgtaagtgcccaaataagtctgagtgctttcctcttcttcaacactcaaccctcaatcccttagcactgattgattagagaggtcccccaaagaaaccactggttttgacccatgaagcattagaactgcattgttcattcaggagccactagtcacatatgactatttaaatttaaagtaaattgtatgaaaaattcatttcttcaattgcattagccacattttgagtattcatgtggctggtagattctgtattagcacaaagatatggaacatttccatcacccacagaaagttctgttggacagcactgcattagaatattttcatactgctcttcctcaattaatttttgttgttaatgttgatgtcttcattggatgggtcataatgttccatgaaacctctcaagtacacaattgtatgttctttgtatcccttaccacaaatatctcgctctgctcatttcttttgcagcttcctataaagtttgtcttcctcatcaaaaaaaaaaaaaa

SEQ ID NO: 58106 - DNA, 479 bp, Homo sapiens
gttgtttaagaacaacaaaatcaccaatgtcttccattttgagatgtgtatagttttgtaagcattagtgcttggtagcatattgtagtgccatgttaggggttagtgcatgagtctagtgattttaaacttcaggatgaattattgataataacaaatagtgtaaaaagagtggaaaatctaaaccttttctttttccataatgtctaaatctgttatattcttcctggggaaaagagattaaggcccaaaagactcatttatgaatagaaatgtggggtcaaaatctgagatactatatttgaggacatttcagctttccataaggtatctggaaaccagctgtctttgtgtcttatgaaacctcaagtcaaaatgagaccgcatttaattattctgctttgctctttttttggggtgggggggaagaaagagtttcactctgtcacccaggctggagtgcagtggcacaatctttg

SEQ ID NO: 58107 - DNA, 1122 bp, Homo sapiens
tacgaatttaatacgactcactatagggaatttggccctcgaggccaagaattcggcacgaggggattgcagataaccgcttcccgcacggggaaagtctaccctgcctgccactttctgctcgccgtcagcgccggagctcgccagcatgtctgtggtaccgcccaatcgctcgcagaccggctggccccggggggtcactcagttcggcaacaagtacatccagcagacgaagcccctcaccctggagcgcaccatcaacctgtaccctcttaccaattatacttttggtacaaaagagcccctctacgagaaggacagctctgttgcagccagatttcagcgcatgagggaagaatttgataaaattggaatgaggaggactgtagaaggggttctgattgtacatgagcaccggctaccccatgtgttactgctgcagctgggaacaactttcttcaaactacctggtggtgaacttaacccaggagaagatgaagttgaaggactaaaacgcttaatgacagagatactgggtcgtcaggatggagttttgcaagactgggtcattgacgattgcattggtaactggtggagaccaaattttgaacctcctcagtatccatatattcctgcacatattacaaagcctaaggaacataagaagttgtttctggttcagcttcaagaaaaagccttgtttgcagtccctaaaaattacaagctggtagctgcaccattgtttgaattgtatgacaatgcaccaggatatggacccatcatttctagtctccctcagctgttgagcaggttcaattttatttacaactgaattcctgcgcagtggagaagtaaaagaagccgcttgtctctgtgagcacagctatatacagtgtagaataaatgtggtagaaaagtttttttggttttatctcttttgcgatccctaaattgccacctttctattgtttgaatagtaaaattaatatgaagaactagatagtggtgtaaacaaatgtgataatgtttatttactttcggttctgctcatacttttttgtacaacattaaagaaaatggactttttttattttaatttctcattaaacttctaaaattctt

SEQ ID NO: 58108 - DNA, 1114 bp, Homo sapiens
aattcggcagaggccttgcttgagttcttcggaaagtctcatccacccccacatcgcctctttaggaagtcacttaatgttgggcttcattattcccacatccctttccttactacttgcctgcacttcttgagaaaaagactgcagaaaggagaggtggggctttcagtagaaacaagcaaaccgcagtccctgtggggggactctccaggaagaagggtaatttcctgcctccttaaattggctgctactgtcagttattttgctcccaaccccagagcttcacttgctccttcacttcccaagttccgcaagaaccgtgggcgacagttatggagaagcgtctgcaggaggctcagctgtacaaggaggaagggaaccagcgctaccgggaagggaagtaccgagatgctgtgagtaggtaccatcgagctctgcttcagctgcggggtctggatccgagtctgccctctccgttacctaatctcggacctcagggcccggccctcacgcctgaacaagaaaacatattgcataccacccagacagactgctataacaatctagctgcttgtctccttcagatggagcccgtgaactacgaacgagtgagagaatatagtcagaaagtcctggaacgacagcctgataatgccaaggccttgtatcgggccggagtggcctttttccatctgcaggactatgaccaggcccgccactacctcctggctgccgtgaataggcagcctaaagatgccaacgtccggcggtacctccagctgacacagtcagaactcagcagctaccatagaaaagagaagcagctctacctgggcatgtttggttaacaaagaagaaagatgctcctccagttgaacttaggtggaccattaaacatgcatgaaggagaaatctgagcctcagcaagagaaattaaccctatacctctgacccaggtggatttttgtttctagttctgcacaaacttcactacttagacagtctgagtctttttctgtctatccatctgtttatttctatacctttcaatacatgttattgttgcagatatttggcttgagaaatatattctgaaaacataaaaaaaaaaaaa

SEQ ID NO: 58109 - DNA, 1560 bp, Homo sapiens
  misc_feature (1)...(1560): n = a,t,c or g
caggtcctggctgagagccgcgtgcagaggagcatccgcctggtgtccgtgctggagctgctgagagctccctacgtccgctggcaggtggtcaccgtgattgtcaccatggcctgctaccagctctgtggcctcaatgcaatttggttctataccaacagcatctttggaaaagctgggatccctccggcaaagatcccatacgtcaccttgagtacagggggcatcgagactttggctgccgtcttctctggtttggtcattgagcacctgggacggagacccctcctcattggtggctttgggctcatgggcctcttctttgggaccctcaccatcacgctgaccctgcaggaccacgccccctgggtcccctacctgagtatcgtgggcattctggccatcatcgcctctttctgcagtgggcangtggatcccgttcatcttgactggtgagttcttcaacaatctcagcggccggctgccttcatcaattgcaggaccgtcaactggtctcaactttgctgttgggctcctcttcccattcattcaggtgctatctacctgtattttgtgctgcctgagaccaaaaacagaacctatgcagaaatcagccaggcattttccaaaaggaacaaagcatacccaccagaagagaaaatcagactcagctgtcactgatggtaagataaatggaaggccttaacaagtttcctcctccccgttggacaattatgtcaaacacaggattgtctacatggatgatctcacttttcaggaaacttaaaatttacccattattgggaagcttaaatgaattgaagctatgcaagtcttttatattattaaatatttaaaagtaaacctgtactaatctaacattgcaactgtgttagcattattcacaactgaatctcccaaacccttctggaagctgcaaggaatcactctatgtttcagtagacccagcgttcttctatataggtagatgacctgccttcttcatgactcaacccatgatttcagaatgaaattggggaaatagtaggttaatgctttatcaaagaaaaatcaatttggtctgataggggactcaacggattagagatcacagactgaggttctagtcccagctttaccacaagcagccttgacctcgccctcaacctgggtcccagtgcctcaatgaccctaggcttccatccctgatataggctttcagaagtcagtggaaagattattcatagtgcctaagaaatgcctgtttccaatatttgaccttgtggatctcaggctttggagagcctaataccaacacaccagcctgcagattttgtctttcccaaactgtgttccaggaatgggctcaaaacttcagggctgacgctgtcctcaccccagactattagagtcctgtgtgctcacagagaacatgaagaaggagcaatgtgtagaagacttaactttctcataactgcagcagggactgaaaattgacctccatccaaatgaaaaataatgttgaggatgattctaaagctaaaccctaggcttggtggg

SEQ ID NO: 58110 - DNA, 1494 bp, Homo sapiens
attcggcacaggatgtcgtggcgctttaggggaagaagttggtgtttcgctgggccctggtactgaagacgcggtccgggtcgcccctagctgtttcctactcacccaaagccccgcacccgccttttctctctctcctctggcaggatgaggcgtgcaggcctgggtgaaggagtacctcctggcaactatgggaactatggctatgctaatagtgggtatagtgcctgtgaagaagaaaatgagaggctcactgaaagtctgagaagcaaagtaactgctataaaatctctttccattgaaataggccatgaagttaaaacccagaataaattattagctgaaatggattcacaatttgattccacaactggatttctaggtaaaactatgggcaaactgaagattttatccagagggagccaaacaaagctgctgtgctatatgatgctgttttctttatttgtcttttttatcatttattggattattaaactgaggtgatgcatgtaattgtgaatttggaatttgttccaacttaatggcttgcagtgcagtaccactttgataaaaatcagcatcaaaacattcccagtgttcaaatactgtggcattttccattgaaaattgctgaattttgcttattttataaatcacattagttaatacagtggtctttgaatactgtttcttaatgactcattttagcccctattttcaggggtagtgagagggtgtggctccactaatttccagtttgtttttctattgtttgccaactgtcagattaaatagcattataatattttgttgtaatcataaatgcaggtttatgtcccatgtaaggaaacttagtgggagagtaacagaatgcctggagagcctgactctgagctcttgaagtagtcagccagtttgtggtaaaatggtaattgaattttcctaactgcatcaactgtaatgatatactcccttctcctcctttatttagttaaaattgtaggctgatttctttttacctacaatcttcctaataatttttgatgataatgacccctcatttctttctgcccaaagacctcattctttaaataaaacttgttattttggcatatttctggtagggcccattgcacatgtgtatcagtatagttattatttcatattaactttatgaattctcttgacttggcttataatagttttatgatttttactacataggtagcacatttatccatttgtgacagaataatgtgaagttaagtaattactgaactttaaatggaaatagtatgcaagaaactcaggcattgaacttgaagataagagtattattgctttaatccagtgtatttgtttatggaaagaaaaacacaaaggcagactgttgagtaaaaaatattaaatattgttaaatattcctgtattttggaatttatccatttataggcttcaaaagtaaatttttaaataaaatatattagtcgacaa

SEQ ID NO: 58111 - DNA, 455 bp, Homo sapiens
gggggatttgttcacatatgggctcagcaacgcacaagtgaggtcagccatggcactaggtcattcccattttagccaaggtgcctctataggggtcagacatcatgtgcccagacctaaggtcaggaatgtcatatttttctgttaaaatcattttatttctgtgtatcttacctttaaatcattgtggtttactctgagattctgtagtcctaatattgtatcattgtgctgtctgcaaaacaacttgaatctattttgtttgcatcttttgttacatgtaacgcagctgtactttatgttctttgcaactgtttccattatgagaacgctgtgctatttacaaggttacatttttcttggccaggcgaggtggtcatgcctgtaatcccagcactttgggaggccaaggtgggcggatcacttgaggtaaagagttgagaccagcctggcta

SEQ ID NO: 58112 - DNA, 2122 bp, Homo sapiens
tcggcccagcatgagccagtcacctgtgttccaggagccgaatcagaaatgtcatcctcaggcacgccagacttacctgtcctactcaccgatttgaagattcaatatactaagatcttcataaacaatgaatggcatgattcagtgagtggcaagaaatttcctgtctttaatcctgcaactgaggaggagctctgccaggtagaagaaggagataaggaggatgttgacaaggcagtgaaggccgcaagacaggcttttcagattggatctccgtggcgtactatggatgcttccgagagggggcgactattatacaagttggctgatttaatcgaaagagatcgtctgctgctgggcgacaatggagtcaatgaatggtgggaaaactctattccaatgcatatctgaatgatttagcaggctgcatcaaaacattgcgctactgtgcaggttgggctgacaagatccagggccgtacaataccaattgatggaaatttttttacatatacaagacatgaacctattggtgtatgtggccaaatcattccttgggaatttcccgttggttatgctcatttgggaagataggggcctgcactgagctgtgggaaacacagtggttgtcaaaccaggcaggagccaaactcctctcactgctctccacgtgggcattctttaataaaagaggcagggtttcctcctggagtagtgaatattgttcctggttatgggcctacagcaggggcagccatttcttctcacatggatatagacaaagtagccttcacaggatcaacagaggttggcaagttgatcaaagaagctgccgggaaaagcaatctgaagagggtgaccctggagcttggaggaaagagcccttgcattgtgttagctgatgccgacttggacaatgctgttgaatttgcacaccatggggtattctaccaccagggccagtgttgtatagccgcatccaggatttttgtggaagaatcaatttatgatgagtttgttcgaaggagtgttgagcgggctaagaagtatatccttggaaatcctctgaccccaggagtcactcaaggccctcagattgacaaggaacaatatgataaaatacttgacctcattgagagtgggaagaaagaaggggccaaactggaatgtggaggaggcccgtggggggaataaaggctactttgtccagcccacagtgttctctaatgttacagatgagatgcgcattgccaaagaggagatttttggaccagtgcagcaaatcatgaagtttaaatctttagatgacgtgatcaaaagagcaaacaatactttctatggcttatcagcaggagtgtttaccaaagacattgataaagccataacaatctcctctgctctgcaggcaggaacagtgtgggtgaattgctatggcgtggtaagtgcccagtgcccctttggtggattcaagatgtctggaaatggaagagaactgggagagtacggtttccatgaatatacagaggtcaaaacagtcacagtgaaaatctctcagaagaactcataaagaaaatacaagagtggagagaagctcttcaatagctaagcatctccttacagtcactaatatagtagattttaaagacaaaatttttcttttcttgatttttttaaacataagctaaatcatattagtattaatactacccatagaaaacttgacatgtagcttcttctgaaagaattatttgccttctgaaatgtgacccccaagtcctatcctaaataaaaaaagacaaattcggatgtatgatctctctagctttgtcatagttatgtgattttcctttgtagctacttttgcaggataataattttatagaaaaggaacagttgcatttagcttctttcccttagtgactcttgaagtacttaacatacacgttaactgcagagtaaattgctctgttcccagtagttataaagtccttggactgttttgaaaagtttcctaggatgtcatgtctgcttgtcaaaagaaataatccctgtaatatttagctgtaaactgaatataaagcttaataaaaacaaccttgcatgattcttaaaaaaaaaaaaaa

SEQ ID NO: 58113 - DNA, 1336 bp, Homo sapiens
ttttgcaaattagaattcttttaatataaaaaaaagtactaaaatacccacgtggttctgctgtgttatttgccctaaaggaagtgaggggcagagtgaagaatcccagtgcagctcagtgggcccagaaatgggcctttccgtaggctaaggcgtgcccactccacctccaccagacttctatcccctctgctgttcccagcccccaattcctgcagcaggaaaccccagtggtctggctttggcactgggagtagaaggcacctgaagggctggctgggtgagtgaggacaggtgacctttaaaaacaaaacgacaccgtggggtggggaagcaggtcatgcagctgtggcagctggcagggcccactcctccatggcacaggtgggcatgggatggccacttctccagaagtgaggaagcccagatcccaacagaatactttctcaaaattgtttttggtacgaaataaatggaaagaagatatggggtggggtgctgtggaggccgggccagccaccctccccagaccttagatcatagcgatgctctcgggggcacagttgaggtgggtggaggtgctgctgctcccggaggacttgcaggcccggcccaggggtaggctgcagtgcagccaccagtgtgtctgaggagactgccccaaactcgtagctgaaggtgccatagaaaatgaggatatcgatgacacacacccactcacacagggctgccccatgttgcagctgagaactctcatggacaaagaagactccacctaaaacgaggctgaaagttgccaaccaccaagaggcccgcagcgttggtgcagcctgtgatgagtgccgtggtgttaacccaagagtgccgactctgctccaggagctgcccgtagcgcaggaggcagatcagggccaccatgaaagcacccatgttgccaatgaggctgaagaggcagctttctgggggataggagccacacttgctaatgagggggacatcgtccagggtgcagcaggtcttgggacccccttgctcagcagggtcaggagggcaggactcgttgtaggaccagttctccacagggcatacatggtggttcatcacagccatggcatacacagtccatatgccagtgatggagaacgctgacaggctgacaggcaggaggatccaggcggtcatgagggaggggagccagggtggtggtggtgttggggggaggacaagaggtagatggggaagtgggggcggaccagctaccttgagatgtttctgccacaaccatcagctgtcctggcctccccggagcgccccgccgccgccgcaccctgctcgc

SEQ ID NO: 58114 - DNA, 343 bp, Homo sapiens; identical to SEQ ID NO: 15206

SEQ ID NO: 58115 - DNA, 1284 bp, Homo sapiens
gccgccttgtctctgggcgcggccatgttggaggctccgggcccgagtgatggctgcgagctcagcaaccccagcgccagcagagtcagctgtgccgggcagatgctggaagtgcagccaggattgtatttcggtggggccgcggccgtcgcggagccagatcacctgagggaagcgggcatcacggccgtgctaacagtggactcggaggagcccagcttcaaggcggggccctggggtcgaggatctatggcgcctcttcgtgccagcgctggacaaacccgagacggacctactcagccatctggaccggtgcgtggccttcatcggtcaggcccgcgctgagggccgtgcggtgttggtgcactggtctctttttcagtcatgcaggagtcagtcgaagtgtggccataataactgcttttctcatgaagactgaccaacttccctttgaaaaagcctatgaaaagctccagattctcaaaccagaggctaagatgaatgaggggtttgagtggcaactgaaattataccaggcaatgggatacgaagggatacctctagtgcaatttataagcaatatcgtttacaaaaggttacagagaagtatccagaattgcagaatttacctcaagaactctttgctgttgacccaactactgtttcacaaggattgaaagatgaggttctctagaagtgtagaaagtgcaggcgatcattatttcgaagttctagtattctggatcaccgtgaaggaagtggacctatagcctttgcccacaagagaatgacaccatcttccatgcttaccacagggaggcaagctcaatgtacatcttatttcattgaacctgtacagtggatggaatctgctttgttgggagtgatggatggacagcttctttgcccaaaatgcagtgccaagttgggttccttcaactggtatggtgaacagtgctcttgtggtaggtggataacacctgcttttcaaatacataagaatagagtggatgaaatgaaaatattgcctgttttgggatcacaaacaggaaaaatatgaacatgatattttatagcttgggaagaaacttgcagatgatatgtgctgcctttgcttcttatcattcatggcagattgtttgtgctttcaacatttcatttgaaatgggagaagataaaatcacttgatgtaacctggaaactatgctttacatggcaatcaaagccttttgatcatgtacattttatttgatattaaaatcttttataaccagaaaaaaaaaa

SEQ ID NO: 58116 - DNA, 639 bp, Homo sapiens
aataattggaatcactttttagacttttcaagttaccttccttgggaagtttgtgcagtgttatagtttagtttagctcctcttacagggtaatggtttgctagtttaaaactgtaaccaaacgaactggtcagacaacatatatctaaaacacttaaaatgttaggaagtttgggaatgttataacctaaacgtttttgctggtaactttttgttatttatagatatttgtgtatttaacatacatacttcaggaaatatatgcctttcctaaaacttaaccatgcattcaataccatggcctatctatagaattgaatattttggaccatgttatctgtggcacagtcagtgctgtgtttgaggtaaatgcagtaacggttagttttctactttgtcttatagaaggtagaaaccatgtgtatgttatgtttgtctataaaagaaaaaatactaatattaaataatttcttacgactctgagtcactcacttatttttccaataaattgatattgtacattcctagtgccattaggtatgtatgtatgtaacttttacagtttttcagctgaaagttgtaagtatttttttttttttggatcggggctctttaatctcattttaatttccctttgtt

SEQ ID NO: 58117 - DNA, 1962 bp, Homo sapiens
tttttagaaaagaatatgacattttattttcacttatggacatacagtacatgaatttagaaataaaatcgtcgcaggattctgaaatactgataccttaagatctaacacactgatattagtccattccctacaaagcagccacattagcagttcagatttggtctttgttgtagctgttgacattaagttctttaagtgaaatgcccagcagcatttaaataatattttacagcagacatgaactaagtttcaatattccatctttggaacaaattatgcttatttacatgttaacaggtggctatatttacttaccctattgtgagtttaatgactgattttaaactacagagggttttccagctattatttcctttagtttctaaaagtaacgacttatattaatgttttataaaagatagtgatgaaaaaaaggtaatgctgaaataaaggcgcttttagaaatatttaaggacaacataaggtattaatattggaaaaaaactgtacatattttcaagcacaacactgaaatattgcagcagtgtttaactgaattgttttaaaatagtggtaattatactaccttacataccgttctaatatttaaatctcttaattacaatttgaatatacaatctgacttacaattagaactatgcacagtttccgaagcatatttttcaggtttgtttttgcacaaaaattaacgttaagttggtccttgatttggagtactataactacctggaaagcactaagttttagacacattcattgatagccaaaaaaatcccttgacagagtgaaaaaacatcaagagtaccatgcgtgaaaaagcagctgttaccctccaagtgcaatatgaaatctagaacaagaccctctcagaggcctgcgtgtctcaatgagtgaccctcaaagaaaccaaaatgtatacgaggaagtagctgaccagtcatgggcatcttccacattgggataatctttaaaacagaggcagctttggacctctagcgtaagagatagactttacattctttgattttatttacacttttttaaaaagataaagtatatctgaattctctcatcacacctaaactgctggtgcactggcagttcaagctgattaaagtcatgaggcagcccaccagagactttaaagaaccccagacctcatcctcctctttcctatcatgaagtcacagactgtctcatcaaactacttgatgtctgtaagagacttacattttataaacacagttagcttattactgaacttttaagaaaagtccaaagatgtgtggaaaagtatgccctgctaatagtgaccgcttctacaatgacaataatgaaactggagcctacaaaaataattttgcctgttttaaataatgaaaggagctaggtttttaaaatatattacttattctgcaacagctaattaaattgacaatcaatagaatacaatgaacagattcagcttccattctgcaagctgaattcaggttatattttaattacagaatagcttcaaattataaatctaactgtcccaatagtaaagagaccatcaaggcagtaacatcagatcaattctgtcatcatcctgcatggagcacaagatgtgcttttggataaaggcattaaaaagaccttgggctgatgtggaaagcgggtcagtaaagactccagttctgcacaatggaatcttccaagccaagccgctttccacaaatacaaattcagtctatcttttctttctggaccagtctgggagcatcgacaaaatctttgccattgtaaagaatgataaaaaatgttccaatgcttgcaactccccagaagagcacataggccagtgtttctgtccaagtgtcaccagccataagcaaacagataatgcacattgaaaaggcaacaaccatgataataggcaaagccaggaatttccag

SEQ ID NO: 58118 - DNA, 377 bp, Homo sapiens; identical to SEQ ID NO: 25095

SEQ ID NO: 58119 - DNA, 368 bp, Homo sapiens; identical to SEQ ID NO: 25097

SEQ ID NO: 58120 - DNA, 1034 bp, Homo sapiens
cgccattcctgtaatggctgcttcctagaaggtcgtgtcacgtggaacctcttaatctcagcatccggagctccaggaagggaaaatttcaagtcagatagaattctatatataccatttctttggaaccttcagccctcaagattccaacatcatgacctcagtttcaacacagttgtccttagtcctcatgtcactgcttttggtgctgcctgttgtggaagcagtagaagccggtgatgcaatcgcccttttgttaggtgtggttctcagcattacagggcatttgtgcctggcttggggggtatatggcacggaaaaaggaaatgggacagatgtggactttgaaaggcctactgagtcaaacctcaccctgaaaacctttgcgctttagaggctaaacctgagatttggtgtgtgaaaggttccaagaatcagtaaataagggagtttcacatttttcattgtttccatgaaatggcaacaaacatacatttataaattgaaaaaaaaatgttttctttacaacaaataatgcacagaaaaatgcagcctataatttgctagttaggtagtcaaagaagtaagatggctgaaatttacataagtaatatttcataatcttagaattctctcaaagcatgtgaaataggaagaaggaagttcttgcccagaatcttaggaaatcaccactgttcggttataatcactgcctcctgaatcgttgaggagtcttttaaattagatttttgttttgttgtctcccaagttaatattatatttagatatcagagagtcaggtaaaaaggaaaacttttatctctagggaaaaaacatttagaaaaatgtattcagtgtatctaatactgaaatgcggaaaaaatttaatgttaaaacaaaaactatagacattgacatggaaaagagatttaatgttttgaaaaaaaactttatattaactgagtaacatcctcctgataagaagtactatattaaatataaacccattatgttataagttaaaaaaaaaaaaa

SEQ ID NO: 58121 - DNA, 4513 bp, Homo sapiens
gcggcacgagggaggtttgaattttctcggagaaagacaggccggccacgaggaaaacagaaacaagccgcagcaacatctaagcccttgaaaggatcctgagagaggggggaaagggaaaacagcagccaccagcccaaccacttgtgtcttctgccccttcccacctatcttgcccaccccaccagcccacgctgcttgggacttgaaatctgtggccgaaggaccggtcactacataacttcaaaaataatcaaccaccctcccttcccaaaccacccaaattcactcatccagcgtttacttttttgaatccactcagaacttttttctgcgacccccctccctaaatggagttgggtgggggggaaatgaatactggagttgggcctttattttttaaaaagactttttgatccaatgagggccccctaaataattgagttttgggtcctggttggttgttttattttttttcctccaaaattttaccccctcccccctgagcccgaggtgctgacgtcgcaaaaaaattggataaaaccaccatcatgggttcgggtcccatagaccccaaagaacttctcaagggcctggacagcttccttaaccgagatggggaagtcaaaagtgtggatgggatttccaagatcttcagtttgatgaaggaagcacgaaagatggtgagtcgatgcacttacttgaacattctcctgcagacccgttcaccagaaatattggtcaaatttattgacgttggcggctacaaacttcttaacaattggctgacgtattcaaagacaaccaacaacattcccctcctccagcaaattctactgaccctgcagcatttaccgctcactgtagaccatctcaagcagaacaacacagctaaactggtgaagcagctgagcaagtcaagtgaggatgaagagctccggaaattggcctcagtccttgtcagcgactggatggctgtcatccgctctcagagcagtacccagcctgctgagaaagataagaagaaacgtaaagatgaaggaaaaagtcgaactacccttcctgagcgacctttgacagaggtgaaggctgagacccgggctgaggaggccccagagaagaagagggagaagcccaagtctcttcgcaccacagcacccagtcatgccaagttccgttccactggactagagctggagacaccatccttggtgcctgtgaagaagaatgccagcacagtggtggtttctgacaagtacaaccttaaacccatccccctcaaacgtcagagcaacgtagctgctccaggagatgccactccccctgcagagaagaaatacaagccactcaacacaacacctaatgccaccaaagagatcaaagtgaagatcatcccgccacagcctatggagggcctgggctttctggatgctcttaattcagcccctgttccaggcatcaaaattaagaagaaaaaaaaagtactgtcacctacggctgccaagccaagcccctttgaagggaaaacgagcacagaaccaagcacagccaaaccttcttccccagaaccagcaccaccttctgaggcaatggacgcagaccgtccaggcaccccggttccccctgttgaagtcccggagctcatggatacagcctctttggagccaggagctctggatgccaagccagtggagagtcctggagatcctaaccaactgacccggaaaggcaggaagaggaaaagtgtgacatggcctgaggaaggcaaactgagagaatatttctattttgaattggatgaaactgaacgagtaaatgtgaataagatcaaggactttggtgaggcggctaagcgagagatactgtcagaccgacatgcatttgagacagcgcggcgtctgagccatgataacatggaggagaaggtgccctgggtgtgcccccggcccctggttctgccctcacctcttgtcacccctggaagcaatagtcaggagcgatatatccaggctgagcgggagaagggaatccttcaggagctcttcctgaacaaggagagtcctcatgagcctgatcctgagccctacgagcccataccccctaaactcatccccctagatgaggagtgttccatggatgagactccgtatgttgagactctggaacctggggggtcaggtggctcacctgatggggcaggaggctccaagttgcctccagttctggccaatcttatgggaagcatgggtgctggaaagggcccccaaggccctggaggaggaggcattaatgtccaagagatcctcacctccatcatgggtagcccaaacagtcatccttcagaggaactactgaaacaaccagactattcggacaagatcaagcagatgctggtgccacatggactcctaggccctggcccaatagccaatggtttcccaccagggggtcctgggggccccaagggcatgcagcactttccccctggacctgggggacctatgccaggtccccatggaggccctggtgggccagtgggtccacgtcttctgggtcctccaccccctccccggggaggtgatcccttctgggatggcccgggcgaccctatgcggggtggcccaatgcgggggggtccaggaccaggtcctggaccataccatagaggccgaggtggccgaggaggaaacgaacctcctcctcctcctcctccattccgaggcgccagaggaggtcgctctggaggaggacccccaaatggacgagggggccctggtgggggcatggttggaggtggtgggcatcgtcctcacgaaggccctggtgggggcatgggcaacagcagtggacatcgtccccacgaaggccctggcggtggcatgggaagtgggcatcgcccccatgaaggccctggtggtagcatgggtgggggtggaggacatcgtccccacgaaggccctggcggtggcatcagtggtggcagtggccatcgtccccatgaaggccctggcggaggaatgggtgccggtggtggacatcgcccccacgaaggccctggcggaagcatgggtggaagtggtggacatcgtccccatgaaggccctggacacggggggccccatggccaccggcttcatgatgtccctggtcaccgaggccatgaccatcgagggcagccacctcatgagcaccgtggccatgatggtcctggccacgggggagggggccaccgagggcacgatggaggccacagccatggaggagacatgtcaaaccgccctgtctgccgacatttcatgatgaagggcaactgccgctatgagaacaactgtgccttctaccacccgggtgtcaatgggccccccctgccctagggaccatttgcctgccctgttcacacaacccctgtggactgcagcctcgctctttccaccctgttatggcttctgtgaggcccattttcccttttccccagctgatgaggagccggccccctcagttcccacttgcttgggttcctgggggttttctgatcactggtgcgcattgatgtacatattttcctccagtctggggaggagagagactggaaacgttcctggactgctgaagaggagacccagttggcttcactttttgagaagattcgccctgtaccccaaacccctttccagtattacccttaatgcttgagaacctaaagctggttatcctggcgaacacccctacccttctattgcgggtccccacatgcacacagaactctgacacaggatcagctgcacttaagaaatcatcccagctaagttcattattcctcatggggtggggagatgctgaaaggggtattgtatatcccactgcactgagagggctcaatcagctggatttgagttctggaacacacatcatccccacccctcccccagcgtgggctcaccattcttagtcctttctcaagtgggaccttcaactttctgtgaacacccagtctgcgtcctgggtctgctaggttcgatgatggcgaactcgtatctgcatccggtgcaagttttagctggcagaggtgagaccggtggtgctggtctgcctttgccaactatagccagtctggagacttgataaaatacttcagtgagaccagcttctcatcaacttgggcccggcgtgctgggcctgaaagtcacactacatgcactgcctttgggagtcagctcactccctgctcccacctggaaccttgccagcgtgaaggaggcttccaggtacttcaccctgtcaaccacctctgaatccccaccaggcgccttcctgggtggattcaacaagatgattttgccctttcccagttctctccttcactttggcatcagttgttttctatgaaaacagtggattggttgggttttgtgcagggtcttgggttagagccaaaatggatttgaggatgagtatttttttttttggttttgtatattttgtacattaataataaacagtggaaagagaaagc

SEQ ID NO: 58122 - DNA, 513 bp, Homo sapiens
gttcctggttgagtgggtaactagatgcattgaatagaatgagtgaacacacggccatacgctgggctgaagaacttggagtaagaacatgtaagaacttctgagtgatgctctcaaattataaaagctggattttaagaaaaattgaaagactttgtcataattcacttgagagaattaagtatttaccaagagagatgagtgtacagaaaatgatccaaatttaactctgagaattgaacagtgtctcatgctaaggaatttcttgtgtggctagtatttttatactcatttatttttttggctacgctctaatcgtggttttcttacaaggtggattttgggaaaaaaaatcacagtttttttagtaatgcaatcgatgtaaatataactagttagtgagcattaagtgtaagttatgctttctctattggtttaactaattggcatctccaattcagaacctatcagaaatatcagacactgtgactcaaaggaaaaccaagtgggagc

SEQ ID NO: 58123 - DNA, 5153 bp, Homo sapiens
gtgttttttttgttttgtttttgtttaaagggaaatcattcatttattaaggatcgcaagacaacatcttaatttctgtagtacgatttaaatgttttacttctttgataaagcagagtacaatagaaaaaaaacaattagtttccagtaatatctatatctctaatcagaattaagtcttccaagacatattacctggaaataaaagcctgttacaataagcaaagcttcaaccagagcggctacttttcgtgccaggaaaaagttcatccctataggaggaatgatgtgctatgtaaaatggctgtaaggtcacagccttgagggcattggaagtatattatcctattccacattaagtatttcagcgaatttcaaacatcagtttatctgcaaccatgctggcaacctttaactgatatttcaatcaaccggtaaaaaataaattaagaaatcccttcacggatattccgtgatttacactgttaaaaggtacactgttcattaacatgtaattctggttcagaattacctttgagactccttggctccaaatttgggtaacagtaagaatcctccagaaattcaagttcttattaatcaataatttgtcagctaggatacattcaggcatcagctggcaactaccggataggtgcacagcctcagcgctttggaaagacataatctagaacactactagcagacaaaaaattacctgcaactggatagcgtaagtgcagtatagcgagacaaaacatatattcatatgttgggcttgtttaagcctcaaaccctcgaccctttgttgagatcccataattttattcctatgattttaataactcaagttccaggaggactataagtctaatttgtactccaaaccaaacagcagtgcagttcgctactactgaggctgaatctgtacagacttcaagaccaagtccagaagacagttattatctaaaaaataattacttgaatacatagatgatccttcagagattttacctataacctatttcttgatgaaggttatttaatgcactggagataactgtgacttactgatcaaatacttgaatacttatacttacctgggatttcatttctgctgaaagaaataggaagaacaggactcacttaaaaaaaaaaaaaaaaaactttagaaaggaaggtaaaaatcttacacacactatcacttttggaagcagcatagaaggggcagtcaagggtaaaacactggtgaaacaggtcaaaattaggaaaaaaaaaaaaactatattattatcaatgacagtaccacaactgtgcccttgataattagtaatcactcctaaaaatcttcatttggcaccagatggtgtgtttaaaacaccctaggatgttttgaatcaggcttgattttgttagttgagttacaggagaattttaagggtgagggtatgggggtcagggaagaaaaggaaatgggaaatggaccagaaaaaatcttgagtcatcatctaaatcaacaaagcactgatagctccaaatattaggtcagacactaaaacgactgatataggctcaagtggtttataaaacctataaaaagactacaccagcaaagtccctgtcaatctgtcagagttcagaaactaaaacagggagtaacattttagcttaaaaccttatctcaagagaatcatatacacttcacatgaataaaaatacctgaaaccaaacatttttaaaagctccagtacccaaaatataaagaaaaaaaaatccagaagactgaatcaatccatggaatcacaaagcggccggacaatctatatctcccctccacactaaccatcccatggaagaccaagggagatcagaccttccagacctatgcaccatctggtcgccgcaaaattctacggagattccttgtggaaaagcagtttcccatcttttgtgtctctccctaccatgcaggaagcaagtctggctgtgctattctattaccattatatatcacccatctgcaacaaggtactgtacagacaagtaagaagtatgttatctagttccctttcccccagaaggttgaggctcaggtataggggtaattctcctgtgcagtctttatttatgctgactcagtgacttcaacaggcttaatcatgtggtcaggtttgttgccagctgcataatgctcccacatctgtagatagagccgctctagttccattgtgtattgtttggtgttgaacagagggctagatattctttgcttccagactttgccacgaactttcttcaggtattctagatcagttcccagcttcacagctatgtcttcatattcttgtctgtttttagcaataagctcaagacaacctaagcaagtgagctgggatgctgcaactcgagaagcaagagtctctcctggcatagtcaccatgggggtccctgcccagaggacatccatccctgtggtgtgcccattacagagtggagtgtccaagcagacatcagccagctggcctctcctgacgtgttcctctttaggagcaacaggtgaaaaaatgatacggttctggggcaggcccatgttttgtgcatactgttgaatattaggttctcctactgctggaaaacgcaacagccagagtacactattgggaacacgcttcagaatgtttgcccacatctgcaaagtagaagggtcaattttatacaactgattaaagttacagtatacgatggcatcttctggtaacccgtactgagaacgggtggttacaataatggtacggggaacctcctctccagttgcagccttattgttgatctgagtagttgccagtccattgctaatactgaatccattaattgttatttgaatctgtcctcggttaatcatttcaataactgcttctgcaatagtattcataggaataacaggcatattaagagctgtgttactgctatctgcattgtctcctccatcaggacacttcatcttgacaattttcacatctggtagactatcaagaaatgctttgaggtcgatgccattcagaactatccgattgtcataaatgtgcccattggacttaaaatcgatgactgcttttttcttcaggtgagggaacatattagcatgatcaccaataaaaaaagtgtggggcatataagccaatttctcggaatactgctcagcaacttcagctggcgaagtttcctgatcagtgataatataatccatgaaaagcgcaccactcgtcccagggtatcccagccacattgcctgaataggagctggcctgagagcaaaaagctcatttcgagcgcccttagtatagccattcatatttacaaggatatgaattccatcctgatggatgcgatcagctgcttttccattgcatggaatctgagaaagatcaatgaaatgattggcttctgccatcaccttcactcggaagtttgtgccatcgtctggcatcagggcataacagaacacctcaaatttatcaggattgtgcatgcctggaatagactgcataaggtgagaagtaggatgattcccaaagtcggaactcacatatcctacacgcagccgaccatcactgagcttcaagtcttttggatgttcatatggtggtttatgaagaacattaatcttatctaagcacaggttgccgtgcctctcagcaatagccttcctgaagccatgagaaagaggatatagcatactatgatgaggatgcacagaaggcaacctattcttctctaactggtcagccacaatactgaccaacttcttcattcgctcatcatagtctgtccaatcacagacaatctgcaggcaatgagccaagttacaataagcatcaggaaaatcaggcttaagtttcagagccgtgcggtaagaagctatggcttctggaatattccctgaatccttatgaatggaagccagattgctatgtgcatctgcaaatgcaggattaatttggatggcacgcgtataacactgcaaggctccctgaacatcctgcatctcctttagagtgtttcccatattagagtaggcatcagcaaaggtaggactgattcgaatagcctccttataatgcatcagagcttcctgcagttttccctgctgctgcagtacacttgctaaatttgaatgggcagcagcaaactctgggaagacttctaatgctttacgatacaagcgaactgcctcttcaatgtttccctgttctcgtttgatattggctaggttattcagagagtctgcatgggtgggacacagacggagagctgtattataacaatcttctgcttcagcaacactgcccttctctttgagagcattggctaggttgcagtaagcatcagggaaatgtggttgtagttcgatagcccgcctgtaggtgtctattgccagatctatcaggccttgctcatagtatacacaagccaggttgccgtgcaccactgcgtgatttggactcaaacttagggcacgaagataagctgccacagctctgtcaaaaatgcgtgcctctttcaagacatttcctaaattgatataagcatccagaaagtttgggtcaagggtgacagccttttcaaagtgatgaattgcaagccaaatttccccttgtgcattgaaaacacagccaagattactccaagctactgcaaagttcggttgcgtctcaattgctttcaaataacatgccttaggaggggttaatgaaagaagatgggagggaaaggaggtaaagggaaaggggaaaatttgtaaagggaaaaaaaaaagattggggggagggggggaagaaggtgatatcattattccttctctgaccagccaaaagtgaccctgcagcataggctcgcttgcgccaaaactaatgcgctgccacagctggctgctcctgcgcctgcgccaccagaacccaagtgcaaaccaccatgttcagttctgccaaccaaagaccaacccttacactgggacttaactgggaagtcagttgctataaggctctatgctggagttctcttatccaaacaactacgggcccttgtcatgttttcaagtgctacctagagggcgcaacttgaggccgagttttcctacccccactgtttccgga

SEQ ID NO: 58124 - DNA, 1188 bp, Homo sapiens
atgacaagtctggtgttggtgaaatccctcaagcttttgtttgtctgggaaagtctttttttctccttcatatttgatggatatttttgctggatatactattctagggtaaaaggttttttcccttcagcactttaaatatgtcatgccactctctcctggcctgtaaggtttccactgaaaagtctgctgccagatgtattggagctccattgtatgttatttgtttgttttctcttttgagatgcttttaggatcctttctttatatttggcttttgggagtttgattattaaatgccttgaggtaatctttgagttaaatctgtttggtgttctataaccttcttgtacttgaatattgatatctttctctaggtttgggaagttctctgttattatccctttgaataaactttctaccccagtctctttctctacctcctctttaaggccaataactcttagatttgcccttttgagggtattttctagatcttgtaggtgcacttaatactcttttctgcttttctcctttgtttcctctgactgtgtattttcaaacagtctgtcttcaagctcactaattctttcttctgtttggtcaattctgctgttaagagactctgatgcattcttcagtatgccaattgcatttttcagctccagaatttctgcttgattctacttaatcgtttcaatctctttgttaaatttatctgaaaagattctgaattccttctctgtgttattttgaatttctttgactttcctcaaaaccgagttccttttgaattctctgtctgaaaggtcacatatctctgtttctccaggattggtccctggtgccttatttagttcatttggtgaggtcatgttttcctggatggtgttgatgcttgtggatgttcatcagtgtctgggcattgaagagttaggtatttattgtagtcttcacagtctgggcttgtttgtacccatctatcttcaggagattttctacaaattgaaaggtgactgatgatgagttccctaagcgtgtagtcagtcactgcagctgtttcagcactagagggcagtctaagccaagttacactgtgactatcttgtagacttctagatatccagccctgatgtacttggggaggatcagagagaatgccctgggggttcccaggcaaagtccctt

SEQ ID NO: 58125 - DNA, 556 bp, Homo sapiens; identical to SEQ ID NO: 25112
  misc_feature (1)...(556): n = a,t,c or g

SEQ ID NO: 58126 - DNA, 963 bp, Homo sapiens
tatgacatgattacgaatttaatacgactcactatagggaatttggccctcgaggccaagaattcggcacgagaaaagacatccggggatcatcccgatgatcggcttaatctgcctgggcatgggcagcgctgcgctttacttgctgcgactcgcccttcgcagccccgacgtctggtaaagctgggacagaaagaacaacccggagccctgggaaccgcctgagccccaatgaccaatacaagttccttgcagtttccactgactataagaagctgaagaaggaccggccagacttctaaggccaggcctgggctggccagtgccatggcaaggccacagccaggccaggcccatccacttcttccactcctccccgcaggccccaaggcattcacttccggccaccctgttcccgctactgcttacacaggccgggttcccacgcagagggggaggctgctccacccctactctcctcccttgctcccagcagcggaagcgcctctgacccttggcttgagtcccacgtgggggaggaggaggcaggcagcaccagccaggggtccaccaagagcccagaccagcccctctgccctcctacccgggcctcgaagggtgttggcaacaggctacgtgttgagcgtggcctacgtgagccaacaagaagcaggggcctctgagtgccaagcgacgtggcgggctccacgttagcccatgctctgagagccagcccaggggcggcgctgctcagcttgggctggtccagggcctgcccaggctggggcacctttgcctcctgaggcgcagcgcactcctcccctgcccaagcctactgcctcccgtgccgccagtaccccctccagccccacacctgggcctccccctgccactcccctcccttgctcccctctgtccccagggatcaaacagaagccgccgtgggcaaaatacaatttcatt

SEQ ID NO: 58127 - DNA, 940 bp, Homo sapiens
  misc_feature (1)...(940): n = a,t,c or g
cacacacaaactctcaagtggcctaattccctctcaccaaaccaatcacaatacagataaaagagaataacttgtgttcatttttgtacaaacaaaaaagatataaattgtgaatgatgcatgatttttaattacaagtaaactgggcaaatgcttctgcattatttaaagctaaaaggtgatcagtggaaactttcctctgttagtactctaatactttttatatttatcggctcactacaacctgtgcctaccaggttcaagcgattctcctgtctcagccacctgagtagccgagaccacaggcacgcactaccatgtccggctaattttgtatttttaatagagacagggtttcaccgtgttggccatgctggtcttgaactcctgacctcaaccgatccgcctgccttggcctcccaaagttctgggattacaagcgtgagccaccgcgcccagccttattataattgttactatttaaatctcttttgctctctccttcaagagagacctcatcccattcagttgcttccatttatttattcatcttctgnctnnnnnnnnnnnnnnnnnnnnnnnnnnnnnnnnnnnnnnnnnnnnnnnnnnnnnnnnnnnnnnnnnnnnnnnnnnnnnnnnnnnnnnnnnnnnnnnnnnnnagcnnnnnnnnnnnnnnnnnnnnnnnnnnnnnnnnnnnnnnnnnnnnnnnnnnnnnnnnnnnnnnnnnnnnnnnnnnnnnnncatgagccaccacgcccagccgcaagtacttttacacaaaatgcaaacaccattcttccatcataaaagtgataccacagcttccgtgaagttttgccaggtagtactcataattaccttgggtaaactttttgatgttaaactgtatcttcttattacgagtttttccattgtattaactgcttttacaacaacacat

SEQ ID NO: 58128 - DNA, 963 bp, Homo sapiens
tttttttttttcacgttaaaaaaagttttatttagggagctccagggaatgcggtgggaaaggagaggtgcagtgtcattgccgccctctcctcccacctagtgcattaatagtggatgggagcatctgacagaagtgagatcaggcagtgggtgtctgcaccccacagcgcatgttggctggaacagcaaagtctatctgctgaggtttaggcaagttcaggttgcccatgattttgacaaactcctcacagctgagggtgagccgagggttcagagtcctctcctcctccacggtggacactgtgaacccatggtaatcgtgagcagggtagatcagacagtctcctggaagtgtgaagatcttttcatggaccgagtggtacaaggtcttggcacagccttgctggaagtctgtccgcccacacccacggatcaacagggcatctccagtgaaggccatgctgtggtcattcaggacgaaggtgacacagcctggggtgtggccagggctggccctggtctccaacgcgaagcgcccgaagcggatggagtctccatcctcaatgtgtaagtcagcctgggccccactaaggcgggagatgacagactggcagccagggaggagggaacggagcagccccgagcctgtaatgtggtccgcgtggcagtgggtattcacagcatagagcagccgcagccccagctccttgatcagctgggcatcccgaggcgctgtttcccaggactgggtcgatcagaacggcctcccgggactctctgtcacccagcaggtacgtgaaggtgcagctcacaggctcgaacatctgccgcaggaggatgggggctccagacccgccgcgctggctcagctgccgccgggcgaccctcagtacagcctccgccatcgcgcccactgcggggtcaggaatgagcggaggccgagcgtctgcaggagccgggc

SEQ ID NO: 58129 - DNA, 1528 bp, Homo sapiens
  misc_feature (1)...(1528): n = a,t,c or g
aaaaaaaaaaaggaaatagcgtatttgttttaactttttattaaaatgcttaggatacagattgactttctttcgtaaatgactgttttacttttcctgaagtaggacatatatgcactctgataaaacagaatgagaagtcataattcatgggaattcctatacaaggtgctgatcctgtgtttggagctgagctcctcacagcagcttctttcagctatcttataggaatagtgttccgtggggcaagaaatacattggttctaactgattttcaatcccctttctccagtggaataaaccactttcacaaagagctgccctatgtataacccacagatttctagcttgcaacaaagtgacaagggacaaataggggaaaaaaaaaattaagaaaactaacactggaagtaatcatacttctcatgtctccgaacagagaagtatgggggacctttaaccaaaggaaattaaaaatatgcaagttatattacctagttcattccactgttagctagatttgttcacttaaggctttaacccctttccaaaccaacaactttgtcttaatccagctatgtttgctaataaacgaaatgcatgcacttcccacatatatacttcactgagcctctgcattcagtacctggcagtgaaaaagtatgctttccccacaagtcagtactggagaataaaaatgagaactccaactaaagaacaatgcctccttcaccccagtaatgttatccacattttccctaccctcacattagaataaagacatcctcccaacttttcatctcctatctccaatctgttcataggagatatatcttttgatcttttattataagggtagaatatagattaagatcatcaaaatccaatttcacatgtggcactaggaaaatggaatgctataaaattaatccccatcacccaagtagggatgctggtgcttttatactgagtctttactgccaataagtgatgctgcctccaaaggaacagctctacagaaagtttttgggttagtgtttccctagcttatttctgcaatggagaaagacaatttcatatcaaaaaaaaaaaaaaaaaacctggaaaagctacagatgttaacctttactttaaacaccaataaaataggtgtcaaaggagaaaaaatgtaaaaaaaagagctcccaaacagcctgagagaccaaattctgcaaatggaaattttaaagcccactgaatacatttttcatggatccaaacaaatgctacaatacttttaagtcctcaactcacagaattaagagcccttaagctgttaactttgtcctgtcttcctattcagaaaaatgtccccctagaatctgtgcaaaagtaactgatgcacctgcagtatgtgacacgagagatgttctcaactcttttatgaggtcaaagtcacttttgataactgaaaacgaaaaaggaaggtgctatagcncttnaattnaatttcacaaaagtataaangcaaagactggctanaatctgt

SEQ ID NO: 58130 - DNA, 705 bp, Homo sapiens
ctcctatgacatgattacgaatttaatacgactcactatagggaatttggccctcgaggccaagaattcggcacgagctcattcttggcagcgatggcttcttatcgtctgctcctcctctgccttgctggactggtatttgtgtctgaggctggccctacgggcaccggtgaatccaagtgtcctctgatggtcaaagttctagatgctgtccgaggcagtcctgccatcaatgtggcccgtgcatgtgttcagaaaggctgctgatgacacctgggagccatttgcctctgggaaaaccagtgagtctgggagagcttgcatgggctcacaacttgaggaggaatttgtagaagggatatacaaaagtgggaaatagacacccaaatcttacctggaaggcacttggcatctcccccattccatgaagcatgccagaggtggtattcacagccaacgactccggcccccgccgctacaccattgccgccctgctgagcccctactcctattccaccacggctgtcgtcaccaatcccaaggaatgagggacttctcctccagtggacctgaaggacgagggatgggatttcatgtaaccaagagtattccatttttactaaagcagtgttttcacctcatatgctatgttagaaagtccaggcagagacaataaaacattcctgtgaaaggcacttttcattc

SEQ ID NO: 58131 - DNA, 2644 bp, Homo sapiens
gccgccgccgccgccgccgccgcgggcttcgttcgtaaggaagggggcctaggcccgggcctgcggtggtgggggttgctgcgcgccgggggtcgctcctgcctgtgtcttccgctccagcttcgcccacttccccttgcccagcggggtgggcgcggagaagacctgccggagccatggaggacgaagtggtccgctttgccaagaagatggacaagatggtgcagaagaagaacgcggctggagcattggatttgctaaaggagcttaagaatattcctatgaccctggaattactgcagtccacaagaatcggaatgtcagttaatgctattcgcaagcagagtacagatgaggaagttacatctttggcaaagtctctcatcaaatcctggaaaaaattattagatgggccatcaactgagaaagaccttgacgaaaagaagaaagaacctgcaattacatcgcagaacagccctgaggcaagagaagaaagtacttccagcggcaatgtaagcaacagaaaggatgagacaaatgctcgagatacttatgtttcatcctttcctcgggcaccaagcacttctgattctgtgcggttgaagtgtagggagatgcttgctgcagctcttcgaacaggggatgactacattgcaattggagctgatgaggaagaattaggatctcaaattgaagaagctatatatcaagaaataaggaatacagacatgaaatacaaaaatagagtacgaagtaggatatcaaatcttaaagatgcaaaaaatccaaatttaaggaaaaatgtcctctgtgggaatattcctcctgacttatttgctagaatgacagcagaggaaatggctagtgatgagctgaaagagatgcggaaaaacttgaccaaagaagccatcagagagcatcagatggccaagactggtgggacccagactgacttgttcacatgtggcaaatgtaaaaagaagaattgcacttacacacaggtacaaacccgtagtgctgatgaacccaatgacaacatttgttgtctgtaatgaatgtggaaatcgatggaagttctgttgagttggaagaattggcaaaatatctggaccattaagaaaacggattttgtaactagctttaaactaggccaagcaactagttttcctgcaaatcaaatttttaaagcaacttgggttagactttgtttttgacctaacatcccttccttaaatgccttctgtagtttcagatcagtagggagaccatataataattttatggtacctgtttcaaaacatattttttctgtttttataagtaagttgatattaattaaactcttggcaatatttcttctttcttaaaggaaaatataccttaactttttttcttttacactgtgaaacatacacagtagaaattctgttactctctgttattaatacataaatgaaaatacatttttttccatattggcatgtagctacaaatattaaaggaggagaaaaggtaatataattttaggtttaccaaatatggtgtgtattcaaataatacttgaccagcttatctaaaatgtacataattttgaggtagcttatgaatttgattttaattattatgttcacaagcttggaatattagatattattttgcatctgtaactaaccgtgatcatcatttcttgtaatttcttgtacatgtatattacttgttcttaatagatttttggaaacaagactttattgagatcagtttggttttcctgttaatttacctgtttgactttataatgtgttttagttttgcagaagaacactgttgtagtttagaaggcttttcataaatcccctcataggcaaagatgaaaacttcccactatttttttcccctcttaggaagacatactggaaagaaaatgtttagcatcttagtgtagtatagctattgtaaacagttcatgactagattttgattcggaaatctatactgaccaaggattaatcttaaggattgtataattcattaaagctgtggtctttccatgtggagactgatagaaaataattttgtcccaagtcttatttgctgactttttctgtcatgagtgagattgttgaacaaactgaatatatgggctatagcaagtagctttacagtacagatcttacaattaagttttgcttttgttaaagtgtgtaccattttttctgtttggagtaagacaaaaattgttttgacataggttccctagggtacacttgctctagcatactttaaaggccactgttggcaaagtctacattttatgctgaatctgcattctgtcaggcacccatagaaagacctcagtacatgctttgcactctcctttgctccctttttccaatttcttattgcatatcattttgttgtaatacagaaagcagcatttttaaatgtccgtgttaagaattggcccgctggtaccaactcacctctattttgtcagttcatagttgaagattttgttttatttcaaaaacaaagtacatttttgaaataatgtttcagaataaaataatctcacttttaagtgatccattttaaaatttgtaattcaataaagttttttttgttgttaaacataaaaaaaaaaaaa

SEQ ID NO: 58132 - DNA, 621 bp, Homo sapiens
ttgctttttaatgttcttatttatttaaatatgaaaaaacatttcatctcttcccagttcatctgaaaggaggtcccctgggtaaacataggaaagcagttctgcaggctcatgaaggatgctcggctggaggtcggggggagcatggctgctttccccagcatagcccccatgttccccaccctctttgtgccccggatctgcgatcctgagtccagaagagctcagcaggaagtgggaactgagaagctgttgggagccaggagggccctttcagcttcaccggagatgagaaggtgccacccgcaacagggctgctggtcacagctcagtgcgcgatgccttggccacaatcaccagcttggacagctcagctttgaatgccccgggcctgtgagccactgctgttttggtcacttcaaattcctcagttttcagagggacatcactttccctttcaaatgcggctttagagtaggccatggcgtactcaatctcagcgccccgcacctctgccttgaactgtgtgaagtacagataggacttcccctggggcctccagatggtgcaggtgaagtgctggtggtcttcgctggtccccagactcatctgccattgctc

SEQ ID NO: 58133 - DNA, 1570 bp, Homo sapiens
gtggaggtgccatcaactctccacagctgctcatgctctctggcatcgggaatgctgatgacctcaagaaactgggcatccctgtggtgtgccacctacctggggttggccagaacctgcaagaccacctggagatctacattcagcaggcatgcacccgccctatcaccctccattcagcacagaagcccctgcggaaaggtctgcattggtctggagtggctctggaaattcacaggggagggagccactgcccatctggaaacaggtgggttcatccgcagccagcctggggtcccccacccggacatccagttccatttcctggccatcccaagtgaattggaccacgggcgggtccccacccagcaggaggcttaccaggtacatgtggggcccatgcggggcacgagtgtgggctggctcaaactgagaagtgccaatccccaagaccaccctgtgatccagcccaactacttgtcaacagaaactgatattgaggatttccgtctgtgtgtgaagctcaccagagaaatttttgcacaggaagccctggctccgttccgagggaaagagctccagccaggaagccacattcagtcagataaagagatagatgcctttgtgcgggcaaaagccgacagcgcctaccacccctcgtgcacctgtaagatgggccagccctccgatcccactgccgtggtggatccgcagacaagggtcctcggggtggaaaacctcagggtcgtcgatgcctccatcatgcctagcatggtcagcggcaacctgaacgcccccacaatcatgatcgcagagaaggcagctgacattatcaaggggcagcctgcactctgggacaaagatgtccctgtctacaagcccaggacgctggccacccagcgctaagacagttgctgctggaggatgaccagggaagccccctgataagccaagagggccagcacagcccttgctcccaggctcctgcctgaaactatctagcacactaggacccaggtggtaccctactcagtggctgagaattggataaagtcttgggaaatgagacaagtactgggcagtgaatccagctccttttccccagcctttccctgtgggccatttggggaaggccagcattcagcctgagatgttcctccctgcctcctggagggacagaaggggaggatggttaactcctgccgcatcctttttcttgtgttcacgtggcattctctaacccagggcagtggttccttcccagggccatgcacagaggctgggtgcctgccagacccacggagggttcgcgaaggaaggggcatcctccttcttgagctgcaagctttagctgaggcagtaagtcacacagtagttagttcagcctgggctggcacataagtccccagtgtccctgttgagaggggaaagttgcctgctggttgaaaaactggcttttcctttctcgctgcctaatttcactctcagagtgaggcaggtaactggggctccactgggtcactctgagagggttgtggctctggttcttattaaaccagggccaggtgca

SEQ ID NO: 58134 - DNA, 1284 bp, Homo sapiens
tttttttttttaagaaagacactggatcttttatttttttcctttcattttctttttcttaaaaaaacaaaatgaaaccaaaaaaaagcctgaatcaaaacctttttaggagtagttacagatattatagggatgggggcggggggcactaaaacaaaagagaaaagcaccagtgagatgtctttcccattttcttctctccgccacggaacacgcacaccaacagagcccaggccactttttgccctcttcccttggaaaaaggaggaacagaagatttaagaattttgaaaggatttttttcttgtgtgaatgtgtgtaaaagtcaatgctataaatctaaaacgaggtctgtttttttaaaaaagttctaaaacaacaggaggaaaacacatggaaagaaacccctcgcggagacctgcttccttacagatggaggctcttttggaggagagtgtgaagggcagagggctccctgcgccggcagaacctgcccggccaccctccactcccctgccatcacccctcctctctccttttaaaaagcaaaaccccactcttgggactcgggtcgtcctccgatccctgctggaaagtgcggcggctacttggcgtcgagcttggccatctcctgcacgtagatgccgatgctctcgctgtcgaagagcaggaagtacacgttcttcagcgaggacgcgctcgagtcatcaaagtgggctgagatggctttgagggtcacctgggccgcagtctgtttgggaaagcagtttctgccgctggggaaaggcgggaacgcgacggactttagcttcttgtcctccgccgctgacaggcagtttttgatggtctcttcaagctgttcttcacatttgtcggagccccactgagggatgtgacagtggatgacaaatttggctgcgagtccactggattggctgacggcggcttcggcgacttccaaagggccttgggatttgcgaagctcctttaccgtttccaagaactcttttcccccagccttttccaaggctttacctatatcttctttgaggtcaatttcggctgtggttgggtggacaatgccctccactctcatggagccaatatggctgatgtcactctgggttaaggacagcttctgtcccagaacaaggctcttagaagacagaatggtgaatccatcccctggcccatcttcagaggtggaatttgaagttccttctttatcgctgtcctttggtttggactttttggacgtccgtggtttggcagccttggatttct

SEQ ID NO: 58135 - DNA, 1398 bp, Homo sapiens
gcggtggcagtttgcccgcgggtgtgtgaagggagacagtgtggaggccacagggtactcgccacgatgagcagcaccttagctaagatcgcggagatagaagcagagatggctcggactcaaaagaacaaggccacagcacaccacttagggctgcttaaggctcgtcttgctaagcttcgtcgagaactcattactccaaagggtggtggtggtggaggtccaggagaaggttttgatgtggccaagacaggtgatgctcgaattggatttgttggttttccatctgtggggaagtcaacactgcttagtaacctggcaggggtatattctgaggtggcagcctatgaattcactactctgaccactgtgcctggtgtcatcagatacaaaggtgccaagatccagctcctggatctcccaggtatcattgaaggtgccaaggatgggaaaggtagaggtcgtcaagtcattgcagtggcccgaacctgtaacttgatcttgattgttctggatgtcctgaaacctttgggacataagaagataattgaaaatgagctggaaggctttggcattcgcttgaacagcaaaccccccaacattggctttaagaagaaggacaagggaggcattaatctcacagccacttgcccccagagtgagctggatgctgaaactgtgaagagcattctggctgaatacaagattcataatgccgatgtgactctacgtagtgatgctacagctgatgacctcattgatgtggtggaaggaaacagagtttatatcccctgtatctatgtgttaaataagattgaccaaatctccattgaggaattggatatcatctataaggtgcctcactgtgtacccatctctgcccatcaccgctggaattttgatgacctattggaaaagatctgggactatctgaaactagtgagaatttacaccaaacccaaaggccagttaccagattacacatccccagtggtgcttccttactccaggaccacagtggaggatttctgcatgaagattcacaaaaatcttatcaaagaatttaaatatgctctggtctggggtctctctgtgaaacacaatcctcagaaagtgggtaaagaccatacgttggaggatgaggatgtcattcaaattgtgaagaagtgaaacctttcccttttcccatctgccggacgaaccacaacagcgttccccatgatcaagcaccctaccccagttctttctggttttggcagtcactggatcaggatccaggggagggagatggaggcacccaaactggaacttcatttgtcttaccttggtgtcaccttgtatgtcgaactgcataaaagatctggtaggctggtcagctacatgcaaaaaaaaaaaaaa

SEQ ID NO: 58136 - DNA, 1870 bp, Homo sapiens
acaaaaactggatgaaagagtatgcatgaagaaaagcttctttgataaatgtggagttcttcattataaatatatattcatgaattcacagataagtacttaaagaacagacagtttacttggcctaaaaatattttgatgtttactcaaaaagtacctcttcaggtcttgagaacatggaaaagaattgagtgcttttaaatactttttagaaagtaatcataaaagtaaattgaatttcaaacctatttggcttctgttttgtgaacctttgaactatatgtatgtgtataagggtatacacatacatatatgggcatataacaagtgtacacatatacacataacaagtgtaggaagtatatattacatacatacactcactctgtctgggtatagggctaattttgaagaactcccataagtttctgctgcttctccccataactgctgccaccaccatcagaattcataatcaaacctaacctttttgtttggggcaccaaatctgaagacaaaattaatttgcaccagtaaacttcaagctgctttctttcttgaaaactaaacgtttaacgtataatgtctgtttggatactgttccaaattgttgattgcatgtggttaatgttgcattagagcactttgcaattgcataattcattaatgttttgtgagcttgcatttgtgagttattggatgatcagactgaattttgtcaagtatcacattgtacatcttgcctagatgtcgatgactgcaagtaataatacagtttataatgaaactatctacaattcttgttttagcacatctgttatccgtaaaacacctgtaactagcttttttaatttattatttgaattttaggatagcgaatcactaatttttagttgctgaggttggcattttagtgattattaagcacttctgtcagtctttgaaaaaagaacgtattttttgtgctttgaagatctctgaagaatttcttttataatagaatgggcatgtattgtaacagttttatgtcaaatgatctgtgctgtagaaaaacattaacccttgttcaaaaaagaaatgggataaacttgggcctttctaagtgggtaaggaatgacctgtcactattaatatactgtatgtttacattttatttaaatttaatctcttatgtatagggtgataaccttccccagaaacaacagtgattgcgattgttttctagaaacttctttaaagtgccacatttggcagtacaaatgagtctgagtgtaatagcccagagatttatatatagttgaatgtctaaaatgggtaaaatgtgccactgtgtccaagttacagtggcttatgtttttcatagtaattcaaatgaacttcctatttttgatagtaaatgtcatttaatagtatacttgccatttgagcctcactgcaaaattagtgcagaggagaaaacaatttttaatgtaatcttgattttacctcatatactgtacattccaaaaactctaaactttttaaagattatagatacactaccaaacatatcaccttaaaattgtataaggctgaatgaacttcatacaaatgaaaaaaatctcataaaaatacataaactatgtagcaaaagtatctgtaaaatccatggaaaataaaagttgtatcattctttttgagatacgtttattgtattcatatatattcattatttgctacctgtttaagaaagtgaaatgttatggtctcccctcttccaatgagcttaaaacatttttcccaacagtatataaatcttcaacatgagaggatgtatatttattatataaagcccagtaaagaataaaattagaagttttatcctagtgaa

SEQ ID NO: 58137 - DNA, 470 bp, Homo sapiens
  misc_feature (1)...(470): n = a,t,c or g
gngnngtnnnnnnnnnnnntttganaccccttntttggagaacngntatgacatgattacgaatttaatacgactcactatagggaatttggccctcgaggccaagaattcggcacgaggaaagaccgactggatttccaccagggctggaaaggttacttcaaaatgaatgtggccaggcagaataatgacagtgactgtggtgcttttgtgttgcagtactgcaagcatctggccctgtctcagccattcagcttcacccagcaggacatgcccaaacttcgtcggcagatctacaaggagctgtgtcactgcaaactcactgtgtgagcctcgtaccccagaccccaagcccataaatgggaagggagacatgggagtcccttcccaagaaactccagttcctttcctctcttgcctcttcccactcacttccctttggtttttcatatttaaatgtttcaatttct

SEQ ID NO: 58138 - DNA, 435 bp, Homo sapiens; identical to SEQ ID NO: 25164

SEQ ID NO: 58139 - DNA, 626 bp, Homo sapiens
aaatagtcatcactccccttgactctctctgttcacgtcttctcagtctgcagagttaacttctgtaaggagtttaatctggggttccaagaaaacaagttccttgttaacatagcactgactttgcaacaatagaaaactaacaaatgagcaacaatataaagagtagaggtagttctcattgggtgtaacttcaacccattctgcttgtggttagaatttataattttgctaacgatgtaatttactaaggtttgaaatggtattctaacagtgagtccattgtcttgaggattaatctgatttataagtaatactgatagacatattttcgtacatctgagcagaaataaatgcatgtttctagcatatgtaatataaaaactccagaggataagtttacacttaacaagatgttgttttctatttttgaatttcttattatttccccctttttggtagtggagttgagagggggagcatactatttgtataaagaactgtcaccccagagtgacatttattttccaagatgaccctgaactcatgctgttggtttcatatggtgtttgtgtgctttgcctagattcaaggcctgaggatttgaggaaaatcgggattttttt

SEQ ID NO: 58140 - DNA, 2008 bp, Homo sapiens
tgtccctcaattaaatgccttaagacctgacattccaagagaaaacaaaaaccatactttggtttctaaggatgtatgactgggtcctggccttcagaggatggcagacagatgggaacacaagtataagtagactagagtatcccataattgtcaactctggcaaggtaaagatgaagctgcttatgtggacgactcgtggggtacctaagtaaatctgggagccaggtacgtgcaaagtggtcagtggtagaagccctcatgaaggcaggaatgctgcaaacctccacttactgccttccaggaccacttaagtcatagtggtaagagctgctagaagtagtcgttaccaacttgattaccagcaatacacaatgatgtcaagaagacattccacatccttctgtcatcactagctctcatttcaaccactaaaataggtaacagctatagacaaaaaaaaaagggagacatgaaacattcatggctgttcaagttagaaaactatggcagcggctatattaacaaaaatacaaacgtgtacactaattacaacatttatctacagtcattttaccagttgtgcagcctaaactgccattatcttgtttagtcattcctaagatgcgttatttctgacatcgaaatatcctgaaattgggaaactattgacccaaccccaactgtgttagaactgcatgaacacctaagatgaaggaccagcatcacagcagcacatcaggccaacaaaggcagaagtccagcagcaggagagggcaatcgcacgaggacagcatcgtgaggtcagctcaccgacactctaggtgtgcaggcttatcctgatgacaagagccatggacctcaccatgtgtctgaaaaccgcaatgttgctacttaaatgctaagcctttaatggtgcattaatagatggttaagtagcatattagcagcttaaatctacataagtcagctgtgtactgactgtacctcacagtaacaaattcaccaaatctgtatcttttcttctttgtaacaatgttaaatattggtatatctcagttctcaggtgtgattccagcagctatggtgagaccattgctgctcctgaatctccactttcatttgccttcactggtgtcactgtcgctgtcactgctgctgtcagtatcactgtcactggtcaatgcagttagattacttagggcttccttttgttcctggttgattgcaaaatcactcattactctctggggtgaggccctcacaaataggtaagctgaaggcacttgccagctctactacttcaatggcctgggaagggctgttagacacttttgcactgtccataagctcattcagcaactcacttctaggaatcttattatgcttcctgaaaagccccaacattttccaggcttcctgagttctcccagcccttaaaaagaggatagctatacagttgagagaggtggctggccaatcctgagcagtctgtctgatgggttggctttcatacgcagatttgatatcagcagcacagtcagcaaatgccacctgaagctctggtgggtgcttgtcccttgccatgagcatcaggatctcttctctcaggtcactgcggaaagtatgacccatattcctttactatctttcccaaattttaggaatcacttcctagccgattggcccacatcccaatgccttggagaagatgtatcattgtttgggagtggggaaagtaggctgaaggtatcaggtcctcataccacttcaaggtaacatcaatttgttccattagacaaatcaaatcgaagaacttggaataatagaaattacgatgttgatcaggtccaatgaatttccagttgtctccggtttttaaaaggccatgtacttggtaggcaagttctagatctctgagagatgagcatatgctcatggctgactgaaaaaacttatcatcatccgggtcctttggagaaaatctctttcccattaattcttccat

SEQ ID NO: 58141 - DNA, 1335 bp, Homo sapiens
taaaacttaaaaagttgtttatttctgaaatttttcatttaggtattttcggtctgcagttggctatgagtaactgaaaccatgagtaacagaaaccatggatgggggaggatgactggagtctggagtatcctatcctacatggcctgggaatgtttgttctcatgctctgccctggcagttaattgttcacaagtgtccccataagtaactgtcgagaagattctcacaggagaccacgtgggttgcctgaagaagccagagtgaaggagggttgaaatcaacgcctttagagtcttaggaataaaagttaaaaagccccagagaaatgttgtcctttgtccacggcacctgcactaacccctcccagaaagtgggcatgcagtttcccaggccaggcgagtgttcgttgctcaccgaagaccagtgtttactagcaggattgtcgccagaagcagctgcattctccccggatgcagacctgcccgttggtagggactctgctcacacggaacatggcacggttacacctgtgccgtggtgacgtccaccagcttctggatcatctcggcgtgggtgttgtggaagggcagcccatccacctccatgcccacgatgcccgagacgccactccggactttgtgctgcaccaagatgcccagcattttttcttccttaatgaccgacgggagggcctgagtccaggcctgatctccaggtgccctggagggtccgactgctttcctcaggtactgactgtggacagcacatgagtacaggatgtagagtgcgcaggccagggcatagcctccccagttagaaacaccagcaatgacggcaaagtcagcctccacgtcgcaggcgatgacatccccgtgccgtatgtgcctcctcacagcctccttgactttacccatcccaagctcgttgcctccatcaccgactccagttgatgagattccaggaatcttcttcgcagcaagaaaaagatcgtcaatggggtcaaccaagtgcttgatgttcatcttccttgcattgtagtaattgccatcagcagctcttccggcacgctctatggccaccaggtggtcaaatctaggtgtctgcgggtccccatttttgcacaggaatgcctgagcagcttccactgatccaccttggtaagttaatatcgggatctgcgtcttcagaacaccttgctcaacagcatcttcaacaatcttctggtgcaagttccaggctctctggtcaacgattatggcgacctccttctccaaggcctgcaggaaggcaaccagagcaacagctcctggtgggccatctgtctcttctggc

SEQ ID NO: 58142 - DNA, 1629 bp, Homo sapiens
  misc_feature (1)...(1629): n = a,t,c or g
tttttttttttttctagataccaaatgttcccacaagctttattccaaaaataattttatttaataggtattaaataatgtatagaaggaaaaggagctggtgtcaggttctgtttacgtccttctcttaccctagctcttctcgtgttttgcctatttttttgggcattttcttagcatggggatcttctagctccttggccttataataatggggagccacctccagaagccaactgctctcaatctccagtacctgtctcatgaactctttggtggtcaagacaagttcgtggtagagcagccagcgtggctgttgctcaaagagggaggagttgggatgaatgaagactgtctgctgctgtttcactgtgcggtagcccactccgagtcaaccgtgccgtgtggtaaaagtaaccagcagtgatggccttgcgtacacggatatagtccccctggcaggaactgagaccaacttccacacgttccaagagcccttccagctgttcccgcacatcccgggctcggcgcatcgatctgaactgtacaaagttctcatagcaccactgggaagagtaaccactctcagcccactgtgtgtaaacatttagcagaaccaggtgggtcaccgccagggaggaaagaagttgacacgggcattgtcagcatggacgaccttgtcctttggtcggtagaagatggagttgttgacagagagcatggcagccactgtcaggatctcctctgaacagctgtacttctcagaggctaagatcattttggaacagcatggggtccaccggncaactctgcccatctttcgaccaagacgtggtgagcttccccaaggtggttgagggctccccagagcatacagctgctccaaagccagcaagcagtgtctcatatggtggagggtcccaggaaatcaaagtgcattaggtcatggatccctaagctcttgagcagcaacacgacattgcccaagctggtcctctggatctcaggcactgtggtttcctcaagctcgtgctgataggcccaggcggtatacaggcggaagcacttccctgcagccacccgacctgccctgccagctcgctgattggctgaggccttgctgcagggtgtgacagtgagcgattccatgcctgtgcgggggttgtagctcttctgcttacagaaccctggatccagcacataaatgatgccctcaatggtgagtgatgtctcagcaatgttcgttgccacaaccacctttcgtgccccaggtggtgtgggctggaagatacgggcctgcatgtcagagggcagattggcataaatgggcagcaccaggagctcccggattttggagcccaggcggcggcagcgatcctggagcatatcacaggcagcctcaatctcctcctgtcctgtcaggaacaccaggatatccccagggggttgggtcacatggatctgcaacacagatactacacaagcttccaagtagtcagcctttggagccttggtgtagaagatgtccacaggaaacttgcgtccggggattcgaaacacaggggggtcatcaaagaaggtggaaaaacgggcagtgtccattgtggctgaagccaccaggaccttgac

SEQ ID NO: 58143 - DNA, 1567 bp, Homo sapiens
ttttttttttacataaaattatctcactccattttatttaagatttttttatccagttagtaaaaggaagatgtgtctctctttatacatatgtacaagttcagttataaaaatagcacattcaaagagaaaaggcttggcatttttctgattccctctaaatagcatctgtacacaggaatctgggtttgagcaggggaatcttaatgatttaaattaaatgattcccctataccccctactccaaaaaagttttaaaaatcaatctatcgaaactcaattccgcgattttcaggtgtgcaaatcagaggcttgcccgcccggaggtacctgctccaccagggacatcaggcagggacaggcagaaacacctcccatgcaaacactgctgattgaggtggctcctggtctctttactggcttctgggagtcccctgggtggaaggtgctacggttgctggtaggatctgaaggttctcttggtgtgaaccatgcaggatgggaggaattgctgggaacacaactgcctgtggatagacttcctctagcctctaccatgcttagcggcctccaccatctctcgcagtcactgctctctccaatgatgacactctggggttcagagacctggggagctgcctgaagactgtggacaacaggtatacaatctcccttactagccctatgagaaatcacactcttaagagaaatctctaccatggaaggctcttcacagcacctgcggagactttgcaagggacgtgtcagagccgaagagtggaatcgggatggaaacagtatgcctgagcatctaaagggggtctgtgtcaggcttgccccgtgagaggtttaagacttggctatacagttcacttgagatgcagtggggctgatccatgccctgtggccttcctcctacaggcaccccagatgctcctgatgagacacagatgataaaagtgctcacaccatccacctgcctgtccttcccctgctggacatttccacttctgactcaggatgcaagatgctgcacggggcaagccatccaaagaccactggcaggtcaggactctagccctgggtttggttgaaggaagtcggagggcccagatggttaccgtcctccagaggggttggtgcctttgccctgtttccggaccagagagtctggggctaggctgctggtcatgtggaggtttcttgggatttccccaggaacattatttcccctttgctcaaaaaggggaaactcaaaaggaagaagaggcgcttgaaggtccaaagtcaagcaaaggccagcaggccgaacaagggatgtctgcagaggactgctggcggagattcctttagacacgttgtacccgtatgcggcataggcagctgcagaggccgctgcagccccggctttggctcctgccattgcagcagcactgcctgccgtggactttcgctccggcccttccctgctcctttggctgtgcttcctgaacctttggggcggcctcggcttcgggctgagtgaccacgtcctgcagctggcatttcctgaatggaaattccattc

SEQ ID NO: 58144 - DNA, 1163 bp, Homo sapiens
tttttttttaatatatatatttcattttaatgaagagtgctttcttgtagacattgatgcagtacatagggctggtaaggaagtagtaacagtgcggagggggtaagtatgtcagtctggcatgttttcttctaaattaatattcaaaaaggtgccattcaaggaacacttttggtcataccttgcaaccagtactgagacatgacataaagttaaaactccaggtgcctttttgagataagtgtgaatccacattcacaacctgggttgagaaaggtcacacttctctacttactaaaaatggagtccttcaatcttaagtcagcccagcaattcagttgtattgacctgatggaggccatccgaggtttcactgccattaggagcagggcttgttttatgcgctccgtgcatgctgatggtgcagggagtggtggaagatgtgccacctcaaatctggataattcctttaatcccttccttcaatacaacctgctcttaaaactgaacactgattttcattcttttcatgattagtgtttccccacccttatctttgcattcactccctctcataaaggatgcattttcagagtccagatggattaggataactgcttacaaattccatggcaatagttaagttctgaggaaaagcaggctttgtgataagaccactggatgtctttcaattttcaaaagtcagatttcattccacagcttgtcatacagtttacagaattatgagaatcctccctggattcacagtgtctttcttaatagagtcatacattaatgaatgttacccattatttaatatttaaatttcaaattctagtttctactttacaaggaaaaggacacgaagacaaaactgattggacccatggtcagtcaggagaaaatgtgtcttagctcctaatttagtgacctatatgctaaattacaccttttcatccctctgagaacataattctggaagcttgtataaacaaaataggccccaaattacattctcaccacagaaattagataatttatcaagtgcaaaaagaacacgagaatattctgcacaatttatcaaggaccttcaaataaatccattacaaaaaataccccttcaggcaaaataaataagactgaaattcagcgggacgcgtggg

SEQ ID NO: 58145 - DNA, 470 bp, Homo sapiens; identical to SEQ ID NO: 25172
  misc_feature (1)...(470): n = a,t,c or g

SEQ ID NO: 58146 - DNA, 547 bp, Homo sapiens
  misc_feature (1)...(547): n = a,t,c or g
tgaaggtgggagctggaggtgcagggggacctggaacatggatgggagtggacaggcctttctccttagaggccagaggtgctgccctggctgggagtgaagctccaggcactaccagctttcctgattttcccgtttggtccgtgtgaagagctaccacgagccccagcctcacagtgtccactcaagggcagcttggtcctcttgtcctgcagaggcaggctggtgtgaccctgggaacttgacccgggaacaacaggtggtccagagtgagtgtggcctggcccctcaacctagtgtccgtcctcctctctcctggagccagtcttgagtttaaaggcattagtgttagatacagctccttgtggctggaaaacacccctctgctgataaagctcagggggcactgaggaagcagaggccccttgggggtgccctcctgaagagagcgtcaggccatcagctctgtccctctggtgctcccacgtctgttcctacccttcatctntgggagcaactgcacctgactggccacccggggcaatgg

SEQ ID NO: 58147 - DNA, 552 bp, Homo sapiens
cccacgcgtccggttcacactggctgttgtcagcggcctctgaggtttcaggctcttggcggtgaaggtcagagtgcagacctgagaccactgctcaccgacttcagactccagtttatctgtgccccagcttcctcacttagtctcagaagacttaggctgaggcctcagaaggagatctccatcctttgtccagagcagaacaggatggccatgtcccaggaatcattgaccttcaaggacgtgtttgtggacttcaccctggaggagtggcagcaactggactctgcccagaagaacctctacagggatgtcatgcttgagaactacagccacctggtgtccgtggggtatctagttgcgaagccagatgtgatcttcaggttgggaccaggtgaagagtcctggatggcagatggggggaccccgggtacggacctgtgcaggtgaggacaggccagatgtatccatttttgcctcattgtattttgaagtgctgttattagaagtctggcaagttgatgagcagatagatcactacaaggaaagcca

SEQ ID NO: 58148 - DNA, 1660 bp, Homo sapiens
  misc_feature (1)...(1660): n = a,t,c or g
ttttttttttttttagaaatcaaatctgtgtcctttattccacctggtagggcatacccaagaaccatatactgagtcctgtctcaggttgatggagggttccctgggcccaaggcacacaactgcctgtgctctgctctacagatgataggagggatggacagtggagagaagctgagccttgtgaccaagacccccagcatgatggggaatggaaagttggaagaagtaggactacaagggaggggacagggaggggcttagaggcatttggggcaggctgggcattttgaagtgagaggcatttccatccagctccccatgtccactgacagccacacccaggcttcaggtggaggtgaggctgctgtttcccaatgcggtgctatattcttctggaagcccctttccttctgctgtggctagagctgtgaccaagaatgggaacaggaggctgctaaagtctggagaagcaggaatcatttgtcagaagaacacagaagccacctgctgggagttctatctttttagagatgagctgtttggggtttagaaatgagatggaaggaagtggaaggcagagggcaagggcggagttgtgagaggctaccagcacaaggatggaggctgggggccatgtgcagtagggccagaaaagtgttcagtggaattgtgggtaggaggctgagatgctgctgggccctgtccccaccaaagatggaagaactgaggtggaggcaactggccacttgcctaggagagaactcaggcaccaagttaaaaagactcccatgaagaactgccaccttctacccgctgcagtcttggatggtctacccatgcagaaatcagtggccaggaaggcagggcctactgctgggatatccagggcaagtgcccagtccaagaaagccactgtaatgtcctgtaggcaaagccaggtccagtggacagcctcactgagctgtgtcttcatgcagtcccaggtcacctcacctctgcatcctcatggcagtgctcctggcccagccagggcctcaagcaagaggtgccacagtggcagcagcacattctggtggaaaagcaggggcagctctctcagatagcggagtagctgattcacggaatcggggagctggatctgtagcctctgagagagactggtgagactgtcaccaaaccacgcaaggtgagaggcacagtgggcagaaaggaagctgactgtggcattggtgtgagcccaggccagctgcaagctgggccgcaccacggtgagcaggtgggagccccagagcggcagtgtctcccccagccagctgtagccttgcagactgtaggagtagagcttggcacacgcttgttggctagcaggtaagaagccagatgatcgaagcaaccggccagtaagggaggcctggaaggagctgtgtgaccggaggtcatggcacaggaagcctacagcgaagaccagcagcaacaggaggagccgcgtccagggcagccgaggaccctgaacctgctgcaacaggcccttgcaggccatgtcacaggagacgacatcctggttgttactgctacccttcctcagcagctcctggttggtaagcttgagggactgaatggtttcttgcaaanacttctgtaccttcttgggaatctg

SEQ ID NO: 58149 - DNA, 966 bp, Homo sapiens
  misc_feature (1)...(966): n = a,t,c or g
gcccgcatcaaggccgttgagtgcgtggagagcaccgggcgccacatctacttcacgctggtgaccgaagggtgcggcgagatcgacttccgctgccccctngaagatcccggctggaacgcccagatcaccctaggcctggtcaagttcaagaaccagcaggccatccagacagtgcgggcccggcagagcctcgggaccgggaccctcgtgtcctaaaccaccgggcgcaccatctttccttcatgctacccaccacctcagtgctgaggtcaaggcagcttcgttgttccctctggcttgtgggggcacggctgtgctccatgtggcaaggtggaaggcatggacgtgtggaggaggcgctggagctgaaggaatggacgagccctgggaggagggcagaaggctacgcagggctgaggatgaagatgcagcccctggatggtcccagactctcaggacatgcccagctcaggggcttcgagccacaggcctggcctcatatggcatgagggggatctggcataggagccccctccctgctgtggtcctgccctctgtcctgcagactgctcttagccccctggctttgtgccaggcctggaggagggcagtcccccatggggtgccgagccaacgcctcaggaatcaggaggccagcctggtaccaaaaggagtacccagggcctggtacccaggcccactccagaatggcctctggactcaccttgagaagggggagctgctgggcctaaagcccactcctgggggtctcctgctgcttaggtccttttgggacccccacccatccaggccctttctttgcacacttcttcccccacctctatgcatcttccccccactgcggtgttcggcctgaaggtggtgggggtgagggggggtttggccattagcatttcatgtctttccccaaatgaagatgccctgcaaagggcagtaaccaca

SEQ ID NO: 58150 - DNA, 888 bp, Homo sapiens
  misc_feature (1)...(888): n = a,t,c or g
gagcaaaatagtaaataaaatataaaaatgaaaatgaagatacgtgaaattcaaatgtcacaacttgccctattatttattttagtgccatttttttgtgcttttcccagtttggtgttaggtggccttaagttctcagtaatgacacttatcaaataggaacttagtgttactcacctttatccattcccccaacactcaacaaattgcctttgctatatccctatgagatgagcagatcaaatattccccgtgagttaatgaaaactgattcaaccaaatggcgaagtcagagactatcgggggccatggagacactctgggccatttttatgaggtagtctaggctcatcttcatgagggaactgaggtcttggggggtgggggttacccaaataggttcacagaagaaccagaaataaaacctgcctttctagactgtaagtcttgtgattgtcatctaaatggttgtctctatacagcaactcatctctagaactgaaaataagtttaaatccctcctccatccccaataattcaagctgcatttcagagaaaaccaggactttggaatcagacagatcaactttgaattcttgatctgcttcttcataggctatttatggcttagggcaagttttgttttgttttgtttttacgttggccactcagtcttctcatctgtaaaacagggataataacaccttcctcaaatggttttttttattaggactaaaagagagaatgtgtggaaagatgttagtggaattcctgggcacatagttcacatggacaaaatggtgttaactacganaatttttacagagaaaagggcaactgacaaaagcaggtgtttgggatgattaagaccatggcaggntttgaggg

SEQ ID NO: 58151 - DNA, 1671 bp, Homo sapiens
ctgtcatggcggcggccgcccccaatgccggaggctcggcccctgagacagcgggttccgccgaagctccgctgcagtacagcctgctcctgcagtacctggtgggtgacaagcgtcacgccccggctcctggagcctgggagcctgggcgggatcccaagtccagccaagagtgaggagcagaagatgatcgagaaggcgatggaaagctgcgctttcaaggctgcgctggcctgcgtgggaggatttgtcttaggaggtgcatttggggtgtttaccgctggcatcgataccaacgtgggctttgaccctaaggatccttaccgtacaccgactgcaaaagaagtgctgaaagacatggggcagagaggaatgtcctatgcccaaaaattttcgccattgtgggagccatgttttcttgtactgagtgtttgatagaatcttaccggggaacatcagactggaagaacagtgtcatcagtggctgcatcacgggaggagctattggtttcagagctggcttaaaggctggggccattggttgtggaggttttgctgctttctctgctgcgattgattattacctccggtgagagtaattgcctgcagggaaggatgatgccagccccggatccgggctgctctctggaggacagtttctgtaccacaccagggccttgcttcagggcctgaagacattcattttccctcatgtcgttggtattctgagggagctgcctggcttctctgcctcccagcctttggggtagccacactttgctgctcctggactccagccagccttcacagaggacgtcccgtgccagattctctcacagcagatcgggagacaggatgttgacatataggaattcagctccacaaagcttcaggcctgaccacagctggccctctaggttgtttggtgttgtgggcacagaggtgacagtgtctctgcaggcactcaggaagctgttctaccttggaactccatgcaactatccgtctcgaataccagggcagggcaaggcggactgatgccgtccaaccaattatctcacttgttttgtgttctgtcatccttgttttttttttaaaaatacactcccctcccccaccgccacacaccttacagttcaaaaggttggtttatttgtattttattttcaaattccctattccaaaaatagtgccgggtggcccaaagataacatctgaagggaaagaatgagaaagctcccagggaagcgggggatggggcgctgaggcagggttgttagaggactgtgtcatcctcaccaagctcattacatctgccagggcctgcctcaagaagcccagcccagccttttcctgggatgcagtgaaatcccatccatgaactcgatgggcccctcctgtgccggccgagaggcacacactgccttcacgacgtgactgctggacctgggccgagcttgaggccacatgtgaagggtcctgctgtggtcatcttgggtgactcggtcacagcagctactggccaagatcagacgtcgctgaggggctgttcaccaccatcctcgttctccagggtcaaggaagtgttttaacatgtcgtgttttcgacttgaccttgtggtatttttcttggcctagttgtgtgccatggatattaaaaaaaaaaaaaaa

SEQ ID NO: 58152 - DNA, 2139 bp, Homo sapiens
  misc_feature (1)...(2139): n = a,t,c or g
tcatcaacattattggtagctttattaaatttgtttaccttctaaaaaaaacgattacaaaaaagaatacttcatttaagtgtaatactggctttatggacgtaccgtgatcagaaagtgaaattaaagctcatggatatgcgtgagaagagaatgggcgcagaggcacgagtccagtatcccacggagagaaggaagtgtagagagatgcgtggacccatctcaggggtcacgcattcctgggccaaggagttgcttctaagagcttaaaataaatgcactggctggctccagggctggacacacaggcacagaactcttgtaccgcttctcaaagctgcccaaagctgcgaccttccccctcagacacccacaattaattgtttccaatcagctttggttttgttttctctgcaatttacatgcaaacaccatctatctattcatccatacatccatccatccatccatccatccatcctgcttgtctcctttgaccagccaagccctattttgttttacgtacattcccttcactaaaaatcaaagcaagccagtctacatcaagccaagaaacctacttttctaaggagagaaaccagtgctttgccttctttaatgaacctgcgagctctcagcgctttctcttgctgaaatgtggctttaaagccttggaggctgagctccactggcctcgaaagggcagcgcgcgtatttggtttggagcgcactcctgatcacaaagcacatttttagaggcttggaacccttccctttctgttgctcaccaaggaaaaggcacaagaaagacaatgatgtggagattcttaggggaccaaaacaggccatgaaggaaactgtgagtgtctctggcaagccccgtttcccacaggctctgttccgaggcagctccggaaagtctctaggttgttaaaaagcccagctggcccatgtttggttttcagcaaagccctgtctctttaagtttgcgctgggaggcctggggacggccaacttttaatcgtacacacatggggtttttgggagccggccctgcgttttgccaacaagcgcatgccctgttttctttcctttgaggagagaaattctggagtcccggggaggaacaggacggccctgtgaccatagtctggggcctggcggcggggacgcagaagccaccctgagagccagattcttttcctgcgtcttcaggtctgaaggattttctaggaaaattaacatttgccaaggcctccatgtggggaagggaggggtttctgggtaannnnnnnnnnnnnnnnnnnnnnnnnnnnnnnnnnnnnnnnnnnnnnnnnnnnnnnnnnnnnnnnnnnnnnnnnnnnnnnnnnnnnnnnnnnnnnnnnnnnnnnnnnanncttcccaagtagctgggactacagacgtgagtcaccacgcctggcctgtaatttctcattgtgaattgattgggtccctgtaagtcacagagcctgtcctgagtcccttcatctgaatgagggtgaaaagactgagttttctgtcccgggtgacaaggacagaatctgtcttgtgaaacaaccagaagaaaattcccctaagaaagccgtctagcggggcagtggacacaacactattctatatcagacaattaaatgtgagggatgaagggtgaaccccaactggtgcgtaataacacttaggattaaaatgaaaatatgcaagttccagtgactttcaaatctggcaacaaatcctaagattcccaccccctcctgcaacaatgattcaaaaatacaatatttttttcctctccctcttcctccatccataattaccagctgattgttctcaatgttcttcataaaacccacaccccagcatcagccctggcgccaatgtatacaagaattttgcttcggtctgcgctgtggccactttgaacaggggagccaagaaaacccacttggagctggagtcctgtggccgttggggctcccccagggaagcagagggagagctcgcttgcctttgagccgtgggccttggggagtgtgagtggggtgggccagggaggaacgggaacagggaggagacggggacaagggacggtttgctcccggtctggctggtccccgcctc

SEQ ID NO: 58153 - DNA, 1545 bp, Homo sapiens
ttttttttttttttctttacaaaagattattttattaattcaatttttgcataaaagactgttaaaagaacttgctaacttgaaaacaattttgagtatttatgatctttccaacttgaaaacacctgaaccttatagaacagattgtgtaaagcagccagggccacaggagtgaaagaagatggagacccgccgtctggtcatgatatgagaggcctggacagtgacctcacgaacaaaaagaaatgatcctcttcagtccaaagtgtgtttgtgagactaatgactccatgccctcacatggccactcctcttacagcagacagctttcactccgctccagccccggtactgcggtctgtggtaatttacatgggaatgggatgagatctagtagttttagatccaacgcaattctgggaagggttggtaataaaccaaaactcaatctatgcagtatttaaaaaataattgagagttgtgacaacttcgattcttttcaggaggtgctgtcttaagatagaagaaagggatcaagctcttatcttagaaagcacagacacgtttagctcagggtagtgccattccaatgctaagtggctgctccatgaaatctaagggccgggtaaggggaagaggcccagggatttcttccctgtctggcactctcggggactagcattctgggcaggtcttacaagttataatacaaaaccatcagataaattctaatcacgactgtgtagttccctcccccaaaataattttcctcttaagaagtaaaatcaggaaaggggctgaagttctgaaaagaaacatcggggctgtggccccaggcccctctgaagtggtggaacgctgtcccccgtgtcccctgtgtttaactgccttattgtctcctttgtatgaaagtaataatttacgtaattcgtccttggagaatcacagtggtgttcaagaaccttttgaggccatccaagtttttgtccttcagtaccttgaaatcagataatctcaacatccagaaatagcctttgatttgttctttctctgatgtcttgtgtccttgggatcaaagcctctttcactggcaccaaataatgcccagtgaggagttctggccatataatcctttgcgctgaacgtttttgatccaccactatcttcatattcctggatgagctcctggaagcggttataattgatccatgtccaccattcaccaccaattttaaactttctgtgtgctatcaggaggcaattagagtgttcgtgttcacatgcaatttcatattcggggatcagatccaccagctcgcggacaaactgtaccacttcctcatgccagggcacgtgggccatggtaagactgcttgctgaactttctccgcagtaggtaacgcccttcacttcgatgaagtcaggattccccagggacacgagctgcgcgtaggcctggagctcgtccacgttccatgctttcacgagcgtcagtctgtagacagttcgttgttgcttgactgccaaggcttttaaactgtcaag

SEQ ID NO: 58154 - DNA, 1583 bp, Homo sapiens
gacggcttgttgacggaaacgagcccttgacgctgtggcccggaagtggagcggctgtcgcagtgcggctccggcagtggcagcggaggcctgtgtttgcggccttcggcaagcgactgagatggcgagcgcaactgcacctgcagccgcagtccccaccctggcttcgcctttggagcagctccggcacttggcggaggagctgcggttgctcctgcctcgagtgcgggtcggcgaagcccaggagaccaccgaggagtttaatcgagagatgttctggagaagactcaatgaggcagctgtgactgtgtcaagggaagccacgactctgaccatagtcttctctcagcttccacttgccgtctccacaggaaacccagaagttcttgttgaacaagtccatgctgccatcaaggcattttatttgcagtgtactatttgcttccaaaggatcaggggatcaccctgtagaaagctggttacgggggcgccaccctggacatcgtggatgggcatggctcagctcatggaagtactttccgtcactccaactcagagccctgagaacaatgaccttatttcctacaacagtgtctgggttgcgtgccagcagatgcctcagataccaagagataacaaagctgcagctcttttgatgctgaccaagaatgtggattttgtgaaggatgcacatgaagaaatggagcaggctgtggaagaatgtgacccttactctggcctcttgaatgatactgaggagaacaactctgacaaccacaatcatgaggatgatgtgttggggtttcccagcaatcaggacttgtattggtcagaggacgatcaagagctcataatcccatgccttgcgctggtgagagcatccaaagcctgcctgaagaaaattcggatgttagtggcagagaatgggaagaaggatcaggtggcacagctgggatgacattgtgggatatttctgattgaaatcagccctagtgtggatgatttggctctgagcatatatccacctatgtgtcacctgaccgtgcgaatcaattctgcgaaacttgtatctgttttaaagaaggcacttgaaattacaaaagcaagtcatgtgacccctcagccagaagatagttggatccctttacttattaatgccattgatcattgcatgaatagaatcaaggagctcactcagagtgaacttgaattatgacttttcaggctcatttgtactctcttcccctctcatcgtcatggtcaggctctgatacctgcttttaaaatggagctagaatgcttgctggattgaaagggagtgcctatctatatttagcaagagacactattaccaaagattgttggttaggccagattgacacctatttataaaccatatgcgtatatttttctgtgctatatatgaaaaataattgcatgatttctcattcctgagtcatttctcagagattcctaggaaagctgccttattctctttttgcagtaaagtatgttgttttcattgtaaagatgttgatggtctcaataaaatgctaacttgccagtgattaaaaaaaaaaaaa

SEQ ID NO: 58155 - DNA, 1378 bp, Homo sapiens
cccacgcgtcccggtttctggttttgctctagtgtttgggtttcttcgcggctgctcaagatgaaccgactcttcgggaaagcgaaacccaaggctccgccgcccagcctgactgactgcattggcacggtggacagtagagcagaatccattgacaagaagatttctcgattggatgctgagctagtgaagtataaggatcagatcaagaagatgagagagggtcctgcaaagaatatgggtcaaggcaggaaagccttgcgatggttttaaagcaaaagaggatgtatgagcagcagcgggacaatcttgcccaacagtcattcaacatggaacaagccaattataccatccagtctttgaaggacaccaagaccacggttgatgctatgaaactgggagtaaaggaaatgaagaaggcatacaagcaagtgaagatcgaccagattgaggatttacaagaccagctagaggatatgatggaagatgcaaatgaaatccaagaagcactgagtcgcagttatggcaccccagaactggatgaagatgatttagaagcagagttggatgcactaggtgatgagcttctggctgatgaagacagttcttatttggatgaggcagcatctgcacctgcaattccagaaggtgttcccactgatacaaaaaacaaggatggagttctggtggatgaatttggattgccacagatccctgcttcatagatttgcatcattcaagcatatcttgtaaaacaaacacatattatgggactaggaaatatttatctttccaaatttgccataacagatttaggtttctttcctttctttgaaggaaagtttaattacattgctcttttattttttccattaagagactcattgcttgggaaatgctttcttcgtactaaaatttgattcctttttttcttatgaaaaacgaactcagtttaaaagtatttttagctcgtatgacttgttttcattcattaataataatttgaaataaaactaaggaaatggaatcttaaaagtctatgacagtgtaactctacagtctcaaaatgacctgataaattgataagacaaagatgagattattggggctgttcatattatgattcagaatcattttctattgtggtattataggttggttaaagtgatggcctttttgatgggttttgttgtgtcttgtgaacaagtcgttactgtgtccattattggaatggaattatcactactgtatcatgagtgggtattttgattctatggttccctcagtattacatcttgacttgtaatcaattatgaatatttcttgatatttaatgtataggacatttatttatactcaataaatatttttcaaaagg

SEQ ID NO: 58156 - DNA, 1180 bp, Homo sapiens; identical to SEQ ID NO: 15290

SEQ ID NO: 58157 - DNA, 462 bp, Homo sapiens
ggatgtttacaaccccagcaccggggtcttcacggctccttatgatgggcgctacctgatcacggccaccctcacccccgagagagacgcctacgtggaagcagtgctgtcggtctccaacgccagcgtggcccagctgcataccgctgggtacaggagagagttcctggaataccaccgccctccaggagctttgcatacctgcgggggcccgggggcattccacctcatcgtgcacctgaaggcgggagatgcagtcaacgtcgtggtgactgggggcaagctggctcacacagactttgatgaaatgtactccacatttagtggggttttcttatatcctttcctttcccacctctaaggtggctggggagatgtcaggggaaagatagatagttgtaaaaactctaaagctttaatatattcggtttgtatgtaatggaagcacggggctagagtttc

SEQ ID NO: 58158 - DNA, 8783 bp, Homo sapiens
atgtaagttgagtttatggagctgccttttggtggcttgctttatctgcagtttttaagaagaaaaagaaggccctgagtcaaagaagatgcctcgaactaaacaaattcatcccagaaatctaagagacaaaattgaagaagcacaaaaagaacttaatggggcagaagtttcaaaaaaagaaatcttacaggctggtgttaaaggaacttcggaatcccttaaaggtgtgaaacgcaaaaagatcgtagctgagaatcacctgaaaaaaataccaaaatccccactgagaaatcctcttcaggcaaaacataaacaaaatacagaagagtcatctttcgccgttcttcatagtgcttcggagtctcacaagaaacagaattatattcctgtaaaaaatgggaagcagtttaccaaacaaaatggagaaacacctggaataattgctgaagcctcaaaatctgaagaatctgtctccccaaagaagcccttgtttctgcagcaaccatctggaactgcgtagatggagatccgaaggcgctgatcctgccaaattcagtgacctcgatgaacaatgtgactcaagttccttgtcaagtaaaaccaggactgacaatagcgaatgcatctcttctcattgtggcatacgtccccctcctatacaaacactgcattcgatgtcttacttaaagcaatggagccagaacttagcacctttttacaaaagggctcccctttgtccattaagacagaaaaaatgagggccaaataaaactgcacgttcccctcccaaattaaaaaacagttcaatggatgccccaaatcagacttcacaggaattggttgctgaatcacagtcttcttgtacctcatacacagtccatatgtctgctgctcagaagaatgagcaaggggcaatgcagtcagcttctcatttgtatcatcaacatgaacactttgttcccaaatccaaccaacataatcaacagcttccggggtgttcaggtttcacaggatcactgacaaatctgcaaaatcaagagaatgccaaacttgaacaggtttataatatagcagtgacatcatctgtaggcctaacttcaccttccagtagatctcaggttactcctcaaaaccagcaaatggattctgcttcacctttgtcaataagtccggctaattctacacagtcgccccccatgccaatctataattcaactcatgttgcctctgttgttaatcaaagcgtagagcaaatgtgcaatcttcttctgaaagatcagaagccaaaaaaacaaggaaaatatatttgtgagtattgcaatagagcatgtgcaaagcctagtgtgcttttaaagcatatccgctcccacactggagagcgaccctatccctgtgtgacttgtggattttcatttaagactaaaagtaatctgtataagcacaagaaatcccacgcacatactatcaaactgggtcttgtcttgcaaccagatgctggtggcttgttcttgtcccacgagtcccccaaagcacttagtattcattcagacgtagaagacagtggggagagcgaggaggaaggcgccactgatgagagacagcatgacctgggcgccatggagctgcagaatgtgcacataataaagaggatgtcaaatgctgaaactttactaaaatcaagcttcactccaagcagtccagaaaatgtgataggtgactttttgctacaggacagatctgcagaatcacaagctgtgacagagttaccgaaagttgtggtccaccatgtcactgtgtcccccttaagaactgacagtccaaaggccatggatcccaagcctgaactttctagtgcacaaaagcagaaggaccttcaggtgacaaacgtacagccactttcagccaacatgtcccagggtggagtctccaggttggagactaatgagaattcccaccagaaaggcgacatgaatccactggaaggaaagcaagactctcacgtaggaacggtacacgcccagctacaaaggcagcaggctaccgattactcccaagagcagcaaggaaagctcctgagtcctcgaagtttaggaagtacggattctggttacttttcacgttctgaaagtgccgatcaaacagtgagtccaccaactccctttgccagaaggttcccagcacagaacaagactctggaaggagtaacggaccctctgcagctcttgtcaccacgtcaacaccctctgctttgccacagggaaaaggcattgcttttaccaggtcagatgcgcccacctttggccacaaaaacacttgaggagcggatatcgaagcttatctcagacaatgaagctttggtagatgacaagcaactggatagtgtgaagccgcggagaacctcactgtcaagacgaggaagcattgattcccccaaatcatacatatttaaagattctttccagtttgatttaaaaccagtgggacggagaacaagttcaagctctgatataccgaagtcacctttcacccctactgaaaaatcaaagcaagtgtttcttctgtctgtaccttcacttgactgtttacctatcacaagaagtaattccatgccgaccacaggttattcagcagtacctgcaaatataatacctcctcctcatccactaagaggaagtcagtcatttgatgacaaaattggcgctttctatgatgatgtctttgtatcgggacctaacgctcctgtgccccagagtgggcatccccgtacacttgtgagacaagcagccatagaagactcttcagcaaatgaaagtcatgttcttggtactggacagtccctggatgagagccaccaaggatgccatgctgctggtgaagccatgtcagtgaggagcaaggcactggcacaaggcccacatatagaaaaaaagaagtctcatcaagggcgagggacaatgtttgagtgtgaaacttgtagaaacaggtataggaaactggaaaattttgaaaatcataagaaattttactgttctgagttacatggaccaaaaacaaaggtagccatgagagaacctgagcacagccctgtgcccggcggtctgcaacctcagattctacactacagagtcgctgggtcctccggcatctgggaacagacgccccagataagaaaaaggaggaaaatgaaaagtgttggggatgatgaagaacttcagcaaaatgaaagtggaacatctccaaaaagttctgaaggccttcagtttcagaatgctctgggctgtaatcccagtttgcctaaacatagtgttaccataagaagtgaccagcagcataaaaatatacagttgcaaaactcccatattcaccttgttgccaggggccctgagcagaccatggatcccaagctgtcgaccatcatggaacaacagataagttcagcagcccaggacaagatagaactgcagagacacggaactggaatctctgtcatccagcacaccaactccctgagcaggcccaactcatttgacaagcctgagccttttgaaagagcctccccagtttctttccaggagctgaatagaacggggaattccgggtctctaaaagtgataggaatctcccaagaggaaagtcacccttctcgggacgggtctcatcctcaccagcttgcactatcagacgctctcagaggagaacttcaggaaagctccagaaagagtccaagtgaacgacatgtgttaggacagccctcaagacttatccggcagcacaacatccaagttccagagattttggtcacagaagaaccagatcgagacctggaagctcaatgccatgatcaagaaaagtcagagaagttcagttggccccagcgtagtgaaaccttgtcaaaattgccaacagagaaactgccacccaaaaagaaaaggctccgtctggctgagatagaacattcctcaacagaatcgagctttgattccactctctccaggagtctaagtagggagagcagtttatctcacacttcaagtttctcagcctctttagacatagaggacgtttctaaaacggaggcttcccccaaaatcgattttctaaataaagccgagtttcttatgattccagctggcttgaatactctgaatgttcctggatgtcaccgggaaatgaggcgtactgcatcagaacagattaattgcacgcaaacgtcaatggaggtctctgatctcagaagcaaatcattcgattgtggaagcatcaccccaccccagacaacaccacttactgaattgcagcctccatcttcaccttctcgagtgggagtgactgggcatgtgcctctcttagaaagaaggagaggcccactggtacggcaaatatctttgggcatagccccagatagtcatctgtctcctgtacacccaacatctttccaaaatactgctcttcccagtgtgaatgcagtgccatatcaggggcctcagctcactagtacatctttagctgagttttctgcaaatactttgcactctcagactcaggttaaggatctgcaggcagaaacatcaaactccagctctaccaacgtttttcctgttcaacagctctgtgatatcaatttgttaaatcaaatccatgcaccgcctagccaccagagcacacagctatctctgcaagtgtctacgcagggtagcaagccagataaaaattctgttttatctgggtcttctaaaagtgaggattgctttgctcccaaataccaattgcattgtcaggttttcacttcaggcccatcttgctcttctaatcctgtgcattctttgccaaatcaagttatttcagatccagttggaacagatcattgtgtgacatcagcaacattaccaaccaaattaattgacagcatgtctaattcgcatcctctgctaccaccagagctcaggccccttggaagtcaggtgcagaaggtgccatcatcattcatgctgcccatacgcctgcagagtagtgttcctgcttactgttttgctacactcacatccctgccacaaatactagtgacccaagatctgcccaatcagccaatttgccagactaatcatagtgtagtgccaatcagtgaagaacaaaattctgtgccaacattacaaaaaggtcatcagaatgctttgccaaacccagagaaggaatttctatgtgaaaatgttttttcagagatgagccaaaattcttctctatcagaatccttgcccataactcagaaaatatctgttggtcgactttcccctcaacaagaatcttcagcttcgagtaaaaggatgctttccccagcaaatagtttagacattgccatggaaaagcaccagaagcgggccaaagatgaaaatggagctgtttgtgcaacagacgtgagacctttagaggctttgagttcgagagttaatgaagctagtaaacagaagaagcctattttagtgagacaggtttgtactacagagcccctggacggtgtgatgttggaaaaggatgttttttctcaacctgaaattagtaatgaggctgttaatttgacaaatgttttaccagctgataattcatcaacaggatgctctaaatttgtcgttatagaacctataagtgaattgcaggaatttgaaaacatcaagtcatccacatcattaactcttacagttcgaagttcacctgctccttcagaaaatactcatatttctcctttgaaatgtacagacaataaccaagaaaggaagtctccaggggttaaaaatcaaggtgacaaagtgaacatccaagagcaaagtcaacagccagtcacttctctttcattgtttaacatcaaggacacccagcagctggctttccctagcctgaaaactacaaccaactttacatggtgttatctcttaaggcagaagtcgttgcatttgcctcagaaggaccagaaaacttcagcctatactgattggacagtaagcgccagtaatccaaatccactcggtttgcccacaaaagttgcacttgctctccttaattcaaaacagaacactggaaaatcactatactgtcaagcaataactacccattccaagtcagacttattggtctattcaagcaagtggaaaagcagcttaagcaagagagcattaggtaatcaaaagtccacagtagttgaattcagcaataaagatgcctctgaaattaacagtgagcaagataaagaaaattccttaatcaaaagtgaaccaagaagaattaaaatatttgatggaggatataagtcaaatgaagagtatgtatatgtccgaggcaggggaagaggaaaatacatttgtgaagaatgtggaatacgttgtaagaaacctagcatgttaaagaaacacatacgaacccatacagatgtccgcccctaccactgcacttactgtaacttctcctttaagactaaaggaaatctgacaaaacacatgaagtccaaggcacatagcaagaaatgtgtggatttaggcgtctcagtaggtttaatagatgaacaggatacagaagaatcagatgaaaaacagagattcagttatgagcgatctggatatgatcttgaagaatctgatggcccagatgaggatgacaatgaaaatgaagacgatgatgaggacagccaggctgaatcagtcctgtcagccacaccctcagtcacagctagcccgcagcaccttccatctagaagtagccttcaggaccctgtgagtactgacgaggatgtcaggatcaccgattgcttttctggggtacacacggacccaatggacgttctgcccagggcgctgctcaccagaatgactgtcctgagcacagcacagtctgactacaataggaagacactctctccggggaaggccaggcagcgtgctgcgagagatgaaaacgacacaattccgtctgtagacacttccaggtccccgtgtcatcagatgtctgtggactaccctgagtcagaagaaattctgagaagttctatggcaggaaaagctgttgctataacacagagcccatcatctgtaagacttcctcctgctgcagctgagcacagcccccagacagcagcggggatgccttctgtggcctcaccacatcctgaccctcaagaacagaagcagcaaataactctacagccgactccaggcttgccttctccccacactcatttgtttagccaccttcctttgcattcccagcagcaatcgaggacaccttataatatggttccagttggggggatccatgtggtacctgctggcctcacatactccacgtttgtgccccttcaggctggaccagtgcagctcacgatccctgctgtcagtgtcgttcacagaactttgggtactcataggaatacggtcacagaagtgtctggcactacaaaccctgctggagtggctgaattaagcagtgttgtgccatgtattcctatcggccaaatccgcgtgccaggccttcagaacctaagtaccccaggcttgcagtcactcccctcgttaagcatggaaaccgtcaatattgtaggcctagccaatacaaatatggccccacaagtccatccaccaggactggctctgaatgctgtcggactgcaggttctgactgcaaacccttcatcacaaagcagccccgcccctcaggcacacattccaggtctccagatcttgaacatagcattgcccaccttaatcccctcagtcagtcaagtagccgttgatgcacagggagctccagaaatgccagcttcccaaagcaaagcatgcgagacacaacccaagcagacttctgtagccagcgcaaaccaggtcagcaggaccgagtctcctcaggggttacctacagtccagcgggaaaatgcaaaaaaagttctgaatccacctgcccctgcaggtgaccatgcaaggcttgatggcctgagtaaaatggacacagagaaggctgcctcggcaaatcacgtgaagcccaagcctgaactcacttccatacagggccaaccagcgtccacgtcacaacctctgctgaaggcacattctgaagtttttacaaagccctcaggccagcagactctctctccagacagacaggttcccaggcccacagcactaccgcggaggcagcccactgtgcacttcagcgacgtgagcagcgatgatgacgaggacaggcttgtgatagcaacctgatggattttattttttatttgctttttttttatataacacttaaaggtttctttgaaaaccctcctttccttaaagcacatttttctgacataaactcatgactaatctttgtgcaatcatgaacttttgaccaataattgttgttttgtgtcagctccagccatttttgtacatgttgtatagacaattgtgccttttaggagctttatgtttagaaactgtacagattgttgaatatctatatacataaaaatatattatatatgtatatgaaaaccaggtagttatttgtgtttagtaaggaaaacctgtcaaataaatcaaatgattaaattatatgttccactgttgaatataaattttatggctatggggcagagtttctgtgtataaattagtatgtaaactccatatttattgtattcatattagtctttgaaaatgggtctgtcctccttgtgtaagacagtaactttacacttcagacagattttctgtgttatgaaatgtttcagtaaaatattgtttactgactttaaa

SEQ ID NO: 58159 - DNA, 1896 bp, Homo sapiens
gctcgactttttatttttttttttcatttcataaataatgtactttattttattgcatatggctattaaggagggcatccatgatcaatacagactaaatacaatgcactattctagtccagtttattctcgtctccagcagcatcacattgacccctatatacagcgtgtacagtggaagacagagcaagataagttaagtctcttgtcatatcacaatagcaagaaatatatttaacatcttgatatccagaaacaatacgtacccaaaaagaaaacactgtttaataactgttaaagtttatatagcaaaaaatattttaaatttaaggtaagtcaggcaaaatgtacaaagacccaatatacattgtgaagttttagcaaacataacatttatacattttggttccattctgtaaactaaattaaaaatgtaaatattgcatatgcctttttgtgaaatgtacaggatagaggaaaatttagcatattatcatctgtgtattttgcttgttttaagctgcagtatgaacacgaaccatctgtatagtgtcatgactactctacggatagagggcgagttaaatatgcgtcaatacactgctttcagcagggtccatattcagtccctatcgtacctggggggagttacaaagcaaataccacccattgatgcctattcccaaaactaaataaaaacttcaggatgttttatacatcttaataaagtatatcatacactgaaattgaccttccagctaacattatatggcctatgcactgctgtgatgtataatttcagaaaagtaaaaccttaaaaatgttcagggagatcactttacattcaactttgtcttgcaatacaatcctctgttctaaagttcagcacggaagcaggaagacttttggcattgcccattaaatatatttttaagacattgaattttttggtcttcctctaaaaaagcctcattttattaatgcattattctatagcgatagatatctattatatatttatatatatttttctaaaaacaaaacaaaacaaaaccaacaacttacatctccaatgaattagtgtaacctctccatgactatcagagaagataggcactggggaagcccccacgggaggagaggtcgacagccctccaatcaagtgtcgagggagcagaaaacggcagaacattctgccggtcaagttcagcagttttaggtaacatctgcgagaactgccacacactggtattttcagaatactgaaaacataaaacaagggtagtcttgtccggaattttttcgacaagtaacatgtactgcgagattgcttttcttctttttctttttccatcaataacataggggctggaatgcctctttttatcagtttctttctttccttttttttttttttttttttgtttttttttgttcagggcagcctcactggttgacataataacattttattaaagataatacgttttttaaaaatcaaatctgccaaacccggaccaccctggaattgctagcacgcctacagggatttttggttacagaaaggcatgcccaagattcaggagagcagagacatctgagcttgtaaatagaataaaaggcgtttgcaatgtgaagtacctacataaacatctacatcgagaagattaaacaagtctgttaaaggtaaaaagagatattcatccccttcccaaagcccttccctcccacctcccactacccaatacagttgattttcaaaagtaggttgcttcagttacatataataattattatttagtaatccgtcttcaaagtccaatccccaaattttcacttccattgagaaatggtcagtccccacacttgggcttcggtgttgggacgtaaacatct

SEQ ID NO: 58160 - DNA, 819 bp, Homo sapiens
tttttttttttaatgttaaaaatatttattttttttcctaaaagatcacacaaaagttgggaagagaaggatgtcaattagactacatcaaaatctgggcagagggaggacaaagagctgcctaaagaaactggtagctggagcaaactgcagagatcaagatgaccctagtcaacggaaccagcagcccaggtcagccacattcaggagcaccaccgaggcacggcagggagagcaaagttgctggccccaatcattcctccttttcagggcaggagaggcagaagctcactctttagacatgttcttgatggtcttgtgctctttcatggccttctcccaatcgctgccattgaattccctcagtgaccatactccgcacagtgccctcatccaggcagtggggggcaattccgaagcctccggggtttgatcgtggagtatagaagctctgaacgccacatctcttacagaaggtatgctgggctttgtgagtattgaacgtgtaagtcgttatgtgctcagctcccttcaggagcttgaagcgagaagctggaacaatgaagtgtctattctgcttcttcttgcaaatgctgcaacatctctggaattaaactgaagtcccctcttttcaggccacctttgaaaaagttctaatttagcacagaatcctctcacaagttattccacagtgcttcttttccaatctggactctattgttagtagcctggtcagttctccatttgagtaattccatcgtatgtgcttattattcatatataattccggtacttgcagtcaaatatatgcaagtctgc

SEQ ID NO: 58161 - DNA, 1063 bp, Homo sapiens
ttttttttttttaaagtttatcatttatttccaatacattaggataaaaacccactttatgcaactgtaccctttaattcatttcttctgaagaaaagtacaaaagaccagactaaaattgagacaagcatttaaaggaaaatcctttgactcagagtccaaaaccgaactgtaaatggttcattttaccaaaagaattagtttttgtacaaaatataaagaattctacactataaacaaagacggctgtatatgtaattaaattagaattctagtatctgcttttcctctaattcttctggagtacaaacatatttgcaagtcagaaatctaatattctcaatggacagactgtcttagaataagcttttacccttaagatatctggaaagatagtactcattctttcccttggctcaaagtccaatatatcagtaagttttaatttagtttacaaaactctgccatattaacatgaagagcacactaatgcttaatgtttaagcattatcttttaggaagtaatacaacacagagctcaacaccgaatctaaaaggtcacaatctaagtcattattaattcagaaaacttcagcaacttctatctttattgaaaaagaccaaaccaatcccttatctcctactatatcattactctattttcatggcccttctatcaaagaaacagcttaaaataaaacttggttagagttaagtcatagaaaatagttctctagcactagctgaagttcagacttgatcaggaaagcaacttctatacagtaatgattttctgactcagtgtttaagatagtattaacctgacttttatctcttttaacatttgaaatctttgttatctaaaagtctttcccaatagaattataaccatgatagttttaaaggagacaatatattaaaagttgagctggaaccacatagtcctttaatatgattagccagttatccaagtatcaataacgttaatctccttttaaatgaaaacaatgaaattttatgagcttaactgaaatgtcttaatttagaacttctcaattctttt

SEQ ID NO: 58162 - DNA, 1318 bp, Homo sapiens
tttttttatggttctgattcttttaatttttttttacaggtccaaccagctgtacatttggaaaaataaaactttattaaatcaaatgaatgagtatgtctgtttcctaagaaagacaatgataaagaatttggtggaaggtataataggggtttgttgactttgcttttagcctcatggtagttggtagagagcatgattagcttttttctgtatgtgactgcttcttcattgctgcagcttcagttttgaattgatgtctggactgccagcggcgtccattattccagacgcggccaaaagagggcagccagcctgcactggtcctggagctgtgatcaaagttggccccaactcggtctggggggagttttttcaacttctgtttttccttttctttaagaaattcttcataggatggtcctatttcttggttcccagcaatgtattcttcatcttggatcatccagggaggtgtggcacctgagtggatgttaccaactcctggtatatcctgatggccaatgaatgtcagagatggtcctgtctccatccagtcaagctctggagctggtggcaaggtcccaaattgagggcctgctgtaaagctggaagctacttggctgttcatccctttcccagcttcctaggtgctgaagagccctcttctgggtcctgcaactgcctgaggtggtctggatcctccgagggaaaccaacctctaagacagaccgaaccaccctctgtcggctctgctccacctcacggatctgagctgccatctccttgatcactttatcctccttttcttcataggaatccaaacctttcaccatggatttcttgaatctaaaaggaaaaggggcaaaaccacccagaacccattccccaccagttaaaacgaaaagctcctcagtagatatttttttaattttgagaaattccaaattcagaaacaaaacagtatagtaagcacctatgtacctctcacccagagtccttgtaaacattttgccatactggctccacttcttttgtacagacacacgtcctttttgccaaaacaaaataggtttagacgtcaaaccctattttcaacacacatctcccaagaggaggaacattctatacaaccatgataccattaccacattaagaaaattcttccttttagtgttcaaatatttggctggttagtatagacatggtttacatgtcttcagacttgagtgtaggcatacaggctatattcacatttccctcgtctcaaaaacgtgcattatgccttctctactctcacctccaatcccaaagtcca

SEQ ID NO: 58163 - DNA, 1595 bp, Homo sapiens
ttttttttttttaacagcagatagattctttatgttcaagacagcaaattcagatacaaaaacccaccgccatcgtccctccctccctcctgctctgggccagggatgggcctggaaggagagatgggaggtggggaggaggttgcggggttcacagcagactcgtgtcaaatgcggaggtaacaggctccacagggagggggctcctctcaggaggggtgagggcattattgcatttgctggggggaaggacaaccctctcccctgtattccctgcgtcaggaaactaggaaggtcatgacccccaaacagaacccaaggccccagggagacagagggaccagtttggcagctgatggtggaaagtggtggaggcgggggtggccgcccaatttggctgatccctcccctccctgtgcctgacccagctgaggtaggtggggaacagggcacaggggggccggggaccccggccagactgggaaccagggaggggatggtaccgattggagcggggcagggggcctggccccacctcccctcaccatcgtccttgggctgatgagctaaggctcaaggctggaggctcggggtcctgacgtaaagtgttccctgctgggggcccccaccaggttgcgcccgggtcatcatcgcagggtccgggggcagtcctagtagcggccgaccttggcgtccccaatggcgccccagacgtcaaagacgaactcgtcagggaaggcaaagtcacccagccgttcgtccagggcctcggccagctcatccgggttccttttgtcctttcccagctccaccatggtggccgccagctccgtgtccctgatacccatgtaactctccagcaggtcatccaccttctcaatggccttctcttcaaaggcagagggcagatcctccactgtggcggggccccgggatcggagccgcagggtccctcggccagtgcccagttgtgggccagagccagggcggccacccgctgaacgctggctgatcatgtcgaaggccttgcgaggctccgtgagcttcagcgtgaaggtacggcctcggggcagctccttgagcagccgggccacctcgtagtgccggcagcccagcaggctctgcccgttaatggcctcgatcatgtcgcccacgctgatgaggtggatgtggtcgatcacgctgccctccttgatgcgcttgatgaaggcgtagccagccccgttgtccgtgatggtgagcccgagtgcatcctccgacttgaacacctccacctccttgcgctgccccttcacgtgggcgaagatgaagtcctccagcccgatctggccccccaggagcttgtccatgtccactttgtgggtgttcagggtgcagaacatcacctaaactagtgtggttgcctcctgtgggtttcccagcttccaccctcaccccctacgacttcttgtccagacagcagccagaatggtccagctgtgtggctggggggcaagtcacttcacatcacagggcctcagtttcttcatctcgtccgccgccgccgccgccgccgccgccgccgccgctgcctccgcctccccgtgcgcacccgc

SEQ ID NO: 58164 - DNA, 495 bp, Homo sapiens
  misc_feature (1)...(495): n = a,t,c or g
ggnngngttnnnttntnntntntgatctcgnancctttgacatgattacgaatttaatacgactcactatagggaatttggccctcgaggccaagaattcggcacgagacccgggtctggccctcactgcaggacaggttcagctcactgaaaggggtcccaacagaggtgaagatccaagaaatgacgaagctgggccacgagctgatgctgtgtgcgccagatgaccaggagctcctcaagggctgtgcctgcgcccagaagcagctacacttcatggaccagttgctcgataccatccggagcctgaccattgggtgctccagttgctcgagcctgatggagcacttcgaggacaccagggagaagaacgaggccttgctgggggagctcttctctagcccccacctgcagatgctcctgaatccagagtgcgacccgtggcccctggacatgcagcccctcctcaacaagcagagtgatgactggcagtgg

SEQ ID NO: 58165 - DNA, 1065 bp, Homo sapiens
gtctgagctgcccaggcggcgggggagcagcgagcgggcttcagcgagccgcaggaggcacaggcctgtcctgggtccccgcaggtctgcgcgtctgttgttcccagcgctcttggaggcctgcaaaggaagagcaacctgtccagactccccgcaggacaggaaaaggaggggaaatctcgacatggaaaaaccctacaataaaaatgaaggaaacctggaaaacgagggaaagccagaagatgaagtagagcctgatgatgaaggaaagtcagacgaggaagaaaagccagacgtggaggggaagacagaatgcgagggaaagagagaggatgagggagagccaggtgatgagggacaactggaagatgagggaagccaggaaaagcagggcaggtccgaagggtgagggcaagccacaaggcgagggcaagccagcctcccaggcaaagccagagagccagccgcgggccgccgaaaagcgcccggctgaagattatgtgccccggaaagcaaaaagaaaaacggacagggggaccggacgattcccccaaggactctcaggaggacttacaggaaaggcatctgagcagtgaggagatgatgagagaatgtggagatgtgtcaagggctcaagaggagctaaggaaaaaacagaaaatgggtggttttcattggatgcaaagagatgtacaggatccattcgccccaaggggacaacggggtgtcaggggagtgaggggtggaggtaggggccagaggggcttacacgatatcccatacctttaatgcctttggccttccattctgatttctctgatgagaatattgctggccctgctttccctggtaggtatttgccaggcccaatgctttaaccttaagctgatactttgctttagatgtcagtctcgttaccagcagccttttgacccaactacggcgctctatattttagtagaggattttcacccatgtgcatggaaaagatgttcatggtacattgtaaaaaaataaaattaaaattaaaaaaagtttgcagaaccgcaaaaaaaaaaagtcgac

SEQ ID NO: 58166 - DNA, 1374 bp, Homo sapiens
tttgtacaaaacctgaaatatttttacttttttaaaactttgatctaagttgccttagacctcatggactcgatacaagagtaatatgaattgggaaataaaacactttaatagccacgataaactttgttagaaatgtacatgttgccaaaataataataataaaattaaaaaaaagagagagagagaacagcttgatgtccaggttagattatataaatgttcaacaagggcagggtaaaggaaactttaaaaacaccagttctgaataagcctggggccccgtgagactccccctctcccacccagtctcgggccctagggactgcgtccctccaaacaggacaagtgggagtggataaggcctccaccaagctgcctctcccagtggacaaaaacatccaggtaatggggtatataaacaaagctcataagaaatgtacaaatataaaaagctacaaacattaataaattacagcatcacaaaacacggaaacacttcacaaggtgctagtaaaataactgtatcccccaatcccctcatcatacaaggaaaacaaagagctggtattaaagttgaagattcatcttcaaaatgtgtctgaaatagatcttttgtgtactatttgcttctgtaaagacagagtgtaaggctgcacagacatcacttgtttttcaggcaataccttagttcttaaaagaaaaaaataataataataaaaggaaaggagaaggaaaaagcatcagaacccaactgtccatctgactcagcaaaaaactcgtataaatgttaatgaagaactctatagaaagaaattcctaaagatacttttactcttataaaaaagaagttatttaaaaagctatttacacgctacattctatgaaaaatatgcttcaggaaatacatctaaaattaaaatacaggattgcctgagaaacaaatccagcccctccgtgtcgatggtggacacaccatccaggtacgacccatgcaggcgacaccacacgctgacacgggagaacagagaagtgccgaccgtaagtcctcgggccgcctggccactgtccctgcccctgcccctgccctgccagtcccagggcaggggtgccttggctgagaagtgcttctccagagtgtagccagcagggcaagacggtccctgccacatggcttagcctgggcctcccagacccccaagatgtggctgagcccttgccctttcctggggaccccacaatggctcccctgcccgctaacacaccaacccagctgccagtcttagctgccccccagaaatgctcctgggcattcaggctgaacatccaccatcctgctgccacctgccaaccagaaagctcggggcagaccct

SEQ ID NO: 58167 - DNA, 846 bp, Homo sapiens
  misc_feature (1)...(846): n = a,t,c or g
gaagatggctgccgcctgggggtcgtccctaacggccgcgacgcagagagcggtcactccctggccgaggggcaggctcctcacggcctccctgggaccccaggcgcgtcgggaggcgtcgtcctccagccccgaggccggcgaagggcagatccgcctcacagacagttgcgtccagaggcttttggaaatcaccgaagggtcagaattcctcaggctgcaagtggagggaggtggatgctccggattccaatacaaattttcactggatacagttatcaaccccgacgacagggtatttgaacagggtggggcaagagtggtggttgactctgatagcttggccttcgtgaaaggggcccaggtggacttcagccaagaactgatccgaagctcatttcaagtgttgaacaatcctcaagcacagcaaggctgctcctgtgggtcatctttctctatcaaactttgatgtgatgactggtgactctgggattgtcaccagttgtaccaatttgaagaacctggaattagtagaattctagaagtttacttctaatcatgtccctctcaattttatttcccgcagtccaggagtgttatgttttgccactattattttcagaatgtgaagattttactcttggcttaatttttccctccactcagtgctaaggctgagcctccagatgctgttacctcagatttaatcactggttgaaactccgtataatctgtagagcctccatggctcataaaaatttggaattaacttctcttgccttaagagctgcttgtacatatgtggatagctatgtataaaagcttcattttaaagaaaaannaaaa

SEQ ID NO: 58168 - DNA, 1563 bp, Homo sapiens
gaagatttccttacaagggccgtgttacatgacactgttaatgattgcatttggcttgctgtgggggcatctcttgcggatcaaacccacgcagagcgtcttcatttccacgtgtctgtccttgtcaagcacacccctcgtgtccaggttcctcatgggcagtgctcggggtgacaaagaaggcgacattgactacagcaccgtgctcctcggcatgctggtgacgcaggacgtgcagctcgggctcttcatggccgtcatgccgactctcatacaggcgggcgccagtgcatcttctagcattgtcgtggaagttctccgaatcctggttttgattggtcagattcttttttcactagcggcggtttttcttttatgcttggtataaagaagtatctcattggaccctattatcggaagctgcacatggaaagcaaggggaacaaagaaatcctgatcttgggaatatctgcctttatcttcttaatgttaacggtcacggagctgctggacgtctccatggagctgggctgtttcctggctggagcgctcgtctcctctcagggccccgtggtcaccgaggagatcgccacctccatcgaacccatccgcgacttcctggccatcgttttcttcgcctccatagtttctcctggcggcgctggtcctgtctctcattctgccgaggagcagccagtacatcaagtggatcgtctctgcggggcttgcccaggtcagcgagttttcctttgtcctggggagccgggcgcgaagagcgggcgtcatctctcgggaggtgtacctccttatactgagtgtgaccacgctcagcctcttgctcgccccggtgctgtggagagctgcaatcacgaggtgtgtgcccagaccggagagacggtccagcctctgatggctcggagatgatggaccgtggaagggaagcgtctgtggggagtgagcgcttagatggccagcagctgctccttctgggaagctcgcaccttggcaacagaacagccctctagcagagcgtcagtgcagtcgtgttatcccggcttttacagaatattcttgtcctattttagaattttccggagtagtttatttgcagtctgttgattatgtgcagtagacccgggacactgcgttttaccgatcaccttgaatgtggtgcctggatgtgccttttttttttttccctgaaattattattaattttctattgtgagttcatcagttcatagtttttttagtaaagaagcaaaattaaaaggcttttaaaaatgtacaacttcagaattataatctgttagtcaaatatttgttattaaacatttctgtaatatgaagttgtaatcctggccgtgagcttggaagcttacttttgattcttaaagcctatgttttctaaaatgagacaaatacggatgtctatttgccttttattgtaacttttaaatgaaataatttcatgtcaatttctattagatatatcacttaaaatatttggttttaaatcacaagaatatgtattctttaataaagataatttatgatcatggt

SEQ ID NO: 58169 - DNA, 830 bp, Homo sapiens
gaaattttattgcaaagaatctaaaatctttgtgtgtattttgtttaatttcagggtagtatccacatgccattctttggtggttggtatttttggcctgtacattttcttattcgatgaggctactaaagctgatccactttggggtggtccatcacttgcaaacgtgaatattgctattgcctcaggctacctcatttctgatttgtccattataattttgtattggaaagtgattggtgacaaattttttataatgcatcattgtgcgtccctgtatgcatactaccttgtactgaaaaatggagtgctggcatacattgggaattttcgcctgcttgcagagctttccagcccgtttgtgaatcagcggtggttctttgaagctctgaagtatcccaagttttctaaagctatcgttatcaatggaatactcatgacagtagtattcttcatcgtgcggattgcctcaatgcttcctcattatggcttcatgtattccgtgtatggaacagaaccctacataaggcttggagttttaatccagttatcctgggtcattagttgtgttgttttggatgtgatgaatgtcatgtggatgatcaaaatttcaaaaggttgcatcaaagtcatctctcacatcagacaagagaaagccaaaaatagtcttcagaatggaaaacttgattaaaagagtgctaccgataagcaaacttcattactacccagcatatctgctgataggatgaattcttggcatgttcttgtgtacctttcttaattataattgttattcaggatttcagtgtcattttttttaaaccttagaa

SEQ ID NO: 58170 - DNA, 1632 bp, Homo sapiens
ttttttttttttaaaaaatcaaagactttattggataaaggttacacaacattctttaacatttaaaactctgagcatacttaagatgagaaacaatttttatcattcaagtctacaaaacaaaataggcttatgaagattgaaatacagacaaaaggtagcatgaagcaaagcttaaatattaagcaactaaagcaatgaaagtgaaatagcaacatggtaggtgtaggttttaaataccaccaagtctcattttttaaaaaatgaaaatctggtttgtaacaaaacacctttgagaatatgccatgagaaaaaaaaaatatttatatacttaaaacctgatctctcccaattcttttgctttatattattacttcttggtcatttccatcactctacacaaataaagaattctaaagcttaattaaaaatcttgattatacacttcatgtatcatggtttgggagagttatctggttcttgaagtgagcccgaaagtactgctggtgttatgtatctgaaagaacaagactgacccaaaccaaagccctaggccatatagagtagggcacccctatagtatagttcatgtcatctttagaactccctgctgctacagttcctgagctgactttttctgatttgataaaatatataatgacttcataatatgtaattttccaaacagacaattgtagaatgcaatcaaaactttaaattatttgcagtataattagaatttgcattaagctcattagacacaagactgcctgccttttcttcaagttgtaaaacaaatcataggtatattaaatgttttaaaactcacccagaaccttctgttaatcctgagcctggggttattaggtaattccaaacttacacagtaacattatgaaaagtctgaccacttgagccaagtgctcagttatctgttacgttgcttcatatgaattttaaggttttttattttttggcatattttcccttttttgtagtaagtaatcaatatggattatctttctggtttaaaaaataaatcagtattgccactaaaaaacttcagttttattattattaaaagtacggcaccatcaaatataaaatgccttaaaaatgtagtactaacaggtccatctggttttctcatgttttctccattcattaaaaaagaaaaattaaggtcttttatatatttaccaaagacaagaaaaaaaactacagtctctattagtaagaattcatgctccatgcatgagaagtttgacactgttttaaaggatcctgttcctgccacttgttgtcccccagggccaagtcctactgacacctgttggaatttcttgcacttaggagcggctctctatggagagaggtccacatcaaaatttagacgttgtcaccttttttgaactagataaaaccagtaaggatacagacaataataaaaggctttccaactcagcagaattaagaactagctcttggagtatatacatttgcactccaatatcaacactagcctatccactttgagtcaaaatttgaaaggtaagaatgtaattatgaaaatgtgcacaaaatgttaaatactagtggcaaataaatatatcttaatatgttctaacaagc

SEQ ID NO: 58171 - DNA, 939 bp, Homo sapiens
tttgaagttatagcacagtttattagctagaaatgaattttaacagccctgtctcagtctgaatgaggcaaatttaggcccacatcattaggtatttcacaacttaacacctaaaatttaacataaatttacaaaaataaggcttattttaaagtcatctggagaaactgttttacaggtatcttaactttatttagctctctgtagaattaacatctttgcaaatatattattcaaccaagcatttgccataaagataagcatcaactttcccattggacaagtgatagtgttcaagctacttgacttgtgaaaaacaaaaaaccaccatgacttctcaacaaatacattttaaaatgaaatatgctcaggctgataaacaaacaagatattaaaatggagactgacattgaactacatagtcaacttgaaaaacacaagaagacaatgctcctataaaatgatatattattggctttacaaagacatactggtttatgtttacaactatgttttattttcaaatggtaaaggaaaggcttcatgttgctatttgaaagtacttctcaactagccgggcatggtggcataattcctgaagtaggaggatcatccccttgaggccaggaggtccaggctgcagtgagctgtgattgtgccactgcaccatagcttgggtgacagagtgagaccctgtctttaaaacaaaaagaaagtacttctctgcaagtaaattttatggatataatctttattctgattaaataaatgattaccctaatcagctattatttattattttctatttaacattcatttttgaagtgccagagacctgcctatgtcgcataaagtttggtcagatatatgcaaatgcagtgttggtgaagatcatctgaataatgatcactttcacatgccatattagttatattttag

SEQ ID NO: 58172 - DNA, 369 bp, Homo sapiens
ggtagaaccacgcagtgcaagaaggcctgctggtcacacttaagtgtcttcaggtaccccccagagcgtttcacaatgcccatggcaagctgtcgggaatgtcaggtccaagggtgaaaagtggaatccgctcatgtgcccacttgtgtgttgtgaatttcaggatctggtgccaggagacactgcattctactcccaggtgggtttctccggcttttaaaaatgcggaatactctctccatcgtgtcgcagggcatgatttctccattcagtgccttctgaaattgcgagtcagagatctggttccgtcgtccgcttccgccagccttggccaagtcattttgtcttttgatgttgggagggacagag

SEQ ID NO: 58173 - DNA, 536 bp, Homo sapiens; identical to SEQ ID NO: 25255

SEQ ID NO: 58174 - DNA, 1165 bp, Homo sapiens
aggaactgttcaggcacatgaaccaaggggatgcggggagtctggctcccagccttgggggacagagcatgacagagcgccaggctttatcttatcaaaatgctgactcttatcaccatcacaccagcccccagcatctgctacaaatcagggcacaagaatgtgtctcacaggcttcctcacccaccccgccccacgggtatgctcaccagccggcactgatgcattcagagagcatggaggaggactgctcgtgtgagggggccaaggatggcttccaagacagtaagagttcaagtacattgaccaaaggttgccatgacagccctctgctcttgagtaccggtggacctggggaccctgaatctttgctaggaactgtgagtcatgcccaagaattggggatacatccctatggtcatcagccaactgctgcattcagtaaaaataaggtgcccagcagagagcctgtcatagggaactgcatggatagaagttctccaggacaagcagtggagctgccggatcacaatgggctcgggtacccagcacgcccctccgtccatgagcaccacaggccccgggccctccagagacaccacacgatccagaacagcgacgatgcttatgtacagctgggataacttgccaggaatgagtctcgtggctgggaaagcacttagctctgcccggatgtcggatgcagttctcagtcagtcttcgctcatgggcagccagcagtttcaggatggggaaaatgaggaatgtggggcaagcctgggaggtcatgagcacccagacctgagtgatggcagccagcatttaaactcctcttgctatccatctacgtgtattacagacattctgctcagctacaagcaccccgaagtctccttcagcatggagcaggcaggcgtgtaacaagaaacagagagttttgtgtacagcttgggaatgaaaaggttgattgtaaacccacagtatctagcagcgttgtgccaaattgcccttgtgtttctctccacccaaaatatcacagctgctttcctcacatttggttcatccgtgtgctgttcttttgggttctgagagggttttgccatgtttgcttgtatgaccaagtcaccaaggaaataaacaggaaggaaatccatgttctccaaaa

SEQ ID NO: 58175 - DNA, 1856 bp, Homo sapiens
gccgccaagaagctggtgaaccgcctccaagtggctcccaagacgcagctggatgagacggtgctgtgggtggtgcacgtctctggccccattaacccccaggtgctcaaaagcaaagcagccaaggagctcaaggcgctgcaggacttggcacggaaggaaatgctggagctcttggacatgccagcggcggagctgcttcaagaccaccagctcctctgggctcagctcttcagcccaggagtggaaatgaagaagatcactgacacccacacgccgtctggcctcaccgtgaacctgacgctctattacatgctctcctgctcgccagccccactgctcagcccctccctgagccacagggagcgagaccagatggagtcgacgctcaactatgaagatcactgcttcagcgggcacgccaccatgcacgccgagaacctgtggccggggcggctgtcctccgtccagcagatcctgcagctctctgacctgtggaggctgaccctccagaagcgtggctgcaaggggctggtgaaggtggggtgccccaggcatcctgcaggggatggtgctcagctttggggggctgcagttcacagagaaccacctccagttccagggccgaccccgacgtgctgcacaacagctatgcattgcatgggcatccgctacaagaacgaccatatcaacctgggccgtgctggcggatgccgagggcaagccctacctatcacgtgtccgtggagtcccgtggccagcctgtaaagatctatgcctgcaaggcaggctgcctggacgagccagtggagctgacctcggcgcccacgggccacaccttctcggtcatggtgacacagcccatcacgccactgctctacatctccaccgacctcacacacctgcaggacctgcggcacacgctgcacctcaaggccatcctggcccatgatgagcacatggcccagcaggaccccgggctgcccttcctcttctggttcagcgtggcctccctaatcaccctcttccacctcttcctcttcaagctcatctacaacgagtactgtgggcctggagccaagcccctcttcaggagtaaggaagatcccagtgtctgagtgaactaacagtcctgctttcagccaccatttgcacaagacacccagcactgaaagtcccgctgccaggagcaagggatcctttggaagcacccgccctttgtgccttgttgggggaaaccggtgacgcagaagtgagtgtggatacaccagagtttgcattggaaggaatgagtgtcacgtggggagggaaggggccagtggaccttttgtaagctttccactcaataaaatgaacctgtatggcaaatacttgaaatggaactcactccttccactttccccctttcttctgtcccaggaaatagatcatcttttgaaaagactcttgtctaggaaaagttgtgtccttttcctaatttaacgtgttctttcttaatgaagttttaatttatttttgttgagattttgctagatggcttttgcatcccctgtagatggtgagtgttggcggtgatgtccgtctcggcgttcggaggccccacggtcccgaggctgggccgggggcccccccagggtggctgtgctgctgcctgtaggagggtgcgggttgtgctgtcatcctcgggtttgcacgcccttttttaggagcctgtggacatctgtggttttgtactttggggcttcaggggaggtgtttaactttctagtgattgatgattgtcaggttttgaaataccaaagcttttttgttctgtttttaaataaatatctttcaaactttaaaaaaaaaaaaaa

SEQ ID NO: 58176 - DNA, 1152 bp, Homo sapiens
aaaagaaaactcagtagaagataatggcaagtccagactggggatatgatgacaaaaatggtcctgaacaatggagcaagctgtatcccattgccaatggaaataaccaatcccctgttgatattaaaaccagtgaaaccaaacatgacacctctctgaaacctattagtgtctcctacaacccagccacagccaaagaaattatcaatgtggggcattctttccatgtaaattttgaggacaacgataaccgatcagtgctgaaaggtggtcctttctctgacagctacaggctctttcagttccattttcactggggcagtacaaatgagcatggttcagaacatacagtggatggagtcaaatattctgccgagcttcacgtagctcactggaattctgcaaagtactccagccttgctgaagctgcctcaaaggctgatggtttggcagttattggtgttttgatgaaggttggtgaggccaacccaaagctgcagaaagtacttgatgccctccaagcaattaaaaccaagggcaaacgagccccattcacaaattttgacccctctactctccttccttcatccctggatttctggacctaccctggctctctgactcatcctcctctttatgagagtgtaacttggatcatctgtaaggagagcatcagtgtcagctcagagcagctggcacaattccgcagccttctatcaaatgttgaaggtgataacgctgtccccatgcagcacaacaaccgcccaacccaacctctgaagggcagaacagtgagagcttcattttgatgattctgagaagaaacttgtccttcctcaagaacacagccctgcttctgacataatccagtaaaataataatttttaagaaataaatttatttcaatattagcaagacagcatgccttcaaatcaatctgtaaaactaagaaacttaaattttagttcttactgcttaattcaaataataattagtaagctagcaaatagtaatctgtaagcataagcttatgcttaaattcaagtttagtttgaggaattctttaaaattacaactaagtgatttgtatgtctatttttttcagtttatttgaaccaataaaataattttatctcttaaaaaaaaaaaaaa

SEQ ID NO: 58177 - DNA, 1101 bp, Homo sapiens
aagaactgccagccatgaagcggcctcggctattaagcactaaaggggacacgctagatgttgtgttattggaagctcgagagccactcagctcaataaatactcaaaagatcccaccaatgctttctccagtccatgtacaggacagtacagacttggcacctccctcacccgagccgccaatgttggctccagttgcaaaatcacaaatgccaactgcaaaaccattagaaacaaagtcatttacacctaaaacaaagactaaaactagctctccaggacagaagactaaatcacctaaaaccgcccagtcaccagcaatggtcggaagtcctattcgatcaccaaaaactgtatccaaagaaaagaaatcacctggacgttccaaagagccccaagagtcccaagagccccaaggtcacgactcacattccccaaacacctgtgagacctgaaacgcccaacaggactccttcagctacactcagtgaaaaaatcagtaaagagactatccaggtaaaacaaatacagacaccccctgatgctgggaaactgaacagtgagaatcagccgaaaaaggctgtggtagcagataaaacgattgaggcctctatcgatgctgtgattgcacgagcctgtgctgagcgagagccagatcctttcgaattttcttctggatcggaatctgaaggagacatttttactagccctaagagaatttcaggcccggagtgtactactcccaaagcttccacttccgcgaacaatttcacaaagtcaggatccactcctctgcctctttccggtggaacctcaagttccgataactcatggacaatggatgcctccattgatgaggttgtacgtaaagcaaaactgggaacaccttcaaatatgccccccaactttccttatatctcttctccgtcagtgtctcctcccactcccgaacctctccacaaggtgtatgaggagaaaaccaagctgccttcctccgtggaggtaaagaagaagttgaaaaaggaactaaagactaaaatgaaaaagaaagaaaagcagagagatagggagagggaaaaagacaagaacaaggacaaaagt

SEQ ID NO: 58178 - DNA, 903 bp, Homo sapiens; identical to SEQ ID NO: 15327

SEQ ID NO: 58179 - DNA, 5180 bp, Homo sapiens
ccctcccttgcatgatggaaacaccatggctgcggcggcccagctctctctgacacagttatcaagtgggaatcctgtatatgaaaaatactatagacaggttgatacaggcaatactggaagggtgttggcttctgatgctgctgctttcctgaaaaaatcagggcttccagacttgatacttggaaagatttgggatttagccgacacagatggcaaaggtatcctgaacaaacaagaattctttgttgctttgcgtcttgtggcatgtgcccagaatggattggaagtttcactaagtagtttgaacctggctgttcctccaccaagatttcatgataccagtagtcctttgctaatcagtggaacctctgcagctgagctcccatggggctgtaaaacctgaagataaggccaaatatgatgcaatatttgatagtttaagcccagtgaatggatttctgtctggtgataaagtgaaaccagtgttgctcaactctaagttacctgtggatatccttggaagagtttgggagttgagtgatattgaccatgatggaatgcttgacagagatgagtttgcagttgccatgtttttggtatactgtgcactggagaaagaacctgtgccaatgtccttgcctccagccttggtgccaccatctaagagaaaaacgtgggttgtatcccctgcagaaaaagctaaatatgatgaaatcttcctgaaaactgataaagatatggacggatttgtgtctggattggaggtccgtgaaatattcttgaaaacaggtttaccttctaccttactagcccatatatggtcattatgcgacacaaaggactgtgggaagctttcaaaggatcagtttgccttggcttttcacttaatcagtcagaagttaatcaagggcattgatcctcctcacgttcttactcctgaaatgattccaccatcagacagggccagtttacaaaagaacatcataggatcaagtcctgttgcagatttctctgctattaaggaactagatactcttaacaatgaaatagttgacctacagagggaaaagaataatgtggaacaggaccttaaggagaaggaagatactattaaacagaggacaagtgaggttcaggatcttcaagatgaagttcaaagggagaatactaatctgcaaaaactacaggcccagaaacagcaggtacaggaactccttgatgaactggatgagcagaaagcccagctggaggagcaactcaaggaagtcagaaagaaatgtgctgaggaggcccaactgatctcttctctgaaagctgaattaactagtcaggaatcgcagatctccacttatgaagaagaattggcaaaagctagagaagagctgagccgtctacagcaagaaacagcagaattggaggagagtgtagagtcagggaaggctcagttggaacctcttcagcagcacctacaagattcacaacaggaaattagttcaatgcaaatgaaactgatggaaatgaaagatttggaaaatcataatagtcagttaaattggtgcagtagcccacacagcattcttgtaaacggagctacagattattgcagcctcagcaccagcagcagtgaaacagccaaccttaatgaacatgttgaaggccagagcaacctagagtctgagcccatacaccaggaatctccagcaagaagtagtcctgaactactgccttctggtgtgactgatgaaaatgaggtgactacagctgttactgaaaaagtttgttctgaactcgacaataatagacattcaaaagaggaagatccatttaatgtagactcaagttcgctgacaggtccagttgcagatacaaacttggattttttccagtctgatccttttgttggcagtgatcctttcaaggatgatccttttggaaaaatcgatccatttggtggtgatcctttcaaaggttcagatccatttgcatcagactgtttcttcaggcaatctactgatccttttgccacttcaagcactgaccctttcagtgcagccaacaatagcagtattacatcggtagaaacgttgaagcacaatgatccttttgctcctggtggaacagttgttgcagcaagcgattcagccacagacccctttgcttctgtttttgggaatgaatcatttggaggtggatttgctgacttcagcacattgtcaaaggtcaacaatgaagatccttttcgttcagccacatcgagctctgtcagcaacgtagtgattacaaaaaatgtatttgaggaaacatcggtcaaaagtgaagatgaacccccagcactgccaccaaagatcggaactccaacaagaccctgccctctaccacctgggaaaagatccatcaacaaattggattctcctgatccctttaaactgaatgatccatttcagcctttgcccaggcaacgatagccccaaagaaaaagatcctgaaatgttttgtgatccattcacttctgactactaccactaccaataaagaggctgatccaagcaattttgccaacttcagtgcttatccctctgaagaagatatgatcgaatgggccaagagggaaagtgagagagaggaagagcagaggcttgcccgactaaatcagcaggaacaagaagacttagaactggctattgcactcagcaaatctgagatatcagaagcatgaagaattctcttgttctttggcaacaatatagtattcttcttcctgaatactgaaactatttaccaatggtgtatcaaaactacctgtgaggcatggggaatacaaaaggtttgagattcctgtaaatgtgacaaaattttagggtttttttttttttcttcattacagattcgtcttttttttttttttcttataaaagccgtaacccagtcagacaaattcaccttcacttaggcccctgttctggtatacatttactgtgagcttttgcctgcctgtgctattttacttgtaaagctagagcacccaagcttctgccttctggaatatagagaaatagtttcaccctgcactaccctgttctgtagttattctgatgatagccagtgaggttcttaaagtttgcagtattctcccctgattggaatggttgagtgagggtaagggaaagaatatcttatttcttttatgattggtgcaaattggctaaagtgcatttttaaatttcctctacttaatttgtttttcagagataaggaaaaatattttgcacagatttactccactatggaaaagggatgctgtaggttgaaccattatagcctcagattcgatcttttcctaactaaaaatattaaagcctcatgtgtgaaataaatttttaaaaagatttatctggatttagagaattttagatcaacagatacctctcagtgtgtttgctaattaataaaaatcagtttcttacaaataaagtttgtaaggaaaatgttccatttttaaggtggataggatagtgggagaaaatttatcacctaaaatatacccatcagtataaggcaaggcaaaagtcttaacatggcagccattctgcctttgccgtggccctgtcctgtttagttcttagtgggttaatttttgtacttttgcagaagaaacttcagcaagctagaactggaaggtactttaatttttcatatatatttgtttttttttttttaatgaaggctcatttacttgaaatgtaaaaactttcactgaatacaaatagaaaaagtgatgtgttttatatcatattgctttttgtccatctttgtggtttagtttatttactcacttcatgtttttcacctataaaattgtcaagctagcaaaaaaactcttgtttttttaattgggagagaagagacctgccagattatcagacctcttcatgttaaaagaccatctcctgtaaaactgacctagtggacaagctgaatttgaaatagactgtgaagtaagctgtaacttgtcattttaattttgtttaacacggttactgacttagatgatgtattaaataccaagataaagaaaaatgcacctaaaatctaattagaattctctgggtcaacaagtcaaggtggtattgatctgtgttaatctgagtaacttattgcctagcctataaataaattccaaaatatccaattcatttcttcttgaaatggtgcttgttttgttttctttccattacacaattagactcctacagtttaaaacaaactttaaaccactatcttgcactgctaacttttttctacctttgtaaatagaaacatttctgcataaaagtcatacatatgaagcaagggctgaatcataatcacaaggcttaattttgataaacgaatccagtgacctaaggattttctgcaaaatttgactgggagttgtgataggtggtatttttgtttattttcttcctcttactccttaggataaaggtaagttgacttgaacaactttcttttgcactgggaaaataagcaaatgtttaaatgcttcaaaaaaattttcaattaaactcaaatattaaatatctataacttataaacaccaactttcaatgtaataaatgtatcctaatcttatgtatgtttaactggattacatagatttttatcttttgttaaaatgtgtataccccgtggaccaacataatattaaagtatgtatatattatataaatatatatgtatatgtgctcgcttgtgtaggatgaatgtcttagagtcgtttgtggtattttatgttgttgactctggctccagggcctgtgcttgaaaaggacagataagtattgcccagagctaagtggcactacttacaaagttttaaatgtcttctacatactgattcatgtttatttgagctctctttatagaattttctcttaaagtttcaaacctctaagttgtagcctgtaattatgagaacagtaaactttaagtaataataaagaatcccatccatatatccaatttgcaattgagttttgcatggttctctgattatgtccatgctgtgtccaaggaggagtaggtacatacaatcagcacagattaatatatgtaaagggtttgggacagcacctggtatagaataaataataaatgtaaactattaaaaacaaaaa

SEQ ID NO: 58180 - DNA, 847 bp, Homo sapiens
tttttttttcacatggcgctgctttattgttttaggtcttttgggctgaagatttgctagttccattaatttgttcattctctgtcggtcctcatcatcagtgctttcatattctgattcttcactagataattcctcatcctcgtctggcaaaggaggttcctcaggtggctgaggagatgtgggtggaagaggtgcatgcaatggcatatagtcttcatacatgggaggtcgcgcagtaattggtccaaaaggtgtgggcaaattcattttattcataagatgaaggacctgtacataggaacttagggcacgcttgccaaggcatttacaatgtttgctagggattgtgctggaaggtgggtgggtacatatacttgaggcatgaatttaaagggaaaagtccagcccatgggtttgggtgccaattcccattttcctaccttgttaaataaccaagttcttttttttctttttccttccttaggatcttgttttggtctagcagatcgagcaaactgaaccaccatgggttttccaaaaagcacatatccattagcttcctttaaggcttttgctgctgctttttcattaggaagtccaatgaaagcttgtcctttcatacgaccttctttcatcaaacgtatatcaaacatgatccgctgtgtttctgatgaaaagtcaacatatcttccaaaaatatatttaaggtccttttcttgaacatgtttagctaaattctttacataaattctacagtttggttcacccggttcataacttctgaaaactgaaagtgtttccatttcttctctagaaattctgcccttttccaattcccttctag

SEQ ID NO: 58181 - DNA, 2295 bp, Homo sapiens
  misc_feature (1)...(2295): n = a,t,c or g
gcagggatttgaaccgcgctgacgaagtttggtgatccatcttccgagtatcgccgggatttcgaatcgcgatgatcatcccctctctagaggagctggactccctcaagtacagtgacctgcagaacttagccaagagtctgggtctccgggccaacctgagggcagacaagttgttaaaagccttgaaaggctacattaaacatgaggcaagaaaaggaaatgagaatcaggatgaaagtcaaacttctgcatcctcttgtgatgagactgagatacagatcagcaaccaggaagaagctgagagacagccacttggccatgtcaccaaaacaaggagaaggtgcaagactgtccgtgtggaccctgactcacagcagaatcattcagagataaaaataagtaatcccactgaattccagaatcatgaaaagcaggaaagccaggatctcagagctactgcaaaagttccttctccaccagacgagcaccaagaagctgagaatgctgtttcctcaggtaaacgtggaataaatggtaacagagattcaaaggtaccttcagaaggaaagaaatctctctacacagatgagtcatccaaacctggaaaaaataaaagaactgcaatcactactccaaactttaagaagcttcatgaagctcattttaaggaaatggagtccattgatcaatatattgaggagaaaaaaggaaacattttgaagaacacaattccatgaatgaactgaagcagcccatcaataagggaggggtcaggactccagtacctccaagaggaagactctctgtggcttctactcccatcagccaacgacgctcgcaaggccggtcttgtggccctgcaagtcagagtaccttgggtctgaaggggtcactcaagcgctctgctatctctgcagctaaaacgggtgtcaggttttcagctgctactaaagataatgagcataagcgttcactgaccaagactccagccagaaagtctgcacatgtgaccgtgtctgggggcaccccaaaaggcgaggctgtgcttgggacacacaaattaaagaccatcacggggaattctgctgctgttattaccccattcaagttgacaactgaggcaacgcagactccagtctccaataagaaaccagtgtttgatcttaaagcaagtttgtctcgtcccctcaactatgaaccacacaaaggaaagctaaaaccatgggggcaatctaaagaaaataattatctaaatcaacatgtcaacagaattaacttctacaagaaaacttacaaacaaccccatctccagacaaaggaagagcaacggaagaaaccgcgagcaagaacgaaaggagaagaaagcaaaggttttggggaattgcgaagggggcctcatttttggctggaagattaataattttttaacatcctgtaaatattcctgtattctcaacttttttcctttgtaatttttttttttgctgtcatccccactttagtcacgagatctttttctgctaactgttcatagtctgtgtagtgtccatgggttcttcatgtgctatgatctctgaaaagacgttatcaccttaaagctcaaattctttgggatggtttttacttaagtccattaacaattcaggtttctaacgagacccatcctaaaattctgtttctagatttttaatgtcaagttcccaagttccccctgctggttctaatattaacagaactgcagtcttctgctagccaatagcatttacctgatggcagctagttatgcaagcttcaggagaatttgaacaataacaagaatagggtaagctgggatagaaaggccacctcttcactctctatagaatatagtaacctttatgaaacggggccatatagtttggttatgacatcaatattttacctaggtgaaattgtttaggcttatgtaccttcgttcaaatatcctcatgtaattgccatctgtcactcactatattcacaaaaataaaactcctacaactcattcctaacattgccttacttaaaagctacatagccctatcgaaatgcgaggattaatgctttaatgcnnnnnnnnnnnnnnnnnnnnnnnnnnnnnnnnnnnnnnnnnnnnnnnnaccaaatgtacttcttattcattttatggaaaagactaggctttgcttagtatcatgtccatgtttccttcacctcagtggagcttctgagttttatactgctcaagatcgtcataaataaaattttttctcattgtcaaaaaaaaagtcgacg

SEQ ID NO: 58182 - DNA, 1903 bp, Homo sapiens
tttgttttagaggcattttatttagacaactaaaaacaattagatgttcagaggcagtgtacaatgaacgagaaatcaaaccagttactttatcatgtattccctcttctttacaactgaagcaaaaaaagaaaaggcattctgctttaagatcagaaaaaatcagccaatatagttttcttctccatattaacataaacagctacaagaaccctaattgtaataatagaaattggatgttggcttgtatatattcattaaaaagataacaggccactgtactataagaggataactccacctcccttcatctgacacttgagttttcacttacaggtaacaccaagttagttagttgttccagcactggagctaattcattttcctcattatttactgctgtttctgccttaagcagacagtaactctggaaggctgatgcttttctctgcttgcttgttttagtcagttgtatactaactgcaacatatgattgacgctcaggccttaacatcaggagctgaaggaaagatgcaatctgaattctctgaagcaatttcttctagctcctcttctgttgtctctggaaaaccaatcttttgctttgccagctcaccactatcttcttcaggaagcacacatttccaaaggccatacgtttttcctaccacagtttgccatagtctcaatgttccatcttctgaaccactggcatagagttctccatcaggactaaatctcacacagtgaataggaccaaagtgtcccttgtaggattctaattcttctccactattataatcatacttataaagtttaaaatcttcaccgcctgcaacaagaaattctttctcaggatgaagagatgcagaattgatggttgcaggagcttcaaaggatttaattgggtccaaacttactgcactatgaaaagcaatagatcgtccataagttataaccaaaatctctccctcaggaatatattccatactactaacagacatattaaaatttagagatttcacttctgtcatagtagcatgatcccaaagtcgaacagttttgtcatcagcagaaagaatctgtttatcctcactgcaccacagagctttttttataccagaagtatgaccactaatttccttaggttctgcttcaggtttgttcaagtcatatatgcgtaacagtttatcctgtcccccggttaacaaataattactatcctgcgtgaaatccacagtcttgacaatgtgtttatgagccagggtcatcaattcatctcctgagacagcatcccacactttggctgtgaaatctgcagctgctgtagctgctttggtggcatccttattccagtgttgcaccccaaacagcacctttatgacccaaaaatgttccaatccagtctcctgtatctccctggcgtagcataggtttacccatctttgcaagcgcctgatttaagaaatacccattaaggcgtgatgccactgaaggcccaaatccaacccacggggtcgcgtgttggccagagccaggtgagccggcgtctgtcctccattgccatggcggccggcgaagccagcgaccggactggcgaagctgagggtccgtcgttgtcttttctcttcttctgcttgcagttccttcggggctgctcccaggcccccgccctgacacttagggctgggctgggcaacaggaaaagaagggcaatccggtggcaccgaggttagggatggtttgagggaggggtcagggagtctgcgaccagcaagcacacagtcgacgagggagggaaagggagggagggaggaaagtaggggatggggagaagcggagaaccgtggccagccacgattcacagcgtccacaccggcatcggcaggaagtcctagtgccg

SEQ ID NO: 58183 - DNA, 1493 bp, Homo sapiens
tttagaagtaaccactcttgtctctctggctgggcacggtggctcatgcctgtaatcccagcactttgggaggccgaggcgggccgattgcttgaggtcaagtgtttgagaccagcctggccaacatggcgaaaccccatctactaaaaatacaaaaattagccaggcatggtggtgggtgcctgtaatcccaactacctaggaggctgaggcaggagaatcgcttgaacccggggggcagaggttgcagtgagctgagtttgcgccactgcactctagcctgggggagaaagtgaaactccctctcaaaaaaaagaaagaccactctcagtatctctgatttctgaagatgtacaaaaaaatatagcttcatatatctggaatgagcactgagccataaaaggttttcagcaagttgtaacttattttggcctaaaaatgaggtttttttggtaaagaaaaaatatttgttcttatgtattgaagaagtgtacttttatataatgattttttaaatgcccaaaggactagtttgaaagcttcttttaaaaagaattcctctaatatgactttatgtgagaagggataatacatgatcaaataaactcagttttttatggttactgtaaaaagactgtgtaaggcagctcagcaccatgcttctcgtaaaagcagcttcaaatatccactggggttatcttttgacaacttgccattatctgatgttacacaattcaatagcaagcaagtttgagacaatcgcagtttaaaagcatgaaccatttaacaaaaagtggaataattaaagataaagcacttcttcccaaagggaattatcacctagtgaaaaattatgcatttcatctactcagttaccgactgcaagtctctcctcgctctagctctcaagctttgggtgaatattcctgtgaaatatatcttcaacttgaaagttcatactccaatcaaaaactccttttactgagtttgcagtactgtatttgcactgtttgtattcctctgggcccttattgctacttttgctttcctttgttacacagattttgtgttgcactttttctccagaggggtgttgtagagccttggttgtatgaataataccagtggtagtgtccacggctctaatgtaagcccatttggcatcactcctctcctctctcttgagaggatttcttgtgcacagagtatgaagcagttgtggagcgctgtgcctttgtcaagataccatcttgtttgatgatttctttctttgctgttttttcttcaaaatgttagtaagctctgtcatgcttctagcaaattgtaagactaattatttgtttccacctcataacctgttgcaataaatattacttctcatacagtttaatattgttgtttgttggagaaaatgaaccataaaaattgatttgctgttcagttttcaattattcaagtacacccaattaaagatgcagttatgtttataaaat

SEQ ID NO: 58184 - DNA, 2784 bp, Homo sapiens
gtttgaaatgactgagcaggaaaagcagtcaatcacagatgagctcaaacagtgtaaaaacaacctgaagctgctccgagagaaaggaaataatccttccatattacaacccgtcccagccgtattcatcggcctattcctggctttcctgttttggtgtttcggtccattgtggtagagaaagaaaccctggccctggatgcccatgttggctgccctggttgcagtaacagccatcgtgctgtacgtgccaggtctggccagagcttctccatgagagcgttccttgagtccgtacaccgtcctccctctagaagctggcatcacactcatgctggggacaaacagaaccattttcttcctctttacctcttaaaacagcagaagtacaagaatacagctgtagggtcattgctttaaattatataaaatgtatctgtctataaagaagatataaaattgtgactttattctactgtaagcaataatttgcttgcaatttttcatgtaatttttaaattagtatgttaagattctgaatattatggtggcctaaagtaggcttcttggtacaccagattatttataacattaaatttatgagtattttactctgaattctgatcaccagataattcatttttctgatttgataactacccaaaccaaacaaccaatacatacatgggaagagaggccctgtgtgctcagtgcctatcagtttgaaatatatacacatatatatattttttacatatttacgccatttttacttgttatgaaaccactgagctattgggaacaagacttagagacaactatttgcgtggatttttttttttttaaggaaaaatacgtttggaaaataaactgttatggtgataatttggggaatatgtgcacgcttgttcagccttaatgtgacttgaagatgtggaggacatcaactttgaaaaactttccatgagagtgtattttcttgagcaaactgaagtatttctgggagcaaaaacatagtaattacacaatttcagtgcagtcaaccaaaatgttgagtcaattggaatgtaatttattaaaccatgtatttaaagagatatttttctttaaaagccaagttactttctcatatacagcattttaggaagcatgattttttttttctatcatctattcctccaagcatgtttaattgaagaaagtattaatatctctttagataagcttgtattgacctaatttggtttatgatgtgtcagagctaattcatgttcagggtgagcgttgtacctaccaacaaatttcctggttgggtatgcaaatggttattttctttttattgttgttaattggggactttctgttaatgaaaagcactattcccaagattaatagtggttcctatggcacaatggaagcacccaaaaacactggcctggatattataaatttaaaacacaagtgaaagtttagccatggttttgtgcggcatcatagttatgtcaataaagtttatttaggtcatagaatatcctaaagtatcacatagttaaatttttcagtcagtgaagaccgggagggaatgtcagtgaattggcttgaatgttctgtggcaatccacaggtctagccaaatattgaaataggagtttagggtataatttgccttgtgatgtttggcagtcactgtttatactttaaaggttatattttaagctatttgagattgcttttgggaagatcactagatttatggaggaattagtcacaaatgacttgtagaaaatactgtcatatagttcatttcatcattttctgttgcaggaagccactccaccacagaatgctaatatgccagtggtacccagtacctcttgtatataggttattgcaaatattgttctgaaatgcttaacttcagaattacattttttaaagtaaataattgttttaaatctattttgtaaagatataaagtacaatagaatttctggagtacagattaaactatttgcactaacacacgtgacgtgcatgatttaataaaataactttactctccctacgcatgtttgagttgaatatcattgaagttcttaatgctgactctactattgggttgttaatagtcttctcttgacatgactctttatgcaacataacatacatttggtattcttcagggtttaaaagaaaacactgagctgtttcctccaagttttattaaccttttatttaacttactgctttatttttttctcttttaatatgggtattgttaaaatgagagtcacttgctagactggtctctttaaatgtaaggtctagtatcaatatttacttcattcaagtggaataaatggctttttgtagttacttccagttttcctcaagaatagaaataagtctgttcataagcaataccttcagttttgttcagttcacttccacgttaaataaagaataggattattcactggtaataatagagtcattaagaaatattaagcattgcagctaaaaattgaacaaccctgtaatgatacatttaagaattattcaaaggtgctacatggcagggttagagaataaaaagaacgtggtgtttgaagcgaaaacagatctgtattggcatcttggttctaccttttatcagatgttgttgccttgtgcaaatcacattttctctgagtctccattttctcatttataacatgcggagaataatacttatatttgtggtagtagtgtgaacattaaaaagataatgtatgtgaagtacaaa

SEQ ID NO: 58185 - DNA, 1774 bp, Homo sapiens
  misc_feature (1)...(1774): n = a,t,c or g
tttttttttttctgacacgagacataaaaacttttaatgaaggaggacacagctcagagcccttccacatgcggcccaaccctgccccacggagaccggccatggcaaccgctcaatcagaaggtgttcttgatgcggccggccaccagcctaaggatgtccccgatcttcttctgccagttggcgatgtccttggacacggcgcaccacagctccccatgccgaggctctgcactctcacagcgcttcctcacctcctcctgctgctcctcagtgccatgctgcagctcaaacttgtagaagaaggcccaggcatcccccaggtccgagtcaatcttcacagtgcggtggaaccactccctggccttggtgatcttccgctgactccaaaacagcttggccacggccaggagcacatgggggtcatgctcacacttcttcagggcatccacgctcttggtcctcctctggggccttgcctcgaggaagatggcctcagaccacaggataccggagttggggcactcctgcagcgccttggccatgagtgtatttgcgatgttcttcagccccgcacggtactccagccgcacggactccaaccacagcccagggttctttgggttcttcagacgagacttttccaaaatggcccgtgctcgagtaagctgcccaatcttctcctccagccgagagagcaaaagccacaggggtgtggagtggggacacttcttcaacccctggttataggcttcccgcgccttctccatcatctccttctgctcctcgatctgccccttcatcatccacagcttggggaagtcctcatagtgccgcagggcctcctcgcacagatcttgggctgccctgatgttgtcttgcacccactccagcttcacagacttcatgaacacccgggcggtgggggcactgctccgcgccttggccagcagcctccgggcccgctcgtactcatcattctcggactccagcttcacggctgccagccagatctcctcactgttggggttggcctggaaggccagggccaggatgctccttgctgcaggcacatcccctgccagccacttggacttggcgcccatgagccacagcacctctgctttggggcagtgggccacagccctctgcaggagtgcttccagggactcccgagtgccatggttcttctcgaagtacgcggcgcgcagccacacactcttcttgctggggaacacctgcagggcgtaggcgtagatggctcgtgcacactccagggcattgtgggctacacaactgtcagcatcctccatccaggtatgcttccgatcttcctcctcaatcccaatcccaatcacggcacgcatgacggcctggcaggtggccacactcccagccctgtcacattcctcggcatcctggatccactgctcacggttgatctccacaccgttggcccgcagcgaggtgatggctcggtcgatgatcttctccaccatctgcgtgttcccattggcttcctccagcttagcagccgtgatccagatatgtcggtctgtaggaatgttctcccgcgccttgttcaagacctntgcgggcattttcataggtctccagccttgccagagcaagccagagctccacgctggtggggcagcactccacagctcggctcagcatgattctagcatcttcaggttcttccagctcaacggctgctttcnacaagcgaaccgagtttggaacatgctcgagggctttccgaagaacccgc

SEQ ID NO: 58186 - DNA, 465 bp, Homo sapiens
  misc_feature (1)...(465): n = a,t,c or g
cncctntgacatgattacgaatttaatacgactcactatagggaatttggccctcgaggccaagaattcggcacgagaactagtgcaaccagtaagttgatccatccagatgaggatatatccctggaagagagaagggcacagttacctaagtatcaacgtaatcttcctcggccaggacaggcccccatcggtaatccaccagttggaccaattggaggtatgatgccaccacagccaggcatcccacagcaacaaggaatgagacccccaatgccacctcatggtcagtatggtggtcatcatcaaggcatgccaggataccttcctggtgctatgcccccgtatgggcagggaccgncaatggtgcccccttacagggtggccttctngancttcgatgggaatgagacctctgtattgcnctggtgggcgnnactgatttattnntncantataatattt

SEQ ID NO: 58187 - DNA, 774 bp, Homo sapiens
gaattaaataagtttccatagatctgctgctaaactttccaaagtttagttagtgcggcgtgccagaatacgtgaagatattatcagacctattctaactgcccaatgggttcacctcaacccgctgcctagacagccaatttatcaagacaggggaattgcagtggagaaagagtaattcacacagagcagctgtgcaggagaccagagttttattattactcaaatcagtctctctgagcatggaagggggaggtcagagttcttaaagataatttggcgagtaggagcttgggaagcggggagtgctgattggtcaggttgaagacggaatcacagggagtcaaagtgaggttttcttgctgttttctgttcctgggtggaatggcagaactgattgagccaggttactggtctaggtggtgtcagctgatccatccagtgcagggtctacaaaatatctcaagcactaatttcaggtttcgcaatagtgatgttatcccaaggagcaatttggggagtttcagactcttggagcgagaggctgcatgtcccctaaactgtaatttgtaatcttgtagctaatttgttagtcctacaaaggcagactgggtccccaggcaagaagggggtcttttcgggaaggggctattatcaattttgtttcagagtcaaaccatgaactgaattcctctcgtgccgaattcttggcctcgagggccaaattccctatagtgagtcgtattaaattcgtaatcatgtcatagctgttgg

SEQ ID NO: 58188 - DNA, 536 bp, Homo sapiens
acccagcctaaaatgatggttttctgattctagcatttcttttataagattgctatgtaaagcacagcttttctttttttagggaaaaatgtcttttaacagctgcaaaataaatattctttcaatggaatgacaattattatttttgccatatatttattttaaaaatttatgtataatggtaacctgagcctgcatgttattcatgtgtggtgccatactgatctttaattttaatgtgaagcaagtactaatatagtaaagcataaattatataaaatttgctttatattttggattgcaaattaattgctgtactttatagaaaagtttcccaaatccgttttacttttttgtatttgaaatttaatcacaggtggaatcttaaagagagcatttagggatattgtaaacagatgttattaaggactaatgttaacaaacattgaagaagagaaaacagtatttgtttttagcttaacatcttagtggagtgaaatattttcagtatatttattttatttatttattaattt

SEQ ID NO: 58189 - DNA, 331 bp, Homo sapiens; identical to SEQ ID NO: 15345

SEQ ID NO: 58190 - DNA, 772 bp, Homo sapiens
agtgaggccccggtcttcctcctccgtcctgcccgcaggcccaagaaccccctgacgggtattcaagcttgcgcgtaagtctggccggtgccatctgtctccgcaatgccccccaagaaacaggctcaggccgggggcagcaaaaaggcggagcaaaaaaagaaggagaagattatcgaagacaaaactttcggtttgaagaataagaaaggagcaaagcaacagaagtttatcaaggctgtcacacatcaagttaaatttggtcaacaaaatccacgtcaggtagcacagagtgaagctggaaaaggaaattgaagaaggatgacaagaagaaagaattgcaggagctaaatgagctgttcaaacctgtagttgctgctcaaaaaataagtaaaggtgcagatcccaagtctgtagtatgtgcattcttcaagcaaggacagtgtactaaaggagataagtgtaagttctcccatgacttgactctggagagaaaatgtgaaaagcgaagtgtttacattgatgcaagagatgaagaacttgaaaaagatactatggataattgggatgagaaaaagctggaagaagtagtgaacaagaagcacggtgaggcggaaaagaaaaaaccaaaaactcaaatagtgtgcaagcatttcctggaagctattgaaaacaacaagtatggctggttttgggtatgccctggagggggtgatatttgcatgtatcgtcatgcacttcctcctggatttgtgttgaaaaaaaaaaaaaa

SEQ ID NO: 58191 - DNA, 2008 bp, Homo sapiens
accgttatgacatgattacgaatttaatacgactcactatagggaatttggccctcgaggccaagaattcggcacgagcttgctgagagagtaatattaaaggaacagtgagggagtggaaggagagccttagttagagcgttcccatttctggcctttgggggtttgcactgtgcgggagatgctctctcatcactctgaaggcccatcctgtgcagaagtgggactctgtggctgttcactgagcaccagggcagactgtagctgagcagacttgggttatggatgggatatggggcccagggaccctcaggacacagggaccggctcaaggtaccactcagcctggccaggacccccagctttgcttttgttcttgatctctttgtgatagagaagcttagaacattgaatttggaaccccaaaatgtgtgagtctttggaaaacccattccagcctttcttcaaatgctcttattttcagtatatgaagtgtgtatttgaaatattcatatttctgttatttcttgttttcaagctctgaattattgcagttttctgtcctgcatgctttcaacagtgtgcttttacagtggcagtttaggcacagcgaatgtccctgccccacactccatatggtcctgttttcctgaaaatacactccaggtagcacagacttgttattttgcctggctggttacacacatgctgtcttgctttgctgctcagccacctccctctgaggccaacttaggccaacctacataggactccatctttagcgagacaccagagacacctagtgatgaccacgggtctgcttttctctctgatcctaggggacttgttgacatgggagtgtctgtttccacatggaaggatgtctgtttatctctcatctctgaatagatgtatgacaactctagtgtccatggtttaaaatgttgctttgaggattttccatcctgtataagaagaatggctttcttcagattataatcgttattaaagctgtatgtacactttacttaaaaactattaacagtttttcatgttgcactggtggtaattttgaacttggaattactgggtgggaattccaggaaccacagagtattgatttttgctgccaaaatgctcttgaagcagatgtccctgtgctcccctggctgcttctggctgaaggggggaggtgtagactgaagcttgggcactcatgtgtgtcccctccccagtccccatcctagtggggccagtctcattaggcagccatagataagcctggaacttggctgtcattagtgacttgatcctggtatgaaatgcatactgggtataaggttgctcaggtattttatttccttggccacaactcccatagatgccaatgttttgatagcctcagtttctcaacgatgtcttttgtttacagtgctacacttagtgtgagtcaagaagtgcttgagttacaagaaacttcttattcaggtttgagtaagcattttacttccatgtgtacttttaaataatccataccttgaagaagttggccaatgatattatatacatgctgatctgattgttcttttcattccttgagtcaacttcagggtcttggatactaaagagaaggagaactgtggttaatgttttggatcatcatttgtgaacaaggccagactttgcccattttaggctatccaggacttaaggtagccatctggatcataagaaggtcctgcagttgagacaaaatgacccaagtgtattttccacaagttttgatcctgtgtaatatttctttttccttccctagtgtatgtagatacaaggcatggaatgcagttccactttctccccagagttgatctttttgtgattgctttcccgtctctagtagtattctgttgtgtctagagaactgattttttcctacatacgcaaattgtacatttgtaagtgaaaatgtcaatacattaaagcattaaccttaaaaaaaaaaaaaaaa

SEQ ID NO: 58192 - DNA, 2014 bp, Homo sapiens
ttttcatcttttagtaactatggctatgttgtaacaattttattttgatttttaaaaaaggaatctcttgatttaatcagggctttggggtcatagggggattagtcactgtcacagtcataataatgcatttattcagggaaaactttaattttctttgtcttctccaaaaacagctgctggaacacctcaaattaagggatgttcatctaaaacacctttactgaaacttgattccttgggccagaggaaggtctttactgtagttgatagtacaagtagaccttctcatgtactgtttccaggcatcactgccagactccctgccaccaccagtgtgcttttctcctccaaaggcacctccaatctcagccccacttgttggaatgttgacatttacaatgccacagtctgatcctttaggtccaagccagcgaaagattctgcccagatctttggtaaagatgctacttgaaagtccctgttttacttcattattccatgcaaagacctcttcttcattcttgaatttaaagacatagagaatcggagcaaaagtctctgtgtgtgcaatggacgcatcgtggccaagacctgtcacaattgtcggttctacataatttccagggcgatccataaccttgcccccatagaccactgtgccaaccttctttctttgcttcttccactgctccaagaaacatgctcactgcctgccttggtgtgaaatggccccatagagaacattagggtccccatggggttcccccaaactcgggatctgtgcataggccctttttaaagtctgtttaaaaacctcatcatggatgctttcatgtataaacagtcgccctcgcagtggtacacctctggcccagctgttccccacagcaagcgaagagagctgatggaacaactaagctgaggtctgcatcttcaaaggcaataatggcattgtttcctccaagttccaacagacttctcccaaacctctcctgcaccatcaggcccacctgttttcccacctgagtgctcccagtgaaggacagcaggttcactcgttcatctttggccattgctgtgccaatatctgctccaccacaagtcaaggaacaaattgcaccaggcagcttgttgtcctccagaaccttggctattatctttgtgacagccacactaatgagggaagtggttggagctcctttccagaggcagacatttccacagatcatggcgatggcgttgttccaaccatacactgccacagggaaattgaatgccgtgatgattccaaccaggcctacgggattccactgctcaatcagtgcatggccagatctttcagaaggcaagataggtcctccaatcatccttgataaaccaacagcatagtcacagatatccacatactcctgaacttcacccacaccttccactaagattttcccaatctccaaagacaccaagcttcctagtacttggatcttctcccgcaaagcatcgccaatctgtcttactatttctcctcggttttggagcaggaatatctgcccagattttccatgcttctcttgctttctttacagtttcttcatagtctgccacactggcctgtcggactcttgctattggctcgttgttagcagggcaataggtcgtaataacctctccccggcctccccagcttccattatacacgccctcgttttcctcgcggagccccagctctttcagccacgcatactggggctgattgatgaggagagtggacatgaaggcggcaggcctgctccaaggtccagagagctctctggaccttggagcgtgcacacacagcgcgcgaggaaggcgccacatactgagcccgggactcgggatgacccaaggccctgagagctgctgaaatagagccccgcccccgcccgggagaaccattgggcagacccgaccccatccactgggcacgaccccgccaccgccccgtctgcccctggtcttccggaggagcctgcgc

SEQ ID NO: 58193 - DNA, 3980 bp, Homo sapiens
  misc_feature (1)...(3980): n = a,t,c or g
ggtttttaaatatttccaaactgaccaacccagtttctcttaacttcttccttctccaattttcttttccacttttaccaagttaacttcacattcttatctccagataagttctttagtataatctattcctttgtcttccccattaattacctaaatctcattggatgttcttttcataccactcataactcaaattctcctaatacagctccataattaataagaaacagtcatcaatcacaagttttaaggactattctctcctctgtcttccctccctccagggtcaccccagctctgatatttgccatcacagttgctacaatcggctctttccaatttggctacaacacttggggtcatcaatgctcctgagaagatcataagaggaatttagtgaataaaactttgaccggacaagggaaatgccccaccctctgaaggtgctgctcacgtctctctggtccttgtctgtgggccatattttcccgtcgggggtaatgatcgggctccttttccggtcggacctcttcggtcaaccgctttggcaaggcgcaattccaatgctgatttggtcaacctgtttggctgtcactggtggctgctttaatgggactgtgtaaaagtagctaagtcgggttgaaatgctgatcctgggtcgcttggttattggcctcttctgcggactctgcacaggttttgtgcccatgtacattggagagatctcgcctactgccctgcggggtgcctttggcactctcaaccagctgggcatcgttgttggaattctggtggcccagatctttggtctggaattcatccttgggtctgaagagctatggccgctgctactgggttttaccatccttcctgctatcctacaaagtgcagcccttccattttgccctgaaagtcccagatttttgctcattaacagaaaagaagaggagaatgctaagcagatcctccagcggttgtggggcacccaggatgtatcccaagacatccaggagatgaaagatgagagtgcaaggatgtcacaagaaaagcaagtcaccgtgctagagctctttagagtgtccagctaccgacagcccatcatcatttccattgtgctccagctctctcagcagctctctgggatcaatgctgtgttctattactcaacaggaatcttcaaggatgcaggtgttcaagagcccatctatgccaccatcggcgcgggtgtggttaatactatcttcactgtagtttctctatttctggtggaaagggcaggaagaaggactctgcatatgataggccttggagggatggctttttgttccacgctcatgactgtttctttgttattaaaggataactataatgggatgagctttgtctgtattggggctatcttggtctttgtagccttctttgaaattggaccaggccccattccctggtttattgtggccgaactcttcagccagggcccccgcccagctgcgatggcagtggccggctgctccaactggacctccaacttcctagtcggattgctcttcccctccgctgctcactatttaggagcctacgtttttattatcttcaccggcttcctcattaccttcttggcttttaccttcttcaaagtccctgagacccgtggcaggacttttgaggatatcacacgggcctttgaagggcaggcacacggtgcagatagatctggaaaggacggcgtcatggagatgaacagcatcgagcctgctaaggagaccaccaccaatgtctaagtcgtgcctccttccacctccctcccggcatgggaaagccacctctccctcaacaagggagagacctcatcaggatgaacccaggacgcttctgaatgctgctacttaattcctttctcatcccacgcactccatgagcaccccaaggctgcggtttgttggatcttcaatggctttttaaattttatttcctggacatcctcttctgcttaggagagaccgagtgaacctaccttcatttcaggagggattggccgcttggcacatgacaactttgccagcttttcctcccttgggttctgatattgccgcactaggggatataggagaggaaaagtaaggtgcagttcccccaacctcagacttaccaggaagcagatacatatgagtgtggaagccggagggtgtttatgtaagagcaccttcctcacttccatacagctctacgtggcaaattaacttgagttttatttattttatcctctggtttaattaccataatttttttttttttaactttaagtttcaggatacatgtgccgaaagtacaggtttgttacaagcgtatatactatgcccatgatggaaatatttatttctttaagcgtaattttgccaaataataaaaacagaaggaaattgagattagagggaggtgtttaaagagaggttatagagtagaagatttgatgctggagaggttaaggtgcaataagaatttagggagaaatgttgttcattattggagggtaaatgatgtggtgcctgaggtctgtacgttacctcttaacaatttctgtccttcagatggaaactctttaacttctcgtaaaagtcatatacctatataataaagctactgatttcctttggagcttttttctttaagataatagtttacatgtagtagtacttgaaatctaggattattaactaatatgggcattgtagttaatgatggttgatgggttctaattttggatggagtccagggaagagaaagtgatttctagaaagcctgttcccctcactggatgaaataactccttcttgtagtagtctcattacttttgaagtaatcccgccacctatctcgtgggagagccatccaaataagaaacctaaaataattggttcttggtagagattcattatttttccactttgttctttaggagattttaggtgttgattttctgttgtattttaactcatacctttaaaggaattccccaaagaatgtttatagcaaacttggaatttgtaacctcagctctgggagaggatttttttctgagcgattattatctaaagtgtgttgttgctttaggctcacggcacgcttgcgtatgtctgttaccatgtcactgtggtcctatgccgaatgccctcaggggacttgaatctttccaataaaccaggtttagacagtatgagtcaatgtgcagtgcagcccacacttgagaggatgaatgtatgtgcactgtcactttgctctgggtggaagtatgttattgttgacttattttctctgtgtttgttcctacagcccctttttcatatgttgctcagtctccctttcccttcttggtgcttacacatctcagaccctttagccaaacccttgtcagtgacagtattttggttcttagttctcactgttccctctgctcctggagcctttgaataaaaatgccacgtagctgaggcccggaatgccggttgtcacgcctgtaatcccagcaacttggggaggcttaggcgggccggtcaggggttcgagaccagtctggcccaacatcnnnnnnnnnnnnnnnnnnnnnnnnnnnnnnnnnnnnnnnnnnnnnnnnnnnnnnnnnnnnnnnnnnnnnnnnnnnnnnnnnnnnnnnnnnnnnnnnnnnnnnnnnnnnnnnnnnnnnnnnnnnnnnnnnnnnnnnnnnnnnnnnnnnnnnnnnnnnnnnnnnnnnnnnnnnnnnnnnnnnnnnnnnnnnnnnnnntgcacatagctatcgagtgtgctttagcttgaaaaggtgaccttgcaacttcatgtcaactttctggctcctcaaacagtaggttggcagtaaggcagggtcccatttctcactgagaagattgtgaatatttccatatggattttctattgttactctggttctttgttttaaaataaaaattctgaatgtacacgac

SEQ ID NO: 58194 - DNA, 1992 bp, Homo sapiens
  misc_feature (1)...(1992): n = a,t,c or g
ttttttttttatttttttagtgggtaaaaccatttttattaactgaccaaagcacatcattttgttttctgatttgaggtaaaatcataaaacacagttcacaagaaaatacaatgactatttaaccacaattacaagtttgaaatctcactaggtgttcatatacttttacaaattcatacaactgtatagtctacttaagcttagtgttaaccaaaagagcaatatcaaagacctagacacttgactactacttttgcagtgggtatagttttataacaacagaataaactggttacccttatgaatatactttactttaaaaaccacttgactagcgactgtactgtttcctcgtggttcaggggtgtgcatgaaggctcttaggagagcaaacacctgttcctattctgtatgtccctccctcatttcaaatgagagtaaccaattgagtaaaataaccaaataaccattgccccaccatgaacatggggcttgggaagacagtcctacaatcttcatcatatatttaggtttttaggccagccagctcttttttccaaagctttcttttgaatgttcagatcctattttaatcctaactatagactactgtgtttgtgaagggtgtcctgagtgtctatgtgagggcaaggacaacagtgcagtccagaaacacagaaaatatgcttttttgcagctgagctctgttttgagatttcattttgttactggacagcgcttaatccataccaaagtctttggaacactgcagatttgctttagaggtagataaaacagaaatcatgcagttaagtcaattgagaaaaaaaaagggatttgttgtctttacagaacatcatgactaaaagttgatcctttgctcttggtgcacatttaagatttttacctgttttgggaaatacccaagtcttccttgtctctcaggaaaaacacatttaaattcatcctgtactaactacagatagaagaaaaacagtattaacatgtgtattacagcactgcagttcactttctggatttgtgacacacaaacacatcatgtgacgtcgcatgcacgcgtnngcttgggnccctcgagggatcctctagagcggccgcccttttttttttctttttcattctaagaagttaattttattagtgtcactagtgatgttaattaaaaaacttatagcaagtgctcaaaactttctaaatattgtaatcactatgttttaaagacagagtggactgttacaaatgattttgcaaaatacaaaaatagatatacttccactgaatgctttaatcatttttccgggcactctcatcttttggttcttcctcatctgagtacacagtgggctcctccccctccttcagcagtttgcccacgtgatgatacttgaaagtgaactgagactcccagtcactcagagtctcctgctgggcagcagtgaggtcagaaaggtcatcgtactcatccttcagtgcttccttatccaggcaaaatgtggcaaggccccctgggatgcatctcttccagcaaagaccccatacgggcccctcgggccccgtagaatttgcggcctttggtcacatcgaacaccttgccgttgatggccatgagtatgcgcgggtcctggacgccgtcgaagcgccgcagctcggcgggggtgaagtcgcgccgcttgaggcggggcagagggggcggctcgtcgtcgtcgctgtcgccgctggccgccggctggtccccgcgcacgatcttgtagagcaggaagatgcatgaggccaagcagcagcaggttgagcggcgacgtgaaaatctcatgcagcagcccgccgctctccagatcgcttgggtcggcgccagtcgccaccacatcctcggcagccatgatctctggagtaaaggttgggccgcgctaggcagggatccggaactcgccactttctcctccctctgagcgagcgagtggcgcgcggggt

SEQ ID NO: 58195 - DNA, 488 bp, Homo sapiens
ctatcacatgattacgaatttaatacgactcactatagggaatttggccctcgaggccaagaattcggcacgagttttccagggaggattgtttttgttcacagatgagcaaacatcctgtaagtgctgatttttcactgtgctttccaccctgttcctccctggtgccagcgtgccaacatctctacttactggcagcctagttgaagaaacctctagagttggcccaggaggactgttttctcagtgtttagagatcatacagtgccaagggcagctgccatggcctcaagccttccctagctcagcatcttctactctttcctcttacagatggagaggcaacttcaatgcactggggaaagaaacgaacaatgacagtgaatgatgatattgcacttcttatggaccaggctctaagtgttttatgtatattaattcacttaatccccatgacaaccctaagaattgggtacaatttataactc

SEQ ID NO: 58196 - DNA, 1760 bp, Homo sapiens
cggacgcgtgggcggacgcgtgggtcctgctccagattcaacttcctgatgtctccagacatgggatcgatgagaacagagactcctggagggtttgctgccaccacaccatacaactgcctgagttcctaagtggcctccccgtggaacagggcagggagctgggccacaggctccagtgtcacataagtcactatgctgaggcaggcactgctcctcgagggagcagagcgaatactcagcagagatggtgccccaggcctggatcctcccaagtgtgaagtgagcgcctcagagcctctcagggcaggccaacttcctgcaccagaggtctcagatggcaaggatcatcttggttcggttaagcaacagtagcagatgaccacaagggggtactggagaggtggctcttggagacactgacccctgccctgcaaagatgggactgaaggaagtcctctgggccaggaagaccctaccaaatatcatgaaagctccgggaactcagccactggtgacgttcaggttgtgagggccagcagtgccaccctggtaaatcagccctgttgggaccaccccagtggagctcctggaggggcaactggaggaaaggggcagacacctctggactgacaatggtatcagccagatcaccccaggacccctctacttggagtcaagttctcttctgcttgaaaggcccaggctcgttgccaggcaccatacctggcccctgctaagcaaaaacctacctccaccccccacaactgaaagcactgccacaggacccctctgatataaatgatcccttttattgtaagtaatgcgcaacactggcctggctttgcactgcaagccctcggtcaagatatagtcaaataactatggctgcaggttccacagttccacaataaccatggctgcacgatccacaattcagacacagacatagagctggggtgggtggaaggggcaggagggtggcagagtgcggactgtccccagccctggcctctccatgcagagttggcccaggcagacacaccccatggaatgatgagaaagtgacggcacggccccttcccacagcaagcctggggctgccaggaactgcccttcagaacctttgggcccaggtcaccctgaagccccacaactttttatctggattagttattaaaaaacaataaattaagcaacaacttggtcctgaggatgctgagccagcatgtccacagtttttggcacaaaaaaattagggtctgttttgcttttttggagtgcaggggtttgttggcttgtcttcaattcattttcaaaacacattcccagtgaggtaagaccccagggggtggagctctgtaagaccctgaacctgggacgcacagttgagtcagccagcaccgtgcctctgtatcctcttggggaacagggactggggatgggggtgcgggccaggaagagtgtgcagccaccaagatggggtcgtagagaggccgagctgccacacagcagctttggtcaagatgagggccaggccccaccctgggcaagggccgaggtggaagcaggagcctgtgttgtcttcagagggcagtgtggggtacaggggctgatagagcccctgggggaacagggatggacacaggagggtccaggcccaactggcgcatgcgacacacacttctgcaaaaccagctgctttcattttctcttctctctcttgaggcgtccgtcacctgtaacagtctagaattgat

SEQ ID NO: 58197 - DNA, 1048 bp, Homo sapiens
aaccggctgagcctcttcccttgcagccaacatcccccactctctctggttctccaaaaccttcaacccctcagctcacttcagagagctcagatacagaggacagtgctggaggcgggccagagaccagggaagctctggctgagagcgaccgtgcagctgagggtctgggggctggagttgaggaggaaggagatgatgggaaggaaccccaagttgggggcagcccccaacccctgagccatcccagcccagtgtggatgaactactcctacagcagcctgtgtttgagcagcgaggagtcagaaagcagtggggaagatgaggagttctgggctgagctgcagagtcttcggcagaagcacttgtcagaggtggaaacactacagacactacagaaaaaagaaattgaagatttgtacagccggctggggaagcagcccccaccgggtattgtggccccagctgctatgctgtccagccgccagcgccgcctctccaagggcagcttccccacctcccgccgcaacagcctacagcgctctgagcccccaggccctggcatcatgcgaaggaactctctgagtggcagcagcaccggctcccaggagcagcgggcaagcaagggggtgacattcgccggggatgttggcaggatgtgaattcagaacagaagccatgtatctcccccacaccagggcccaccatggagcttgtgttctcagaatctgatgctttctgatcaacaaaactgagcaaggaagatcccaacactgaaggggtagaaggccaggggggcatggagagtgcagctccattatagtgaagagccaaacatatgtgaactgtttgctgtgtggaggtgttagttctgctgcctaccatcttcatctctagcacctcccctgccaagagtcaaccactaagcaatcccacccaagcctggatgcttctagaggggcccactcccagctgggagagtgtaggggatatgctcacaccacattagcagcaaccaataaaaatgctggaaacaaaaaaaaaaaaa

SEQ ID NO: 58198 - DNA, 1168 bp, Homo sapiens
ttttttttttcattgtaacactcgtttttatataaatattcgcaagtcatgttacagaagaagccccaccagggaaaaaagtcaacgttagggttttgttagattgacccctgccttctaggttgggccccagcctggaggcgcctgctgctttgggaaggctggggttgctgccgtgaggctgccgaagaagctgcctgtgtcgcccacccctgggccgacccccttctttggtgtgtggtacatggtgaccttctctggccacccttagcctggggcagggttttggagaacagggttcagggaagcagggcccaggagtcctgggggcacttggaaatggggtgaaggggactgagccattaagaggtggtggagtctgagatttagaggctgagcctttgggggtgggggcagagtgaacgggaacatgttgggggaaccggggctgtcagccaagtaggaagcttctgcccttccctccagcccaggtccccaggtcctgccccctgttggtcatctcctgctggccccaccttcccagggagaagcctgactgtcccttcccggctcttccccctgcagtcccctttccccacagagaggccagaggcctaggaacacagcaccagtctgagggtttaattaaccaggaagggaactgttgggaggggcacccctgtaaaaatgtacaaaaggtcttggggctatgtgaaaggggtgataaatatgtacatggaaccccccttccttgagcccctcctcccccagccctcggagggcatgaggacttgggtggtaggtgaacgggagggggcactttggcctctggcttagtgagcccttggggaggcaggcccagggcctagaggcccttacaggggcaaaggtgtacctcaggaggccccatggcccccgagatgagccacactcccatgcacacgcccctctcccttctctagaggctgtgacctctgctctcccagtgaccctacactccatgtgatgcttggtcttgtgggggttgaggcttctgttcccaggttccatgacctcagaggtggctggtgaggttatgacctttgccctccagccctggcttaaaacctcagccctaggacctggttaaaggaaggggagatggagctttgccccgacccccccccgc

SEQ ID NO: 58199 - DNA, 465 bp, Homo sapiens
  misc_feature (1)...(465): n = a,t,c or g
gnnngnnnnntgnnntttgagnntacngaatactcnttatgacatgnttacgaatttaatacgactcactatagggaatttggccctcgaggccaagaattcggcacgagttcattgttgcagaggcacctggtggagaattaatgggttatattatgggtaaagcagaaggctcagtagctagggaagaatggcacgggcacgtcacagctctgtctgttgccccagaatttcgacgccttggtttggctgctaaacttatggagttactagaggagatttcagaaagaaagggtggattttttgtggatctctttgtaagagtatctaaccaagttgcagttaacatgtacaagcagttgggctacagtgtatataggacggtcatagagtactattcggccagcaacggggagcctgatgaggatgcttatgatatgaggaaagcactttccagggatactg

SEQ ID NO: 58200 - DNA, 1184 bp, Homo sapiens
tttttaggggtctggctttctctttagttctcatcacactagggctctcagtcacagagaaggcacttaaatgggaaggccacctgatgcaggccaaccatattcaccccccgcccacccgctctgggggaggggagcacaacgacatcaccacttgacatcccccttggcactggtatgtgggtccccttaaccgttagaccctggggaagaacccaaggccttgacctccggaatcgccatgttaggaggaggggcttcagaaacagttggaaggcaggatatcctgggagctgcccccagccagcaggggatcaggcagggggctgtaggagatgggttggcacaggggaaggggacagcttggtcgggcttcctggagatccccaaaccccacagaaggtcccacctcctacagatcccccaaaggcaccggtgaaggatgggcaaggaggcactgatgagctggcgtagagaccccccacacacacttagctggtgggcctagcatatgctgggcacagaaggtgctcaagaaatgtttttttgaatgaatgaacggagcaaaggggtgtgagggacagaggacagggcctgggccccttggcccagcttgttccattcagaaaatagcagtttaaaaaatgtaaaaatcctttccctccctccccccaacttctgggcccaggaaaggggcaagggaggggtgtctctaccctgacccttccctctctccttcccctaaaaatctatatacacatgtacatatttatatggcaccacaaggggggtcctgcctatgcccccacgctcagagctgggggagccaagccccggggctggttaaggcagaagtctgaggtcattgcttggatgatgcagggagcagccctcagctgtcggccctggagaagctgcactgtggggcctgaaggacagactcctgctgccttccccagtggtaacagacctcccctccctccaaggcagaggcaaaggttggtaggggccctctcagtcccaagggaggaggtggggcagggggaggggctggttctcccctcccagcctagagctgtgcccctgggaaagctgggcggggaagagggggctctatgcaaggcacttgatgtccaccgttcccagactgggggtccaaggcaggaaccctgcccccaggaagc

SEQ ID NO: 58201 - DNA, 754 bp, Homo sapiens
tttttttttttctggagaacatcagactcatgtttattagggagtgagggagcacaaagggaggtctccttgcccttgttctccttaacacagctcagagtccccaagcctgggcccgtccaggtaggggtgggaggtgggcgagcagaaggccctagttctagcagcaagccaagaccgacaggtgtgcctgcctcatcacagaggcccaggacccaatccgcttctccgaccctcgccctccggcaggctcagacatcaatgggctcccgacctcggttctgcctcttcaccacaaacaccctctgtcctgacaccgtcaccagcagtgtgtgttctccaaagaccactggaggagagacacaccagacaggcgcttgaagggcacattcatgccgcggtgcagccggaaaccgcaggctgtgctgaccagctcagagatggcactggctgcctgctcatcattctccaggtccccagatgactgttaatggctccatctttttctgtcttcacacttgctgccggccagcactgcaccttcactcagtaccaggtagccgagctggtctgggattcgctccagcccctgggtcagtgcagaagtctagtgggtaaagatgcaagtcgtgagaagcatgctagagggatggacggcccgatacccttcacctgcaaacccaagtctctgggttgacgatggccccaggttttctcattccccagccagtcccttccggcccaccctctgccg

SEQ ID NO: 58202 - DNA, 1254 bp, Homo sapiens
tcatcatcccctggaactatcccctgatgatgctgtcctggaagacagctgcctgcctggctgccgggaacacagtggtgatcaagcctgctcaggtgaccccactcacagccttgaagtttgcagagctgacattaaaggccggcattcccaaaggtgtggttaacgtcctcccaggatctggctccctggtcggccagagactctcagaccatcctgatgtgaggaaaatcgggttcacaggctccacagaggtgggcaagcacatcatgaaaagctgtgccataagtaacgtgaagaaggtgtccctggaactgggcgggaagtcacccctcatcatctttgctgactgtgacctcaacaaggctgtgcagatggggatgaagttctgttttcttcaacaaaggagagaattgcattgcagcaggccgactctttgtggaggactccattcatgatgagttcgtgcggagagtggtagaagaggtgcggaagatgaaggtgggcaacccgctggacagggacaccgaccacgggccgcagaatcaccatgcccaccttgtgaagctgatggagtactgccagcatgggttgaaggaaggggccacactggtctgcggcgggaatcaggtccctcggccagggttcttctttgagccaactgttttcacaggcgtggaagaccacatgttcatagccaaggaggagtccttcgggcctgtcatgatcatctctcggtttgctgatggggacttggatgccgtgctgtctcgggccaatgccacggaatttggcctggcttctggtgtcttcaccagggacatcaacaaggccctgtatgtcagtgacaagctccaggcaggcactgtgtttgtcaacacgtacaacaagaccgacgtggccgctcccttcggaggattcaaacagtctggatttggcaaagatctaggagaggcggctctgaacgagtacctgcgggtcaagacagtgaccttcgaatactgaagaaaggtctttgtgagaagaaagtccctgcccctccctcgtggctggggccccctccctcttgagcctggggtgcacagcacctcccacctggggggctagtggaagccctcctgcctgcacaccatgtctgcatcttggacgccctctgtccagtcagaagcagcccttggctgggtgaaggtgtgcccctcccaggggagaataaagcttctgaagagagaccgtcaaaaaaaaaaaaaaaaaaaa

SEQ ID NO: 58203 - DNA, 3356 bp, Homo sapiens
ttttttaactttaattataactttaatattcatagcttatatttatcaatagattgtcttaggaaaagaaaaagacttcccataaactagaagaaaatgtaaaatataaccaacatataaacagcaatgtgttaaagaattataaagaataatacaaataacacaatttaatgaacaaaggatatagacattatacaaaatatgaaaacatgaatagacaatatataatgcctaatattggtaatcagggaaatgctattaaacatagcatagcattgtgtgtgtggatgtgtggatgtaaatggcagtaaaaggtaaaaagggaaggtggtaaaaagggagatggtctaatattttcaacattttttaatttttgttttgtgttttatttatatatatttggcagcaaaattgtgtttactaaaaaaaaatctggactatgaacacacttcactgctttgaagaactccaagccaaataaaaagaccaatcaatattaaaagcagtataactggttactttccttaaaaatacataaaaagaatcaaatgcaacagtgtaggaagacaatccacaccccatgtccagaagtcacaacttcttcccaaataaagaatatgaccaatctgcccatattgaatcaatatttatttcaggacatgccatgtcaaaataaaacaaagagtcaacccttgcctttaacaattatattgtattataaaagcactttacaactccatcccatctttaagtataagttactggtatgtgggctaatgattatctgtaagcatttctctattcagatccataatccaagtgctctctgaatattacaaggtgacaataagtgggaagtggaggaggaagaggaaagagaggggactaaggttctcccagtttaaggttttgttccaatgaggggatgaggaagtatgaagatatttttgttgtcttttcatctttatactgtgttaagtaatgcttacaacataaattcagcaggcttttcctgagctgtaactcagaagttttcgtcctgcaaacaatgtatttacaaatgtgtttattagcttacacagcaatctcacaataactagtaaagattaaaagggcacactcctagtatatttgtttgcagtgttttaagggaaatacatattgccatggtgaagctctaaatagattcaacgaaacatctgaagattgaaagttgttaaaaaaaaaaaaggcaaagaaataaatatcaccaaagaaaaaagattaattgtagcttaaatataaaactaaatcaccagttaattaaactatacagatctaatacaaaccaaaaccagcctgaaagacccaaccttaaaaaatgctaaaaaataaggcataaatctgcataatattgagttttatttccattctctcctttccctctactatgtatgctttacctgatctgcctctaggggcttacaagaaaacggtttccggtttccgtcttcaatttgacctcaaatgtcctgagcaaagtttttgttattctgctgagggttcttttgttggtaagctttagacatcattatttctactaattcagtagttttgatcgtagcgccaaatttaaattcttccactggttcttctggaaggaattaaaacttttacagtgccttgcctgcacagtattatgtttttaaaaaagaaaacccaagcaaaatctattgcttaaagaggtttcttattttttaaacaaacagaataactcttgacaattttaaaaccttggggaggaaacagttcattagaacttcattttcttaccgtgaaggaattaaatactaaaaacctgttctgaagcacttggttaattttctctcccagagtctaataaagcacatgtgaaagagccatttgttttagtcagaaatacatcttatgttcttctacttctaagtactcagtatgttctttaggactcattttgaaagatgcacccaggagccttttcctcattccaagcaactgcccctaccccatggatggcctggaattttggcccccaaagaagacccgtaatttttaatccagtgcctccaagaataattttggacatccttggtcccgtaccctacagcaagtggtatctgtaaaattaaaggataattcccaatgggcttggtagaactgcctgctttgcccatctcttgtttgttttgaggaagtcgggggaggctaggtaagaatagggtaatagggaatgggggtaagtgagaggtgagaaaagcaaggagagataaagtaggctgtgaacataccgctcgttaaccaagccatactcatactgttgagatttccatcattttgaagtacattatcataacattaaaaaagaaaaaaatgttaagaaaatgtatctaatttttaaagttatcactggaatatgctgaaatattttggctttttgtaaaatataaataatgaagacactgacttttgttgtgcttgtgaagctaatagatcatctccacgagacaggcagcaatgatgaattgcaatacgttattactgaagggaaaaggttcaagccaatattcacactgcagtcaatgaaagagtaagggggccaaagcagtgagcttctgaagaaggttgaagatgacatgggagattagcaggaacagcctccttcactgactggttgctcctgaggcttttccagttttatgtcaatcatatcttctctgcttctgtcctgtgtgctttccattcccggcaaagctgctgctacacgtcgaaagagctgctttacattgtatccagcttttgcactagtttcaataaacataacattcagctctttggctttcctctctccctcctcaattgacacttgcctcttgtcagcaagatctgttttatttcctactagcatgatgataacatcacttcctctttctgttctgacatcatcaatccactttgtagtttgctggaatgagttaacatttgtgatatcgtaaactactacagctgcagcagaatcacggatgtaactgggaatgaggctacggaaacgttcctgacccgcagtatcccacagctgaagcctgattgttcgatcctccaagtacatagtttttgataaaaagtcaatgccaattgttgcctgataggtgttgtcaaaactgtcatacatgaatctggtgatcaaagatgtctttccaacgctttgctcccccaggaacaccagcttgaatttcctcagcggattcccgaagtctccgcccgtggacattgtggaactagaggagcggccgccgcctcagcctagagaccgtcccggaccgatgctgctccagccagct

SEQ ID NO: 58204 - DNA, 359 bp, Homo sapiens
ggagagagctagcaccatgaaataccctgctgccaaataaccttccccaaatacttgtttttatcatacttcttccttgcttaaaataaaatgataaaacataacaggatatagaatattcaagatttttttaattccagaattcaataattaagagaaacaatgtttttatatgaatgatgaagaaatatacatgtgtatatgtaacataaaagatattttcacgggtaagcaaatatatatataaagccctgtaatagctcaccatggcagcttggagcaatagttaaaaaaaagcacaggttcttttttggacggagtgggagatggaggtacatgggtttttaagtcacctggat

SEQ ID NO: 58205 - DNA, 446 bp, Homo sapiens; identical to SEQ ID NO: 15382
  misc_feature (1)...(446): n = a,t,c or g

SEQ ID NO: 58206 - DNA, 5347 bp, Homo sapiens
  misc_feature (1)...(5347): n = a,t,c or g
ggccgcgagtgcatcttccacgaacctaattcatctctccagcaaaggacacatctctccagcaaaggacacctctctccagcaaaggacacctgcagagatgtccccagtccttcacttctatgttcgtccctctggccatgagggggcagcctctggacacactcggaggaaactgcaagggaaactgccagagctgcagggcgtcgagactgaactgtgctacaacgtgaactggacagctgaggccctccccagtgctgaggagacaaagaagctgatgtggctgtttggttgccccttactgctggatgatgttgctcgggagtcctggctccttcctggctccaatgacctgctgctggaggtcgggcccaggctgaacttctccaccccaacatccaccaacatcgtgtcagtgtgccgcgccactgggctggggcctgtggatcgtgtggagaccacccggcgctaccggctctcgtttgcccaccccccgtcagctgaggtggaagccattgctctggctaccctgcacgaccggatgacagagcagcacttcccccatcccatccagagtttctcccctgagagcatgccggaacccctcaatggccctatcaatatactgggtgagggccggcttgcgctggagaaggccaaccaggagcttggtctggctttagactcttgggacctagacttctacaccaagcgcttccaggagctacagcggaacccgagcactgtggaggcctttgacttggcgcagtccaatagcgagcacagccgacactggttcttcaagggccagctccacgtggatgggcagaagctggtgcactcactgtttgagtccatcatgagcacccaggaatcctcgaaccccaacaacgtcctcaaattctgtgataacagcagtgcaatccagggaaaggaagtccgattcctacggcctgaggaccccacacggccaagccgcttccagcaacagcaagggctgagacatgttgtcttcacagcagagactcacaactttcccacaggagtatgcccctttagtggtgcaaccactggcacagggggccggattcgagatgtccagtgcacaggccgcggggcccacgtggtggctggcactgccggctattgctttggaaatctgcatattccaggttacaatctgccctgggaggatctaagcttccagtatcctgggaattttgcccggcccctggaggttgccattgaagccagtaatggagcttctgactatggcaacaagtttggggaaccagtgctggctggcttcgcccgctccttgggcctccagctcccagacggccagcggcgtgagtggatcaagcccatcatgtttagtgggggcattgggtccatggaagctgaccacataagcaaggaggccccagagccaggcatggaagttgtaaaggttggaggtcccgtctacaggattggagttggaggtggagctgcttcatctgtgcaggtgcagggagataacaccagtgacctggactttggggctgtgcagcgaggagacccggagatggaacagaagatgaaccgtgtgatcagggcttgtgtggaggcccccaagggaaaccccatctgcagccttcatgatcagggcgctggtggcaatggcaatgtcctaaaagagctgagtgacccagctggagccatcatttacaccagccgcttccagcttggggacccaaccctgaatgccctggaaatctggggggctgagtaccaggaatcaaatgctcttctgctgaggtcccccaaccgggacttcctgactcatgtcagtgcccgtgaacgttgcccggcttgcttcgtgggcaccatcactggagaccggagaatagtgctggtggacgatcgggagtgtcctgtcagaagaaatggccagggggatgcccccccgacacccccgccaacccctgtggacctggagctcgaatgggtgctgggcaagatgcctcggaaggagttcttcctgcagaggaagccccccatgctgcagcctctggccttgcccccagggctgagcgtgcaccaggctctggagagggttctgaggctgcccgccgtggccagcaagcgctacctcaccaataaggtggaccgctccgtgggaggcctggtggcccagcagcagtgcgtggggcccctgcaaactcctctggcagatgtagcggttgtggcactgagccatgaggagctcataggggctgccacagccttgggagaacagccagtcaagagcctgctggacccaaaagtcgccgcccggctggccgtggccgaagccctcaccaacctggtgtttgctctggtcactgacctccgggatgtgaagtgtagcgggaactggatgtgggcagccaagctcccaggggagggcgcagctttggcggatgcctgtgaggctatggtggcagtgatggcagccctgggtgtggcagtggatggtggcaaggactccctcagcatggctgctcgggttggcactgagaccgtgcgggctcctgggtcactggtcatctcagcctatgccgtctgcccagacatcacagccactgtgaccccagacctcaagcatcctgaagggagaggccatctgctctatgtggctctgagccctgggcagcaccggctcgggggcacagctctggcccagtgcttctcccagcttggggaacaccctccagacctggaccttcctgagaacttggtgcgggccttcagcatcactcaggggctgctgaaagaccgcctcctctgctcaggccacgatgtcagtgacggaggcctcgtcacatgcctgctggagatggcctttgctggaaattgcgggctacaggtggatgtgcctgtccccagggttgatgtcctgtctgtgctgttcgctgaggagccaggcctcgtgctggaggtgcaggagccagacctggcccaggtgctgaagcgttaccgggatgctggcctccattgcctggagctgggccacacaggcgaggccgggccccacgccatggtccgggtgtcagtgaacggggctgtggttctggaggagcctgttggggagctgcgagccctctgggaggagacgagtttccagctggaccggctacaggcagagcctcgctgtgtggcagaggaggaacggggcctgagggagcggatggggcccagctattgcctgccccccacctttcccaaagcctccgtgccccgtgagcctggtggtcccagcccccgagtcgccatcttgcgagaggagggcagtaatggagaccgggagatggccgatgccttccacttagctgggtttgaggtatgggacgtgaccatgcaggacctctgctctggggcaattgggctggacactttccgtggcgtggccttcgtgggcggcttcagctatgcagatgtcctgggctctgccaaagggtgggcagctgctgtgacctttcatcccagggctggggctgagctgaggcgcttccggaagcggccagacaccttcagcctgggcgtgtgtaatggctgtcaactgctggctctgctcggctgggtgggaggcgaccccaatgaggatgctgcagagatgggccctgactcccagccagcccggccaggccttctgctacgccacaacctgtctgggcgctacgagtctcgctgggccagcgtgcgtgtggggcctgggccagccctgatgctgcgagggatggagggcgccgtgctgcccgtgtggagtgcgcacggggaaggttacgtagcattttcttctccggaactccaagctcagattgaggccaggggcttggctccactgcactgggctgatgatgacgggaaccccacagagcagtaccctctgaatcccaatgggtccccagggggcgtggctggcatctgctcctgtgatggccgccacctggctgtcatgcctcaccctgagcgggccgttaggccttggcagtgggcatggcgaccccctccatttgatactctgaccacctccccctggctccagctctctatcaatgcccgaaactggaccctggaagggagctgctgactggccacaggggctcacctgggccccatggcttttcacctaagtgggtcctgccccctcccccatgaccttcaggagcaccccatattatttccaaaaatatcttggacagacaaggaccaaaatgccaaaatctcagcggactcgatgatctgcctgctgatgttccttctgtggctgtgtctattttcagttctgctctaacatggcatgccctttctcagcccaggaaacagcatgtggttcagagaaaagagcgacaaggaaaagttaggactcctgaggtccgaacaggggcttctgttgcccacttcacaacacccagtgatcaccggtgtgcaattgcctccttggctctgagggatgttttgcgctcccttttctcatcattggggttagcgggtgcagacaaattcagcaatagtatgcagatcagcccctcaccacctcattgttctcatctggaactgaaactttctggatttctcttgaagtgctacactgcactgaatgtaaggaattgttgcttgtggaagtttctcagcgtttctggctgtcttagggctggcctcagaacccagcattcctgttatttgcttctaaattagcagcnnnnnnnnnnnnnnnnnnnnnnnnnnnnnnnnnnnnnnnnnnnnnnnnnnnnnnnnnnnnnnnnnnnnnnnnnnnnnnnnnnnnnnnnnnnnnnnnnnnnnnnnnnnnnnnnnnnnnnnnnnnnnnnnnnnnnnnnnnnnnnnnnnnnnnnnnnnnnnnnnnnnnnnnnnnnnnnnnnnnnnnnnnnnnnnnnnnnnnnnnnnnnnnnnnnnnnnnnnnnnnnnnnnnnnnnnnnnnnnnnnnnnnnnnnnnnnnnnnnnnnnnnnnnnnnnnnnnnnnnnnnnnnnnnnnnnnnnnnnnnnagcagctctgtttctgatagaggtggttggggctctcatccctagatcctaaccctttagtatgctggaattctactcttcacttactgcattgactgttgttgattagttattattgcaaagcactgtcaccggcctcagggagtttatgtgtaatagaattaaaaataatagctgtgtataacacttagctcaagccacgcatgtgtgaggcatttggtatgtatctgaattaattctcactaaaattcagcaaaggacttgatagcctctccccgccttttcaataaaggatgaatgaaggttgaaaaaaaaa

SEQ ID NO: 58207 - DNA, 950 bp, Homo sapiens
tttttatttttttttttttttggatttgaagaaacctttatagatatagattccattttacaagaagggaaaattgaggcctggagcagaaggaagcagtggggtagagtcagaaccagcatccttaagccgggcagacttggccttagacagacatgccttacttaggtccagcagatgctaccaggaaggtatggctggcagtacctgcgtctgagctcaggacttcagaccaagatggaagtcccttagaccaataacataaaaatcactttttaactcaggtgctgtgggtagggagcaagggcagctatactgtcctttcagaagctctcctgggctgtggaaagtgcccacgagcctggcagatcacggaggaaggaggcagaagttccaggcccagaacctgggtcccaggctgcattcagagaggattccttgaggccctggcagccaggaaccctgttttatgtgccccgaaggctgtaatgaaaacattgagtgaccacagtgaagaagaccaagatggtggctgcgttgttgagctggttgagtcgccactgcttttctacctcattcaggttcagccgtgcaatgaccacgagcaggacaccgatgaccacctgcaggagcagagagaggctgatgagggtgaccagggtggtgtagtagtgagaggatggtccctgctccagcaccgccttcagccgcatggcgttggacatgaacagggccacgtccagcatgctctccgccacgctcttcttggtggcgtaatggttcaggttgatgggctggctcctggggtcggagcttccaggctcatgtcccctcacttaatcctcccaagacctgtggggcgtgtcgtcattttagggctggagatgaggaaaccgaggctcggagagatgaagcgttgtacggccaccgagcggctgctttgcaacgac

SEQ ID NO: 58208 - DNA, 849 bp, Homo sapiens
tacatttacaataattggaattttgtccatttggggggagttgtttttttaaaaaaaaatcttaactaaggaacttaatttgactgtcttgattttgtttagcatctactttataatgctattttatcattacaataggttttccgaaattctctgtatgcaccagattattcatctcgtttagatattgtaagagcaaattcaaagtcacctcttcagagatcactgtcagctaagtgtgtatctggaacaggacaggtatccacttgtcgactaagaaaggatcaacaagcagaagatgatgaggatgacgagttagatgttacagaagaagaaaattttcttaagtaaactacacatttccattttcatcataaatgacttgaaatccacaatgactaaattgtagaactttatactcactttgctatgttaagcctcaaagtgaagtccaactggaaacagaaaaataattaaaggaaacttatgctgaccaaaaatgaaggctttaaaaaatattgcataccagtcatttcaacatcctacctagtgttacatgatttttgtgtaagtgcctttttttttaaagatggtgtatttcaaagtatttcatattaatgtactatatctacttgaagttccaatagtacattatgacagaaaccaaaagatctaacaattctgcttagctttttggttaagactccatgctttcattaccagaaaagggtcttacgtagtcattatgattcatggaattctattccatgaagccttaagaaaaaaaactttttttaactttccctgaaactttatcatttgataagtaaatttacttttcaagaagag

SEQ ID NO: 58209 - DNA, 2104 bp, Homo sapiens
tttttttaggtttaataattattttaattacaaatttccaccaattcttgccagtcatattattgtggatatcacaaatgaattatataatagtatattaccttatattcatctgcatgaaacttaggagaaaggagagcagaaatgtataagtttctgagaatgacaccataaagctcatatttacagtatggtagtctgtaaacatacaggcctgccagttaaagcccactcttctatcatcacccagctgcatgaccctgagcaagtcacttttgtttgctaatttttaatatcatctatcacctgacttctctatctacgagagttaactggctgcatgcaaaataccatgaaaaataccatgcacttttaagtgtgaagtagcactgtaaagtgacttatatattactggtctttctatttttagagtattaatattcatacatcagttaaaagtcaacatgtgtttgctaagtgatccttttgaaaggatccctttaaaagttcctaggcatcagcttcactgacaatctggtatgattctgaagccagcatttcaactcttggaaagatatacaatagtcacagcttgaattagtaactaataaaataaaatgccctcttattctcccaaaatgtaataattcaggagtaatgacatcaagatttttctcctcaaactgaggagaaaaaagccccaccgtggcttgtttaaatgacttaaaatacaagtggtaactatggtgactagggaaccaatgtttaaaacatcaaaagattattacaaaaatccaatttcccatgaatttctaaaaattaaaattctgagatgttgtgtctgagaaactgcttcttcagcaaaatatttagcacagactacatcatcccaaatctatggtatggccaggtatttaggtccttcaaccaacgtttttagaaagggtcccgttgctctttacttgcaaaatgactatctctagggcctcaaaattcaagagacaacctagcttttataatgttaaaaagggaagactttggcatgtaaactagaactacatgattgtgaatatttggcaaattgatctctatgtgtatatacaagctatagctaacatgattattacaagttttttggaagcttgaaggccaaggaaaataatctgcacatataactttctgatttatcaagtactgagatattaatgaattcttcatattgttactcctgtatcagttctttagaatttcttagcctttgggtactctaagccttggatggaaccatttagggagtagctagatatatgcaaagaatattaggatttagaaacatttctggtttatcaaagtgaaaagataaatattacaaacactgaaaatgtgaaaataaggttcaagagagctgcaaactatgtgggtaccagttagaaagtatcttcatctgactcatcactcttgggtttggtaagtctttctagttcttctccatccccactggaacgctcccaaagattgccacttagatctcggatcctttcttgcctaggtgcgtattccggaacttgaggcttgctggcattataaataaatatagagagaaggactgatggggcttccaagaaaaattccagggagggcctgaagtcaaagaccaggacagacactgttgtgataatgacagtggtaacctgggccatcaagacatggaacatgttatccaggaacttcagaatgaaagccactgaaaggccctggaatgcagttacaaaaataagggctactgaaaatgcactgtggccataaaaaaatccacagttcttaatctgatcacggttactcctctgaaggcccagagtcagcccattaaacagaatgccaaagaaatagagtttgctgttctgtatgaagatgctttcagtgagctggttcccttccttcagtatcttttcattatagatattagccattgaagaaataaaacactggactataataagaacatggcccatgccaagacggatgtgactgaaaactctggctgtggtgttccatttagcttcaggaaaagtccattcctttgctgtacaattgtcttttctgg

SEQ ID NO: 58210 - DNA, 1551 bp, Homo sapiens
cactctggaggtgtctttctgtgggctcagggcaaccacacatacacagggtgggtgcagcttcccaaccattttatacagagtcacagtgtcagaactctggtggaaaacagggtggggtcgggggatgacatccaactcaggaggtgtccatggtctcgcctttgagttcgttgaagaggaaggcgtcctggtactccttcatgtactgcgtggagcgggactcgtccaggaagagtgagtagacccgcttgatgtcatccacctgcacttctgtacccttgcgtttccggcacaccaagctggcagctgtgatgagctggatggcgtagcgcagtgacgtctccagcccgatgcgggtcagcaccgtgtaggcgtcctcactcatctccacatcttcttcctcgcaccggatgcggaggatctgcttcgtgtctttctcgctgtagggggtggtggagacgataagcagccggtccagcaggtctatggggatgccgtgagggctctggtagctggtgccccggattcgcgtgatgccacggttggtggccatgatcaggacaggcgccatgtcactctccagggcccggttgaggaaggagaagctctcgatgtccagcatgtggacctcgtcgatgaacagcactccagggatgatctccgccttgccctcctcgcgccactcagccaccttggcattgatctgctcacggacttctgacttgatctcccctgtgtcacctgagaagagcgccaggaagccctgggtgcgagagttgatgacgtcgatctcgtgcagggacacggtgtgcaccacctccttgcgtttctggagctccccatctgggcactgcacgaacttggtctgggagcccatagcgtcgtagtcgcgggcgcgtgtgaaggagcggcccagcttggagatcttgcccgtcgccttgtcgatggtgatcacgtccccggcctggaccttgtccttggtcagggactcaatcatcttggtgcccaaggtcgtagatggtctccatctctgtggtcttgagggtcagtttgcccaccttggagcccgtccctgttgctggtcgatcaatctggaactccaacaacttccccttcgaatgaatctccgtctccctccctttgaatgcgaaacgccgaatggaaccgccggaaaggcctgcgtcaagcgccctcggtcttgctaaatctcccagggaagaagatttcactgccggcgaatggctgtgaaatggcgtgtccaggccccagggcctggcgccatgcccatggcgatggccgtcttcccccgtgcccggctggccagcaataaggactgcccgaccggcaatcttcccttcccggatcatctccagcaccacgccatgccgcccgccgtgccgccagctgacccaccatgccttgcgaagcctgccgaggctccaaggcatcgtccagccccagtccccggatgtgggagtgggcaccgattcgctcaatccttgttacatcacggatctccgggactttggttgtggctgtaacggttgc

SEQ ID NO: 58211 - DNA, 3669 bp, Homo sapiens
caaagctgttctgcagatcagaaagaaggggttcctggtcatacaccagtactaccaaggacagcttttttcctgcaagatctgttacctaaagcaataaaaaatggccagaggatcagtgtccgatgaggaaatgatggagctcagagaagcttttgccaaagttgatactgatggcaatggatacatcagcttcaatgagttgaatgacttgttcaaggctgcttgcttgcctttgcctgggtatagagtacgagaaattacagaaaacctgatggctacaggtgatctggaccaagatggaaggatcagctttgatgagtttatcaagattttccatggcctaaaaagcacagatgttgccaagacctttagaaaagcaatcaataagaaggaagggatttgtgcaatcggtggtacttcagagcagtctagcgttggcacccaacactcctattcagaggaagaaaagtatgcctttgtcaactggataaacaaagccctggaaaatgatcctgattgtcggcatgtcatcccaatgaacccaaacacgaatgatctctttaatgctgttggagatggcattgtcctttgtaaaatgatcaacctgtcagtgccagacacaattgatgaaagaacaatcaacaaaaagaagctaacccctttcaccattcaggaaaatctgaacttggctctgaactctgcctcagccatcgggtgccatgtggtcaacataggggctgaggacctgaaggaggggaagccttatctggtcctgggacttctgtggcaagtcatcaagattgggttgtttgctgacattgaactcagcagaaatgaagctctgattgctcttttgagagaaggtgagagcctggaggatttgatgaaactctcccctgaagagctcttgctgaggtgggctaattaccacctggaaaatgcaggctgcaacaaaattggcaacttcagtactgacatcaaggactcaaaagcttattaccacctgcttgagcaggtggctccaaaaggagatgaagaaggtgttcctgctgttgttattgacatgtcaggactgcgggagaaggatgacatccagagggcagaatgcatgctgcagcaggcggagaggctgggctgccggcagtttgtcacagccacagatgttgtccgagggaaccccaagttgaacttggcttttattgccaacctctttaacagataccctgccctgcacaaaccagagaaccaggacattgactggggggctcttgaaggtgagacgagagaagagcggacatttaggaactggatgaactccctgggtgttaaccctcgagtcaatcatttgtacagtgacttatcagatgccctggtcatcttccagctctatgaaaagatcaaagttcctgttgactggaacagagtaaacaaaccgccataccccaaactgggaggcaatatgaagaagcttgagaattgtaactacgcggtagaattggggaagaatcaagcgaagttctccctggttggcatcggtggacaagatctcaatgaaggaaaccgcactctcacactggccttgatttggcagctaatgagaaggtatacactgaatatcctcgaagaaattggtggtggccagaaggtcaatgatgacattattgtcaactgggtgaatgaaacattgagggaagcagagaaaagttcatccatctctagtttcaaggacccgaagattagtacaagtctgcctgttctggacctcatcgatgccatccaaccaggttccattaactatgaccttctgaagacagaaaatctgaatgatgatgagaaactcaacaatgcaaaatatgccatctctatggcccgaaaaattggagcaagagtgtatgccctgccagaagacctggttgaagtgaaccccaaaatggtcatgaccgtgtttgcctgcctcatggggaaaggaatgaagagggtgtgaggcccaatggggctgggtgggaggcggtgcactcactcctgactgcccggcacagatgctccagggatgattcaagccattccaaagttcaacttggtgacactctataagattccaaaaagcacatattagtgcagccaagtagcctctcctgtatttaacaaaaagtgcttcattctttgcaggaggcccaacctcctatatataggtttctattcttgatttatttgcttcttcgaaaatctagaggaaaagaaagaagttattttccaggtacccttctcgcttttgccattagccaaggatagaagctgcagtggtattaattttgatataatctttcaaaccagcttcatgtggcttcccttttctttgttcaagatgagggccaggaggggaaacatcacacctgccctaaaccctgttcctgggaggtcagcatttgatctgttgcaagcccctctttctgtcccctcttcctaccctgcctcccatgactttgctcctcacacttttggaaccatgccttccgggggggcccatctcttctggccgtccttgtctctgggccacttggagtgtgtgataaatcagtcaagctgttgaagtctcaggagtctctggtagcctgcagaagtaagcctcatcatcagagcctttcctcaaaactggagtcccaaatgtcatcaggttttgttttttttcagccactaagaacccctctgcttttaactctagaatttgggcttggaccagatctaacatcttgaatactctgccctctagagccttcagccttaatggaaggttggatccaaggagggtgtaatggagcatcaagccactcggcggcagcatggagctataactaagcatcctttagggttctgcctctccaggcatttagccctcacattagatctagttactgtggtatggctaatacctgtcaacatttggaggcaatcctaccttgcttttgcttctagagcttagcatatctgattgttgtcaggccatattatcaatgtttacttttttggtactataaaagctttctgccacccctaaactccaggggggaaaatatgtgccaatcaatagcacccctactcacatacacacacacctagccagctgtcaagggcagaatgaatctatgctggataagaaatggtggaactgcgttatgaagagctaatttactggacaaagaattccaaagcaaaaccagaacagtatgaatttgagcaggtctcataggttgagcaatttccccctaaaccaactgaaggctaaaaagcaacaggccattgtgaaccaatgcaagacgccctctatcatggtgaaaagctccatcaatgaggtatcttctttagtggtggtatgtaatggaacttagccatttttcaaagcaattgaaatgcattgctctggatctgttccttggcagtggactcagaaagccaacatgtggctcctcccagcccataaccagtatttttgctgcttctgaatacaaattggttggttttgacttcagattgaacttactgtagcctcagatgatttcccccctccgcctccaggaagaaagaatgttactgccttaataaaaaatgaaaagagaatgatgctcaaaatctttccaaataaaatgttccctataaaaaaaaaaaaaa

SEQ ID NO: 58212 - DNA, 988 bp, Homo sapiens
ccatgatggctacttataatttatttataaaacattttaccagtgagtgatgtctcaagtgagaggtggtaacagatacacaaagcagtttatagcatgcaatatttcaatgcctctgagaggtagaaacagcttgtgctctcagatggccctcagtccttccccttgtcatctttctgtcctagactgtgtcctaactgctcacaagggttcagcggcatgcaaacagtctttaattggttttcttcaaagaggcattgttgactggaaagactggcttgtatttaaactctgctctttttgcaaatgacagactttctcaacagtatttcagaggaaattttgttctgaacagttaactgaatctgaccagattacagacagcaccacccatattactcaatgctaagacacagcatctttgattttctgtatgtcataacattctgaagcttgagttaccgatggagccatttttgcaactacacatcctccttatagttcttgctttcctttcaagcagatcacagggcccagggcaagatgatttcccttgaggagaagtagcctgagccttagaaatgcaatttgtataactgaccagcctggctttccccctcctttaggaatctgattcttcttcctcttcctcctcctcctcttccgtcacatgactctttgtgctcagctccagggttgtttggttgattgatgcttcattgtctacatgcaccaacatatcatgtgactgttcaggtacagtgtgagaagacagcatctcatcccctcttctagaactgatcattgattggagggctaattcttcaaccttgaggcggttcagctggtcgtgcagggctgccttcaaccgcagcagcgtctcctcctccttgcgcagttcctgaagccggctcagcatgttgcctggtcacatagccaacctccgggctgctgtcggcccggcactcggtgatgacgccatcgccgc

SEQ ID NO: 58213 - DNA, 1710 bp, Homo sapiens
tttttttttttctttttttagacatcaactctacatttattgcagtcctttaagtctatgacggcggggcagccgctgacagcatgcagagcaagtttaggaaaaaccgaggccctgtgggaacagcaacgcgggctccagccagggctctcgtcctcgcagcctcccacaagacctggggctcagggcagccgcttccccacccagcacagcagcagaggggccctagagcccccacagaaaggactgtcccagcctcgggagcaagagatggctccctccggacgggcctcatccaactccgccctggagtgtggctggaaggaagggacagagaaagaagggacagaggaaaggggctgtcccagcccaagaaggcagttccactgggaagtcagtcaggtccggcggcagcgcttcctctggcagggccgaggctcgcgactgctggggtgggcggaggtcgctgcctggggatcggacactggagccttgcggcggctgcaactcatgctcaggacccagcccagcttgttgtgtagcacctgcttgaggcccggcggcagcggcagaccctccagcgtgtctcccgagtctgggccgcagctggcgcaggcggtggcagcacaggtactggagggaagtggcgctggcacaggagcgggtgaccttcatgctgctccgggccgccgtggagcacaccatcgggtagaatctcttgttctgcagcttggtggctgccacacctatacacttcctgttcttgaaaaaggtgagtgtgccgtgccaggtgtccaggtgcacgccaatgatggagccctggccgaaccgcgacgagaagctggtcttgtcgcccttgtggtggaggaggcccgtgtaggagaggccccagctgtcctcatccctgcccagcaggctgcagaacgtgtggcggtatttgtccaggtccacatccgacgtcccgatgcccaccatcatgtcggtgccgtagacgggagaggtcatcttgatctcccagaagtgctggccctcccccagctccttggtgccccggatggccgctgtgccgcagctgtactccatgtggaagcttgacttacggttgtcacagctcagcagggtggctgatgacttatttaagtcatcccagacccagtcgaaatactcgtcttcctctccgcagcggcagtccctgccccggtgggccgagtgcaggctgctacagaaggaggcctcgctctgcccagcacagtcacagaaggactcgccggtcacgggcaccgcactggggatggatggcggcagcgtggagtactcggggtcggagtccgagtcgctgtgctgcccatcagagtcgtagccccagttagtggagcctgctagagccacggcccgggcatctgcgtctcggcgggctgcactcaggacgaagtgccaggccctgctgttccgggggcgtctggccatggtggaaagaatctagaagaaaacacaggctctgggcaaaggaagactcacagcactcccagccctgagcttccaaggctgggccacggacccactcaaagtggggactgcaggggccgcaccggtgcccagccagggctccagaacgcttcaggagcccgtacctcaccccaggatctgagcagctcaataaaacccaggtagatcctgtgaaacgccacccagacaaaaaaaaaaaaaaaa

SEQ ID NO: 58214 - DNA, 2214 bp, Homo sapiens
ctttttttttagcttggttctttctacattttattatttcaaaccaggtgaacaattccataaaacatgtgaaaaaagcaaggaagtgttcaacgctgaaggccccgggcctgggacaagggcatgaggggcgtggccccccagcaggcagcggcggttcctaggttagcgctagggagctacattttaggttaatagagcctggggccagggccgctggggcagggccctcagtgacgttggcagttgtctggaacagcccttggaacccaattctgtggagggcagggcaggggtgccgctcgcacgggggcggccagcagagggacgggtgtaaacacgcagacacactcaaggcacggagtcacttggaaggggggctgggggggggcttgctggtcaggatctgacagttttaaatagtttttctctaaaaagttttctagatttgcagttttttttttttcctttactttcatttttttaaaaagctacgagaatgagcaggtggactgtggtttccaggaatggtggcgtctcacgcttcttgtgctttttcctttggggcctccgagcggctggggttgggggactgggcaggaggctccctgtaaacatttggacttgggctggggcaggggctggtgttgggcaaagctgggggtccaggctggagaagcaggggcccctccagacgcagccttgggagactcagcatgtgcccccctcccctcatcacagaacaagacaatggttaaaaaccagaacagatgcccagaagggggtaccatggccattaccagcatctcagacaagggcaggcttcaaacagggaggcctgtggcaacccctcccctacgtctggagctgaggggacagggggagctgagaacaaagagaggaaagaggagaaaagcggcgggggaacaggcggggagcgtgatcttcttgcccccatcttcctcaggggttggggggtacaaagtcggcggtggcccatcccgccaggccccgctgcccctcagaagaggccgcagtccttcaggttgttcttgatgatgacatcggtgacggcgtcaaacacgaactgcacgttcttggtgtcggtggcgcacgtgaagtgcgtgtagatctccttggtgtctttgcgcttattcaggtcctcaaacttactctggatgtagctggctgcctcatcatatttgttggcccctgtgtactcagggaagcagatggtcaggggactgtgtgtgatcttctcctcaaacaggtccttcttgttgaggaagaggatgatggacgtgtctgtgaaccacttgttgttgcagatgctatcgaatagcttcatgctctcatgcatgcggttcatctcctcgtcctcagctagcaccaagtcataggcgctcaaggctacgcagaagatgatggctgtgacgccctcaaagcagtggatccacttcttccgctcagaccgctgaccacccacatcaaacatcttgaagtgtaggtccttgaaggtgaagtgtgtctccacgatccccgtggtctttacgcgggtccgtagcacatcttgctgtgtggggatgtagtcactctgtgcaatacgctccaggtcgttcaggtagtaggcagctgagtcgttgagctggtattcccttgagcggccaaaagcaggcctgcacaccatggtcagcccagagcctccggatgacgccggacaggtcatcagggagcacgccttgctcctcggcggtgcaggacagtgcaaatagctgcctggcgtcgtccgctctggaggggtcggcaaagtcgatctgcaggttgcccatggctttgacaatggccatgatggactggatggtgttgctgtagacaaccgcccggtactgccggcattcctcctcggagtagccatcctcgtggatgatcttcatctgcttgacgatggtgctcttccctgactccccagcacccaacagcagcaacttcacctcccgcgccgccttctctccgtcctcccgcaggttcttgtcgatcatcttagagcgctcggccgccgccttgtcctcggcgctcacggtgcagcccatcccgcgttccgccgctccgccgccgcccggcccccatctacggcccacggcccggcttcggccccgcccgactccactccgctcccaccaccagccctctgcgggaagcactcgggactgccgg

SEQ ID NO: 58215 - DNA, 2411 bp, Homo sapiens
gccagagcgcgcggggcagtgtgcgcgggagccgaggaggaggttccggacgctgcttaggaaccggggactcaggagtgcccgcgccctgagcgctcagctccagaggcgtcatggttgagtacgggaccctcctgcaagacctgaccaacaacatcacccttgaagatctagaacagctcaagtcggcctgcaaggaagacatccccagcgaaaagagtgaggagatcactactggcagtgcctggtttagcttcctggagagccacaacaagctggacaaagacaacctctcctacattgagcacatctttgagatctcccgccgtcctgacctactcactatggtggttgactacagaacccgtgtgctgaagatctctgaggaggatgagctggacaccaagctaacccgtatccccagtgccaagaagtacaaagacattatccggcagccctctgaggaagagatcatcaaattgggctcccccaccgaaggaaggcctgagcaagggggaggaagaggaggaaggttggaccttcatcagaccactcccttcccccatcctccaggagaggggggcaagggcaacccaccatctacccacttactaacctgggtcctaacccccttactgtgcgcgtgtgtgtgcgtgtgcgcacgctctggctgtttgtctatatgtctagctcatctagttcctcttcttaaggggatgggggtcaggggctaggggagggggctgagtttccccactttaggaggaggtgggggctatttctatgcaaatagaaatcagcacattcctcctacttccctttcctccactccccccatatctttaaagtgtggaagcagaaaggacctgcattttcctacattgaggagctgacataggggtaaggtatgggagaggtaggtggatccagggaaaagcagtggggacggaaggcaaagagaccactcaacccccacctggaaggggcaaagaaaagccagagttccatgtttgtactcctgtgctggactgtttcctgagtaccagcaggtccctttttgtctctcatgggcctagcataggtatgagccagggatcctttcctggtccctaagatcaaaccccatggagcagccagcgttagatgcccccacccacctgtactctggagagactgtgctgggaacatgtaccactgagcctgagatggggatgagggcagagagaggggagccccctcttccactcagttgttcctactcagactgttgcactctaaacctagggaggttgaagaatgagacccttaggttttaacacgaatcctgacaccaccatctatagggtcccaacttggttattgtaggcaaccttccctctctccttggtgaagaacatcccaagccagaaagaagttaactacagtgttttcctttgcaccgatccccaccccaattcaatcccggaagggacttacttaggaaacccttctttactagatatcctgggccccctgggcttgtgaacacctcctagccacatcactacagtacagtgagtgaccccagcctcctgcctaccccaagatgcccctccccaccctgaccgtgctaactgtgtgtacatatatattctacatatatgtatattaaaactgcactgccatgtctgcccttttttgtggtgtctagcattaacttattgtctaggccagagcgggggtgggaggggaatgccacagtgaagggagtggcagaatcaaattgctacatagtccaaacaaaaaagaaggctttttcaaaaaacattaaattcacatgcagtctcagagactatttagacaaagttcaagttaggagcttttaggatgtgggagtaaaactttaatgggaggggagggctggctgctggaagaaggaagaagccagactggttagacagtactcttaactcctagcccagcctagcgtgcccctgcccctctggccactgctgcagacacctgccttaacacacacacctctaggactccacaagttttgccttaaaggaccttcccaagtctccctttccctgtctggcttctcccttaagaagagagagatacttgtagaattgggtggggggaatgagcatgaactgtccttccatttgggatatgttacattagagtgagagagagaataaggagcctttcttatggaagaaatgggagaagagagacagggttcttttcagcagagtctagtagtttctctgtaaggcaaaataatctaaaaagactaacctgcccacccactccttatattgctgtgagattgcccctatcttgtgctcttctgtctgcagtgtgcacggccttgttctaacccggaataaaggtgattgattgtattgcaactaactgatttt

SEQ ID NO: 58216 - DNA, 2237 bp, Homo sapiens
gccaacttctccaccttctatgggatgctattgggctatgcagatgccacccagcggtgtctcgacttcctggacttcctggatgatgagctcacgtataagacactcttcgtccctgtcaatgaaggctttgtggacaacatgacgctgagtggcccagacttggagctgcatgcctccaacgccaccctcctaagtgccaacgccagccaggggaagttgcttccggcccactcaggcctcagcctcatcatcagtgacgcaggccctgacaacagttcctggggcccctgtggccccagggacagttgtggttagccgtatcattgtgtgggacatcatggccttcaatggcatcatccatgctctggccagccccctcctggcacccccacagccccaggcagtgctggcgcctgaagccccacctgtggcggcaggcgtgggggctgtgcttgccgctggagcactgcttggcttggtggccggagctctctacctccgtgcccgaggcaagcccatgggctttggcttctctgccttccaggcggaagatgatgctgatgacgacttctcaccgtggcaagaagggaccaaccccaccctggtctctgtccccaaccctgtctttggcagcgacaccttttgtgaacccttcgatgactcactgctggaggaggacttccctgacacccagaggatcctcacagtcaagtgacgaggctggggctgaaagcagaagcatgcacagggaggagaccacttttattgcttgtctgggtggatggggcaggaggggctgagggcctgtcccagacaataaaggtgccctcagcggatgtgggccatgtcaccaaggaagggggtcttcatgcagccggtgcagagctggtccatccagaggggtgcctcgtgctgcagcggcgtacggcgtgggtagaaggtgaagtccacgcggtagttgagcaggcagctgagggaggccatgtagaggtcagagaagcgcacgaggcgccttgagaagtaggtggggttgtggaaggtgcggaagatgctgccgaactgcgcattgaacagggccttggtgatgcacctcagctcctgccgctctttcatccaggcagccagcacctgcctcgactccgcgtcctgataggtctgcatgcgctccagcagccccgtgagcgcctgctgccacgtcagcgagtgcatgtactgctccgtgttgatgatgcggatctcacgctccagctcggggatgatggcgcctgtgcgccagccgtgccgcagcatgagatccgccagatcactatagaggtggtccccgaagtagagcacgcgggggccacgccattccgtcaagcgtaagaagtcaaacaggtttccctgccgatagatcttgcccttttccaagcgggtgatccggtcccactgaagtgagcccttctcatcgagttttctgaaaggcttgcgccggtcagtgaagaagctgggcttgtctgcctggacaatgaccacatcgaagagctggcgccaatcgggacccaccatgtgccgcatccccttgtctaacgaaagctgaaaaggactgttggtgaatgaggaaaaactgtttcccatgggccacccaggcggctcaggaacagcaaaacgtctcatcccctcctcaggatgtacttctcccatgtcctgctcggatcccactggtaacatgaggcccttcacatgcacgtctcggatggcgtccgtcacgtccttgttagagatgtgcttggtcaaactcccaggctgtggccccagaaagtagtccaccacacaggacagcagagccatctccggtagcgagaagatgtccatgaactgcttaatggagggacccttgccatagaagccactcatctggtatagtgggatgtgctgggtacccccatacagctcaatcacctcctcgtctggcacaggctggaggcccctgtaggctgtccccagctgcacgtagtggaaggcgtcaatcttcatcagaaggctcttctgaatgtcatagtggaggccacggatggcaaagctggggttgtagtcatacttccgaatcccttctgggtacttgtagtgctcgatcaggatgtcacgggcggtactgaagatctcggggtgcagtgcgtctgcatactgggccagggtgtagtcgtagtcaaagccgtagacctcaacgtcacgcaggctgatctcgttgttgg

SEQ ID NO: 58217 - DNA, 1178 bp, Homo sapiens
tggggcccagcaaaccaagaaagacaaggataagaaaaatgcaagcttcacataaagcctggcaagccaaggatgttcccgcattcacctgcttttgcagtaatatcgtatctctgccatgtgtgttctttagttttattttattttattttatttttttacccttcctcaaacaccagtaactattattaactcgttttgctgaatgttgttgggtggtagaaaatgatagaacaagggaataaccgcgaatgctctgtgcagctggactctgtttccggaaagtaaatgatttgctttttatgcctgttctgaatggcagcacgaagcaggcctgttacttgtatgtcgctttggacagaggaaagtggggtaaaatgctacctgtacgtctgacatgaaaacttctcaccgcctcagcagctgaactaaaaacctgaatagccatgacaagagtttgcattttcttgatgattcatctccatgagtgcacaatccctgaactcactgtcttttctccacacttgtcctaagccaaggtagatttgtacgtagacagactggtgagcaagcattatattttatttttacccttgcatgacattttcattttaatcaataacattatttggcctgagcttgtgggtctgttcagactgtctcctctcatggtttgaaactgcatctgaatgcctgccttcaatcctggccaagttggagtagactggtatgagaaaactatgattagttcacatttactggtgcatccttgatcctctcacagatagaggtcttaaaggttggatcatgtaacattgcttagtagaagaatcttcttctaaggatgatgggctttctacagcctgcttaccactaacagtaaggaatctttcataaacacacctcagtttgttcccagtgggcttagagggaggacctgatgactgattccaggatacttgtacttctaataacatttttcatgaatcatgagaaaatttccacagatacttcccttagaaaatttgctataaactctgtatcattggtagcacaaatttgagcgaggccttgtcaattttaaggtggaaataggaaggaccacaacatgacccgtaagtcaagaaggtagacatttcatatccagcttccttgcttagtctcctttcagtatttgg

SEQ ID NO: 58218 - DNA, 3771 bp, Homo sapiens
tctttgtcagcacacagcgttcacaagtcttagttcacttgcacatggattcacataaactgaatggtgtaatgtctgggcaaccaaaactgttggcttttgagaaaactgtcaaatactttaacatcaaactgttgcaatgcaagatcatttccatgtctttgttggtgatctcagcccagaaattacaactgaagatataaaagctgcttttgcaccatttggaagaatatcagatgcccgagtggtaaaagacatggcaacaggaaagtctaagggatatggctttgtctcctttttcaacaaatgggatgctgaaaacgccattcaacagatgggtggccagtggcttggtggaagacaaatcagaactaactgggcaacccgaaagcctcccgctccaaagagtacatatgagtcaaataccaaacagctatcatatgatgaggttgtaaatcagtctagtccaagcaactgtactgtatactgtggaggtgttacttctgggctaacagaacaactaatgcgtcagactttttcaccatttggacaaataatggaaattcgagtctttccagataaaggatattcatttgttcggttcaattcccatgaaagtgcaggcacatgcaattgtttctgttaatggtactaccattgaaggtcatgttgtgaaatgctattggggcaaagaaactcttgatatgataaatcccgtggcaacagcagaatcaaattggatatccccaaccttatggccagtggggccagtggtatggaaatgcacaacaaattggccagtatatgcctaatggttggcaagttcctgcatatggaatgtatggccaggcatggaaccagcaaggatttaatcagacacagtcttctgcaccatggatgggaccaaattatggagtgcaaccgcctcaagggcaaaatggcagcatggttgcccaatccggccttctgggtatcgagtggcagggtatgaaacccagtgaataaggactccagaatctaaagccagtggcttgaggctacagggagtgtagtaaagccgttgtttacttaaagatttatcaaatcagtcagtgcaaatgtcagatacaatgtatttatttaaaagattcatttttaatcatgaaattacttatcatccacattgttttaaaaagaaacaagatgctggatgtctgccaatttttgccttcattaccttttttgataaagtttctcagatccttgtttcaaacacaaatgcagggattgctgccactttttaactattaagaggcagaaaattgcacaatattgaacttttttccactgaagtagtgtgcagttctagtttgcattcctgatatgatttaaaacatgtaatataaagatgttaaaaaaaaaaaccaaaactgtgcagagtctagaagttgtttgtcatcttcagcttgtgcacaattctgttttaggttaaaaaaaggcattgtttgagctgtcccatctccactgttatccctttggggttttttaatataaattattagtttacatcatttttgtatctacatcttttttcacaaatttgtcttgccttattaaagttctgtaaaatatacttaaatggaaaaaatgatgttcatttagattgaaaacttttctcagatggattgataattgcattcatcttgtgttttatatgagaaggtgcctcaagaatttcctgttggatttgtttaaaaggatttttatctttcgtgataaactttgctgtgtaccaggaactataaaaacaaaaacttgttactaaagaaaatatctgaaatgtgataagttcttatgccatgttaatttcatgtgtcaacttcaacatttacatgtattatttcattatgtaaaatgttttagcaatttaatattttgcacagttagcaaactttgtatgtcatttccttcaaggcatcatgcagagttgacatgagatttataaggttttaagttgtttgcatgtgaaaatcaaatacatactttggtagtctttgaatacaaagtcatctgctcttgtttttcaagaattttgagacacaaagttgtatgtaaaggaatatattaatttgccgttttctaggtagatttgctcaaaaagagtgaatcaacttaatatgtacaaatgatagctgtgaaactgtagaatatctttgtgtcaggcttggagttcattgtgacctccaaattttgcctgaaggaccagctgggcaaagcatcttttaaatgttcagaggccaaaagataaacaaaaaaaaaaccttaaaatcctacctctttaaacagccttcagataagagaatcctcagtgcaatcattattttgattcgtttggtacctgttttcctggagttcccgattttattattttggggtggctccaagcattaagaggtttaatctttgatggcattgttctagttttgaaatttctagtatatttcagagtctcttagaagacttgtgtgggaagtttcactttgttttcagtgaagatcacaaacctccttcttcctttactcaagaggaaaggtcccagtatacatatttgaatggttgatggttttcaagaccttcagggagctccctgcattttacctagaaacagaaaaggcccgcaaaatcttaagtttcctggcctgcatttcccgggtaggggcaaatgactccaagctggtctctaagccaatacccttataaaccagagcccaggaaagacagctcgagtgtataattctctggagctcaattctatgcagttgtgctgatatttcattaagtcactgtgtatttttaagtgttgatacattaaaagtcgctttatggaagatgagtaaattttttaaatacttggaaattttatttccttgttaacttctacagatcagggcatgcaaccaaaagcagcttaaatgaaatattttaaaataaaatatcaggaagctatttttagatttcttctggcttatgtttctactttaggaccctcattgttctcttattaaaaaaaattatttcctgtgcatctcatggactgcagggtaaattatttgggcataaataatttaaatagttttctttcattttgactatctccagtaataacagtttttattatccagcatattggcttattgcacaaatcttaaaatgtacattgactactttctgagaagaaagtggtatcagtactcatgatgaaaaggttactactgaacaaattcacatttcaggaacacctctatctttggtttaaatcttactcttagtttttccgtctaaaaatcatactggtattagtatcaggtaaggaaattaaagtttttaaaatggtttcattctctgcaatatgcaaaatttagattttactttctggtactgtaaagaacctgaagtgatttacacttaatgggtgattaatccagtattctttaccctgaatgtttggatattaaagttcctttatgttttctataacctgtgggatcttcttgcagtgattattgtgtgtgagattttttttctttttggtctatccatattgttatattcactcaggtattttttttttaatcttattccagaatcagtggtttatattgggttactgtttaacaccaaatgggaattgggcattctgcagatttaattaattatggaaaccagggggtctcattttccttgctgatacttgttggaaaatgaggattcacattctaggtctttattttc

SEQ ID NO: 58219 - DNA, 1779 bp, Homo sapiens
  misc_feature (1)...(1779): n = a,t,c or g
ccggactacgccatgttggggtttgtgggtcgggtggccgctgctccggcctccggggccttgcggagactcaccccttcagcgtcgctgcccccagctcagctcttactgcgggccgctccgacggcggtccatcctgtcagggactatgcggcgcaaacatctccttcgccaaaagcaggcgccgccaccgggcgcatcgtggcggtcattggcgcagtggtggacgtccagtttgatgagggactaccaccaattctaaatgccctggaagtgcaaggcagggagaccagactggttttggaggtggcccagcatttgggtgagagcacagtaaggactattgctatggatggtacagaaggcttggttagaggccagaaagtactggattctggtgcaccaatcaaaattcctgttggtcctgagactttgggcagaatcatgaatgtcattggagaacctattgatgaaagaggtcccatcaaaaccaaacaatttgctcccattcatgctgaggctccagagttcatggaaatgagtgttgagcaggaaattctggtgactggtatcaaggttgtcgatctgctagctccctatgccaagggtggcaaaattgggctttttggtggtgctggagttggcaagactgtactgatcatggagttaatcaacaatgtcgccaaagcccatggtggttactctgtgtttgctggtgttggtgagaggacccgtgaaggcaatgatttataccatgaaatgattgaatctggtgttatcaacttaaaagatgccacctctaaggtagcgctggtatatggtcaaatgaatgaaccacctggtgctcgtgcccgggtagctctgactgggctgactgtggctgaatacttcagagaccaagaaggtcaagatgtactgctatttattgataacatctttcgcttcacccaggctggttcagaggtgtctgcattattgggccgaatcccttctgctgtgggctatcagcctaccctggccactgacatgggtactatgcaggaaaganttaccactaccaagaagggatctatcacctctgtacagggctatctatgtgccctgcttgatgacttgactgacccttgcccctgctactacgtttgcccatttggatgctaccactgtactgtcgcgtgccattgctgagctgggcatctatccagctgtggatcctctagactccacctctcgtatcatggatcccaacattgttggcagtgagcattacgatgttgcccgtggggtgcaaaagatcctgcaggactacaaatccctccaggatatcattgcccaccccgggtatggatgaactttctgaggaagacaagttgaccgtgtcccgtgcacggaaaatacagcgtttcttgtctcagccattccaggttgctgaggtcttcacaggtcatatggggaagctggtacccctgaaggagaccatcaaaggattccagcagattttggcaggtgaatatgaccatctcccagaacaggccttctatatggtgggacccattgaagaagctgtggcaaaagctgataagctggctgaagagcattcatcgtgaggggtctttgtcctctgtactgtctctctccttgcccctaacccaaaaagcttcatttttctgtgtaggctgcacaagagccttgattgaagatatattctttctgaacagtatttaaggtttccaataaaatgtacacccctcagaaaaaaaaaaaaaaaaaaagtcgacg

SEQ ID NO: 58220 - DNA, 649 bp, Homo sapiens
ttttcaaaatccaagcaaacttcaaactcattcatgagatatttattaaaataacacatttagggaaaaaaatcaatacaatgtatacatcattactgaaaactgtataccatcatacaaaaaaggattttattttgggaaattgttttctaatttatggcaagttttactttcagaaataaaaccacaacaacacaatctaattcaatcttaaaggctggcatgctgagcaaggaatgttcttattctttgtaggagctccttctttacactgtcaggtaccagggctctgcctttttggagtgatttcagccaccaagtcatcaacagtaacgtgttctagtcctttttctttaattacctctttacagtgtgccttcaactgatccttccagccacattcaattaatttagctctcagcaactctttgaggcgttctctttctccagtttctatcaacttttggttaatcgctgctctcatctgcgcatctttgttcatcttgctaaccaccatcaccgcgggcgagggccgtcccttcccagcgacgaaatgacccttgcgctgaggaccgttacctaccacactcttcggctgcccggacttagaccctcagtagctcgggcacctaagcacacagaaagctag

SEQ ID NO: 58221 - DNA, 448 bp, Homo sapiens
gatctttcctcctcaagagaagagctgcaggctgtcgaaagcccatttcaagctttgtgctgcctcttgatctacctctttgtccaggtggacacgctttgcctggaggatttgcatgcgtttattgcgcaggccttgtgcctccaaggaaaatccacctcgcagcttgtaaatctacagcctgattacatcaaccccagagccgtgcagctgggctcccttctcgtccgcggcctcaccactctggttttagtcaacagcgcatgtggcttcccctggaagacgagtgatttcatgccctggaatgtatttgacgggaagctttttcatcagaagtacttgcaatctgaaaaagggtaatgctgtggaggttcttttaaaaccaaattagatttcggttcaccaaattccacaacctgaaggcagtcgtctgcaaggcctgcatgaa

SEQ ID NO: 58222 - DNA, 351 bp, Homo sapiens; identical to SEQ ID NO: 25388

SEQ ID NO: 58223 - DNA, 1711 bp, Homo sapiens
ttttttttttttttaattagagcaggtatgcttttgatggtagggaagggatggaaaaaaggaaaagcaatagaaactgtccaattcacatcagttatccgtctgctttttcttgagagcttgtggaaggtgttaacgtggctgggaacatcaacaccttggcatgcatgaatgttaagtcaggaaggccagcgatcaccttgatagcttcttcacttaggtgctcttctcttttcggtttcctactggtagatgtgcttgtcttctctactgtagacatgagtcttgcaaatgcatcagtcactttgaggcttgaggtggagatttccagcttagaagttgttaactcatacaactccggatccacaccatctaaagggttagtaaggccactgctactccagtcaaactggacgggtggtagagactcctggaactgatcagatgtacatgtgttcatatctggtgacatggtggctgtctgaccgatggaagctattttttctgcagcagaaagtggtttcagtggttccttggtgggctctaacatacccaatcctgctgcatacatgggcactataacaggctgcttcttattgcccgtgaagagaatgtttcgggtgtctattcccaaggaggacaaaagcttcttgttgctatgggagccgccccactggtatctcaagccatgtgcatcatggatatcctgtagctcagtccacacatctagcaattccccactttcaggtaaggcctctctcgtttttattggcaaagtgcttgtttccagcaagtgcttcagggaagtaacttcctcttcagcatcagggacaagtatgggaagggaaaacatgcttcggaaaattcgctccaggcgggtttaataaagctgtctgaaactgaaatggctgaatccctgtaaaatggccacttagcaactggctcctttggaagttgcctgaaggtaacactggtgccgttttgggggggcccccgggagtatcaatattttcaacctgtccctatgtgaactgcccaggcttccctttcgatgatgagattccagtagcctgctggtctcccaaaagcagccccaagaacaactatctttttgttcatcctcaaaagcattccaatctacaacttggctaggaccagctgaactgaagtctgcaaaatcatcagagtcttgaaaaccattgcagtcatcctgaatatttggcacagaatcaaaatgtccaatctcaccttcttgcccatttttaagttttgcaacaggttcagtgcctgttccactagattttcttgccaattgacattcttctgataaattatcagaagtctgttttaggtctgactttgttaatattgtctcctcttggcaagaaacagcatttatatccccaaattctccaaagtcatcacctggttcactaaaatgtggaaagtgctctgaagactcttcaaaagtggcatcactcattgaatcttgagtaccagtaacaaaaggtggagttgagccactggcagagccaaagtcaccaaaatcaccaaaatcatcttcattgatatcattgcaagtcacaaagtcattactactatcaccattttttacacttaaagaatcatccaaatcattttcttctgtggggtcaatgtttgggctttggaaattagtaaactttctactttcttctttgggagaaccaac

SEQ ID NO: 58224 - DNA, 1697 bp, Homo sapiens
cggacgcgtgggctgagactggggcctcgctcgctcccgacccggttgcaagtgttgcggtgggagaaagtcgcgtccgcatcggaggggaagcgccgtcatgcctaagtattatgaggacaagccgcagggcggcgcgtgcgcgggcctgaaggaggacctgggcgcgtgtctgctgcagtcggactgtgtggtccaggaaggaaaatcacctcggcagtgtttgaaggaaggatactgcaactctttgaagtacgcattttttgagtgtaaaagatcagtgttggataacagggcaagattcagaggaagaaaaggatattgatgcattatgttgaagccaacatggaaaacaacaaatattttccctggtcattaacacaaagaagccaaaacaggaaacatactttttactacatctgtttggttggaccagatttcccctccgtggaacactgaagaaagtggatgagttgttttcgaatatgtataaagtaaatgattctcttgatcccaagttatttttagaagaaaaacctaattgaacaggtatgggttgggagcataataaatgtgttttgagaattgttctaaagcacagaaaatggaaagactgttatttgcaaacttgactcttcaattgaattacccaattagtacaggccactgatttggactgacacagtcgataacatgcagcctatccagaaggtgtctgttgggaaagtttaggataaaactttttctttagttcagtcttttcctgtctagttctaaaatggaattgtgtttgattccttagagaagaaatacttcatttgtgctctgattcactgaagtaataacctcagcactttaatagcgtccacaggcatagctgatgctaggccccagattgtgttgcccaggctctttaccatcatcttcggactgtttttgtttcctggttacattttcagtctggcccgctctacataatgggccagtgtcagctccaagtccacatccttattatccatgattcaaaagggagagagagaacttcctttttcagggtccacaaatcaaatctataaaaggactctggtcttcccagggatcacctgcccttgcattgggacccagtccctgtggaagaggggatgggggcctgtgatcttggccaggcctgggctatctatctgcactgtcattgctaactcctgtcagaatcacatggatgagtagtgggctgaatcccaaaaggaaaggggtttagagcaagtggaaacaacagatgttcactatagaaagcaagaatgaaaaccatgaagtggttgaagattagccttacagtaattttattctgatcacttaatacagtagagtcaaacaggaatccaagtttccaactttattatttttggcactgaagaattacaaagaactctagcgtctttatacctccgtggttcactggagttaaagcaatcggggcgttgtacagctcacttgagtttttaaaggttctactaaaaagtgagaattccacagcaatatgggtcattgttgcagaatatcacaaaggtctgttgtgtatactccttttcaccaggaaagggacaataatagtttttttcaatgtatatatatataagtgatctaactttttattaataaaagtaaacaactctaaaatgtaaaaaaaaaaaaaaaaa

SEQ ID NO: 58225 - DNA, 3554 bp, Homo sapiens
ttttttttttttttcttctcaaacagtttaatagcaaataaacaaaggaaggtaccacacttggcagatacaaaatgactttttgtccatgtgtctgtgcaattaaaacagatttaggttccccattgggacaaaaggaaaaacacacaaaaaaaggaaggagattcctttgaaacacatactcccttgctccaaacttataacaatttttttttctttttaaattcactacacaaactctgtgattaggtaagaaaagcgacaagggctctccttgcctttttttaaaccattaaagtaaaatccataattttctacagagtacaacacaagttcacacaaaaaagacattttcttttgcaaatcaaaacaggaaagaaaggaaaagctcaaacaagataaaggaaaagcatttctacggctgaatcacgactgagttgattgaatcccgttgttgctgcagaacagactgtgcgtttggtcatagtggcaatttttttttctcttcacattgtgaaatcactttacattgttttctagtagaaaaggcaaaaaactgtacaaaacccctagtgttaaatacaacgtttgtaccaataaaaaactcacacaggtttgtctccaaaatgtaaagtttctttttttttttctttttaaattattcacaaaaagcagctggaaatcagaaaggcagctgccgctccagggtctcaaatccattaaaaccaccacagaacaattaaaacaatcagagagagaaaaggaaaaggaaacaacgtccaacatttggcatttggttttatccacaggttttcccagagctcctcttggaattgaaagcaaaatatattggcaaacactgcttctcaatacacaggaaggggagcctcagtgcctcctgccaacagaggcggctctgtgcagtcagactgtggggtgcacagcagtctctcaggctggggtttctggcctctttccatccaatcaccccttccaggaaattcagcagcctaccagacactgggcctctgcctggctgccctttcccccaggcagagcggccttgggcataataccaggcaacctgccagccccagagcagaaaccctgctgggatcccttccttcatcaaccttggtgtggaggatgctcaatagcgcttccacctccccctccccagcccctagctacatctctccacccttccctggacagtcctacttcccagctcacccacccaccagcagcttaagtctgggtgggatctatcatcagctcctccccctgtaacctcttccctccacagatccaccctgtgctcctcttcactcgcgagcctcggacatggtggcccccggctccgtgaccagccggctgggctcggtattccccttcctgctagtcctggtggatctgcagtacgaaggtgctgaatgtggagtaaatgcagatgttgagaaacatcttgaattgggcaagaaattacttgcagctggacagctagctgatgctttatctcagtttcatgctgccgtagatggtgaccctgataactatattgcttattatcggagggctactgtctttttagctatgggcaaatcaaaagctgcacttcctgatttaactaaagtgattcaattgaagatggacttcactgcagcaagattacagagaggtcacttattactcaaacaaggaaaacttgatgaagcagaagatgattttaaaaaagtgctcaaatctaatccaagtgaaaatgaagaaaaggaagcacagtctcaacttataaaatctgatgaaatgcagcgtttgcgttcacaagcacttaacgcttttggaagtggagattatactgctgctatagccttccttgataagattttagaggtttgtgtttgggatgcagaactacgggaacttcgagctgaatgttttataaaagaaggagaacctaggaaagctataagtgacttaaaagctgcgtcaaagttgaagaatgataatactgaagcgttttataaaataagcacactgtactaccaactaggagaccacgaactgtccctcagtgaagttcgggaatgtcttaaacttgaccagtatcataaaaggttgtttgccacactataaacaagtaaagaaacttaataggctgattgagtcagctgaagagctcatcagagatggcagatacacagatgctaccagcaaatatgaatctgtcatgaaaacagagccaagcattgctgaatatacagttcgttcaaaggagaggatttgccactgcttttctaaggacgagaagcctgttgaagctattagggtttgttctgaagttttacagatggaacctgacaatgtgaatgccctgaaagatcgagcagaggcctatttgatagaggaaatgtatgatgaagctattcaggattatgaaactgctcaggaacacaatgaaaatgatcagcagattcgagaaggtctagagaaagcacaaagattattgaaacagtcgcagaaacgagattattataaaatcttgggagtaaaaagaaatgccaaaaagcaagaaattattaaagcataccgaaaattagcactgcagtggcacccagataacttccagaatgaagaagaaaagaaaaaagctgagaaaaagttcattgatatagcagctgctaaagaagtcctctctgatccagaaatgagaaagaagtttgacgacggagaagatcctttggatgcagagagccagcaaggaggcggcggcaaccctttccacagaagctggaactcatggcaagggttcaatcccttcagctcaggcggaccatttagatttaaattccacttcaattaaaccaactgtttttctgctcttcttaatttttttaaagattaaaaacaaagaaatcttgttccgggaccctaatgaaaaaaaatttcaaatcttttcagtttgtccatgaccaaagagttgctttaataggaaaaaatctgttcttatccctgtcagatttatggttaatgggtttgcaacggcaaggaggcaaggaatggttctatttctgacagagcagcctgcatctgctttatgctgtctggagggaagtggtctgaggcaggctcacccgtggaagtgctcacgtattctgtattatttttctacactggagctggagattcttctcttcacagccttgcagagtaagtccagtgcctacaagtgtaagaaggagctgtaatcttcatgaggatggttatacttcagtattcttaaagagaacatgaacatttttgagctgtatgttcttagggacaactgtgcttcgatgtggtcagtctcgtcacttgtgagtagctgtgaaatctttagtgtgcatgtgtttgcacctctgtggtctgtcaacgtggctgtcactgaaggagcaagagaccatcttttaggaaccctgccaccaaataataatatatccaggcttagactttggattaatgttaaatgtacatttttttggttcagtacctgaagaagaatactgaaacttgaatct

SEQ ID NO: 58226 - DNA, 425 bp, Homo sapiens
gcccacgtctgctggccccacagccccacagagcccagcttgggttcaggcagctgtccaggcctccccttcctccaacattagccagggctgtggctttcccttcgggaagggagacagcgttgagggaaagtggcttactgcagacttcagggccttactcacaggaccatcaccttccactgcgcctttggaaagtcagggtggggaagaagcaggcacccctcagggtggccccgcagcagccacagcaggccttgtaggaagtgatatggggaaaagcaagaggctgtacaatgccaaaagcaagtccagggcatttactgtgaggaagcaacgcaggtggagggcagggaggcttgcagggccttacctgtgatagtgaaagtgtcggcacctggacatcctggaccagacgcaggcct

SEQ ID NO: 58227 - DNA, 448 bp, Homo sapiens
  misc_feature (1)...(448): n = a,t,c or g
nttganncaaagctatgacatgattacgaatttaatacgactcactatagggaatttggccctcgaggccaagaattcggcacgagcagctgaaggagcatgctgtcgaaggagactgtgatttccagctgttgaaactagatggcaagttttccgtggtatacgcaaaatgtgattccagtccagactcagccgaggacgtgcgcaaggtgtgccaagactgccccctgctggccccgctgaacgacaccagggtggtgcacgccgcgaaagctgccctggccgccttcaacgctcagaacaacggctccaattttcagctggaggaaatttcccgggctcagcttgtgcccctcccaccttctacctatgtggagtttacagtgtctggcactgactgtgttgctaaagaggccacagaggcagccaagtgtaacctgctggcaga

SEQ ID NO: 58228 - DNA, 3942 bp, Homo sapiens
gtgggacacgcagcctagccactgtcctgcctgggatccggtctcccccgccccccggctgcagggtggataaagaggaagatgtgaagaggaggcagacaaaagcaaaaggacatcctgtcagtaggaaacggccgaattacaattcagatgtgcaatgtttgcataagtaaactgacacgggactattatatgcagaaatccacgtgcaaaattttcagacacacctttgtacctcttcctaatcctgccctggtaaaatggcggttatcagtgcaagtttgaggatacatacagctggaaaatggacatcaccaaactggactccagaaagttctgtctaggattttattagactgcttttttttctcaatatacctgtattggaagattgagacaaaaaggcacaaactcacattaaataaacaaggtaatctaatcaattctacaaagtgtagtttgtaaaacaagtagcactaggaaccaaccaaagtaagtcagggagtcccagcagggactgtaaaagaacttgggaagctatacacatgcccacgatactgaccctgtcccggacctctctgcatgagaaggccagagcccagcacccctcctacagaggcactgctgcttctgttggggctgtgaccctggaattctgatggaagcagctggtctgaaggggcatggcacacactcaggtactacccctggagctgaacctttatcataagtccctctgagtgctagtcagtttggaggtgggtgaggaggaaagggggtacttaaaagaagccaacactgttgcccagcagcaacaccatccgtggggatggaacagaccagggacatcctcctttatgtttatgtgggctgcaattccagatccaggctgacctcagctcataatggatgcttttcaactggggcaacaggtggaggtgggaggagcccttgttagggctaaagtgatatgtgtgggtctcaagagccaaaggaaggagactaacagctgctgaccctcagaccacatagacaactgtctgcctagaatgtcagtttgtttctttcaagataacccgcatctggacttccccctagttgatgaatgaaggaacatctttaagcacaaatataatgaatagctaacacagagcttataggaaaacactgacatttttctccagtaggaatgcctcttctccaactttccaagtcagataaatgctaccagcagttgagatgctacccagatgcattactaaagaccccctcaaggtgaggagacttacacagaggaaggtgtctgtaacaagacatctggttccaaagggacctcaatgaaggtcagcgctaaccatgctgggggtctgagtctgttccacccttgccccaggagggccaccagggaagcatcccatcaggatgtcacaggtgcaatcctgtgagacactcccttattgcacttagaaatgagtaaggcaaacaaactgacaaaaacaggatacattctcccacccacttcttgcttcccggacaaagatttggtctcccattagcagatgcacccaggctagtgtgggctgggatcacggcacacttaggccaacgtgcttcacaaggtttggggaatgtcaggtgacactacagctctctctcattctcccactaagaggcaaactcaggctctgtcaagttgcaggaagctatgaacactgggcagcgtctgttcccctggagcctggacttcctcaccagcctactttggtcgggttctgtactatgatcactacttgctttgggttttccagggcagaactcaacatgggggtaggacgagctaagttcttgatccccaaattcctttccggcaactggagacgagggaacatgttctgctggaaaaagctttttgcatgctcatattgtgcagcatgaaagatcaggactcttgcttcctaaccagcctcaaagacagaggacagggacctaagaaagcacagagaaaagaggattattgctgagtggcagcaccagccccaaagggaagaggaggagcagggacttacagagctcctcggggtcagacagttggtatctagggggtgactcaattctaggggccacactggacaattcccctccaagtggagagttgactggggcgattttgtagactgcagagagattcagagcgggcaacaggagggccaagaagccacaggtgtttctaagagtagtaactagagattcagtgattgggacagggttactcgtatttgttaaattttcttaaatagagactggctgagccttgggtacctccatagtgctagagtgccctaacgatgggttactgggagcagaagtcagagctgcaaaaccacattgctattttgtggaagcggtgcggggcagggaaacattgtatctttagctcatccccgctccccacaggagcactcaaaattgcgaagatcttcccaggaagcaaaatacctcagtttaccccaaggttgagaacaaatgaacttaaatcatttaaatcaccacatcacaaaaggcagctatttgaaagactgaaaatgtcacttggaaataaaggttgggggaacacacagaaatggatcggaacacaatggagagagacggaggcgctgtaactacagcaacctacacgccacgtatctcggaggagcaggctcctgcacacgcgggctctgtgacaccagacggtctatttgttcacaatactgaagggcatctagaattagctacagtaaggaatcgaaagttgcctgaagaatgggcacagaacggctgcgtccgaaaatggcctgtcacttgggagggtggagctgctgggtcttcctgttgaccactgtcttgcaaaaagtgcagaggggaaaggcggctttagtcatctgctgtcattcctttcactgggtccttttgtctcatttcatccagctgtctcttcgtctcttcttccatccttcgaatgtcgtccatggtcaggtcaacccacttatcgagccaacagaacagctgcctgtggaagtttgtaaacagacgcctctcttgcttatggatgaagttctccactttgttctgcaggccccaccacttgaacttgacggtcaccagtttgtatgcacacatatatgggcagtccttctggtttacaagctcttgcttccaattggggcccaagggtcctcggcctgttttgatagatttaaattttgctgggtcttcctctgccttgtaatccttgctgagcacttggcttcgatctgcaatgtctatatatacggcttccacgtgtttccacgcctcaggctccagcttatgcacattctcctgcgtgccaagatctggtttgtgccaggtttcaattttaatcagaaagtcttctttcatgtactcatttgtaataacggttctgcagtaggggtaagcattccaggctttctcgtgtatattcagggctccctctggggccagcattcgaacaaacgtgggtactttgctctgcaggtggtagatcttgtgtgtgtactggcctttctcaccgtccttctcgtagggctcattcaccaggacctccacgccttcgccaccacccgtttcatttttactggcctcagccacagaatacagctgccccacttgatactcatctacagacacaggcaggattactcgatactccttgagcagcaccatgtcgcttcgcggctcggtggctgcccgcggcccgcccggcctcccgcccgctgcccgccggccgctctccccgtggcccggcccggcccggctgcctgtgcgtcttcgtcgtgctctgctccgtccccgccgccctcgccgcggtcgccgcgccggctcctgccgcccgggcctcgtcgcctctcgcgccgctgccgacgccgcccggagctgcgg

SEQ ID NO: 58229 - DNA, 445 bp, Homo sapiens
  misc_feature (1)...(445): n = a,t,c or g
gccgagaggtgaccgccatcttgcgtacggagaattctgcttggtcagaatcgtgatggcattgtgttcagcactgatgactattttcaccatcaagatgggtacagcaaaacaagctatcgatcagggaagatctccagttataatagataacactaatatacaagcttgggaaatgaagccatatgtggaagtggccataggaaaaggatacagagtagagtttcatgaacctgaaacttggtggaaatttgatcctgaagaattagaaaagaggaataaacatggtgtgtctcgaaagaagattgctcagatgttggatcgttatgaatatcaaatgtccatttctattgtaatgaattcagtggaaccatcacacaaaagcacacaaagactcctcctccaaaaggggaaacaaaggggggggnggnccctgggcaaaaaa

SEQ ID NO: 58230 - DNA, 814 bp, Homo sapiens
acatgcttaccagctctaggccagggcagatgggatatgacgaatggactgccagctggatacaaggatgctcaccaagcaccaagttctcacaagttattttatgtgactttgcaggaactgaggcattatatctgaggacaccaggggaaaagtgtggcatctcagggaaatacagccctgggctgtgtctacacacaccatgagagtgctgatgggggcgcaatagtcttgaaaatgtataaagtgtccaggaatggaagtgctctttgattcattattattttcttccttcatattcccctcccagagtctcctatctaggacatcagcattctcacacaagcctaatggcttatctgagtaaggcagggcttagaaattcactttcttgatactcagtcttgccttcttaaacactccttgatcttggccttacctctcccccttttccacatgtccttttcccggtaggaacactttctccatttattcctgcctatccaattcttccctatatttcctggaccagctaaagtccagtgtttccagagacttttgaaagtcaacttacactttttccttcttcattcacaaagctcttcttccctgggccctggtatgtatgcctttctctcctactgtctaatagcacctcgtaaattgtcaatgaacttttctaaggggtattcttgaattcccaactagattgtgagcttctggaagacaaggctatgtctttgattgttgtctcccctaccacagcccagtactttagttacagaaaataataaatatttactgattgattgac

SEQ ID NO: 58231 - DNA, 724 bp, Homo sapiens
tttttttttttttttttgactgaatgcgaggatttaataccaatgcgggcacaagaattttcttagaaaaggtcagtggggagggatcatggacaccttggtttcaacaactccaactccttcatacatcatcttcagttaggctggctgatcagtgtgctgatactttcttctacctctgacagcgtcttcagaatttggttgactttgacctcatcaaattccaaacacagaaattcagattcctgtccatatttgcctaattccagctctataatggcaacaggtgtgtgtatttgagctgagtgccttgactgagacttgccatcaactctccagctcaggccccgaagcccgctattccagcggctctggttcatgaggctctcacggatttttgtcttgtggctcttccagaatttggaaatgacagcagcttggtcagatgtgatcccaccttgctttttggtttgagcagtcaagaatgcctccagctggttgaaatccatgtctgcagacgcaatagacttaagaatccccctcatctttgccagaaaggggcggaactcctcgggtggcacctctggatatagctggctccgtagcagctcctctgtgatgccggggtacccgtggaaagtgtcctgggccagcgcattcatcagcccgctcaggggtttgccaccctcaagctcgtccgcctccatgctctgggaaggctccg

SEQ ID NO: 58232 - DNA, 438 bp, Homo sapiens
gctatgacatgattacgaatttaatacgactcactatagggaatttggccctcgaggccaagaattcggcacgagcatggaggccactggcttgcccttctcccagcccaaggtcacggagctgtgcctgctggctgtccacagatgtgccctggagagcccccccacctctcaggggccacctcccacagttcctccaccaccgcgtgtggtagacaagctctccctgtgtgtggctccggggaaggcctgcagccctgcagccagcgagatcacaggtctgagcacagctgtgctggcagcgcatgggcgtcaatgttttgatgacaacctggccaacctgctcctagccttcctgcggcgccagccacagccctggtgcctggtggcacacaatggtgaccgctacgacttccccctgctccaagcagagctggt

SEQ ID NO: 58233 - DNA, 2108 bp, Homo sapiens
gtcgccaccgggctgctctggtctcgtcggtcccctcctccgccccgtcgtcctgactctctctccctcctttcctcagaggatgtccggcttccagatcaacctcaacccgctcaaggagccactcggcttcatcaaggtcctcgagtggattgcttctatctttgcttttgccacctgtggaggttttaagggccaaacagaaattcaagtgaattgtcctcctgcagttactgagaataaaactgttacagctacttttggttatccattcaggttgaatgaggcatcatttcagccacctccaggtgtaaacatatgtgatgtaaattggaaagattacgtcctcataggcgattactcttcttctgcacaattctatgttacctttgcagtctttgtgttcctgtactgcattggctgcccttctgctttatgttggctacacgagtctgtatctggatagtcgtaaacttcctatgatagactttgttgttacacttgttgccacttttttgtggttggtgagcacttcagcctgggctaaagctctgacagatattaaaatagctactggtcacaatattattgatgaacttccgccttgtaagaagaaagcagtactgtgttactttggctctgtgaccagtatgggatccctaaatgtatctgtgatatttggctttctaaatatgatactctggggaggaaatgcttggtttgtgtacaaggagaccagcctacacagtccatcaaatacatctgcccctcatagccaaggaggtattccacctcctaccggaatataattaaagggagaaatacactgtatgaagtatatgttgatactatgacatgttgccaacaccttgagaagcattatttgtttctaataaaagtaatggctttgtcaatatattggtgggtttaaaactttgctgcttttttacataaagcctgtgcctttcctagaaagttaagatgtaaatgtattctcacatgtaaatttgaaagttcaggggtctattatgaaatgatacacatttttaaatgaaccataatttttttcactaagctgtttgccttccaaagtgtttacaccttaagccttaacatgtatcttcattcagaaaacagttatattgtcataccatagtaggaagaaaaacctttatttggaatatacactactgtaagtttgtacagatcatatacctaccacctgtctttgcttaaagagccttgattacataaatatgtaggaaaaaacatattgagttcaaaatttatatctaacattgtttatgttatgatttttttttaattgcaaagactaggtgtatatttttttctgtttttctaaatgacccgtggtacttaataggtgtactaaaattgtgttgggagcagggatttggaaatttctgagagatgtgtagttaatttaggtaattctgtttcatgagatatgatctgttatgctagtggtttaataggcttgctatgtaagtagaacgtggctcaactagatatctttatatgtatgggcattactcttagtgatatttgtttcctgtcctttgttgctcatgctgtttaagtgcaggctgagacccagcctctttgtaagtacagtaaaataatccaccgttttttacagaccctagtcaaagggttaaaaaaattaagattgctttccatgtttgaaatttaccattgagagtcaatgaagttgctattttgagtttagcattgatattgtgaaaataagtgcaatttggatttcatgtttcttaatattcattcttgtttcacaaatgaatgattaaggaattatgcatcataaaggaacctaagtgaggtatatgatgagtgtattgtctttgcacacacatataggtatattctgaatacaagcttattcacattttgcttcctaatctttttgttgtacagggattcaggtttcttattcttacaacatgattgtttatatgtgaagcacatcttgctgttgccttatttttgatgcttttattcatgacaagaattgtcaatataagaatgtatatcttttttgcaaccaatttaataaaggagttgaaaga

SEQ ID NO: 58234 - DNA, 932 bp, Homo sapiens
agcatcttgaatccacttagataaagagagactgtgtgtgtaggtggatttttcccaaaggatttgggaattgtaatgttacaatgaactgtatggatatgtttgtcatgtacattttcaaacaaaaaggaaaactgaaagtagtgatctttgtatacccatctcttagattcagtgattttgctatataggttgtgtatcccttatctgaaatacttgggactagtagaagcatcttggatttgggatgtttttccaaattttggaatacctgcatacacacaataagatatcttggagatgggacccaagtttaaacacaaattcacttgtttcatatataccttatgcacatagcttgaaggtaactttatataacattatttttaataattttgtgcattgagaccaagtttgcataccttgaaccatcagaaagcaaaggtgtcattatctcagccactcatgtgggtaatttgtggttggttgatgtcaccatcattcctgactgaatgtatatgctaccaataagcagttattttcttatacttattcatgcataagtacttaacagtaaaaaatatgacataactcgcataggaacaaggatggcaaaaaaaaaaatatgacacaccactgatacagtgaaaaaataatgtggtcagggtagctaggcaacagtagcatcaccagaaacctgtatcagctgttaaacggcaacaacaatggcaggctttcagtttcccacttaatgatgctgtattttaaaaggttattgtatactgtaattttatttttgtaggtgaagagaaacagaagcagctgaagggccaggaagtgggtctttctagggatgtggcattctgctggatggctttttaaaatgggttttttcctttagggagaccgaataaactgtgttgtgcacgtgc

SEQ ID NO: 58235 - DNA, 668 bp, Homo sapiens
cagcctcggagccgctgaccctggagcaggagtatgccatgcagtgcagctggcaggaagatgcagacaagtgtaccttcattgtgctggatgccgagaagtggcaggcccagccaggcgccaccgaagagagctgcatggtgggagatgtgaacctcttcctcacagatctagaagacctcaccttgggggagatcgaggtcatgattgcagagcccagctgcaggggtaagggccttggcactgaggccgttctcgcgatgctgtcttacggagtgaccacgctaggtctgaccaagtttgaggctaaaattgggcaaggaaatgaaccaagcatccggatgttccagaaacttcactttgagcaggtggctacgagcagtgtttttcaggaggtgaccctcagactgacagtgagtgagtccgagcatcagtggcttctggagcagaccagccacgtggaagagaagccttacagagatgggtcggcagagccctgctgatggctgggccttgtgggcagccactctgtgtgagcagggtgttgggcccatacactttaaagaccagagccctgcactgggagagtgctcctggcccaggctgggaatcacctttcgaggcccttcagactctggcggggcttgctgtggcctcctccactatgg

SEQ ID NO: 58236 - DNA, 3338 bp, Homo sapiens
  misc_feature (1)...(3338): n = a,t,c or g
ggcaaaaccaatctcagctgacaaggctgggcaaactaagttttcctgagcccattttcctttgagccctgacctagcctggccttacctcattaaggtttggttaaagcagtggaaaggaggaggaggcaggggtggatgggggtgtggggaggggatgagcactctgcagccgattaatctgttggtaggggcccagcttcttgggagtgcttattcagcccaagagtggaggctgtttacagcgagccctggagatggcagcttgtctccagctggggaggggtcaggcccctaaattgaagaccactttggtagcagaactgtagggactggtgagtcaactcacagattctgcagcagctgctccacccacaataaagcaaacgccgacaggctagaccccagattgcaggggctgccacctacaaggtgggaccacaggctgcctcaccgggattgtctgccactaaatagctggagtcacagattgagataaatgccaccttcaaggttgcagtgaaaagcataatcctatgtgatgaatttatatgtgttattttttaaaaagctattttattactgcatgttcccgtcccgtcttgtgaatgtgagtccccgccaccacgtgaggtgcagtcgttgcagcggctggtgcaggagtgcagctggcgcgtgtgtgatagcatctcgtaggtgttgctgcacaagagttaaccagagtcaatgccaaacacatagtatgagaagtgtactttttaagaaattaatttatttgagttcaaatatttttgaaatataaaaattggttgtattttttaaagctataattcttgtagacattctgtggttaaaaatttgattgtgcttattaaaaatggtcatctatgttttgcacttcagctacgtgaaaataaaatttctttggggaaggtgacatttggcttcctgattacgggagggagttggttatctcaggtggagcaggaaagcctggttgattctcacaccaggatgggactgggacttcccaggatggagggaggaggccatttctacaccatactttgagctactggacagcaaaaccctcccaccatactgggtgcatcttgtttactcttgactaacatacacttctgatttacagcagaagcctcagaagctaattcagttctcctttggcatgccactggataacaagatagtgagggggcagtgtgtacaagctgtggacatgggcatttcctctctgttggcagcaaggcggaggaaagcccagggagagtaaaacgctacaatctttctaacagctttgccctacaccaccatctaaatgattatgaccaagtggcgacatagtattttattttcctagaattatgtccagctgtgagaaagccaggttcaaatttaaatcctttaataacctgtcccagaattactaacaatgagacttaaacaaattttgatttgtgaagaaaacatgaaaaaagtccaaaagaaaccccctcaaagggcccgagtgtcaacagttcccctttggagcagctcatccatctctcaggtgggggtcctccggcaggcagcttcctctgtggcgccaggtgggtccagagtgggcccgctcctttagaagtcaggcaggccaggcagagggaagagagaggcgaagctctcaacctcctcccggagagcctgcacggccgcctggtacttatcccctgccagtctctccttgaactctttcagggtggctctgacaccagtgtcgctctggatctgcagggtcagctctatccctctgtgaataaagtgggctactttttggaagtctttttccaaaagtccacgggacgtcagtgctggggtccccagccgcagtccactgggccgcagagcgcttctgtcacctggacaggtgttcttgttgcaggcaatagaacaggcttctagcaccttctcagcccttccaccatctgtgcctttggaacggagatccacaaggatcaaatggttgtcagaaccacctgtgactattttgtagcccagctccgtcagggcctcagacagagccctgcagttggccaccacctggtgttgataaactttaaattccagagtcatagcttgcttcagtgccacagcaaccccagcaatggcgtggttgtggggacctccctgcaggccagggaacacagcagaattgataagagactccaggttgtacagaatctctttgccagtcttgggatccacacttttcactcctttcctgtagaagatcatgccagctcggcagcctcgcagggtcttgtgagtggtggtggtcaccacatggcagtgttcaaatggggagggcaccacgccagccgccaccagcccgctgatgtgagccatgtccgccatgagatacgccccgttctcatctgcaatcttccgtagccgggcatattccaggtttcgggagtagcagctggttcctgcgatgatcagcttcgggtggaagaggcgtgcgttctcctccagctggtcatagttgatgtagccagtatctgggttcaccttgtagggcatagattcaaagaagatggacgtggcagagattttcttcttgtctgtcatgaacccatgggtcaggtggcccccatccggaaggtccaggcccatgatgcgcccatggnnnnnnnnnnnnnnnnnnnnnnnnnnnnnnnnnnnnnnnnnnnnnnnnnnnnnnnnnnnnnngaccccccagcactgtgggtccagcttataggcctgcagggctcgcttctgacagagggtctccagttcatcaataaactcagtcccgccatagtatctctggcccgggtacccctcagagtatttgttatttaagcaagagcctagggcctccaaaactgctcggctggcgaaattctccgaggcaatcagctccaatccaaccctctgccggttactctccttcttaatgatgttgtaaacctcaacatcactgtctttgaggggttgtgccagcatcttgtcatgtgaggaccacaggtcagcatccttgtgggccccgttgactggcatcgtcattgcactggttcgaagctgcccgagcctggtggcgcacgcctgtattctcagctactctgggtggctgaggcaggatgatcacttgagtcccggaggttgaggctgcagtgagcccagattttcccacagcactccagcctggccaagagaacaagaccctagcgacgcctcgtgccgaattcttggcctcgagggccaaattccctatagtgagtcgtattaaattcgtaatcatgtcatagctgttatccaaa

SEQ ID NO: 58237 - DNA, 1071 bp, Homo sapiens
ttttttttctccagggtttgcacctgtttccccatgtagtttttaatagcatcccgcttcatactcagaagtgtcccagggtggacaagacattgtgtggcacccttgcaatggcccgcgctgagcagtgggagtaggggatggggagggcggggggcaggtgcccctctccactcaccttcccagaaggccccacccacctccctcagcaccatctccagtgggtggggcaacatctgtcctggcctcagattgcccaagacaccatttgctcacggaggccaccatgccccaatatgtacttcccgtttcgggaccaccaagctctggggactggaatgcaggcagtggaagccccagattgacttaacctgttgacagatcttcagagaaactgctggtaggaggcagctggggaaggtggcgatggccagtgggcaggcaggcctggccccagagccactgtggtacaaagaggaagtctgacagaagagcagcctcgggcaaaacgggggagccaaggcggccacgggggagaagtctctccaccgtgccctgtgtctggtgccctgggagggtggcccagtgtccatcttgtcccactgatgctgccacatcccaaggctcatgtctcagaacgagagctgctgaagggctggacgttctgagacttcttaagatgtaagtcatttggcatctgtagctggtgaatttcaggtctctaggggagaatctcagcaccccaaaatccttggaacaggggctgagccgtccagcatccccatgtagcatccagaggggttgaggggctgggcttctgggatgtcacagtatctgagcccagagcaggagggagggaaccagggccgaggccaaggaggccactcacagagccagccctggctcaaatgcacctgccccagacccagccacaacagcccactgtcccccagctgggctagatgacctcaaagtttggagagtcagggacagggtcccagggatgggaagaagacgtctccggggcctggaggagacaggggggtgctgggctccgaaagcagatgccgc

SEQ ID NO: 58238 - DNA, 1905 bp, Homo sapiens
gtcgacaatagatgacggggctcacgttgtacgttcacatcaggtcccggcccgccggaacctgggcgatccacgatgccgagtttgccacgctgcgacagcccataggcttgcccccccgggcattcgggtggactacgaacacaaactgaagccctaggacttgtcgcccgtttgcgctctcgccgaggcacaggctgctcgcggaccaccctgctccgaaaactaagaggtaggtggtagcccattcatctggttactgatactggccggcatcagtggactgtcggcaggtccttgagcaactggtgtgtgaaatggggacggacgtcaaaggacaagcgggatgtctacttaccggcctgggccaaggagaatggctggcgtgcttcgcagcgcctttcaaactgcttacaattggataaggaatttccaactgtttccaaggccttgacacggggcagtttgacctgtgtgcagccccagggagtttggaagccaggttgttgagccagaagattcggggggccaagggtccggccacgtggtggctgtggacctgcaggctatggctccactaccaggtgtggtacagatccagggggacatcacccagctgtccactgccaaggagatcatccagcactttaagggctgccctgcggacctagtggtgtgtgacggggctcctgatgtaaccggtctccatgatgttgatgagtatatgcaggcccagctcctcctagctgctctgaacattgctacacatgtcctgaagccagggggctgctttgtggccaagatattccgaggccgggatgtgacgctcctctacagccagctgcaggtcttcttctccagcgtgctgtgtgccaagcccaggagcagccggaactctagcatcgaggccttcgctgtctgtcagggctatgaccctcccgagggcttcatcccggacctgagcaaacccctgctggaccattcttacgatttcaaccagctggatggtcccacccgcatcattgtgccttttgtgacctgtggggacctgagctcctatgattcggaccgcagttacccactggacctagagggcggctcagagtacaagtacactccacccacacagccccccatctcgccaccataccaggaggcctgcacgttgaagaggaaggggcagctggccaaggagatccgcccccaggactgccccatcagcagagtggacacgtttccccagcccctggccgcccctcagtgccacaccctgctggcccctgagatggaagacaatgaaatgagttgttcaccttaacccattacgctggcaaactgatacaactcagaaactgctcaatgtcaggaaaaccggaacttggtgatgaccttggtttcaaaatatcatctcatcaacgagccctggacaaacaagccctgaggagggatctgcaacaaccctgaagacaacaaggaaagaaaccatgaaagtctgtctgtactgcagtgggaattcttgagtgaggtcttacctcttctttaaacctcttcaggagtgtcctgattatgtccagaattttccctaaaggcagggattcttaacctggatagaagcccaggggtaaccatgaacttgatggaagaaaatgttacatctttattttcagcaatgaaactgaaatttagccttactcccaagttataaatgctggcaacaaatcacagtagtaaaagcagtacctgggattttcccaccaatacaaaccagttacagcaactgtaatgtaacataaaaagggcatcttgaagtattgttcatatttgtcacctcttggaatgatagcagatcctgtaagttgcatgtattaattaaaaagcccatatattactgcaaaaaaaaaaaaa

SEQ ID NO: 58239 - DNA, 2561 bp, Homo sapiens
ttttttcacttaaaagaaagtttttattaacaaaagttttccttaattcacatttcaactttattaaatagtccaagggtttcatttatgaacacttattccagtttagttctcttaaattcatttgcttgttgtgcatttatgtttaaaaaggtaactaactgcactggaaaatgaaaatttatagttttatcaataggtcagtttttaaaaaatcaaaggataagggatttaaaaatattaggggcattacacctttttcagaacaaggataatttacagaaattatacaaagcagattttcatcaaatatcaattatttagcgatgttttatttagctgaaatgttatttcacttgtaaaaactatctccggttacaaaaaaaaatcagaaaccttattaaatttaacctgcttttacaaatgtcctaagaagtcttaagctaaacaaaatttaagtaggaaaacgataatttaaaaatagtgtgttatactatttctgtggtttatgtacatatattaactggtctcttggataggaaacatgactagaagtttatcacactaagcactgtaaaataaaggcaagagctaatcatcttctagcaaaaatagtctctatgcaacaattgcaaatgtcaaagctattatttagtagttaattgcccgcctacaatacataaaacaaagtacatttactggattgtttttcagtttgcagctgccctcttgacatcccaaataaggaattcccgttaagtaaaacctgcagtgcaattcactcagtggttagtttcaggccaagcctccccctaccattatgcttgttcttccccaccgcccccaaatcctgcagtggcaccatattattaaaaacactaagtacctgggatttatgcctcagagcaagacatcatttgagtaatttcaaatgatacacagctccttcatgtaaaaaagatgttttgtggtcacaattacttcaaaaagtaattatattcaaataacctgacatatcatgccttagcaattacaaaaccatgattttgacacatggcaatttttaagttaggcaaatgtaaaatgctaaaagatgtgaacagctgttcttctgtttaagttagagcactgcaaaactcaggtaatgactttatttttttcagttaacataaccagcccacgatacagcatactaaatcacaaagtacaaatccaaggaagttaatacctttactaagttacaaaacttgggcaaatcaatacagtactcttttataatgaaaccatacttttgttggagtcatgttactttagtgataattttcactccaaaaatatttaagtaccaaatcaaaacactggtttttaatggtggtttatagcatagtaaggtattttgcacaaaatatattttaaaactacacaatttctccttttaagtgagctcccttgtgcaagctgctgaagtgtacagcagcagggcaatgggcgtctataggaggtggctctgctctgttctggggttggtccaaagtcaggtggagttccaatgtatgaaaagcttgaaaaatctaccttaaggagactgaatatcaataccagtttccaaggagttcttgttgaattttcacagaaatactggaaccctcaaaatcagatagtaatttcaaacaacattaatttcagatgatcccttttatttagaggccctgcatctgttttgatcaagtcacatagccttacaccaacttatcaaaaaaaaaaaaaaaaaaaaactacccaaaatatagttgtatttttaaaataacaaataaatatatagtcagtttggagagacctggagtacccgatgttgtctaccaactgtcacgatcacttctctgcaaacgctgctgctgccattggagtccttatggttcctcttgctgaggctgtcagttcttcaatctcagcatttaatttatgtattacccattccattgcttctcggcctttactagcatttgaggatatcgtacttgccatcagtccttcaaggtaactgctgaggctaactcctttcacggtaattatggcttcttgagtcaaaatagttttttggggggtcccgatgatgtggtttgtgtataaatctctcatctactgaaatcatatttgtaagtgaaatattagtagatttaagttccattgttttctctacaggattaactacagaatattctagtatatatgttttgcgttttgctgcaccaataagctaagtaaaacattcagaaagacttcacaatggaaggcagtccccactctgtgctgagaagtctgtggctgtgcaactttccagagggatctatatgtctgtccaacacatcaactccaaccacacttgggttcatagggtttgggtatttctgcattgcagctgttgtaacagtttcccacgggtggtcaaagacgtgctccgaagtccagatcttcatggtgccggcaccctgagagatgtccgggtagcgccaggggacaacgaggcacagaggctacacctgcccctgccccgcccccag

SEQ ID NO: 58240 - DNA, 822 bp, Homo sapiens
  misc_feature (1)...(822): n = a,t,c or g
agagctctggaaagatgatcatgtacccatagagaaggggtatatagacaggacccatgctcctacaggatgggaagggacaatattacccacacaaacccacattgagttagaaagtattgtaattgtttttgtgcttgagatagaacagtgttttgtctagtgcttagcaaaaggggtgaagttcagaattctggcatgtgtttgaaatcactgctgctccttgcaaggtagcaatgggcatgacattttccttagcagtaaaaattggggaaatacaggaaatgttcctctctgcagggcaaattgtgatgatgcaatgatttcaggtcaagactgcagcccacagggtgggttgcccattggcaggagaagtgtgaaagttgtatcatcacacttacctccccccaaccccaactcagccaagatggggaacactgaatatcccgcagggtcaagtatagaaatagccatgttctggcgggaggtgagagttcattacaatgagcaacactgttaaaaaaacaaacaaaaatctcccctgccatttataccaagtgctcttctcggagtccctcttcttgggtttttggtcttggattctcggttgactccatgattccctacattagggcctactgtggcctcccttttggaagggggcccaggggcaggaagacctgggcgggccacggcagggaggactggcagcctccaggctcacctccctttggcttcactctctttgctcctcagcttcagagcactgcatctcaaaggcaagatgaggntgctgaataagaaaaaagntgtggatccgaa

SEQ ID NO: 58241 - DNA, 1024 bp, Homo sapiens
cacagtctgcccatcccctggcactcactgttctctccccaaaaggtacttgattttcttctgccccctggacctcttctacaagtgtgtctgcttcctgcctgtgaaactcatcttcgtggccatgaaggaggtggtgcgagtccgcaagatcgcggtgggcatccatcacgcccatcaccactaccaccacgggtggttcgtcatgattgcaactgggtgggtcaaaggttctggtgtcgccctcatgtccaactttgagcagctgctccgaggggtctggaagccagagaccaacgagatcctgcacatgtctttccccaccaaggccagcctgtatggagccatcctcttcaccctccagcagacccgctggctcccagtgtccaaagccagcctcatcttcatcttcaccttgttcatggtgtcctgtaaggtgtttctgacagccacccactcacacagctccccctttgatgccctggagggctacatctgccccgtgctgtttggttcggcctgcgggggtgaccatcaccacgacaaccatggtgggtcccacagcggtggtgggccaggagctcagcattcggccatgcccgccaagtccaaggaggagttgagcgagggctccaggaagaagaaggccaagaaggcggattagggggtggcccaaggggcaccggggagaggacccggacccaggaccctctgagctgggaggcttcctgcgctcagatctatcctttcctggccttgacttccccatctgcaaatcagggtcattggctcaccctccagggctgacgtgggggttgagatatggggatgaggatgaagaacttttgtagaaatcggggttccctctttctctctgccaggaccccatagagtcacagcttttggaggggttcacagaatcctggcagcagctccagtcaaggatgtcactggttggcatgatattcttagttctatttttccttctttaaaattgcatcttgaccaggcacagtggctcatg

SEQ ID NO: 58242 - DNA, 4909 bp, Homo sapiens
  misc_feature (1)...(4909): n = a,t,c or g
cctgggtctgacgcggccctgttcgagggggcctctcttgtttatttatttattttccgtgggtgcctccgagtgtgcgcgcgctctcgctacccggcgggaagggggtggggggagggcccgggaaaagggggagttggagccggggtcgaaacgccgcgtgacttgtaggtgagagaacgccgagccgtcgccgcagcctccgccgccgagaagcccttgttcccgctgctgggaaggagagtctgtgccgacaagatggcggacggggagctgaacgtggacagcctcatcacccggctgctggaggtacgaggatgtcgtccaggaaagattgtgcagatgactgaagcagaagttcgaggcttatgtatcaagtctcgggagatctttctcagccagcctattcttttggaattggaagcaccgctgaaaatttgtggagatattcatggacaatatacagatttactgagattatttgaatatggaggtttcccaccagaagccaactatcttttcttaggagattatgtggacagaggaaagcagtctttggaaaccatttgtttgctattggcttataaaatcaaatatccagagaacttctttctcttaagaggaaaccatgagtgtgctagcatcaatcgcatttatggattctatgatgaatgcaaacgaagatttaatattaaattgtggaagaccttcactgattgttttaactgtctgcctatagcagccattgtggatgagaagatcttctgttgtcatggaggattgtcaccagacctgcaatctatggagcagattcggagaattatgagacctactgatgtccctgatacaggtttgctctgtgatttgctatggtctgatccagataaggatgtgcaaggctggggagaaaatgatcgtggtgtttcctttacttttggagctgatgtagtcagtaaatttctgaatcgtcatgatttagatttgatttgtcgagctcatcaggtggtggaagatggatatgaattttttgctaaacgacagttggtaaccttattttcagccccaaattactgtggcgagtttgataatgctggtggaatgatgagtgtggatgaaactttgatgtgttcatttcagatattgaaaccatctgaaaagaaagctaaataccagtatggtggactgaattctggacgtcctgtcactccacctcgaacagctaatccgccgaagaaaaggtgaagaaaggaattctgtaaagaaaccatcagatttgttaaggacatacttcataatatataagtgtgcactgtaaaaccatccagccatttgacaccctttatgatgtcacacctttaacttaaggagacgggtaaaggatcttaaatttttttctaatagaaagatgtgctacactgtattgtaataagtatactctgttatagtcaacaaagttaaatccaaattcaaaattatccattaaagttacatcttcatgtatcacaatttttaaagttgaaaagcatcccagttaaactagatgtgatagttaaaccagatgaaagcatgatgatccatctgtgtaatgtggttttagtgttgcttggttgtttaattattttgagcttgttttgtttttgtttgttttcactagaataatggcaaatacttctaatttttttccctaaacatttttaaaagtgaaatatgggaagagctttacagacattcaccaactattattttcccttgtttatctacttagatatctgtttaatcttactaagaaaactttcgcctcattacattaaaaaggaattttagagattgattgttttaaaaaaaaatacgcacattgtccaatccagtgattttaatcatacagtttgactgggcaaactttacagctgatagtgaatattttgctttatacaggaattgacactgatttggatttgtgcactctaatttttaacttattgatgctctattgtgcagtagcatttcatttaagataaggctcatatagtattacccaactagttgggtaatgtgattatgtggtaccttggctttaggttttcattcgcacggaacaccttttggcatgcttaacttcctggtaacaccttcacctgcatnnnnnnnnnnnnnnnnnnnnnnnnnnnnnnnnnnnnnnnnnnnnnnnnnnnttgttgtttgtttttagatccacagtacatgagaatccttttttgacaagccttggaaagctgacactgtctctttttcctccctctatacgaaggatgtatttaaatgaatgctggtcagtgggacattttgtcaactatgggtattgggtgcttaactgtctaatattgccatgtgaatgttgtatacgattgtaaggcttatgtcactaaagatttttattctgattttttcataatcaaaggtcatatgatactgtatagacaagctttgtagtgaagtatagtagcaataatttctgtacctgatcaagtttattgcagcctttcttttcctatttcttttttttaagggttagtattaacaaatggcaatgagtagaaaagttaacatgaagattttagaaggagagaacttacaggacacagatttgtgattctttgactgtgacactattggatgtgattctaaaagcttttattgagcattgtcaaatttgtaagcttcatagggatggacatcatatctataatgcccttctatatgtgctaccatagatgtgacatttttgaccttaatatcgtctttgaaaatgttaaattgagaaacctgttaacttacattttatggattggcacattgtattacttactgcaagagatatttcattttcagcacagtgcaaaagttctttaaaatgcatatgtctttttttctaattccgttttgttttaaagcacattttaaatgtagttttctcatttagtaaaagttgtctaattgatatgaagcctgactgattttttttttccttacagtgagacatttaagcacacattttattcacatagatactatgtccttgacatattgaaatgattcttttctgaaagtattcatgatctgcatatgatgtattaggttaggtcacaaaggttttatctgaggtgatttaaataacttcctgattggagtgtgtaagctgagcgatttctaataaaattttagttgtacacttttagtagtcatagtgaagcaggtctagaaaataagcctttggcagggaaaaagggcaatgttgattaatctcagtattaaaccacattaatctgtatcccattgtctggcttttgtaaattcatccaggtcaagactaagtatgttggttaataggaatccttttttttttttttaaagactaaatgtgaaaaaataatcactacttaagctaattaatattggtcattaaatttaaaggatggaaatttatcatgtttaaaaattattcaagcactcttaaaaccacttaaacagcctccagtcataaaaatgtgttctttacaaatatttgcttggcaacacgacttgaaataaataaaactttgtttcttaggagaaaatgattctgtaattccagtgtcactaatttatattgttctttcctctgatttttttcaggttagtgatttttttgtatacaatttaatccaaatgttatgacattcagaaatcatgaaacacagtagatatctgttataatgtggtgtatcacatgggattataaagcaaagttatggtcgatttctattcttgaaagaatcaactacagtgaatcctatgcatttgaagccttaacatggcattgcctttaattttgcccagggacaaattttaataatcagcaagactggtttgtgcaaagcgttgagtcatcaggtatttagagcctagccagctacccagtatccatgctgccatatcccttcattgtaaaaagtacctaaacattcgtgaaatgattttttttagctgaaaaatgctggcaagaagaattttaaagcttaaaataggtggtaaatttgaagtatgagtgtgttcacgagaaacataggcttttcaaaaaaatttttattcaaggcaaagcaaggaacatcttgagatatgtctcaagaatataaagatgtattattttaagccaaggagctgaaatatatctcagtttataaattcaggtatattctttttgtctccatggcaaccataacttttgaaccaaaaaaaattgtttttacatctttatgctgaaaatgtgtttagattaggaatatggtcgggctgaatttgctgttgctccctaaccaaatccacctcttgttttccttgtgagtccatggctaaatcaaagctgcccctgagaagagacttaatccaagcctgattgtactagtggcatcacttagaagtaggctttccctcttcctagtagatctcaatgttttataattccttaaaacagctgaaaattgggacaacatactttacgcaatgaacagtagttaaataggaaataaactagttcccatgtaagtatacaccctagagttttaattacctttataatgtttcttaaaagtgaaacttagatacaattgtgattggatacttagatactaagtgaaacttagtgtaacaattttgatctgttaaattggattttacatgtacatttgaatgccagaatttctaaataaatcccctggttaggaaattttaaaagtcaaagcttgttttcttcaaccactaccttctacattggttgacttagaccgtaagctttttaagtttctcattgtaatttaccttctcatgcagattgctgatgttttattaaaccttatttttacaaaaatgaccataaaaaaaaaaaaaaaaaaaa

SEQ ID NO: 58243 - DNA, 534 bp, Homo sapiens
gggacctcagaggttgtctgaaggccgaggccaagatggcggtgctgtgcagctcctggcctgcgcggcttccggatccttggttctgcgctccagcgtgggcctggctgtgcaggcacgaggtgtccatcagagcgtggccaccgatggcccaagcagcacccagcctgccctgccaaaggccagagccgtggctcccaaacccagcagccggggcgagtatgtggtggccaagctggatgacctcgtcaactgggcccgccggagttctctgtggcccatgaccttcggcctggcctgctgcgccgtggagatgatgcacatggcagcaccccgctacgacatggaccgctttggcgtggtcttccgcgccagcccgcgccagtccgacgtcatgatcgtggccggcacactcaccaacaagatggccccagcgcttcgcaaggtctacgaccagatgccggagccgcgctacgtggtctccatggggagctgcgccaacggaggaggctactaccactattcctacttcgg

SEQ ID NO: 58244 - DNA, 1749 bp, Homo sapiens
ggcgaggaggctgcgagcgagccggaaccgagcgggcggcgggcgccgcacctatgggggagaaacccgggaccagggtcttcaagaagtcgagccctaacatgcaagctcaccgtgtacttgggcaagcgggacttcgtagatcacctggacaaagtggaccctgtagatggcgtggtgcttgtggaccctgactacctgaaggaccgcaaagtgtttgtgaccctcacctgcgccttccgctattggccgtgaagacctggatgtgcatgggcttgtcattccgcaaagacctgttcatcgccacctaccaggccttccccccggtgcccaacccaccccggccccccacccgcctgcaggaccggctgctgaggaagctgggccagcatgcccaccccttcttcttcaccataccccagaatcttccatgctccgtcacactgcagccaggcccagaggatacaggaaaggcctgcggcgtagactttgagattcgagccttctgtgctaaatcactagaagagaaaagccacaaaaggaactctgtgcggctggtgatccgaaaggtgcagttcgccccggagaaacccggcccccagccttcagccgaaaccacacgccacttcctcatgtctgaccggtccctgcacctcgaggcttccctggacaaggagctgtactaccatggggagcccctcaatgtaaatgtccacgtcaccaacaactccaccaagaccgtcaagaagatcaaagtctctgtgagacagtacgccgacatctgcctcttcaggcaccgcccagtacaagtgtcctgtggctcaactcgaacaagatgaccaggtatctcccagctccacattctgtaaggtgtacaccataaccccactgctcagtgacaaccgggagaagcggggtctcgccctggatgggaaactcaagcacgaggacaccaacctggcttccagcaccatcgtgaaggagggtgccaacaaggaggtgctgggaatcctggtgtcctacagggtcaaggtgaagctggtggtgtctcgaggcggggatgtctctgtggagctgccttttgttcttatgcaccccaagccccacgaccacatccccctccccagaccccagtcagccgctccggagacagatgtccctgtggacaccaacctcattgaatttgataccaactatgccacagatgatgacattgtgtttgaggactttgcccggcttcggctgaaggggatgaaggatgacgactatgatgatcaactctgctaggaagcggggtgggaagaagggaggggatggggttgggagaggtgagggcaggattaagatccccactgtcaatgggggattgtcccagcccctcttcccttcccctcacctggaagcttcttcaaccaatcccttcacactctctcccccatccccccaagatacacactggaccctctcttgctgaatgtgggcattaattttttgactgcagctctgcttctccagccccgccgtgggtggcaagctgtgttcatacctaaattttctggaaggggacagtgaaaagaggagtgacaggagggaaagggggagacaaaactcctactctcaacctcacaccaacacctcccattatcactctctctgcccccattccttcaagaggagaccctttggggacaaggccgtttctttgtttctgagcataaagaagaaaataaatcttttactaagcatgaa

SEQ ID NO: 58245 - DNA, 478 bp, Homo sapiens
  misc_feature (1)...(478): n = a,t,c or g
gagggcggggttcctgtacattcctacttcaccagataacctgcccncaacaccacttgagcttctgccagacagatggaactctccagcatgaaaatctgcgcagccattccaacaagcagggctctgcctgaggttgtccgaaggatgccgaggaaaaggatatcaggactggaatggctcttacagcaagatccaggtttttcattagtcaatacagtgaaggctggcatgatcatcagcttcccatccaataatatctactcatcagtgtgctgttgtcaatcagagattttcaagtatgagttctccaactcaaagaaaagtagctggatccaggaagaaaggcatttggggaagaacaacgttctttacagtgctcatgatgtgtctccagagaaagttacttcagcactaaaaaaaacaaacaaacaaacaacaacaataaacaactttcctctacagtatcttccagggt

SEQ ID NO: 58246 - DNA, 872 bp, Homo sapiens
  misc_feature (1)...(872): n = a,t,c or g
ggtgtgtgggtcgagggggtggggggcagttcagtgaagtctagaagacctgctggacaaattctaaaagagctagagctgtaacacttattcttgcatcttattaattttctatgatattttttccttcttcgtagggacttgggacaatctggctttgctgctttctaactgctaggcacctctctctaaccctcattgtcagagggaattggaggatatccacagtctgttcctgttctgatattctcgagcagagaaaaggcactaacggttcctcttagctatttaattatcagaagcaagtaatctttccccagataatattttgccctagaagaagccgtgatttagctcttttattgtgcttacttggtccaaatacatctgtggggtgttttgtcatttcttaatgaatgaatcatagttataaccagggggccaagctgcccaagaggctcttcagagatcatggatgctctctttctggaagctgtggcctgatggagcagccccattccagggtcccatctgtccggagttgtgtatgtcaagtccggctcagtctttatttccaacactagccgtggtcctgtgcagtcaagctctcagctagtgtttagggctgtctgtcagaaatggttatacgtgggcaaaagaagatctgacagctcctatataccttatcttactgaattcttaaactttgaaccagttcttccacttactgacttgttaccactgctgactttctgaaaagttttccagttttttttttttttttgttttttgttttccagtaggggattagaatgtttagtcctacttagtaagaaaaatattgtatttttaatcaaaganctagtgctggt

SEQ ID NO: 58247 - DNA, 1297 bp, Homo sapiens
tttttttttacgaaaccaggtttattaaaatttctctacaagtcagaaacggccatctcactgttcacatatatacacgtatgtacaggaagaacctagtgtttctagctttcccggcagaaggccctgccagcccagagtccttagtcggataatgtatcacagatacaacagtcgagcaaccacgagagcgttagtgcgacagaggcctctgtcctccctcttctcaaagtcccatgattctgtcaaggtaatattgccaataatcattcacatttcacgtggttttagacacgcaggttattcagacagacacagacaacaaaacaagcctcaaagccagaacaaaacaaaacaaaacaaaatcgaacataggtataaaaggtaaaatatatgtacaaagtacacagtacgtgaggtatacacggcattctcacaatgcatgttagtagtttgcctaggcatagcccttaaagatgactgcctgtttttgtgccatttctcaaaatacagtatattttgtttacccgtttaaccacctgatttcagcactgtccaagacagttactgatatttcatctgaatttgttttttaatgaaagttgcaatttctccattaagctccatcttttgtaggggagtgagtttccatctctggacatatctaacagaggctggattcccacctacaaaagaagctgaagaggggatttctgccttgggaggtggcagaaagaggaaagagattggaccggatgatttttaaagttccttccaactttgaagatttggggtttgctgtttcactccagaagccgattatacagacgtattcataaaccacacatttgaaatattaacaacccaccatgcaaaactgcagatgtacacacaatgccaaaggcggaccatatctgggaggggttaaagtataattctggaagttagtctgagaatcacaagactatccaaaattcactctcttcaaagcacaaagatgtttaatgtctgctcttgggagaggtgggtgggagcctccttatctttcttctcttagacagaatgctccaccctgagatggtcttggggaaaaagtaaagggtaggtactaacatatttggaaggaacttaaaaagctaatagtttccaagcactcaaattattttttaaaatctggagtctctctgagctcagagttcctgaaatccgttgggagatggaatcttttgtgatactgttcccacgttcggctggtaagtgcttttatagcctaaagggggaagtgtcaaggtcaggg

SEQ ID NO: 58248 - DNA, 1236 bp, Homo sapiens
cttcgatagctcatctttgcgcgtcgcagtcgcgcggagcccggcttccgacgtgcagcctggcagtgcagtgagctgtctggccttttgtccttgatccttggttaaggaaatgaccaaccagtacggtattctcttcaaacaagagcaagcccatgatgatgccatttggtcagttgcttgggggacaaacaagaaggaaaactctgagacagtggtcacaggctccctagatgacctggtgaaggtctggaaatggcgtgatgagaggctggacctacagtggagtctggagggacatcagctgggagtggtgtctgtggacatcagccacaccctgcccattgctgcatccagctctcttgatgctcatattcgtctttgggacttggaaaatggcaaacagataaagtccatagatgcaggacctgtggatgcctggactttggccttttctcctgattcccagtatctggccacaggaactcatgtcgggaaagtgaacatttttggtgtggaaagtgggaaaaaggaatattctttggacacgagaggaaaattcattcttagtattgcatatagtcctgatgggaaatacctagccagtggagccatagatggaatcatcaatatttttgatattgcaactggaaaacttctgcataccctggaaggccatgccatgcccattcgctccttgaccttttccccggactcccagctccttgtcactgcttcagatgatggctacatcaagatctatgatgtacaacatgccaatttggctgggcacgctgagcggccatgcctcctgggtgctgaacgttgcattctgtcctgatgacactcactttgtttccagttcgtctgacaaaagtgtaaaagtttgggatgttggaacgaggacttgtgttcacaccttctttgatcaccaggatcaggtctggggagtaaaatacaatggaaatggttcaaaaattgtgtctgttggagatgaccaggaaattcacatctatgattgtccaatttaaacatcaaagtctccaggcttatgctgcaaagagaatgtacggattgatcatgacattccttaccttcttaggcttgtttaaaagaaatatagcatttattgtagcaaagacttaaattttgtagatacaatatgaatcttttcatgttttattggaaatgctgttcatactttaacataaagctttcttaatgcaaaaaaaaaaa

SEQ ID NO: 58249 - DNA, 4908 bp, Homo sapiens
  misc_feature (1)...(4908): n = a,t,c or g
ttgctgtcaggtgactctcccgtggcgccatggcggaagcagtggagcaggaaactgggtcccttgaagaatctacagatgagtctgaggaagaagagagcgaagaggaacccaagctgaagtatgaaaggctttccaatggggtaactgaaatacttcagaaggatgcagctagctgcatgacagtccatgacaagtttttggcattgggcacacattatggcaaggtttatttacttgatgtccaggggaacatcactcagaagtttgatgtaagtcctgtgaagataaatcagattagcttgggatgaaagtggagagcacatgggtgtgtgttcagaggatggcaaggtgcaggtatttggactgtattctggagaagaatttcacggagacttttgactttccccattaaaattattgctgtgcacccacatttcgtgagatccagttgcaagcagtttgtgaccggagggaagaagctgctactgtttgaacggtcttggatgaacagatggaagtctgctgttctgcatgaaggggaagggaacataaggagtgtgaagtggagaggccatctgattgcttgggccaataatatgggtgtgaagatttttgacatcatctcaaagcaaagaatcaccaatgtgccccgggatgatataagtcttcgcccagacatgtatccctgcagcctctgctggaaggacaatgtgacactgattattggctgggggacttctgtcaaggtgtgctcagtgaaggaacggcatgccagtgaaatgagggatttgccaagtcgatatgttgaaatagtgtctcagtttgaaactgaattctacatcagtggacttgcacctctctgtgatcagcttgttgtactttcgtatgtaaaggagatttcagaaaaaacggaaagagaatactgtgccaggcctagactggacatcatccagccactttctgagacttgtgaagagatctcttctgatgctttgacagtcagaggctttcaggagaatgaatgtagagattatcatttagaatactctgaaggggaatcacttttttacatcgtgagtccgagagatgttgtagtggccaaggaacgagaccaagatgatcacattgactggctccttgaaaagaagaaatatgaagaagcattgatggcagctgaaattagccaaaaaaatattaaaagacataagattctggatattggcttggcatatataaatcacctggtggagagaggagactatgacatagcagcacgcaaatgccagaaaattcttgggaaaaatgcagcactctgggaatatgaagtttataaatttaaagaaattggacagcttaaggctattagtccttatttgccaagaggtgatccagttctgaaaccactcatctatgaaatgatcttacatgaatttttggagagtgattatgagggttttgccacattgatccgagaatggcctggagatctgtataataattcagtcatagttcaagcagttcgggatcatttgaagaaagatagtcagaacaagactttacttaaaaccctggcagaattgtacacctatgacaagaactatggcaatgctctggaaatatacttaacattaagacataaagacgtttttcagttgatccacaagcataatcttttcagttctatcaaggataaaattgttttattaatggattttgattcagagaaagctgttgacatgcttttggacaatgaagataaaatttcaattaaaaaggtagtggaagaattggaagacagaccagagctacagcatgtgtatttgcataagcttttcaagagagaccaccataaggggcagcgttaccatgaaaaacagatcagtctttatgctgaatatgatcgaccaaacttacttccctttctccgagacagtacccattgcccacttgaaaaggctcttgagatctgtcaacagagaaactttgtagaagagacagtttatcttctgagccgaatgggtaatagccgaagtgccctgaagatgattatggaggaattacatgatgttgataaagcaatcgaatttgccaaggagcaagatgatggagagctgtgggaagatttgattttatattccattgacaaaccaccatttattactggcttgttaaacaacattggcacacatgttgacccaattctactgattcaccgtattaaggaaggaatggagatccccaatttgagagattccttggttaaaattctgcaagactacaatttgcaaattctgcttcgtgaaggctgcaagaagattctcgtagctgactctttgtccttactgaagaaaatgcaccgaactcaaatgaaaggtgttcttgttgatgaggagaacatctgtgagtcgtgcctttcccctattcttccatcagatgcagctaagcccttcagcgtggtggtcttccattgccggcacatgttccacaaggagtgcctgcccatgcccagcatgaactctgctgcacagttctgcaacatctgcagtgctaagaaccgtggaccaggaagtgcaattttggagatgaaaaaatagctcatttctccttgtcagtctccttgtcaccactctttttgagactgtttttgcaacaacaaaagcatttgttgacactcgtgctgttaagagatttgtttatgtttatattatactcaaaaacaatttcttcatctattcctgtactaatggtttctctttgcagttcacagagaatttggggctctcttcatgccttgaaattttggggtccatagtgaatattttgttatttatttgtttggctcattctttatatagtaatggaaacataagtctaggagttagaaatgaattttttagaccttagtaaaaccatttaaccataaaatggacaactgagaattctcccagctgcctgaaagcgtcgccaactgtggttatcctgcaagctgctacctgcaacttggacgttgtttccacgtgctctgctggctacgattcttgcattctgggtttggcttttttctgtgtcatcaactatggttatcctctaaataggcatttaatgaaacattgtacaaattgtcactcatttgatgacacctgggaataacattagcaggctgatgtcctgcaccattatgtttactaatcacatgttctgtgtgctgtgacgactgtcaaagagtatctggccatggcggacactcagcatttgttgattgaataaatgttagctcttctcattgtgaaggactcacttttactgggataaacaaatgcagttaagaattctgggcacccttgtaaggaagaaaagagagttcaacaccttcgagtctgagcgcttgtggctagagtttgccaggagggaggaaaccagtgaccctgaaaactgagggtgcctcaggagcagtgggaccacctgatgctgaaggacggactaatgatgtttcctcttgccttctctggtgcctccattgccctccatggaacagagcatatcatagaaggagaaaaattccaacttgtaattgtgtcttacagttactggcttcatcttccttgggatatatggtcatcctctaatgagtgtaaaagtgcgcaaaacacatccttattgttcctgatctcttagtcccataaatgggaacaaatacagctttctgcttctttctttttggggaaaggacagggtgctagtgagtactgacagcatgccagctaccaaagtcacccagccattcccatgagcagcagttcatttaattgtcacagcgtcgccaggaagaagatctgaataaaacctaggttttacagataaagaaagcaaaatgtaagagatgttgttgaaggtcacagaggtgactgccctaacttcagagcagggcttctgatccctttaagaaattacagggccnnnnnnnnnnnnnnnnnnnnnnnnnnnnnnnnnnnnnnnnnnnnnnnnnnnnnnnnnnnnnnnnnnnnnnnnnnnnnnnnnnnnnnnnnnnnnnnnnnnnnnnnnnnnnnnnnnnnnnnnnnnnnnnnnnnnnnnnnnnnnnnnnnnnnnnnnnnnnnnnnnnnnnnnnnnnnnnnnnnnnnnnnnnnnnnnnnnnnnnnnnnnnnnnnnnnnnnnnnnnnnnnnnnnnnnnnnnnnnnnnnnnnnnnnnnnnnnnnnnnnnnnnnnnnnnnnnnnnnnnnnnnnnnnnnnnnnnnngaaaagaaatcatagggccaagttcaaaggaaatgcacagaacatatcttcacattagagttaagaattctctagcaaacaacagatttttttgttgttgttagtcacaaatacttagaactggaaggcgctttgttattattgaatgtacccctcagccttctcagcatttccttatcccaagactagtgtgctttctgctacactgctagttttcagttttgttcttacccaattgttttttcttttcaacattaccaatttacagattcagtttattacatttacattaatcctcacttatgatttgagcaagctcatttccagaaaagtttactttaagatcatcaataggatttgctaatttcagtgaagtcattttgcttcaggggtaaattatcctagttaccaagtcctatttggacataaagaaaatcctacttatagaaaaggagaaaataattaaacagtcttcatttttaagtaactgatttaaaaggaaaataataaaatatgttcgtttatcatttcagaaattgctgtaacacactggaaaattcctgaacaatatagattttatcgttaataaaaaacactagctttcgttccttagaatgtcttttcttttgaataaacagtattgggtgattt

SEQ ID NO: 58250 - DNA, 1303 bp, Homo sapiens
ttttttttttttgctttattttgctttatcattttattggtaaaatttatttcaatgcaaaacatatacagagacaagtacacggtggtaaatgtatagctcaataaatctaatgaaataaacacaccaatgtaacagatcaagaaagaggacattactagcttccagatgccctatcatgtggcttcccagtttagttccctcaaggataatgaatattctgactattaatgtcatagatcagttttatcttcttttgaagtttatgtaagtggaatcttttctgtctggtcaatatcatgtttccgagattcatctatattgttgcctttagttggagactgttcattctcattactggatggccatcctgtgaatatacttgggcagttaatatttgatcaattaatttcttccctcaagggtagctcaaaagttgaccatggcctccctacaccgtccctgatttcaatctgaatccacaggaagagtctcaccttactctaatgacttgcattgaatatcagaacacagaagtaggattttttccaatttttaaacaatgtgcagaggtaggctttttcagggtagcagtttattatttatttccatactttgtgttttatcccatcaatctgctctttcaatttggcttagagttatagaatgttcgagctggagaaaccacattttctgagaaacattttatataaattctgataacagttgtatgaacttctatttcttcaagaatcatgataagttttatcacataggtcccaagaaaaatctaggtacagtaacaactggagatcaggaatatttttctaaatatttctttgcattgtacttttataatgagtcttttttcaattaaagtgaaaagcatcaaagcatgatagatttttttacctgagaaaatggtcttttcatttatatatgaataaaaattcaaatttaaaacttcaccataaaagtcagtaatgttgacaacttgtcagcacctacttcatagattgatacccacactataatttagaatgtggaagttaaaatagtatctacaccctgaataataaataacatgcactaaagacttttcttttatggaactctattagtgtccttcctaaaaataaaatgaaatgaactttcctaaagtgttgtaatattagtactatctaagtcatcatcctggccttatgaaatattggcattttctactggtgtaacttttattagaagcatctcatcataactagtaggatcatctcaaaggggttgcaacacattagcaggtaat

SEQ ID NO: 58251 - DNA, 3370 bp, Homo sapiens
ctggaccacgtggacaggatccggtcagcagcccctgtggctagaggaacaccagcacaaacgacagcctcaagtctccttcgagctttatatccatttggggatgaagtctactttgacagctagcaaggcgacatgcaactgttgttgaatgatgacagcaattcaggaaagacttaaatatgaaagcaaattgaacacatcgggtgtttgttatcagaaaagagatgagatgagataagacttgtttattgactagccaatatgtcattaaaattaaggtttatattgtgaagcttttttgaaattttacttttttttgagagttttgctctgtcacccaggctggagtgaggtggtacaatctcggctcactgcaacctccacctcccaggttcaagagattctcctgcctcagtctcccgagtagctaggattacagatgtgcatcaccatgcctggctaatttttgtattttttagtagagatggggtttcaccatgttggtcaggctggtctcgaactcctgacctcaagtgacccgcccttgtcggcctcccaaagtgctgggattacaggcatgagccaccatgccagcccaagaggtgagtttctgttatacgacttgggcctaaaaaaacagattttcagggggaaaaaaaaacctagatttttagtaagactattttatatacttttttacattgatcaagtacattatttttaccaaacaacattgtttcccactacatccatggttatgtataaaaaaacgccattgtcaattaagatgttaaaaaattatttccataagagtattaaattctaatctatgattcacttaacttcctactttataaacactaggtaaagtaatctcacaagctgccaaagaacacatcccaagcagtaatcacagacgatgaagcaccttacaggacccctccaccctcaaacgcgcatgtccagagaagtattaatgccttaatagactactgaaggttaactatttacatcattctaaaaatattttaagctgtattacagtgctataaattctccttttaaggaaaaaagtaatagattgtttccttaccgtgtttgaaaggaaaaaaaataaatccatagtaactaatggtctgccgattttttccctgaatttttaaactccaacaaagcattattttgcaaaaagtcctttagcccaaagtcagtgtctctgttttgatctctttgtaaaagaactctctgttcatccattctctttccctgggaccgtaaaataaggctgaaaaagtcttcatctggtactgtcggaccctttgtggtagcaggtggtggagcacatctttgatcatctaatctggatccttgacattttacaaggatgtcaaagaaatcttcatcagcctctttgttgtcattagtcatcaggtggctaagtaccgactggctgttttgtgttagacgaagccctggcaaattactgaaactagccctctggtcatccagacggcgactctgtgagctggcaagaagatctaaaaactcatccgtgttgggggataccacaggaacagatgatgtttttagcatcattttagggggagtggaagaagttgttgttgaagctgtatggcagttcttttcttgtaagcaacatctctgatcatccatcctattgctttgaaatcggcttaataagtcaaagaacccttcatctccaatagtatctgcactgattttcctctgagaatttggaattcggtggtcaatagaattactggcatcttggagaactttagtggaggaattcgttttgtattttttccccttcagtctgttgacaaagagtagctttgcagaaggtttggcaataagaggtttttgcttagcaagaatttcactgttccagttctgtaccttttctggtgttaacttcataagttccatattttccatactatgccggcgtcccaacttggggagtacaccattcaaactgctatcaatttcagtattttcagacattatggagttatttgtgctgtagctcagaccaagaaccatttgaaggtctgagagattaagtcgtgctgttagttcaccacttttatccccaacctctcttgaaatttccaagtgcttttcagcaaaatgcattgcttgatcatgatttcctagtgctgtgtatgcatttcctaagctccaacatgctcttccttcaccaattctatcattcagctcttgagcaattgctaagtgcttcagatgataatcaatggccttttcatagtcttgaagtaaagtatatgtatttccaagactgtaacaagactgtgcttctacagctcggtctttaagctgtcgggccaacagtagtgtcttcttgtagtattccgaggcagtttcaaattcaccaagaaatatatatgcatctccaaggttgctatatgctcttctttcagctgctttatctccaaattcttttgcaataaggagacgctgctcatgagctataactgcatccctgagtgccaaggaggtaatgtgtgttcccagattccaaggcacgtccttgtgccgctcggtcacccaaagcagtcactaatgataggttttcctcataaaaatccacggctgcctgcagagcatctctcacttcttctggaaattctcctacatcctggggaccagggcaaccaaaacttttccctttggcatgatacacattcccaagattgtaaagtgctcttgcttctcccaccttgtcattaagctctctggaaatatctaggtgtcgctgacaacaaactatggcttcgtcaaaattcccaagaacttttaaggtgtttcccagattaccactagctttcgcttcccccagctggtctccaatagtccttgcaagggttaaatcatgatggtgatattctaatgctttggcataatcatgcaaatagaaataagcattgcccaactggctgtaaatagcgctaagtgtttttaggtcttcagttccaacttgaactgcagcttcaaagaatgacacgccagcgcggcagtctcctgatttacatagacgttccccttccaaggccagctctaggcaagaagcttccattctgtaacgaacatgaaaagaatggtcttctctcatgcttatcaaattttcctccatcgagtcatattataagctgaataaaataaaattattttattttgtgccaatccagtcctttacaatgtagaattgtttgtagaacattgtccggttagtatattaatgagttggtgttaatacatcctaagctcctgattcttctttattaataatgaaaggaggtcaatgtcagacagcttaaaggtt

SEQ ID NO: 58252 - DNA, 2123 bp, Homo sapiens
ggtggccgggcggtctgcggtcggtctgagacacgcggagcaatggcgacctttgtgagcgagctggaggcggccaagaagaacttaagcgaggccctgggggacaacgtgaaacaatactgggctaacctaaagctgtggttcaagcagaagatcagcaaagaggagtttgaccttgaagctcatagacttctcacacaggataatgtccattctcacaatgatttcctcctggccattctcacgcgttgtcagatttttggtttctacaccagatggtgctggatctttgctttggccagggggttccgcagcaaaacctgggaaaacccaagggaaagaaaaagctttcttctgttcgtcagaaatttgatcatagattccagcctcaaaatcctctctcaggagcccagcaatttgtggcaaagggttccccaagatgatgacgacttgaaactttgttcccacacaatgatgcttcccactcgaggccagcttgaagggagaatgatagtgactgcttatgagcatgggctggacaatgtcaccgaggaggctgtttcagctgttgtctatgctgtggagaatcaccttaaagatatactgacgtcagttgtgtcaagaaggaaagcttatcggttacgagatggtcattttaaatatgcctttggagttaacgtgaccccgcagccatacctgaagaatagtgtagtagcttacaacaacttaatagaaagccctccagcttttactgctccctgtgctggtcagaatccagcttctcacccaccccctgatgatgctgagcagcaggctgcactcctgctgggcatgctccggagacactctacctgcatctttgcctccggtgaacatgtacgatctttttgaagctttgcaggtgcacagggaagtcatccctacacatactgtctatgctcttaacattgaaaggatcatcacgaaactctggcatccaaatcatgaagagctgcagcaagacaaagttcaccgccagcgcttggcagccaaggaggggcttttgctgtgctaaattaggatttgagggtgtgggaccctcaccaaattcattgattactgaaaattgaatgttttttgggtccacatttcaaggctgaagtgtatagtgtatatataacctttcctatggaaatgtgacattgagtacattttgtgttgctgttgtgaagccattaatataaatctttggtaatgacccatatctctatatgtatgtgttccccagttgtgggagcaggcactaatgaaatcctgtgcctggaatggagatatttaggtacctgaggcttagtgtcctgtggtctgcatgtaagatagatgacatcctagaacaaagaagctgttttaacttaatccccctgatcagcaggatatctgtgtgttcagtgacatcatacattctgtatctagaagtctaaaatttctgcctttctcctaaagaatgtgttcttgcattttggttgaaataacctacacagtgttaaaaatcagatacctcctttagtgaccagttcaaattttaatagcgataggtagcccctgagaaatttatcactataactccacaggaaatatgacttggaagtgctctgtgtactaaacaaaataaagcccctctttgcatttaaaaccaaagtcaaaacaaaactcttgtaatgcaattaattaactttatgtcttcccatgactcaagttttgttaaatatgcccaaaaactttgattggcagtttcttcggttaattattcctatagaatgtattttaaggaaatcctatacaaattggatatatgcttgggtaattctccagtttctaggaggtacctatttctaccgtttcaagtgatgaagtgaaaataatttacattcgatagtgttactgataacaaacctacttaagagatatgttgctttttacttaagggatagtgttgatagataaattagaatgtatagataggtttgtgaaagtctaaataatggttgtatagatatgtatatatggttcacatatctggatctgtgtatttgattttgtactttaaatgtgacaaataaaccttttgggagaaaaaaaaaaaa

SEQ ID NO: 58253 - DNA, 5760 bp, Homo sapiens
ttttttttttttttttttacacaaagctttttgagttttatttttttcctcaggttggagattcatcgtaacatgcatgcattttcaaacagtaacagggtctcaaactttttaaagcagacgttagacaagcacaggggattgaaaattcccatttaaaaaatggaaactgcagtgggatatggagaagtcacacacttggtggggtggtggtttgtcctgcttccccaaaaggtggatatgaacttaattcacattttttaatttcagtgatctgacctgatgctgggatgtgccgagcagtactgccccctcccccaagggtgttggctcccaccgcctctcacagtggctctgcgcaagggcaagaggctcctgtggaaacttctgccctgggatactggcacaagctgccaagggacagctgagtctccttttccccatggggcactcttcataagtggcacattctagaggagggagagggccacggtcactgacccctgcagatggctggtagattggggaacagttgtctgaatgggttttccctttcaggacctcctgcccgcatgactgccaggaagagatgaggctcctagacttggggggccacaggtttaaggccagagctctgagtgttgtttaaacgcactgtcccttctagcccccaacacctgagtaactcacatgctggggtgctgcagttttctctcccaccctgaattggtaaaaagacaactggggggtaggactggctactgcaaaaagtcctgggtctttggtccacctccccaaggtatgccctggcagaccatgaagacaggaaaggcagggcaggagtgtagcctcacgccctgagcgctaccagcaggcctgtttgaggccaaaagcacaggcaagagaaagagtcaagtagggagaggggataaagagctgcctgtggtgggaacttaagagactgccactgagaacagccacaggggccacttcgtggcgcctgccacagaccagcaacccctgagctaaagaaggagaggtggagcactgcttcagtctgcgcccctcagctgtggcttcccggcatgccctgtgaccccaagccgcagggtacaggaaagaagtttgtgctgggggactcaaagacccagaggttaattaacaggaaccagggccaggggccttcatctagaggtcagtggagtctccagggcactcatcactgtggctgggagactacagtgtctcggctgcggacttgtggaagaagagggggaaggatgggagaaggggtgactggatgccagccaggaatcctggccttagccctatcctggcctcgcctaatcagccatgtcgttattcttacacctttcttcttgggagacccaacattattctgagatgccatgagactgtttagcttttcttcatggccccagggagtgaggctgagggcagtcacttcccctccaatgccctcgactgcccagtaaaagaatgggcgggacccaaggaggaaagagtgggggcagacaacgcttgggggatcagtccactttctctacattcaaactgcagaccaaatagaataccatgacaaaaagaagagaaaggaaacttgtataaaccaagataaatagcttttaaacatttgaatgccaaaaattgggggccaaactcaaggttttgaagatagcacagcgaatgacctttaaaaaaaaaaattgaaaatccaccaaaccacagctcaaaatgttatgacccagtcaacaatactgtcagaaaaacaaaaagcatttgaaacagaatgctacctctcaaaatgtaaacaatatacaaaacacacaaacatacacacacacacacaaactcaatgttaaacaagttagatacctggtagtcgtctttaaccagtaagaatgtgttacactttccatacacattatggcaacatgatcagcagaccaaatgcagagaagccggtaggaacccgaggccacggaggctgctggaagacagctttccaagcttcagagatgctgcgcctgacgaggagcagatccaaacttccattcttcattatgacgtggggaaatcaagtccaaacattattcctacataatccctttcccaagtcaaatttgttttctccatgagccagttggtttcaagttccctaagtcatgtagtggtcttgcggcagttgttcagacctacctatggccccttcctggggcaaggcagtggtttgacccccatctgcctcttccagaaggtttcccatccaatccagcagccccagtgaagtccaagaatgccgtctccattctttcctgacctatatgctgtgagtcaggcacagagacagtgctggttcctgcttcggaagctgggcttggccaggtttggagggagccacaggaaaccaatctattcattcaaaatgggtttcacaagcgatcttcacatctttggggttatctacaagtctgaccatatctcatcccaaatcccccagttcctggttgagggggtgagaagatgcaggaatgtacctcccccaatgcagaacaacagagctgtttctctcctggccagagcagcctgtggctcagttctgagggcctgggtggcaggctcccgaaggcaggtggaacacctgcaggaagccactccttccaaaaaagcctgtgggctgcagatctgctaaaagtctagagcggggcaacaaggaaaaacagccccaaggctgaggccaggtcaaaacccacatcaagcctccaaactggatttcctggatcacatcctcatgtaactaggaagccacctcacgtttggacaccacactctaagatgggggcaccttgctggctgtaactctccaggcacaggggagacagatctcctacaaggtcatcccggagcttaacgaggtgtctctgctaaaaagcactccaggcgcttggagatctgcccagagctaagagttcggctagaagtaagagtgcctgggaggaggtcagaaggaagaaggaaatagatcgagggcacagggcctcatttgatacatcagtttctgaagttttcccaaagggaaataaccatttaaacatgagggtcctgataaatccaaaggtactctagttcctcttgacctagtgggaggcaggctttacagagaggacttctgaactccaggggctaagacagcctggggcttgggtgatcatcacagggttctctgagaaccaggtgtccaagagccccagccgctttccctgcccctcacccatccccatgaggatgaacttattcccctctgagatctctgattctgatctgagatctctggtgttgacctggtgtattccagacaggatggaggaataatgcaacagttttcacttgaatccaagggaaaggtggaggaagttgtgcacaatactccataaattacaaagttaatccagacaagagcaaatgccagcagggcgaggtgtctgacctctgccaatctggcatccatagcacttggttctggaaggacccttgtgctgggtctaccgggtatctctttaattgaagggaactgagagctcagcaaagatggggagggtgggtaggctgatgaaatatgattataaatagcaaacctggagcaatgaaatttcagaaacaaaacccaaataaacccacgaagtcatctctagccccaaggtatcttaaaaggttacaaggtaccaaaaagggaacccctttttaacctgggtgtcaaatggggagaaaaaatcaagggtaagcagaaggtggggttacatcctgtgagctggtgcacacacagcacatccccctcctcttcagctaaagtctctttcggtgtcacaggctgcaagtctcattgctaaagccctcccaaacccgatctcgctcccaccctcccatctagcccaaatacacccttctccctaagtcccgatccccgaccccatatccagtctctcggtctcggctgaaggtagaagagaactacgtcaggatgttggacataaactcgttgaagcgtttggagtactgctcagggttcacagtcgagatctcggcccctgccccgtgtttcaccgttttggcagcatgtgcagctttcttctttgtatcgtatggcgtgaggatatcaatgatggccatgaaatacacctccttcttgggggaactttcatggcttttcatggcatagaagtcaacagaggggtcgaattccccaggaccaaagaaccgaggaaagctgaggaggttgccagggctgtccggaggtgtgccataggagcagagtaggttgccacccaccccatcattctcacactcctcgtcctctgcccgctcctccacctccatctcctcctgctctgcccggtccacgtcgtggatgcccaccagcaggctgtagtccatgatcttcagctgtgccaagaactcaacgtcccgcttcagtttctccaggaagttctttttactctcctctcccacatgcagcttctgcccttcattgaggaagtcattgtctttgaatgttggcaagtccttggccttctccttgtcgctcgcttctctggcaaccgtagaacccttgaggtcatacttgcgatgcacagtgagccgatggctgaacacgttcctggtaaccaccatgtaggtttccacaccatccacggtcaggcggtacatgcccaggaactgtggcaaaagcgtgttgccatgacactccactataaactggtggtatttctttaagatgttgtgcatctccgccacgtcctcgctggacacagtcttgatgacaaagcgccggtcgtaggtggtgaggaaacgcgtgccacaccgaccctggctgtcactgttgatgggggcgctgcgcgtcactgaattctggtaatcctgatcatcaattccaaacctctcccgaaggtttcggaacaccatggggcaatactccttaaacttaaagcggctgggcaggttctccttattgaagagatgattgtccaccttgatcttgctgtaggctttgaagtcatctggcattagcatgacaggaacaggaacattgctcagctcattgatcgtgtggttcaccccccacatcaggacgctgaggatcggctcgctggcccggaatagcttcactttctggcacacgaaatgcttcttcttggtcttggtcttgctggcgctgagcggcgccaccgccaccgccgtggtgctggtgcagttggacgacatgcccggggcggcggcggcggcggcgaaagaggggggcggcggagacagcgcacaagccagcggcctcaggcctcccccggaccgatccccacccccgctccctcaccgcgccatggtcgcgcccgtcccgttacctcccaccccgccccggtggttccgtccgccccacgccccgccctcccgccccgccccggggagcccgccggcccgtccgcaccccgcccccgggcggtgcagccgccctgcagtcccctggccccgtcctccccgtccgcgtggtacggcccgtcccggggaggcagcggccgccccgcccgcccctcctccccgggcctgacagaaacccgcctggcctccgaacgcctcggggccccgtgccggagccggaaggggaggagggctgggcaggcgtcgctgtggaccgcgggaggggctccccgcccgggccccccaacgccagggtttggctctttcccgcaa

SEQ ID NO: 58254 - DNA, 2457 bp, Homo sapiens
tctatttagagccgggtaggggagcgcagcggccagatacctcagcgctacctggcggaactggatttctctcccgcctgccggcctgcctgccacagccggactccgccactccggtagcctcatggctgcaacctgtgagattagcaacatttttagcaactacttcagtgcgatgtacagctcggaggactccaccctggcctctgttccccctgctgccacctttggggccgatgacttggtactgaccctgagcaacccccagatgtcattggagggtacagagaaggccagctggttgggggaacagccccagttctggtcgaagacgcaggttctggactggatcagctaccaagtggagaagaacaagtacgacgcaagcgccattgacttctcacgatgtgacatggatggcgccaccctctgcaattgtgcccttgaggagctgcgtctggtctttgggcctctgggggaccaactccatgcccagctgcgagacctcacttccagctcttctgatgagctcagttggatcattgagctgctggagaaggatggcatggccttccaggaggccctagacccagggccctttgaccagggcagcccctttgcccaggagctgctggacgacggtcagcaagccagcccctaccaccccggcagctgtggcgcaggagccccctcccctggcagctctgacgtctccaccgcagggactggtgcttctcggagctcccactcctcagactccggtggaagtgacgtggacctggatcccactgatggcaagctcttccccagcgatggttttcgtgactgcaagaagggggatcccaagcacgggaagcggaaacgaggccggccccgaaagctgagcaaagagtactgggactgtctcgagggcaagaagagcaagcacgcgcccagaggcacccacctgtgggagttcatccgggacatcctcatccacccggagctcaacgagggcctcatgaagtgggagaatcggcatgaaggcgtcttcaagttcctgcgctccgaggctgtggcccaactatggggccaaaagaaaaagaacagcaacatgacctacgagaagctgagccgggccatgaggtactactacaaacgggagatcctggaacgggtggatggccggcgactcgtctacaagtttggcaaaaactcaagcggctggaaggaggaagaggttctccagagtcggaactgagggttggaactatacccgggaccaaactcacggaccactcgaggcctgcaaaccttcctgggaggacaggcaggccagatggcccctccactggggaatgctcccagctgtgctgtggagagaagctgatgttttggtgtattgtcagccatcgtcctgggactcggagactatggcctcgcctccccaccctcctcttggaattacaagccctggggtttgaagctgactttatagctgcaagtgtatctccttttatctggtgcctcctcaaacccagtctcagacactaaatgcagacaacaccttcctcctgcagacacctggactgagccaaggaggcctggggaggccctaggggagcaccgtgatggagaggacagagcaggggctccagcaccttctttctggactggcgttcacctccctgctcagtgcttgggctccacgggcaggggtcagagcactccctaatttatgtgctatataaatatgtcagatgtacatagagatctattttttctaaaacattcccctccccactcctctcccacagagtgctggactgttccaggccctccagtgggctgatgctgggacccttaggatggggctcccagctcctttctcctgtgaatggaggcagagacctccaataaagtgccttctgggctttttctaacctttgtcttagctacctgtgtactgaaatttgggcctttggatcgaatatggtcaagaggttggaggggaggaaaatgaaggtctaccaggctgagggtgagggcaaaggctgacgaagaggggagttacagatttcctgtagcaggtgtgggcttacagacacatggactgggctgggaggcgagcaaaggaagcagctgagactgttggagaacgcttacaagacttcatgcaagcaaggacatgaactcagaacactgaggtcagaagcatcctgctgtcatgacaccgctcgagtgaccttgaccttgaccaagtctgtcctgtttaggactgatttttcctattaggctagggtttggacctgatgttctcaagatgtctagaattgcatggctggccttgtggaatagatggttttgcattccagccaagtgtgctgtaaactgtatatctgtaatatgaatcccagcttttgagtctgacaaaatcagagttaggatcttgtaaaggaaaaaaaaaaaaaacaaaac

SEQ ID NO: 58255 - DNA, 1144 bp, Homo sapiens
tttttttttttgaagagggataaaaatgttttaattgttgaaatacattggtgaattgagtaacttacattgcaatactaagtagatacacaagtcattatcaaattaatttccagatatcccactaaccatccatcgcaagtccttgaaaagttatagaaataatatgatgagattgtcgtgatgtagaatgagcaacccaaacagctatgaagtatttgtagttgcacatgcctttcacgaaagaaaataaaaatgtaatcaaaatgtgcatatggcatgcaaatttgagtttatttttaaatagtgcaatgaaatacacattgttcctaaaaaaggaaattctgacatttaaatgaaatttgaaaaccaaatagtaagaaatggaaagagatagttgtaagaatccatttaccaattttacagctaaaaattaaagtgaagtagaaatagcaaaagataacagacaaatatattattttaggtcattaatttatagtgccttatcatcttaagttataaatagaataaggattttgttatataaaaactatcaaaaaagtatcagtgaaaagacatgacctccatgaaatgtgctgagtggccagggtggaaatgttgtcaaaatgcagcggccctggctgggcaacaacagcctccatgacagtttgttaacttgtctttcgtaggtggccacagaaagttccataaacaagtgtactgtttaaccaattcccttctattaccacaacaatatgtacccagggttttatgtatacacttaagatttgggggaatgcaaaagggaagggtgactgtttagaatttccttggaaatgtctgtgcacattacaacgtcccacggagccaaattccttccaaactgatgagcaagctcttgattcttgagtcatgatgttattttcttctaatttttccgaaccgtctttgtttgactggacaccatattgacagcttcagatggtaggccaacatatactcctccatagtttctcctcttgtcatcttctgttacggattcttctgttacatctttggctgctcctgcagggccttggcccgcgcccgcgctggtggcggtggagttcccgcagcccatcgcgcagccggccggggaagccgc

SEQ ID NO: 58256 - DNA, 1444 bp, Homo sapiens
gccagaggaagacgtgaccattggagtctggcacaccgtccctgcagtctggtggaagaacgcccaaggcaaagaccagatgtggtatgaggatgccttggcttccagccaccctatcattctgtacctgcatgggaacgcaggtaccagaggaggcgaccaccgcgtggagctttacaaggtgctgagttcccttggttaccatgtggtcacctttgactacagaggttggggtgactcagtgggaacgccatctgagcggggcatgacctatgacgcactccacgtttttgactggatcaaagcaagaagtggtgacaaccccgtgtacatctggggccactctctgggcactggcgtggcgacaaatctggtgcggcgcctctgtgagcgagagacgcctccagatgcccttatattggaatctccattcactaatatccgcgaagaagctaagagccatccattttcagtgatatatcgatacttccctgggtttgactggttcttccttgatcctattacaagtagtggaattaaatttgcaaatgatgaaaacgtgaagcacatctcctgtcccctgctcatcctgcacgctgaggacgacccggtggtgcccttccagcttggcagaaagctctatagcatcgccgcaccagctcgaagcttccgagacttcaaagttcagtttgtgccctttcattcagaccttggctacaggcacaaatacatttacaagagccctgagctgccacggatactgagggaattcctgggggaagtcggagcctgagcaccagcactgagcctgggccgtggggaaggaagcatgaaggacctctgccctcctcccgtttttcctccagtcagcagcccggtatcctgaaggccccagggggccgggcacctgcaatgctcaggagcccagctcgcacctggagagcacctcagatcccaggcggggaggcccctgcaggcctgcagtgcccggaggcctgagcatggctgtgtggaaagcgtgggtggcaggcatgtggctctccttgccgcccctcaacctgagatcttgttgggagacttaatggcagcaggcagccatcactgcctggttgatgctgcactgagctggacagggggagtccgggcaggggactcttggggctcgggaccatgctgagctttttggcaccacccacagagaacgtggggtccaggttctttctgcaccttcccagcacatgcagaatgactccagtggttccatcgtcccctcctgccctgtgtacctgcttgcctttctcagctgccccacctcccctgggctggcccactcacccacagtggaagtgcccgggatctgcacttcctcccctttcacctacctgtacacctaacctggccttagactgagctttatttaagaataaaatcgtggtggtggtca

SEQ ID NO: 58257 - DNA, 1184 bp, Homo sapiens
aacaattcaagtaaatcctgtagctattaccacttaaaatccgtagctcaagattccgtgtttcaccaccttatacacttaagcaattatacttaagcctttttttagtcctaagtgaagaactacatcagaatcaggataagtattttgcctgggaaatttggctgcatatgaatggagaagacatttacatcctatgttctggcactttctgaaagatctaattaaacatgttgatgtgccaatttaatcaagatgagagatccctgctggtgtcaccctctagaacctgcacttggtgttttgactttccagaagaaaaaaatgcaactttggttagggggcagtggttggatcacacagttgtctttcgtttcctaccacagtaattcatatttaaatatgcttttagattagtgtggatactattgctgctgtgttgctacctgacctttttctggggggggtacctcagaaatgagcatttgagggcaagcgaaaaagccctcttcatcctccagaggcaacaaagaggcagcagaaatggggaaagattgtgagaggcagggcttgggtctagacctggacttaggcaagatatgttgccctcaaccctgagttttcttatatgtaaaaagggaaggttgggctggactagatgaggtcaagatttgccattctgggaggctgatattccagagaatcaaaattaatcctaaaccaaagctttatggctgctacagagacatgtcacatttctgagacttgtcaccaagagtttgccctcagactttggcgctgttgaatgcaaagacaaggatggcaccttctggttcttgcctgttgtcctcagctgagagcagtctcggtaaaggtggcaaagattctgtgacctcagaccggggaccaaatgcttgggagtctgatggccgggctgggccaccattctcatagctctcattctgtttggagcaaccaaaggatttgtgtgaagttatttggaaaaggaccttaactgagcagtaatcttttttctgtatatttggaatgtttttcattctgacctgttctgtcagtgattctactgaaaaacaatttaatcaatataaaaatgttcaagctatgcaacactgttattgtctgttgacatttttattctaattgatttctgcaaatctttaaaa

SEQ ID NO: 58258 - DNA, 479 bp, Homo sapiens; identical to SEQ ID NO: 15488

SEQ ID NO: 58259 - DNA, 1630 bp, Homo sapiens
ttttttttttttttttgtggtataaatttttattttaaaaagtgttaaaaaatgccttgccctcttgcctttgaacattaattattcaacctctttggaatctaagagatttgataacaccatttggatggtggtacaaggagcaaacagaactcacccaggcccctccagcaaagcctggagcctccctccattctcccttttgggctgtaggagccaaggctgcgtggtggccaagtagtaaccggacaggtgcagacaggagagccgaggctcattactttacagcagtgctcttctcaaccggggcaattttcccctttccttggaccatttgacaatgtttagagactattgtcacaactggggcggggggctggggagaacagtgcccctggcatacttagtaggtggggcagggatgctactaaacatcctacaaggaacaggacagtccccacaacagaattacccagcccgagatgccgacagtggcaaggctgagacagcctgctctgcagccccatttcaggggtgtgtatgtgtctgctagagttgaggggattcacaatcagaatcaacaacactgttatcagcccaagacaccagaatctgttccgacagccagattgaccatcaccacacccttctcgccctccctctggggagagctaagcacacagccttccttgtcggtttagcaaaatgccagtggacactgagcggcctacccagcttcagtcttctattctagttctttcatccacccccaggtttcaggtgggctttgaaaggctgggtgctagaggcacaattaccacactcagaagctgtcctttttcactctggcacacagaaaaaatatgaaaatactttcacagtacacagagtaaaccgaggaagccactcaacagtatcagccctgaggttctggtctcacccaggggtagagatcagcatttcctgttccctctccagggcactcaggctgggtgaaggtaccagaatgccaggaaataactttaaaagtcaatcaagaatttttgttgtagtcacggttagtaccaattccttgcaacaactgcctgggaaattctgatgtttcccccctccttggtacccctttaaatccattcagttaatttgaagactcaatataaattcaattcattaaaaaataatcgataatttaatgggctgaagactgcacgtggttcttagagcctacagtggctgacagagtattgggtattaacgttaacggatcctgtgatgtggcggtgagctgcagctgtgatccacgaagtctctgaacagggcttagaatctgactgcactttgtttttaacaggagcctacgtgaagaagagagcacacaattttaaaagttgattttatattctctgagtttttcttcttgcttcaacaaaactctaggaaatgccataagctgaaagaacatgaccttcctcagacatctcttctctccctttccaaacacaactaggagtcatttttttattggtgctatgccattaagaggtcttcctgcttacgctttcctccagagcggattgttggctggggcgcagtggctcagtgcctgatatcccagcactttggaaggccg

SEQ ID NO: 58260 - DNA, 2299 bp, Homo sapiens
ggtctctggacttgtgcgatggggacacgggggagccacgctacaccctccacgtggtggacagccccactgtgaaaccatcgcgggacaatcattttgcgattttcatcatccctcagggccgggagaccgagtggctctttggcatggatgagggccggaaacagctggcggccagtgctggcttcaggaggttgattacagtggcccttcaccgaggtcagcagtatgaaagcatggaccacatccaagctgagctgtcagctagagtcatggagctggccccagctgggatgcccacccagcagcaggtcccctttctgtctgtgggtggggacattggggtccggaccgttcagcaccaagactgcagccccttgagcggtgactatgtcattgaggatgtgcaaggggatgacaagcgatacttccgtcgactgatcttcctcagcaacaggaatgtggtgcagtccgaagccaggttgctgaaggatgtgtctcacaaagcccagaagaagcggaaaaaggacaggaagaagcagcgggcctgctgaatgcggaggacctccctgcagcccccggggcagtccattgataagagttacctgtgttgtggaacaccacaaagccatgatcgctgggcctttgccctggttgaggaaacccagagctactcctagaagattcccacttggcattggttgggtggtaggccttggggcggggggggcaagccttcccccttcttttggtccacgatcaatttttccaaaagtccttgcatttgaatgctgttggaagatcgattccctccatgttggaagtggccacccagtggtttggcttctcccagagtgaccgaatgaaggtccacattgcagatggcctggactatatcgccagcttggcaggaggaggagaagcacggccttgctacgatgtcataatgtttgatgttgacagtaaggacccaacactgggaatgagttgtccgcccccagcatttgtggagcaatcttttctacagaaggttaaaagcatcttgactcctgaagggtgtttttattctcaaccttgtgtgccgagacttggggctaaaagactcagtgctggctgggctcaaggcagtgttccccctcctatatgtccggcgaattgagggtgaagtgaatgagatcctgttctgtcagctgcaccctgagcaaaaacttgccacaccagagctcctagaaacagcccaggctttggagcggaccctgaggaagcctgggaggggttgggatgacacgtatgtcttgtcagatatgctcaagacggtgaaaattgtgtgactgcttaggccaagcagccctcctgcctagactgaccttggactcccagcctgccagagaatgaagaaatacaacgcacagtacttttgaagcttcgtatttttcttggtttcacactcagctacatgtgacctccagcttggtgaggttgcctgaagattagggaaaataaaaatgtccttcccatcttgtcctcttcagtaccacttgggttggtttgtctttgcttcctacaccacgtccttgagtggagttccctgctgaagcccctagcacacactgcatgccttaacaagtgtgtgcaagcccctcagaactcaagacatccaaattttattgcgtctctacttatactggtttgcttttgatttattcctctattagttctataggagtgatctcaagtgagataggcagagcaaggatgccaaaagaccataaatagagtaaggtttctatagatgtgagacagatttgagagagcatttactctgtctccctgtggatgaaactgctgctgaaatggttccaatttttaggaatctgcttacccacttcattatttgacagctttccttggtgacccaaaccttgtagcctaagccatttgtctttttctcagtggagggagtgtatggacctggccccatggctttgcatgttagagacctggcagactaaagtctctagtgtttgtttgctcacatttgctgagtgacagctatgtgccagactgcataaagggtggtggcagaagtgaaaatgtttaagaatgaccaaaaacattagtaatgaaagttaatgtgttccaggcattcttctaagtggtttacatgcactgtctcatttaatctgagataaaggatacttaagcccaaactatatctaaacccaaatctcacttggctggaaacatcaatcttaaccatttattcagaaccattaaaccaatgattccaaaaaaaaaa

SEQ ID NO: 58261 - DNA, 863 bp, Homo sapiens
agctcttctctcccagtaaagaagcagagctgactttccgccagcatctgaactccatcagtgtgagtgtgtggggccgggccgcccgcgtgcgagcgtccccgtggtctggagagctcaccttcaggtgccggacgctgctcccttacagatgcagtcggatttcttcctgccaaagccccggaagcctgcggaaccggcacctgcggaagcccactggtggttccaggtcagggtcttctcaagtctgaacgtgtggcctcgtggctgggccaacccagggacacagggcttcttccctctctcacattttcatggtgtaaaatgtgggaaattcctgccccttccttccctcttgtgagtagggtaaaaatacaagtaataacagtgaacttaatggtacccagaagtaaaggtaatctttcaataacatggaaatccacttgcaaaaaagacaattatagggattcaagtccaaagaatgtcccagattgggatgtatttatggaatctcaacacctatttataaacatttagtctgtgggagcagttgccagggcatgtgggtcagccagagcccaggcctctcatgagctccccaggagtccccgaggatgccgtatgcaagcctgggggacagccagggactcagaggcacctcagaagaagagcttggcattctgacgcataaaaatacagaaagtgaggtgggaagtctgaggtaattatggcctcagaaatgtatggatgtgtgttattttggattcatgcacaggtttccttttgttagactcttagaaatctctttctcccttgagattagtatatttacaaatgagacattgcatgaacggtcttaggaa

SEQ ID NO: 58262 - DNA, 352 bp, Homo sapiens; identical to SEQ ID NO: 15494
  misc_feature (1)...(352): n = a,t,c or g

SEQ ID NO: 58263 - DNA, 1046 bp, Homo sapiens
cgattcaaacagtgtgaaggaggaagcaactaattatctccctctcctgatttttcataattttattaaatcatcactgggtaaactaatggtttgcgtatcacacaattacactacaatctgataggagtggtaaaaccagcccaatggaatccaggtaaagtacaaaaacgccaccttttattgtcctgtcttatttctcgggaaggagggttctactttacacatttcatgagccagcagtggacttgagttacaatgtgtaggttccttgtggttatagctgcagaagaagccatcaaattcttgaggacttgacatctctcggaaagaagcaaactagtagactgatgagctggattgcttagattgataacatttacaaataggagtccagttgacatgctattaatgttgaaataaccatgcctgtactggtcagtgagttcggtcagctggttggaataccagttccagagctttaggcgacacatttgaattgagttatcattgtagagagtcatggctccatcagctatggttatcttctttggtctgaatgcctatcagtccttaccagctgtagcagccactgcttggtaaaactttgccacgaagtctggctcactgaactccagctgtctgacaaattcattgcgctcctgctcagcccagcctcgaaaccactgatcccaaagatgtagctggcactcaaagatagaaggtggtcggtctgccccagacacactaagctgctccagactatcccagcagtggttgtaatttttctggcactgccttagcctacccaggtcctctaggaaacgttcacggctggggacctgaccaattggcaaaccagtgaagaatacacttcatctccctgggaggtgatgtaagacatcagaggaggggaagggttagtattgtgtggtactgagggtaagagagatgggaaggatagtggcattgaagaggatgactccagtggcatcctccccttttctctcgaagggcacccgaagattgtcacgagtccttagacc

SEQ ID NO: 58264 - DNA, 862 bp, Homo sapiens
ttttttgcattgacatttttttatatttggtatttgtaagtctttaaaaaaatgttttcaggccattttttccttaaaaaaaaaaaaaagcaaccaacagcaatactctgtacaagtataacaaacattagaaatatgcatcattccaaaatagttacaggaaaattacagtttagagtccacatcaacacatcctatttgtatgtgcccccaagggagaaaaagctacagtatgttaaacacacagctgctacacagtagtctgaaaacccaggacttaaaacttttgaggcaaatcaacaacagtcaccaagacttgtttagctcaataagtacaatcaagcatttcaaaagagaaccaggctttttcatcccagatgaaaaacacacgtgatgggctgcatagctgacccccgcccctcgatccccaacccccgggagcctctgactcaacagagcacaaatccagtggagtcaattaggcggaagtctggctggaggtcacagtatggctgcagtgggcagacaccaaatgtcatttcctgctggtgctgatcatcactagatccaactttggaggcaaaaagtcgttgttcctgggagatgctatcaatggcccaaatcccccaaaccagctggccaccagtctttggccctttcattgacacccaaacccataccagctgcttttctgtatgcaattgtcaaagactgaacaggggcgctcacaccatccccccgattccactggactcttccaatttgagctcattgttcctgggaggggttgaagctcagaggcaccctcctcttgcctctgaccaacccccagcctgtgtgtcctttatatttacacattaac

SEQ ID NO: 58265 - DNA, 3499 bp, Homo sapiens
tttttttttttttttttttattgaaacttactttttattattttttccagttacccagcatgccacaatctgattgctgacctggatggaacagagtgaaataaatgatttacaaagagatatttacattcatctggtttagacttaatatgccacaacgcaccacgaccttcccagggtgacaccgcctcagcctgcagtggggctggtcctcatcaacgcgggcgctgtccccgcacgcagtcgggctggagctggagtctgactctagctgagcagagctcctggtgtatgttttcagaaatggcttgaagttatgtgtttaaatctgctcattcgtatgctaggttatacatatgattttcaataaatgaactttttaaagacttgagttgtaatgtttcctttttatcttgtagtgatgaacaaaacacaccaaaaaggcacatattttaactaggccaaagtatattaaggaccaaactttttttcctgccattcatttttcttttcatgatctatatatcaatcatccttcacctttaatcaatgtcccatcagactccattttatttatttatcgtcctactttgtgcacaatcaatcaatcaggagacaccaggaagcactatgcattactctttccattctgttaaacaacgaaaacagacaaaaaagcatctttggctcggtggtgtcagatttttttcttcaatacgcagtatttgagaggagcctaaaaacgtacttagtgaaattagaaaatttacttagagtatatcaaatatctgtacacagataattatttgtcctaaaatagtatttctactatacacaattaagccctcaaatgctttaaagtaataaaaacggacactggacataccgtgttgtatctgagaatgacaaacactaaaggcaaggctgcagttagttaggacaggtccctgaccttcggctgccctgcctggccagcgagccatcatcctcatcaccatctcaacacagagctgatgtcaccatatgcctcagccttgcctctcagaagtgatgtggattaggcctttggaggcggtggcatgatctacacacagagaccatttgaatctcttgagcatgtaaaaggttcaagcctgaaacagtagaacttctattcagattcagaagttttttatttcatcaaatgtgctagacataaaggctgtcacataagatattttaattgtccttaattctgttttagatatactgtgaataaattatacaatattctaaaaatagcacctttaaagaattatagaggtcacttttttttagcctcctggatctgtcaaccccagtggttttgagagaagagcacatgtgagaatgccctcaaatttggccgtgtgacatacacatacatgcttgactcactctggtcccaaaagccattcctctgtctggcttcgtcacaggagcaaagcccaagtttctacaatagtagctttatgaggtaaaatcagaaaaaggccccatccagaatgattcaacgtgaagtcagactgcagtccagccatcctacccatctacatcacccacgtctaagtttgttaatttgccatgacatgttgttagaaatacactctaagaaaggaaatatgcagagcagtacattatcaggaagacgttaatgaaaagctacattccttccagattctgggtccaaaccgtgtgttgtatagatgattcgggtctgaatgtccccagggtctgagacctccttcatccctggcttcacagtacatccatcctaaatccagtgctgagaggtcagcgtttcccctcagaagcagccgttcatcaaagtttgcataaccgcactactgccatttcactgaagtaaaaatgatcccctatgtgtgtgtgtgtgagctacaaggaattattatttctatattttcctgtcacattttatacaaggtaggttaataccagctggggctattaaaaatcatgttttcattaaagaagatttaatttggggggattatagaaccacatccaacaacaataaacagagaagtagcagattgacatagtgctttatttaagctgtctgtacgaaggaaaatcatgttcatccctatcatatacgtgtaaaaatactaaggatgtacagtgtacaaaaacagtttctcctagttattccacatccttgtgggtcatatacttcaggaaatagacaggtttagtatgaccaacagtaatagtaatacagtttcttgggtttatagttgcatctgcttaaaatccttaaccagatgactagatcttgcgcagatctaatgaaagaactagcaaggtcaagaaatgtcacaaactataaagctacagggaggtaattcaattaccaatttagaggttttctttttatttaaataaatactttacatttcatgcttgcctgtaatgcactaccaggagcaagataaggaaattctactgtagacagtacaaacagtagcagcaaagtgtgtatgttgaggtgtaatagagagaccctgcagttagtaaggaaggcccttacttttgtactctaggagaagcaagtggcccctgcaagaacagtcagcttttaagaagctggaaatcagggatgggaaatggaaaacaatacttgaataatgctatgtaattagtgtagaaagcaaagctgagcgcgaccctgccaaccatctaagcagaaatggccaatttcctccaagatggctgcattatgacaagaagtcaagcttcatgacagttagtatgggctggagtctgcaaagtctgaactgtattctcatagaatgattccaggtttcagggtgttccacctgccagaacccaaaactacaactatgggcgacacaagggaagttttagaaatctccctctacacgcatttctggttttctattattcctccatggcagctgacagatctggaagtgaaaataggggattctcaaaatcaaagccaagaagacaccttgtgtgacaccaatggagtctcagagggtggaatagaagtgactgagccccaggcatggctgggaactgagagccagtgtgaggagtggcccgcctggggcaatgtcagtgccagtcattaatctttaagaagtgtccttggccaaggtcatgggaatcactttaagatttgcgggagaaaaaaccaaaacaacaaaaagctgtgtgcttagtgttcggtgtcatgctttccctctagaggagtaagtgctctgaacatcagccagtctcagctttctgctcttcctctcacctgtttctttcttatataatggatgcaagacaacttaaagaacataccttctagtctacttttttgtcaaaatgaaacattcaacataattccaagtgaaaaaaaaaagattagctatgtgtgtaagtaagaatgaactaccatttactgtaacttcctactcaatactaaggatgaacttcactcaggtag

SEQ ID NO: 58266 - DNA, 1166 bp, Homo sapiens
  misc_feature (1)...(1166): n = a,t,c or g
ttttttttttttttttttgagctgtcaagagaactttattcattggaaactgggccagagacccctcacgaagctgcaagcccctgggccctgggcccttctgtatttggaccctagtgaaatgtgcacagtctgccctctccatgccagggagagacagagaggaatgccatttttctgtgtgatgtgggagtgacaggggaaagagcagaaatccggttatccctcctgagactcccagtgagctggggtgccacagggcacgtggccccaaagtcaggtgcagatgcatcccccatcccaggggtaaactcctgagactggcttttggatcaggttgggagggagcctcatcagacgatcacaggcagaggtggctctgagggcacccgagagatactaaccccaacgcctaccagggcacaggggctctggctgaacacaaaggtttaagatcatccgaaggcccctgagttgccaaaacacccaaatgacactgatgtgttgtggccgcaaaagctggggaggaaatgtgaaggaggcaggaaaaggacctatagatctccaacagaaaaaccagaagcagacaggggtaaccccagaggcatctgggtgggccctgggcaggctggaggagagcccacagcaaatagtctcagggcccttgcatagtgacatactcaccaccctcagcatcgaagggacccactgggtaaagagaagccatgttatcctgcccccacccagatcatagtcttccaactcaatgtcctggatgtatggcaggatggccacaggggtaggaggggattcagaccaggacccggagatgaggtgttaatgctgtcctagcgtgagtgcctgcgtggagcatggaggggtgggcaggcagggaaggaggcttcagaggtagacattgagggtctgcaggatgccccggcggcagagcgggcaattgcggtggtagacggggtggcgcatcaggatttcagtgcaggcctggcacaggcacagatgccggcagggcaggagcaacactgtcttgctctggtcctggcagatgacacacttcttccgctcctcttgctccttcagcaatttccaagggtcttgcccacctggaggctcctcctcattgagcctctctcggcccctnacaggtgtcg

SEQ ID NO: 58267 - DNA, 6423 bp, Homo sapiens
cggtctgaaagcgacatccgctatctgcttggctatgtcagccagcagggagggcagcgctccacgcccctcatcatcgcagcccgcaatggacacgcaaaggtggtacgcttgctcttagaacattaccgggtgcagactcagcagactggcaccgtccgcttcgacgggtatgtcattgatggtgccactgctctttggtgtgcagctggagcaggacattttgaagttgttaaacttctagtcagccatggagccaacgtgaaccataccacagtaactaattcaacccccctgcgggcagcatgctttgatggcagactggacattgtgaaatacttggttgaaaataatgccaacatcagcattgccaacaaatatgacaacacctgcctaatgattgcggcatataagggacacactgatgtggtcagataccttttagaacaacgtgctgatcccaatgccaaagcacattgtggagccacagcattgcactttgcagctgaagctgggcacatagatattgtgaaagagctgataaaatggcgtgctgctatagtagtgaatggccatgggatgacgccattgaaagtagctgccgaaagctgtaaagctgatgtcgtagaactgttactctctcatgctgattgcgaccgaagaagtcggattgaagctttggaactcttgggtgcctcctttgcaaatgaccgtgagaactatgacatcataaagacataccactatctatatttagccatgttagagaggttccaagatggtgataacattctcgaaaaagaggttcttccaccaatccatgcttatgggaatagaactgaatgtagaaatcctcaggaactggagtccattcggcaagacagagatgctcttcatatggaaggccttatagttcgggaacggattttaggtgctgacaatattgatgtttctcatcccatcatttacagaggagctgtttatgcggataatatggaatttgagcagtgtatcaagttgtggcttcatgccctgcacctcagacaaaaaggtaacaggaacacccacaaggatcttcttcgatttgctcaagttttctcacaaatgatacatttgaatgaaactgtgaaggccccagacatagaatgtgttttgagatgcagtgttttggaaatagaacaaagtatgaacagagtgaaaaatatttcagatgctgatgtccacaatgctatggacaattatgaatgtaatctctatacctttctgtatttagtgtgcatctctaccaaaacacagtgcagcgaagaagatcagtgcaaaattaacaagcagatctacaacctgattcaccttgatcccagaactcgtgaaggtttcaccttgctgcatctggctgtcaactccaatactccagttgatgatttccacaccaatgacgtctgcagctttccaaatgcacttgtcacaaagctcctgctggactgtggtgctgaggtgaatgccgtggacaatgagggaaacagtgcccttcatattatcgttcagtacaacaggcccatcagtgattttttgaccttgcactccatcatcattagcctagttgaagccggagctcacactgacatgacgaataaacagaataagactccgctagacaaaagtacaactggggtatctgaaatactgcttaaaactcaaatgaagatgagtctcaagtgcctggctgcccgagcagttcgggctaatgacattaactaccaagaccagatccccagaactcttgaagagtttgttggatttcattaagtgactggatatgtaaagtcgtttaatgtggtgctaaaaagtaaaggacttttaatcacagacagtagaattatgtgttcataaattctgcttttctttccactacccttcctcccatcccatccttccttagttctgtatttgtttttcttgcctcatggtaattgatttcagacagactttaacaaaaccacattgttttggtgtaactataaggtatttgcatattggttacctatttgtctttcttttttttaaaggaacagatataaaatgttttgtttatgtaacaagggacatttataatttcaagttgataatgttttaaacagctgcttacaaaagtatttctgttaagcctatgtcagcatgttatccatgcagcagttttgaggattttatgaagaaaaagagctaaaaaggaacattaagaggaatgggatatccaggtgttctgcacatgccaaactgctgtagatagtttacactcttccattatttatacggagtgatgcagcacattttagcattcaggaggatttttaaaaaatagctgcagattaatctggaaaatgtgctaatttaataatagttacaaatttataaatttaaatccatttgaaattgttgcattatgctgggtagtatatacaaaatggttatcatcttaaaccaacttttcagagaatcttgatggactctgcctttaggcttgaattcttcaaagtctattttaatgaaatttatctaaattgcagcagtctatttgattcagctcatagacatgtaaaaattatgaatgctgttttcttatgaaacaaattgtcacagtgtagttatacattctatttttgtccccttttccctttttctcctgtatcttttaaaatttggaaactacttttccagaaggcattatttatgcctccctaataaggtattttacttatgacagatgaaaaggaaccaggatatgtttgaattttttcactttcttagtctgtgacaagaagtagaaatatcactagtgtggtataggaacttacatgttttttatgatgaaaataattctcaatgccacttgaaaggtaattgtgtctgagagctgcaaatttttcaaccacaaaatgtcacttattcctacaggctatacagaggtctttatggtttttttgttttgttttaatggcaacattgtaactgtcaaactaaaagggtattctgtgattatcttttaagcattacagaaattcaagtgaaagttatatgcttatttctattgatgttaaaaatgataatgaaagcaaaattagctgtatctgtaattttctctctagtgccaaatgaatgccttagctactcatagtgcatggtactgtaagtgaagacctgtagctttttttttttctttaatgaaaagcattataatgatgtagcagcatcagatataaacttaaaaaaaaaggtttcaattaacattttatatatggataatgctttgtaaagtgtaagagaaaggttgcagttggatcagtataaaacaatgaccaagccaaaatcagcaccctagggccttaaataaaatagagataccccacaaaatgaaatattttgaaggatgggaggggacagaaggggggactatcccccaaggatgcaagatactttttacagttgctatcattatactttgtcttcttgcttcagttaggaaggttttgatggtaaattctgtcatggtaatagatacctattttcctaacctgagattttacaaggaaggtttttaggttggcttaaatggaggtatttatttgagtgagccctaatttgaaaattaccagacttgatcctcctggtatgaatcaaggaaatactgtaccttgctcttagcaactctcagtggcctgaaagagaaaatgcacttcttcaaggtgagtgaatcatgctttttccacagttcagatcagaccctttatttttcaaactacaaggcctgcttattggacagtctaaggaatagctttgatacttggtattcagttggttccattattaatgtatattatttttatttaaacatcaaaacttaaaatatcagataatgttgcatgttttaaaaacacatttcatccctttggctacccaggaccagcactatttaagacactgcttatttataaaatgagaataatgattatatgtacatattcagacatcaaaatttaatgacattctattttgagaagggaagacaatgctgaagaaagtaaaactgttgattgaaatgctgacagggtggagaacgaatttgaagacagtggaataaactatgaactatgctaatggtaattagattttttgtttgtttagtatagtggtaaattgtgtagtatcttgctgagaatctaattctatcttgtaaaatcaatccaaatgtgtattgtgaaacacctgtataaaatcatttttgaaataagtgatctacatgcctgtttttttaaaatgtttttggtagaattgtttgaaaatatgtttagccagacccttccccaacttaatttttttttaaaaaaggaaaataggtaagaaaatgatagttctatatctcagccctctgtgaactctaggctgtctccattttgcagccactttggtcatttgatgtttactattggtatacttatgctttgaattgtaaatcttcattgatggtattacagattcaaccaaaacttctctgtcctgttcagtaattgttatataaatctggatgagctagggaggcccaggtggatgttttcattcgcaaatcatgagaaacttaagtgggttttatgcacttgatagagttggcaaaattgaactatgaagttaactatttaactcaaggaatgggcggcaaacccatcccctcgattgataaagaaggggaacatttttacattagaactgacactgaaaacatagctttttcagtccaccctggttgctctagtagcccacagcccaatcacgttaaggttctttgctgtgggaattttaaataaaccaaaccccaaagcagaccatctgtaagctttggtctgcttgtttctgagaagggttttatttcattatactaatagtggactaataattggtaattgtgagaacttaggtatgataacattgtttgaagtaaaatatgatttgggggcagcagctttctaaataccaactctgtttgacaaatgttttgaaaattaaaatttcaagtgagcaacaccctgttaagagttttcactatagttgaggcagctactttatgaataagaccactttgggttatttaagcagaagcgtttcttttttttttttggaatggggtgggatgaggagtgagttgccagacctttgattagtttgctggtttagaaacagccagtggctgaaattagtgagtaaatgaatgaaagtataaaggacttgttttttatgatagattttctgtaagaatcttaaatgttccttttcaaattagatgtgttgatgcacacatgactattctgtttttctcactgactatataacattaaaaaggggttaaagaaaacaaaactctgccttttgtgctatgaaatatttttagtccagaggttttaagctgtgtgtccattcctactctgaaaatgcatagctttgttctggatgtcatctcttgaaagtagaaaactcctatgtgtttatcacattgcagggctttcttatgtatttctggcagacttgcccaaatctttagatgggctgggttatacagcatgccctcccccaaataagggatctgaaataaatactacactattgatagtggagatatattaatttttaaaactgtaaagtaaatgtggtctctaggtttgtggtgtgtacctttgtgttaatgtgtagggaagagacagtgacttgatggttatggggagtgtatcttgatgtgtgtataggggtaagtattgctaaattatttacagcttttattcagggtgagtcatgtgatgaatggcctaatcagaaaagtgaaggagcgaagatgcaagcttgccaaatgatgaaatgaacaagattttgtatctattttttatcaggtgttgtaaaatttgtgcatggctttttgttgttgttgcttagtaactggtagaggagaaaagatgaggaaagaaactcagctttcctcacagtcttttcaaaggtacacagttggggagtaaaatctgactggcctaatcgatggaaaagaccctgtccttttcaccccatcctgcaatcctccgtgcagaggaactacactgttgtattctagtaattcactgtgatttataacaaaccggtgatgtcattctattgtgcacttttgtcaaaccatttatgtgactttaataaacatagtaaacttgctgactgcaccagaggtccattagtgatttatatattgcatgacattttctatttgagtttgacatgtagagtcatttttagtttcatggcaattgacagtcctaataactcagctaatttgaaactaacaatcttgctgtgtaaaaggaaaaaatggtgtttgtgttcagtaaatgtttgaaa

SEQ ID NO: 58268 - DNA, 1102 bp, Homo sapiens
  misc_feature (1)...(1102): n = a,t,c or g
ttttttttttttagacatatccccaattttattccctttgtccaacattccgagagggaaggggcaaatgagtcaatgttgcccctcaaaaccatcaagtaggggcctttgggggtcttcagttgatcaaccagggtgatagacccctaccccttcctcatggtcctggcttgtcacaattaatgggggaaagttttccagaaggggattccgggcttctcaccgctcatcagggcaccttcccaaaacgttctcagcaaaaagtctgcacttctcagagttaaatacaggagaggggagactccttgaggagccagaagtgggtatgttctcaggggtcaagagaagggcgtctcaggctctccctgtccaccgggggtcgtcctggctccccgtaccttcgggcaagtagctcttggcttgacactgtccagcccgccagcgtcccaggccgccccaagccctcatgggggaggagcaccgacctgtctccaagcatcggaaaaggcgggcctcccttgccgtccatcacggggctctctaggccccctgcgtcgccaaggaggagtctctgacatccccaattcgtcaagctagtctcttaagacctctcaccttaggcgggttccccagtccccccatgcagtcaggcgagcctcctggctccaccacgccatcgagcgagttcggctcttcgcctgtcaccgtccgtcggggcgggtctccggtgcccccgtgctgtcgtgggggttccttggactgtcgccgtcgtcaggctgggaacccatcgctgccaggctccccggtcggggcccgcgggcgtacgaaggcgcccatggcggtggcgtggcccgagcgtagcagctgcacgcttgcgcgcccgcggcggtacaggtactcgatgcgcagcacgtcggaccgcggcaggcccgcatgctgccggaactctgcccgcatcatcgcctcggcgcccggcttcccacgcccggcgcgcagcagatcgcggtacaggctcagaacctgcctcctgntccactgtgccggctcatgaccgcggctaagcagagacgctcagcgaacgacctgcgaaccgggagccgcc

SEQ ID NO: 58269 - DNA, 2406 bp, Homo sapiens
  misc_feature (1)...(2406): n = a,t,c or g
ttttttttttagaattatttgattttattaaaaaagaatcattgtctacaaactgttttctaacaatgcaaatacagtaagcaagtcatctgcaatatcaaaatattgtttgtaaatcactgatggcaccaacgatttgaggaatttccaataggacacatattgagaaaaagcaacagattataggcattaaccaaattttaagatcagaaaattataaaaatcattaagtttaaattatccaattttcaatagcttaaatccaatcatcaggaattcagaagcacccaatatgtttgaagttgcacaaatgcatatggatgataggaaagtaatccccatgcaatatcttaagtgttgctatcagatatatttaagtgctactttacagattaagctgggtaaaatcaaaatatattttacttcccattagattttaaaacaatcacaataatttatcaacagttgccatttcacagcaattagaaaagaggagttgatacaagttgaacagaaaggtatcttttcttcttttaggaaataaacatatatatatatgtatatatatttcacatacacacataacattatctttaaaattccaagtggttacttttgtattataaaaaaattatctccctatggtcaaaatactgaaaaagcgcaaaggctgaaaaaagaaaaccacatttgccactttaaaaaaatacattattgtctcagtggttctatttatttaattgattataaagtattatgactcctagtactgtactggacctgatggaattaaatacacccctttctcagtctccagaaaggatactcctaacccaccctaaaatatgataaaataaatgcccctattctgaactgttaaactgggaaataaaccatgcccacctggaaacaatataagtcataaaagtttacataatgtctattgctgcttttgtggtaaaatggcagggttgactagctgtgacagagaccgtatgggctgcaaagcctaaaatatttactctctggcccttccacagaaagtttactgacctcctgatctagttcaccaagtactgctctagttacctaaaagagttaatgcacctcaagaagatttgagcatgtggtgcaagaataacttgcatactgggtttgttcattagcatgtaatgtcaaaccacaccttgaagtggtgctttattttgggcgaggaaataatttgtatacactttcaggaaatacctataaaagtcaatttgaaaaaaggaaagaaaaaagccaaatttaaaaaaagcctgcctatgttcttttaatatttttatattattgtgaggaaagggtgctaagatgattgttctgtcattcttttagtttttctttagtttataaatgtttcttttgtttataaatgttttctcataagaagtgttccctcatgccctcccataacctttaaggcaatctacctaaaatgcttacagtatggtgaagccttattcagaaatatttacttaaaccataggtatagaatagctaccatttctgaataataatgtaaaatgaaaacagaaacagctttcaaatttgaagagaaaagtttcccctgaccctagtcagctaacaaagcctatttctaacagtgaacttcctgaactcaagcagctgctcatgaagctttaagagttcacaggcatttcatatttcaatagttgttgaaacatggaagataaaacactgagaggatatttatcaaacacaaatttatatcaagattaactttttcaaccagcttacaagcagacttttccctttctttgttaaaaaatgaatggtatgaaactatatgttaaagatgtttctataataccttacatttacatagcgctttacaattttcaaagtgctttcacatgccatnnnnnnnnnnnnnnnnnnnnnnnnnnnnnnnnnnnnnnagcaggtattattatcctcatttcannnnnnnnnnnnnnnnnnnnnnnnnnnnnnnnnnnnnnnnnnnnnnnnnnnnnnnngtaagtgctagagctaggacctgaaatcaagttttttgactccttgtccagtactcattccactgtaattactgcctcaagttatgaataatgaactgtgtatcaaaattgaaagcttactgaagttcatttcagtgatgtcttaacagtaaagttaaatgagaaatacaagaacagtaggtctgatggttttacttgacataaaattggtgcaaaaccacttttgtctaattacttgtaaccttttggtccaaatacataaaatatgcaatatttacagcattttccttgttttgtaaatgcaatgctttaaaacacattataaagcaccttagtaaaaatagtctacaggtaaaagtacagagaa

SEQ ID NO: 58270 - DNA, 365 bp, Homo sapiens
gctagtttgcagagtaattgggcattgccagttacacaggcttttgatttttgtttggtcccatagttcatatgggaccaaacagaactgccattcactcagggtacttatgggaggattcagtgcatctatatgtatgagaacataatcataatttaaacatccgctgtaaacttttttcctggcatgtgttcccactgtaggacaatccaagttaaatttatagaacttgactctgaagatttagatttaaatctggtatgtttattgatactgttgcataattgatttgtaaaaactagaagtcagggttttcttaaaacagaaaaaaaagccttgtctgatttctaaagctgttatccttt

SEQ ID NO: 58271 - DNA, 6342 bp, Homo sapiens
  misc_feature (1)...(6342): n = a,t,c or g
tgtcttatccgtgagtgggaagtggtaagctggtgatggtcccatatttgctatgacaggaacacagaggtggcagcttaggaagctggggccacatctcacaaggcaggacctggatgcactgaatccccctttgctccagcaactcagccagacatttaggcaggagcactaatgaccctttccatccacacagagggtatggaacaggagcccctgttgttcccttgcctgtggtctcttaagccagtcatacctatcccaacgccgtctccccctcaggtgtgtagaagggaagatgaatacacagagtcttttgaatctctatcaaatgtggtttttttattcaacaactgacaagcacttttctacagctgcacttgtggaacatcacatggcaaaaacaggagttttttcgctagactttttttttctttttaaccttattaaaaatgagattggtcctaaaaatatagaaagaaataaatttaaattcacaaaaaactgtacattatcaaaaagtcactaaaacaccacatttggttatataaaaagtcccttttgctgtaaaaggaacacagaaacttgttggtgttgatggtgtggtttcttcctgtcaaccagactgatgggagggaagcaaaagggcagggggtgggttgtctttttattttaaacctgctttccctaccaaatactcttgtcatgaagagaaaatccacctagctcaagggggcagtgaagatgaggaaagaaaagcaagaaatggcccctttgatcatgccctatccctaccacccccaaccccgctccagcccccacttcttcaaactgaggctaggaccccaccccgccatatgagtgcctggtccctagggaaagagatggagctgggagaggaacacaaagcaggaaccatggagatttcactcccccatccacctcacaatttcactcccccatccacctcacaatgaaattaatctagcacatcttataccaggggaaaattgccagggggaaaaagcagagcccccaactctaacagtttcaactgtctaacacaaagtttgttacagcgcagttatttagataaaatataaatatttatgcataatataaagtcaattcaaatattcttcaatccacctcttaaaagcaaaaaaaaatctcaaataaaattaaaagttttgaggtttatctgacagaaaaggcgactttagaaataggctatgagggagaaggggcataaaggaataaaggggctgccccaggacctacactgcccctacccccttcagtggctcttcagtgctgccagaatacaaggaatgctccacctcacctggcacccccaccccccaatggaacatttcttggatgcctcagctctctgcttgggccagccagcagccacctccccagtgcaagtacccgtaatctctgaagggaggggctctgctgagcaggaaaagcagggggccaagtgcccatggctatagctgggagtcagcagctttcctctcgtgttgggggcttaacttggacatagtcacatgtagggcagtgatggacccagaacccctcctccctactctcctgtgctcccagggtctctgctgctggggaaggggtcctggggtatgaagtaaatgaagaaaagcacaactaaatgggattaggaaatgatccagttctaccactctcccgtagaagcttaagattcaaagctaccgagaagagagggagttcctgctgaaagattgcacagtctgaagaggctggaacaaaaatgaccaggagagagacacagccttgtctccagagaaattgttcctgtggtttcccaaagacaaaaaagtgatggttttaaacaatgggaaaaatgggaatgaaaacaggtacttggggaaactgaatggatcctatcaaacaatacagggtcannnnnnnnnnnnnnnnnnnnnnnnnnnnnnnnnnnnnnnnncgcgcgctctgaggctgacacacacacacacacacacagcgcgctctgaggccgnnnnnnnnnnnnnnnnnnnnnnnnnnnnnnnnnnnnnnnncgctctctctgaggccggccccattgctacctggcctccatcttagggtgcacccaaactcagcaatagttgtccctgaggagttcccaagagggtttgggaaggaggtggggaaggaggctggaaggcccaggaagcctccctgccctctccccagctactgagtttcagaaaaggctggaaactcagcatgtgaggagcatccaacatcatacaggggatagctatcggcaggaagatggggacagaagacagggacctctgaacatttttttttcctttgaagggaaaagatttgggagaagagaaaaggagggaggaacccgtacacgatagttttacattattggatgagagaaaatctgaaaactggggggtgggaggtgggaaaagaaagacagcgagaagcagggaagggactgaacatggaagcagcatgtccagggcccggtgtccggcgcgacacacttgggagttaagtccactttactggccgtcactgcgggtccgcacacagtacagagtgtttcttggtttcacacattcactagaactattgctattgttaaataaccccagaatgctggggcacgtacaggggaggagaggaagcagggaggaggaagtagggacgactttccccctccccatttttaattagcaaataaaacagaaaagaaaaattatttttttctttctttttttggcttttagtccagaaggacctcatctctgcacctcttacttgaggagcaagaggagggaagggagaaagggatgtaggaataagaggatgtggggcactgccaagggcaaggtcaaaaatcagggttgtatctgacttgagtctggacccagggcagcatcagcaggtgaaaatggcaggtttttgtttggaaggtggggggagatgccacaaggtgactccccacctcccttgcctcacagattggcctgttttccctgataaaactcctcccagcggctctcgaagaagcggcgcatgatgtgcccagccttgcctacttcagagtcatcctcgttgaaagtctggcagttgtcaaataccaggagggcatcagccgcaaactcctctgagctggtgtaccctcccctgagcagccgctcccgcatggtggaaaaatccataggatttttgatgatgcgccggtacccactcaccaaacgtgggttcacaggctctaggaaaggccaggctgcatcatgggactccatctccatcaggataatctcgcaaaatgtgagatcactgtggtggttccgcatagagagtcgccgccgcttggagggggagagcccttcttccgagtaccgaggccctgctgctgggctttctcggcccctcaacagtacccggcgtcggcggccatcaccctctgagaagttcagcgaataaccacttttccgcttctggccacgctttgggaaaccaggcttctgagtgaattctccctccacctgctgagccaaacagacagtacagaaccaatctccttctgggacagcctccatcttgggacgatggcagtaaatgtggcagccacggtcacacccatcacaaagcagaagaaactcatcattgtcacccttccggcagactagacatgtcactttgttgacagacttctcccaggcaatggacctctccagctggcccaggcacaagcacacctgggctgcgctccggcaccgctcgagggtctggcgccagacacgaatgcgaggggtgatctcatatgatatctctgtagtggtgccctcaggggcaccattaggtgtgctaagcagggccttctccagcacaacctcatgagttggccagaggggctcccgcaggtaccgccgttctacattctgttccagggcagccagccgcatcacagccaggtccaaagggttggtagttttacgctgaggtgccagtccctccctgccccgacctcgccaggtgatatcctcctgggagtcggagaggtgctcacagtaggccaagtcttcacgggtagagtctgggctaggacatgtccagccccgaatctgcagatcagacatgataacccgctgctccagctcctctacccattgaagcactgctaggtctgtctcgtatgtcttctctttgggggaccagctcataatcccttcttgaaaggcaggtagttgcctgggctcaaagatggggtcagctgagggccgcaggcagacttcctgcaagaagtccctgtgcttgttaaggtgtttgtgaagtgccttctcccggatacctcgggggtgtagggccttgagcatggcatccaacatctcaggatctcgtatccaccaccagcctgagcacatctcaggtgggacaggctgggctgtcagctgggttaggtaacgctgttccatctgtttgaagaacttactgggaggtctccctctccgtttgggctgtcccagccctgtgggactctgtggcatttctccagggtctcctgctcgcctcttaggggccaacccagccaagggcgtggaagagaactgcactggagaacaagggttggcagcactaggtctattcattggcttggaggaggcaagctgctgaggggagggagtgggttggtcctcagaaactgcagggggcggtgtgggggcagcattgcagggcatctgggctgagatgttaaaccagagtgcttgaggatcagggctggattctgcctcatcaggctctggctcctccgggggttgtgatggagctgggtctagttttcccggactgctatcaggtgtgaggactgagctgctcaacagggagctatggctctgagtctggctcagccaagacaggaaggctgactggctgaggtcatgctggctctgacccagtgacaaaggggagccttcttgctccaggaaccccttatgggactgaagctgaagctgaagctgaggctggggctgggcaggagcatgaagctgagcctcaggctgaagctgggcctggggctgttctgaatcctgacccctgacaggggacttaagatgcctaggttgcatagacccgggcttagtttttcgaggtcggcctcgggcccgggcaggagaactggcagtggtgttggagccagctaactccatcttcatagagaagagggcagggttgagtgacgcatgggctgccacttttaaggagtcagtttccttctttatcacctcctcaggaactaagttcccctctgttccttctacaaagataccagccaaatacggcaatacccagtagcgacgtctgtagcggtcctgacccagggagaccgcccgaagcatctgggatgagtgaagcagctttttgcgaaagaaaagctgacgcttgctgagtttttctatctggcgctctagctctgggatgctagatgctgtggcatcaacctctccatctcttcgacccctgcggccagggacagctgctatagactcctcttcttcctcttcttccatgccactggtctcctccatgatccgagaactgcgcctccgtcccaggcattcctctggcccttccatctctacttcagaccgcccagttcgcttggccagaacagttttcagcctccggagccggccttcaacaatccacttgtttttcctgtagctggacatactctccagagtcttgtcaatctcattgatgatgagggtggagccattgagctcatgcacaaggaaggccaggacagcagccttctgctggggtggctgggcctgaaaaggctgggtgcgcaggcggtcacagagggctggctctactccatatgccataaggaagcagcgcaggatctctgacacattgtctcttgtcagtgggatctcagacaccttctcccccaagatctttagggactgacagtaggagggaaagccatgatcatggagtgcagccttcagcagcctgaccagcaggtcttgcacctcacccaagctgtcaccttgacacaggagtccctcctgcaggacccccaggctaggcacatctttggcaggatcaaagcccagcaccttgccaaagctatgcaggaactccacaatggtcaagcagtctgagaaggctccactgggcaatgtcagaccagggactcgtgagaagtcaggcaggggctggtggtcagtcagacacatatcctctgtcggcttcttcatttcctccaagatcatctgctgcctctgccgttcctccaagcgcctctgtgtgtcgacg

SEQ ID NO: 58272 - DNA, 1453 bp, Homo sapiens
ggtcgacaaagccttcaacctgcgcatcagcttcccgccggagtatccgttcaagcctcccatgatcaaattcacaaccaagatctaccaccccaacgtggacgagaacggacagatttgcctgcccatcatcagcagtgagaactggaagccttgcaccaagacttgccaagtcctggaggccctcaatgtgctggtgaatagaccgaatatcagggagcccctgcggatggacctctctgactttaatggcttaagcaagaacatggtttccgtggctccccctggactgaatgctggaggatatatacttcacagtctgaggcctggtcccaggaactggcaatctaacaggatggcaagtggttttgaaacatatagattttcaggatggaagtttgattcttcagattgtgactcatccgtggaaaataaacggtttagcacctaaatctgtatattcccatcagtggcttggctgactcagttgtaaatagggtaccctccatctgtctcccacccatatgctccactgtccccaggccctcagtgcctgagccctagggggattcgagttggctgctggattcattttcctgcaagcaggcctgcaaggtgacctgtctctctaagatggagagctggagaactggcctgtaactgcaaacttaaactcccttggctctggggaatgtaaaagggtgtgggaagggtgcacctgtggccaaggtgaacctgggagtgagtccatacacaacacacacactcatagctcccttccctccaccacacacacacacaaactaatgactaacaacctaagaagggaaaaatgaatggggaatgggccacagggggctctggcctcagtccatgaggtgtgtccgtccgctatgccgaggatccagtgcacagagggtcagaacatgagtttaggagggccggtccactccgaatcggagggtgaaactcttcggcattctttctgaacagctccggattctgtgtcagcaggtcagcgaggtccaatccgcaggggctccctgatattcggtctattcaccagcacattgagggcctccaggacttggcaagtcttggtgcaaggcttccagttctcacgtgctgatgatgggcaggcaaatctgtccgttctcgtccacgttggggtggtagatcttggttgtgaatttgatcatgggaggcttgaacggatactccggcgggaagctgatgccgcaggttgaaggctttcaggtggtagggaggttggtcgggtaggaggagagcgtgccacacccaggacattggcatcatcgctggacaggttccgcaggtatgggggaggcttcttctgaagatcctccagctccttcaccactcgcatgctcgccatcatgtcgggaccgagtgtgtggcacccgtggcctccagcaggaccgagctccgaccc

SEQ ID NO: 58273 - DNA, 1328 bp, Homo sapiens
gacttggagtaaatacattttattcagaacaagataataaaatagcgtgcactttatttaaaaccaaccaagcactgataaaaaatatatatcactgcagctgtgattccacatcaaacctgaacagtaagaattgggcatttattcttcacatcatgtgccaagcctggcagagaaggacatccacctccactagagcctcaaaggaaaagtggcccctaaccaccaagacagggtaccctggtggagaggggcagctggcagctcaccctgctctctgcagaccacgtgaagggaaaggagctgcctgtgttcctcccgggctgcccggggtgggcactggtcagcaactccttctcggtttcaggttgtggagcgatggggagagaagtgcatgcagttgtgcagacaaggaggcgggtcctccctcctctttcagggtctctgaaacccccacagggcatataatgccccagcaaggtcccacttgcaggcacatgccttacaaagcagcagccatcttttgctttgggctgatgggggatcaagattctgagagtgactgctcttttcttgacacaaagcagccacagaacactttcctacatacagtatggcagcaggcaagcagaaggccctgctggctcggattaaggcacttgaaaagagacacaaggtacatccctccctcccctgcagccccccacaggcctcaggggaccctgtttcccccaccctttatcctcaggtccccttacccctgcccctccctactgctgggccaatgaggaggacaggagcgtgccttaaaggaccatggtttggtgggagtacagggtaggaggatgaggaaaacaagaagggagctggagatttggccaaggagcaacttcagaaggacaggagagcacgagcatttaggaggaagccaaggcagcagcatagggaaaccaagttaagtcatgagagaccaacggcagtgatgttttctgccgcagatgcagaagccagagggaggcccctccaaccttccctggtgaggcaggctgggagcagagaaagggttaagagagccaaccccagacagagaacctcagaagacagggccgcaaggacaggcagggggaatggtctttctctgtttctcttggctagtggggctgcggcaaggatcaatgttctgaaggttcagagacagggcaagaaaagggcagggggctggcaggagggctgcatggccccgaagcagctcagctctttggtatgacactggcggtgtgtggggcatccggctcactcctcctccacactgcgggcccccttggccg

SEQ ID NO: 58274 - DNA, 316 bp, Homo sapiens
gcagcgatattattcttcttttatattagccattttataaattctgaaagggaacacatcttattctttgccaattctgaaaactctggccaggttagcttaagaaaataagataataataatacctaagtatctctatatctacagatagggatctacagacaagacaaggtaggtttaggataaagggcaggagccaggtctagggaaaacagtgggtcaggaacaagataggggtagaccaaaggaggacacatataatggagagtgagatcaagaatgaccagatagcaactagaggaacttatagtggggg

SEQ ID NO: 58275 - DNA, 2598 bp, Homo sapiens
  misc_feature (1)...(2598): n = a,t,c or g
gactagcccctttccagtgctgctactctgtaaaatgtatgtctcaatccagactcacaggcccccatcccaaatactcaagacatcttaaccatttatcttgtaagatttcaagtttgatagttacttaacagtaattactaaattttagccagttaaattcttgtttggatgtgctcttttagctcaaaaaacagatttgtttttctttttatatccctgaaggacatactcctcaactttgcatgattactatagttggcttcttaaggggaagtgaagaaacaaacttctgtatcacaatgacttactatgaataataattgtgatccatgacagatacccataattacactgtatggctacattctaaaaatataccacaataaatacttggtatttgtagagctcaaagcactcttttacagagttttggttagnnnnnnnnnnnnnnnnnnnnnnnnnnnnnnnnnnnnnnnnnnnnnnnnnnnnnnnnnnnnnnnnnnnnnnnnnnnnnnnnnnnnnnnnnnnnnnnnnnnnnnnnnnnnnnnntagtttggttttaatcagtaaatatttatttagcacttggactgctctaggcactatagggtacaaaattagttgtattttatcctctcatcccagctgtgaggtaggtttgctaaagctgtaataccactaagcagttttttcaatactgttcccaaggacagataatattagcaaatcccagaagcatttctaaacacttgtaggaaaaataaagtcggacttaaaatttttagtatctttgccttttttttttttttttttttacataagttttacaagataatacatttttacagtgacctgatgtggatacaactttgcaacttggcaaaaagcaaatcttaacttacattataattaatttgctgcattttacacatctctgattctcaattttggcaagtacaacaggttaagggttctatttagtgtccccttctgatgaatatgatgatcttgaacccattcttcctcctcaagcacggtcatcctcctctgatggcaacagcagaacctctgggaaaggaacctttcggtatccagaactcccaggtggcagcccagtgtgggatttgggagcatgacaacaaaggcattttctcaacatttactaaaggagagtggggtgttctatacgctactgatggggactgtacatgaacacatttaaattgaattacaacaacattttagataggaaatatagaatcttataagaacataatctaaattataaccaattttaaatagcaaagtttaacaataaagctacttaagtgtttgaattagaaataaacagtaaaacatctgtattaattataacagagttgacatttgtttatattttatcttcagtattaaccaaaggagtggaatttagccagggttgcactttttaaaagttgtatatacttttatttattttacaaaaggaaaaaaaaagacatacttttcccataaaattccaggtcttactatgtaaaataaccatgcactacttcatgttataatcataattttagactatttccagtaggtaagtgtcataaagaaggaagagatatggcttccacagcttcaatgaggtgtaaggctagaccatattgcccatgtttttctggtaaaagctcaattactttatttactagtttagctgttgttgcaattggcacttcagtgttttgaaggtcctgggggtccattgctttcagccaagtacacagtgtgggtggaagtctggcaagcagctccattccttcttttgtctgggtgtggagaagcgcatgagccagcctttgccccgtgagcaccagcagctgagaggcaaggacctctttgtcatgaacctgtagaatggcctcttctcctaagtggtcaactccatagttgtatagttcccccacataatgccttctaacaacatcttcactaacttgaaggtgatgggctaaatccacagctagagctggccaatcttggtctttcccaaaaggagtgggtgtggcctcttctgtgggatctttgacctttgtggctgaatgttgggcctggacagctgcactgacaactttcaataagaactgttgtcgtacagaaataaaatctggatccatttccccactaggtaataactgaattgaagttaggtctttgaaaaatgcatttcttcccttactgtcaaaaagtgaaagtggcttcacggtcttcagagaaaacctcatgactgcatacaagatggagcacaggatggagtggtgctccaccagtgggtagtggatgtgcttctgttcaagggccagttccactatggagattggtccttccacggagagccacgcatcctcagtatccagcacaggcacctgtatttcatccctgctaacatctgcctccattaagatctgaagaagatccnaacaggagccgaggaaagatgtcattgctgtgtcactcattcccacatcccttcggcataacctatcttttggtgattttccaaccttatccattaagtatgtagcagcagaaaatcttttaactaag

SEQ ID NO: 58276 - DNA, 723 bp, Homo sapiens
aggccggttccggcgaagttaaaccctcggagctggcctcggactgctggggcgttaccccttcggccacccccgctgaccatggcagtgtttcatgacgaggtggaaatcgaggacttccaatatgacgaggactcggagacgtatttctatccctgcccatgtggagataacttctccatcaccaaggaagatttggagaatggggaagacgtggcaacgtgtcctagctgctctctcattataaaagtgatttatgacaaagatcagtttgtgtgtggagaaacagtcccagccccttcagccaacaaagaattagttaaatgctgaagaagccttcaggaatccaaatcctgaacatttggaatgagcccagatagaaatatcgaatgcaaagctactggcttcacagagacaaccatttatgatttgctgttctgtaagagtgtggattctttctatcaactgctgatatcatcttcaggaagcaagtccataacatgacatatcctggattttgtgcttagaaccttaaattggaagcattcttaattatgcatctaaatttaaaagaagataatttcaaaacagtgctttctttcccttggtttcatcattttcatatcttaaaccaaattacttcggtatctgacaacagcatcatctacctcagtcattaggatttcttaataaaaaagagattgtatttttgacttggttatt

SEQ ID NO: 58277 - DNA, 725 bp, Homo sapiens
tgtttaccccaacagcatagaaccacgctagctggggctctggctgggaggagatgctagtcattctctccccatgcacaaatggtttatagctatgtggtccaatatggtacctaatagccacatgtggctatttaaatttagttaaaatggaataaaagttaaacttagttcttcgcactacccgtatttcaagtgttcaaatgtggctcatggctaccatattggatagcacagaatccaaacatttccattgtcacagacagttctattggacggtgctggtataacttgtaccacttctgttacacaaaagggagagacagagggaaaataccaagctcaccactccagtagcacaggaagagagaagaccgcaagacctacccatgctttctgccgttgaatgtgctatgaactccagttcccaaaggtggcccatgtaacaccctagaacctaaccaatcctaggtactcttcctcctccctggagtggatcaagggctggtgtgagcttgtaagtatctctctaagcccagagtctgactatgaagtaggtgtgtcatatgtccctggttttccaaatatgctttctctttgccatccccggtacatgaataaaacgggcatttttaaatgacatgattcttccttcacagggaggacccgatattattctggaggataggaaggagggccacgacttcccattgttccatttcttg

SEQ ID NO: 58278 - DNA, 1780 bp, Homo sapiens
  misc_feature (1)...(1780): n = a,t,c or g
agaaatatgtattttntggacttttaaagcattatttaaattaccaaggttgacatttttnttgacaaataagctgactagactatttccattcctccaggttctgaagatctcctgtcctagcatggagactctggagatcccgagactacctgaattcttagcaatatccagcacttccttaagtatcaagggctctgtccctcactgtccccattatcccagcagcccactctccagatgccattctcccctgaaccaaggctctggactctcaggacagactaacctgggccattttgctccaggccccacttaaggcataaagcagtcaagnnntctgattgcatgagccctccaggtgattctgattcatgttaaagtctgtgaatcacaggcctgagaaaaggtacaatttcaaatcagaagtaaagggacaaagttcttccagctcctatggactagtcttcagttcccatcgacacactgacgctggatccagctcctgctgtgggcagtgcatgttggcactgcagggaggagaaggccccagagacccgagaaggaaggtagggaccgtggcttcctctttctttattgggcgctttgtagatgtcacgcaggtttaaaagttacactgctaaataattatttaaaaactgaccaggacgaaggtcctggtccggagctccaaaccagaagcaaaaaggaatcggggcggtgggctggggggtactcctccaacatcaccaaaacccagaaaacgaggatcctaagctcctccgcaggccaaatccagggcttgggccctgggctaacccgcaggtgcctctgactgcatcacactcagagtaagataaccagcaaggggctggagggaacggccagccgagtccagacatggacagatgtaactggaaggaggacaggaaacagacaggtactgtccagctgtaggtaagagagtgcagctaaggcaggttgaggggcaggggagaggctgggggagcagtattgcagcaatgcaggagtgtagccccagggtcctgtcctgagcggctggtcaggttagcagctgttagttcccagatggagctcctgacccgaacccaggtagagggctcacacgttgtgggtcctcttggtgagctggggctcctcatccaccagcttggacttgaggtgctccttgtaagcccaggatgtctcccaggccacttggtgattgtctgcttctcacagacccaaatttcctgtgcaacctgctgaatgagtctgaagtcatggctgaccagcatcataccaccctcaaactcattgatggcatctgccagggcgtcgatggtctcgatatccaggtgattggtgggttcatccaggaagagcatgtgggggttctgccaggccagccaggccagacacactcggcacttctgcccgtctgacaagttccggattgggctcacctgttgtttcccagtgagaccgtatcgcccaatgatcttcctcatttcttccttctcctttatctctgggtagcacttcatcatgtactccaaaggcgatacatctaagtccagctgctcttgtaaatgctgatggtaacgccctatcttgacatgagagtgttttcggatcatgccatctgtgggtagtagctctccagttagcagcttcagaagagttgacttccctgctccattgggccctaccagagccactcgtgtgtcaaggtcaattccaaattctagattattgtagatgcaaggcccatcttttg

SEQ ID NO: 58279 - DNA, 554 bp, Homo sapiens
agcttgacatgattacgaatttaatacgactcactatagggaatttggccctcgaggccaagaattcggcacgaggaaatcgtgtgcagaagtaaagcagcaggattcataattttgctggggtaaaccctaaggcagttattttgttaaattccagaattccttaactctgttgtagagtagcagatcagttcccaggaggtgtgactgtggatgtagaatgttaggttttttaacagctagactcccaagactgttagatagggagtcagtggtcagagtctcactttggacacattagtttgaggagccgtggtcagagtctcactttggacacattagttcgttggctgctgttaaaaaacattaaaaggcagtggtctctcctggtcaggcttagaatggaggtgtgcggagcaaggcgggaaacttgcctgactgagcagggaggcactcagacaccatcacacatctggcacacaggcttttcaacactgaggagcagccctgcctaagctgtgggctggtggagtgggtcaggcccagccagggat

SEQ ID NO: 58280 - DNA, 822 bp, Homo sapiens
ggagctactcactggatggtgacctcttttcactttctctactccatgtctgggcatgacccagctttggactccttgagcccctctctaatttaaatttgatattattaattatccaggtaattgtcttccgtgtggttgcctccttccccactccagtatccactttcagcaaaacgtcttgcttcaagtcccagatagaagagtctttgacttttcttcagaggcttattttagctagaatgtttaaagctacagatgcctatctgctcatctttccagctggattaggtgttgcttagatttgctagttgtctttaagtattacacagtttttgtatttatgcagccttatgtatagttgtagtggtgaggagtaggcaaattatatgattagtaaaagggctagtttttgatgctaggtatggaagtgtagtgacaattgtaaactgtcaggctgtggtgggaaggaatgttgaagtagaaaggagtggagaactcactgtgagatctgactggagaacctggtggctcttcgccagtataggttcctccaggacaggttctttttgagcagctaaagcataatataccgataccaattcagagtttgctcttttgttcagtgaaaaagtgaggacttcaactttaaaaatggatggagaactgccggattacaaggcaaagacgtaaaagtcgccaagaggtcaagtagcactggggacaggctatctactggccagtggaatagtgcagtaaagttcatacagagaccaggagtcttagaaaactgacctagagcaggagagacaggtcacatat

SEQ ID NO: 58281 - DNA, 1420 bp, Homo sapiens
  misc_feature (1)...(1420): n = a,t,c or g
ttacaggctcaaaaatcaagtttaatatcaaaagaagttacacataaaggtttttacatttccgaaaatctgatagttaaaatatcccgtctggtgttgattgtgatacacttaagtgaacccctgaaaacctttattttcgaaattgaagtttttgctcagaaactgggcagaacttttcacattctgacagaagataaaacttaagtctaaaaaatattcggtaacttttttctcaaaaacattaagtactttagaatataaagcagaaactcttaccaagcatgtgtacccatcagccacacctcctgtctttgggggaatttggttacttggagctctgtgggtgctatatgaatcctagagacagcaaacttctgctgtacagctaacttacaagggcctgaacccggctgatggcagcaagcctgctacagtccagaagagtgcgacttcttatatttacatatgaacgcatctgtctttccaaggctaactttgtagcattccactggtaccaaggagccaaatggtgacattctgtctaagaatttgtggttactggcttcggaatgaagttgacgctgtcttgaatgcaccagttttttcttcaggattcaagcactttttaattccaggttcatctgtgtgactgtccttggaattgaaagggatgttgctctcgtttacaatcgtgtaaggcgcctgtggtgatcttcactaagcaacaatacaatggttccgccaacatgaagcactctttccatttcttgtagaatgcttttgatgtcttttcctaacttaaactttttcccaaatggaatgtcagaaataataatatcaacactttctgaaggcaatggcaattctataacagagattttaagtaattcaattttatcctcaaggcctgcagctttcagattgtcccaagtacctagtaactgtgagtcgctgacatcagcacctacataatacacatctggccattctttagcagcttccaaaagtattgttccaagtccacacattggatctaaaacaaatgcaccagccccactgtcaggcccagtcgtgctcgagataggggagaaaagacatccaccacttgatatgtctacagaggaagcagagtcctcagtgcacagccaggtttcagtcagagccatatggtaccttaatgtcagccagagatgccattgcccacgctattgtagatcgcagtccagctgtcttgatgtaagctctgctggctagggaaaccctgaacacaggaatccccaccacagagtaaatgtcatttagatgtataaagatctgaaagaacaaacacagaagttagaatggaacaagaaacttcattaccaaattactgacaatttgaaatttccattttaaacttacatgatctatganttaa

SEQ ID NO: 58282 - DNA, 1158 bp, Homo sapiens
  misc_feature (1)...(1158): n = a,t,c or g
tctagccctcctaccataacactgtggcatatcccctgcccagcttgggtctctcacctcctgtctccttaaaccccttataccttaaattaaaggtataatttgattaatagttttactgacaataacaaaaatattcgctgtttatttagccccagtatgtcccactttgctaacccagtatggaaactgattcagagctgctgtaggaacctagggcctagggaatctgcctttttaggcaaggcaccccactgtgaatcactcttctagaaggacagctacctactgtgggggagacaagtacccagtgggttgtgatggagagtatgggcttgagtcagatgacttggatgggactcccagcttggccactcactggcattgtgattgtggccaatttcttaacccccttcagcgtccgtttgtttgcacagtgaaatggaaacattaatacttaccttgccaggctggtgcgaggatgagatggggttgtgtatgagaagtcagcacagagctggcaggtggtgccatgcaggtgtcagcagagttaagggattgttgatgtagtagacgtggtccgctccactacaccttgccagaccacctgcagggcacctcagctccaattcacagacgcgcctacagcttcctgcaccaagcagctgtgtctctctcctgagggctttctctggctgcaggaacgtgctcagccctcaaaaggcagcccaaagtaccagggagttgatgcccctgggttgagagcaaccctcaaccaacagaggcaagttggtggatcagtaaccccactcccttgctcttcactgggacaatctggggagagttctgcagtctctcagggggccccagcaggctgagccttgcctgtccactcactgccaggcacccactcgtcatcatacccttcattggcttcctgtcttccttgtgtcactgtccccatggttcctgggatcacctctcaagtaaatgatgtggaccaaagtcctgtctcaggncctctgggatgagtctgatgacagtaactcagaaattgaggctgctttacgccccagaaaccataacaccgatgattctgatgatttttatgactaacgtgctgtgacattggtttcaaataaaganantaannaaact

SEQ ID NO: 58283 - DNA, 2341 bp, Homo sapiens
tcatcttgagcttactgtttagttaccccgtttcccaaaacagcacaacctctgtgaccagttaactaagaaattatttccttggcagcaaacccagaattccatcacttactcttgtaaatagcaagaaagtaatttactagcagagtttgatagaaaaattctttaatgaaaacaagtttacacgttgaacttatggcttaactagaataaatctaagtaagttaaaactgtataaggaccaaacagataatgactggtatatatgcaggttctctcaaaacggtgattcctagttccattataagacctctttaaaagcaaaaatgcaattctgtagatgaaaacagttatctcagagggtcaaccacacaatgtcatacagagacgctggtcttaagccatttttttccatattcatataatttcaaaacatgagaagtatcctacttgctgagaagtgccaaatgaccctaatattcaaaatatcttagaaatgctatcctttagttaacatacccttaaattttgtaacattgattttaccctggatttagtccatacacgtcaatgtacagacttatcaaagtacaatgctggaacaactagtgtttgtatttttggaatctagaaaataaaaacaatatagccatgatttcaaataggtgagtttccttatataacatttattcatatttattgtataagcatcatgattttttcttccaattaagttttagtgacttcctaaagacatttttaacaacattcctcaaaaataaacttacttagttttcagttttagttactagtgcctgcctataaaaggaccttaaatgatttaaccctaaagccagattcattcctatatatacccagtcagttgtctgcaaagaagtcctaagacttcactgaatgcccagccacaaaactaaattaccttcaaaaattaatgttttatagtttgtagaattctcagttcaatgtcagttgcttaattagttgtcataccaaaaaaaaccatacagagcacacattgttccaaagaagctggataatgtagcacaatgtagactgtgagattaaaattaacttttgataaaaagggagtgagtacttgtatagaagtaacattttatctaccataaaaatgtgtaacttctacaaaacccacaaacagtgaaaagacagtctggtaaatccaaggtttgtaaaaactatgcacaaaacccacagtatttgggaaaagaggcaaggtttatacaagtagcagttttaaaaatgtaactttgttctactatcaattacacattaacatacacacactaattgaaaatatgctacaaccatgtctggaaaagcagtttaacattttctaaatggattttatcccacatttactgtataatgtagctgttaatactgcacaagtacacttagcgataatgtttactttactttaaaacaaagggattttctccctcaaaacaagttttcaacatcaaacctatgcttataaaaatttaaaactttcagcagtctatttcaaatgaaaaccattacaaacttctcaagtgttctctatattccaggtatgtcaacctagttatctagtgtagaatccttcagagatatttcagtctctctctcttcactggatggctttttcttcgtgctggcttcatggttgtctttgctgtcttcattgctctccccgttatgttgtggctgattaccatcttgagcatcagatcctccatttagagtctttgaccctgtttgttccttctctagctttttgtttggccctttcttcccttgatctttggttttattcgcttcctcatgctgtctttgttcagcaagagatttattcagcacttgggtgatcacggaatctccttcaccaaccaagaacatgttcttaaacttgttatacaacattgtagacttttccatgattacctgactaactttgaatcgccgtatttttttcagtgtagtaatcatctctgtgtgtttctgagcttgttgcattgtgacctgaagtgaagcaagttcatccaaggcctcaatgcatctgttcacatcaagattatcaattttgagtgaatttttaatctcagcatgtatcctttgaagtcgagaatccattgatgtttctcgcttcttctccactttcttaacttctggcttctttccttcatctttattctgctgctcagtttccatttgttcctcttgcttgcgttttcgatctgctgcttctttctcatgttggcctttcagcatattccttctgtgagcagtctgaaagttcctctagatagtcaagtttgac

SEQ ID NO: 58284 - DNA, 1272 bp, Homo sapiens
tttttttccttttcttcagagtttattttgaattttcatttttggataaccaagcagctctttaagaagaatgcacagaagagtcattctggcacttttggatagtacataagattttcttttttttttttaaatttttttttaatagtcacattcagctcgcttgctcaaaccagactcccacattgggtgagcaagatgagcccataggattccagagttaatacgtaaccgtatatacaaacagccaaaaaaccataatggtgccacagggatggagcagggaagggcatctctaacgtgtcctctagtctatcttcgctaaacagaacccacgttacacatgataactagagagcacactgtgttgaaacgaggatgctgaccccaaatggcacttggcagcatgcagtttaaagcaaaagagacatcctttaataactgtataaaatccaggcagttccattaaaggggttaagaaaaccaacaacaacaaaaagcgagggactgtctgttgtcactgtcaaaaaggcacttggagttaatgggaccaggattggaggactcttagctgatacagatttcagtacgatttcattaaaaggcttggatgttaagagaggacactcagcggttcctgaagggagacgctgagatggaccgctgagaagcgggaacagatgaacacaaaggaatcaaatctttacaaccaaattgcatttaagcgacaacaaaaaaaggcaaaccccaaaacgcaacctaaccaaagcaaaatctaagcaaaatcagacaacgaagcagcgatgcatagctttcctttgagagaacgcataccttgagacgctacgtgccaacctaagttctcaacgacagcttcacagtaggattattgtgataaaaatgactcaagcgatgcaaaaagtttcatctgttcccagaatccgagggagaactgaggtgatcgttagagcatagcgacatcacgtgcggtttcttaatgtccctggtggcggatacgccgaggtcctcggaaggacatctggacaccactttcagccacctccttgcaggggcgacatccgccaaagtcatcctttattccgagtaataactttaattcctttctaacatttacacggcaaacaggaatgcagtaaacgtccacgtccgtcccacggctgggctgccgttccgtttcctccacgaacgggtacgcgcttccatgagaaaggatatttggcaattttatattccacagtcaggtgggtctgc

SEQ ID NO: 58285 - DNA, 707 bp, Homo sapiens
ccagtcagcgattgtcttatagcagaacaacaagaagtgaaaatattgctagaaactgtccaggagcagatccgaattctgactgatgccagacggtcagaagactacgaactggccagcgtagaaaccgaggacagtgcaagcgaaaacacagcctttctccccctgagttcccacagccaaatcagaacgagaggcgcaatttgtcttaagaaatgaaatacaaagagactctgcattgaccaagtgacttgagatgtagggaatctgtgcattctatgctttgcttcaacagggaaagagagggaaatcaaatacaaattatttatatggcatttaatttaagaggcatctacttagaagaaaccaaatagtctatcgccctcatatcatagtgttttttaacaaaatatttttttaagggaaagaaatgtttcaggagggataaagcttaccattaaagcttttggggtaggaattctggaatccaatttcgtttagtcccaacactgtcctctttggctcttagaagatgtgggcaattcaggacccttgggccccacagtgccagtgtctcatttaaaaaacacttgcagttcctggttcaaaaagaggagagctgcatcccgcaggtggatcaccagtgagcaggtgctcttccatttggttccagtccaagcctaattttattaccaatgctatacagg

SEQ ID NO: 58286 - DNA, 1375 bp, Homo sapiens
accatagatttattttaaaagggaaaatctcacacataattaagcagtggaaaatgtgctcaatgctatggtgcgtcaggccctctgtctaccaggtttctcccctttctgcagagctgtggaccctgtacgtaccaaacaggtgaacttggtccatctttccttcttcctttttttgcacatttgcatttatatcttcctgtactaaaagaaacaaattatttataattggggtgacaatataaaggaacaaaagatggggcaatagttgcttcctagctggagctgtaagtccatgttacagaaactcactatttaaaaagttttaaaagatttatgaaccttgtcctacaattcgctgaatacttatttgtcttttaaactcccctcggtgtatggatcatcttcgtcagaatgccgttgtttcattgtgaatcaggggaaaatgttaatcatttggagactgttttcttattaccaaatgtacaatccataagacaactgaaagcaacaactgctgggttcactgacaaagattataaaaatcatcacgttcaaagtagagtttttagccaaggtcaagaactaacctggggctgagtcagcgtctctacccacttaaataacagcgtaaaggtctttcactaaattcgttatgtggtctgtctggatgtaaacctatatatttccttttgaaacagaatcatatcctgcagactcttggcactcctgcatagctttgaccgaatgttcactctcatcgtaatggaagatttctatctatgcagataatacatgtttttaaatactgttttctgtttagtcctcaatcttcctaactcaaattggggactgaggagagagaaaggtggttacccctgttacccgtgccatattcttcttgctgcttttcaaccccacgtgattgttgattgacggttctgcctataatgtggcgtgcccttcaagtttcagaaaactttcccaatcatttcacttcaatcttaattgaacccaagagtcaaagttattattttctccgaacgtgtttgtgatcttctgttatattttggggcatgttacctttatggtatataagctgtagtgcatactctttgtattgcaaaaaactggtcagtaatttatgtacatgtattccacattttagtgtgcttgaagtgacaatccatagtttgtagtagtttgttatttgtcaactttaccctgtgttttaaggacatctaaacattccttgtcctatcaagatgacaaaagcagaatgtaatttttttttggaagcttcgtgattacctgtaacaagttctgtttttaaaacgaatacaaataaagttagtaactatttttaaatcaaaaa

SEQ ID NO: 58287 - DNA, 896 bp, Homo sapiens
gcaagagcttctgggacagagactgcttggccagctttgtaagtaagtggctgcctccaatgtgatgtgagtacatgttgggcagtctcactgtcctaaggtatgtcttctttccacctcccactgcccctcccctgccacctatcaatgatgccttggttcagtcattagaaatctgttgctttgagttctgaaatattttcaccttaaaaaaaatgctgaaaatacacattctcctgggaagacgataaacagctagctaagaagccgaggttcagtggtggcagcaggaaggacactgccacaaattttgtctatttcatatttgtcccctagagccagccctagcaaatgtgtgagttgggagtagttaatagtaaataagactctgactttacacaagctacacattttatacttttcataaaccacaaagtctctctagaattttttctgccttcactaaaattggactgtagccaagatataaagcaagtcatttggaacctgccgagtgagcactgaagctactttatcatgagatgtgtgttaagaaggctgcagcccacaggagtccagggaaggcggggaccacagaggcacagagtccagcacttggccgctcatgggccttctttctgcctcagaggacgggggcagagaagtgatgaagggaaatgttcttagaggaggaaatatcctttgtcctgttcagagagaccagggccctaccattaggcatactttcagaagcaacctggagaacagctatcaatcatattcaaaaccagtacaagaactgctgcctggtaccctgtgagtcatttctatgaaattccatataaagaatgatgataagtttacacactgtgcaatctcacaatctgaaaataaag

SEQ ID NO: 58288 - DNA, 1647 bp, Homo sapiens
  misc_feature (1)...(1647): n = a,t,c or g
aaaggtagaagtcattatgaatttattatttacacgattgttaaagtacacaaatacagtggcgatacaaacgcacagctcggagactggccgtcagtgcacagctgacacgacgtcctacctacgtctcctgcacggggcgacggggactagatactgggcaaggactgtcacaagcactccgaagacgcgacccggcgaggctcgggctggaacccgggcgcagagctgcctcgcacaaacgttctgggcactacatcgggaccacagatatttacaaagcaagcttgcgccacttcaggccacagcgcgacgtctctccgggtgggggacgtctaccttcaagaaggggtccagcaacaaagaaaatctcttaactcggctctgacccaccccaacctccctctgtacttcaacacacagctcccacccgctcaaggccccgtactccaaaacgcttacacagtaaccagcctaggattgagaaagcatccatgggctcaggcagacggccagccagctggtgggggggtgaacaactgtgttctgggacgccagccagttatggcatccggggaactctggggaggagaagggagaaccaaggtgcacaccttcgaagccctagagtccaaagggaacatcgtccatcgtgatggggtccagccgaagtgcccacgaacacagactgccctgcgcattggggttgggagcacatggccactggctaccgcccaagtgctgcggagtgagaggcgagaaggcatcctgggaacctcagggcacagcagcatggagcctggggcagcaccagctcacggaggccacctgccttctggtgggactcggccccacgcacgctgcttcacttctgaccaacagacacgcgcccaacagaaggtcacagcgcagactctactttctggccgtgaaggttctgggtccggttgggagagtcacctgctccttggcacctcagggtgggtccttctggcctgccggcttttctgagctagtcttggcacgtggcaaggacagccccgctcctggttttaagcacaggcattcatacagacggagtgccaatccgcacaggagcattgagtgctgagaaaatggactgagtgcaaaggcagcaaggcaacaaacactacagtaaccacctctcggttcacagtcctctcccaagggaccagaaacgcatcttccaccttgaatcctgggactcccaattgtccctgctagggtctcaaaagcctctgcttccaagctctcagctgcctgcccacctccctggggaagaagcgcgcagtgctttgccctggtaacacccactgcacccctgccccgcggcagcctgcggtccctaactgctctccgagggcctcaagagttcctgacagcaggcatgtcaattacgggaggagggagggtgagacgccaaaatcaggttgaagaggtcccaccacacacgggcacacacacacaccacggacttttgatgagaaatctcctctccaaagcggacaataaaacactgcaaaacaaacacagcacacacccttgagatccacctgcaccttctccctgcccgantccacctcatacactaactccaagccagcctgtctcagaattccttagtca

SEQ ID NO: 58289 - DNA, 2827 bp, Homo sapiens
  misc_feature (1)...(2827): n = a,t,c or g
gaaaatcttgttgattctggggagccgagcgcgcggcgagcgttcacgccagacagcggcccggcgccttctcctcggcgtcggccgccgccgccgtcccagaacctcctcgtgccctcgcgtgccaggcccgcggcggccgaaatccgcggttcacagcatgtccgcctcggcccctgctgcggagggggagggaacccccacccagcccgcgtccgagaaagaacccgaaatgcccggtcccagagaggagagcgaggaggaagaggacgaggacgacgaggaggaggaggaggaggaaaaagaaaagagtctcatcgtggaaggcaagagggaaaagaaaaaagtagagaggttgacaatgcaagtctcttccttacagagagagccatttacaattgcacaaggaaaggggcagaaactttgtgaaattgagaggatacatttttttctaagtaagaagaaaaccgatgaacttagaaatctacacaaactgctttacaacaggccaggcactgtgtcctcattaaagaagaatgtgggtcagttcagtggctttccatttgaaaaaggaagtgtccaatataaaaagaaggaagaaatgttgaaaaaatttagaaatgccatgttaaagagcatctgtgaggttcttgatttggagagatcaggtgtaaatagtgaactagtgaagaggatcttgaatttcttaatgcatccaaagccttctggcaaaccattgccgaaatctaaaaaaacttgtagcaaaggcagtaaaaaggaacggaacagttctggaatggcaaggaaggcctaagcgaaccaaatgtcctgaaattctgtcagatgaatctagtagtgatgaagatgaaaagaaaaacaaggaagagtcttcagatgatgaagataaagaaagtgaagaggagccaccaaaaaagacagccaaaagagaaaaacctaaacagaaagctacttctaaaagtaaaaaatctgtgaaaagtgccaatgttaagaaagcagatagcagcaccaccaagaagaatcaaaacagttccaaaaaagaaagtgagtctgaggatagttcagatgatgaacctttaattaaaaagttgaagaaaccccctacagatgaagagttaaaggaaacaataaagaaattactggccagtgctaacttggaagaagtcacaatgaaacagatttgcaaaaaggtctatgaaaattatcctacttatgatttaactgaaagaaaagatttcataaaaacaactgtaaaagagctaatttcttgagatagaggacagagaagatgactcgttcccatagatttgaagatctgatttataccattataccagcaaagagaatgtatttccttttctaaatccttgttaagcaacgttagtagaacttactgctgacctttttatcttgagtgttatgtgaatttgagtttgctgttttaaattgcatttctatgccatttttagtttaaaatcttgcatggcattaattgttccttgcttttatagttgtattttgtacattttggatttctttatataaggtcatagattcttgagctgttgtggtttttagtgcacttaatattagcttgcttaaggcatacttttaatcaagtagaacaaaaactattatcaccaggatttatacatacagagattgtagtatttagtatatgaaatattttgaatacacatctctgtcagtgtgaaaattcagcggcagtgtgtccatcatattaaaaatatacaagctacagttgtccagatcactgaattggaacttttctcctgcatgtgtatatatgtcaaattgtcagcatgacaaaagtgacagatgttattttngtatttttaaaaaacaattggttgtatataaagtttttttatttcttttgtgcagatcactttttaaactcacataggtaggtatctttatagttgtagactatggaatgtcagtgttcagccaaacagtatgatggaacagtgaaagtcaattcagtgatggcaacactgaaggaacagttaccctgctttgcctcgaaagtgtcatcaatttgtaattttagtattaactctgtaaaagtgtctgtaggtacgttttatattatataaggacagaccaaaaatcaacctatcaaagcttcaaaaactttgggaaagggtgggattaagtacaagcacatttggcttacagtaaatgaactgatttttattaactgcttttgcccatataaaatgctgatatttactggaaacctagccagcttcacgattatgactaaagtaccagattataatgccagaatataatgtgcaggcaatcgtggatgtctctgacaaagtgtgtctcaaaaataatatacttttacattaaagaaatttaatgtttctctggagttggggctcttggctttcagagtttggttaatcagtgttgattctagatgatcaacataatggaccactcctgaatgagacttaattttgtctttcaaatttactgtcttaaatcagtttattaaatctgaattttaaaacatgctgtttatgacacaatgacacatttgttgcaccaattaagtgttgaaaaatatctttgcatcatagaacagaaatatataaaaatatatgttgaatgttaacaggtattttcacaggtttgtttcttgatagttactcagacactagggaaaggtaaatacaagtgaacaaaataagcaactaaatgagacctaataattggccttcgattttaaatatttgttcttataaaccttgtcaataaaaataaatctaaatca

SEQ ID NO: 58290 - DNA, 1572 bp, Homo sapiens
  misc_feature (1)...(1572): n = a,t,c or g
ttttttttttttttgaaggatttggcaaagatttatttttttttccatttccagttttttaaagtagacacagatttgcttagaataaagctgattttaaaagcacacaaaagttgaacacaaaggagaggattaaattcaccaatgcagagtgataaagaggaaaagatactgagtaggtgccttcagcagaaaactgatcatccagggtgatcacctaataatcggagacttaattccttataatgcaaaagcaagaagagtttagtgtacgaactgtacagctgagtttgtagctctatcttggtttctgttgattatgaacaattagcatagttatatataatctttctttagtagacaacctgcatccatttaaattaaataatactttctacaatagtgtgatatataaggccacaatatttattttggacaaaccccttaaagtagcgattttattatcaatgttattcattcttttgaaatataaagtacttcagctgaattaaggttgcagataatttttaaaatacaacacacatcatgactagtatattaaaattatttatattcagatatttatatctaatatcaaatgaaaatttactaccaaattttcacagtagacattaatcagtctgacatgcttattgatcccataggtgtaattatagatcaacatgattttagtgtctattcttttattttactaaattaggaacgcagcatttacagaacaaataaacacaagtgacgtggccaccccaggatctaacagctcttcagtgagctatgttgcaagctcagaagtaatccactaacgaaccaagtcagactccagttcttcatcaaaaggtgctggtggaggttgtcagacgccttccaatatagatccccaatccgatggccagcaaatgagagagcagcagagatggaaggaaaactttcagaaattctgcagagaatatgccccctttcttcatgacgctcgtgttcctcatgctgagggtggccgtgcgcttcgggtgtttaaagaggaactccttggggggaatattttccggccgacttgaccaatcccatatccaatctgagtttttcttcaagatgctttcaacttctttccttctttcaatatcatcttcctcagactgtgagctgtttttctctccaatgctatgggtatctgtttcagaagctctgttggtatcttgtggtgtctgcgagcgaggtgggctgtcacagtgagagctcttggagctactccgtccagactcatgctgtgcgtccagcagtattttttccatgtctccattataaatagaaaccgaggctggaacgctgcccccgttcccattattgctgaagtgcagttctacccaggagccctgcaggctctcctcctgcatcccgggcgctccgttctgcgacatggcgccagagggcaactgcggcgatcggagtccgcgccgggctgcgggatgtgcttcagctgcgggcggtgggaaagcggaggntgcgagcgccgcggcgccagtgcgctcccggagctgagcggagccccgcagc

SEQ ID NO: 58291 - DNA, 555 bp, Homo sapiens
ttttttttttttttaaaaatatattcatttattcatatatatattcactttacaatactgcattttaacatacataaaaatctaaagcgtttttaagaatttttcaaagtcctgtactgatgctttggcaatctcttcacaaaatatttcatcaggaatagatactagtttgtccaaagagatgtagttaggttttgctggatcatactgtgctcttcctaaataggtaagaaacaagtgtctttctttgaccttaaacagccttgtattaaatacctgtgggaacttgacaatgatgtggtggggaatgctcatcacattgtgcacaaaatcaaacgtctcggtaagtttcattttatttgcagttaacatctttgggattctggtgatcatatgttgaatttcgttatgtttaaaaccaagttcaagacgataaaccttcatattttctttcacgggttccagacttccagttagcagccttgggagacgaactaccagatctctagtcttcttcacactaagttccagttccttctgaaaaaatccaatctg

SEQ ID NO: 58292 - DNA, 431 bp, Homo sapiens
aggcaatggaagggtgatagtacctacaataccctttgtagaccccatctcactaccatcaaaatcttgtccactagcccccaaaaaactggcaaggaaagaaggtggaggggaaatttatggaagtagatggcttaatagttatttcttttatcttgggctgcctttctctaagttggttgtcctgtcccagtgtgaagacccatctttttgtgagaaaagacaaaagaaagcacatgtaactaccttctttgcaatggaaaaggagaaagaaaaaatcttctcctaagttgctgttttcttttattagttaataaaacaaatcagggactatgcaggtctatggggaaacctttagtctgctttaagaaaactcagtatctgaaaatcttaacttaacatgtgatactgtcttatcagcatctgcagag

SEQ ID NO: 58293 - DNA, 1008 bp, Homo sapiens
gcagccgcacgtgggctcggcgcgatggaggaggagacgcatactgacgccaaaatccgtgctgaaaatggaacagggtccagccctcggggtcctggctgcagcctccaggcactttgcctgcgaacagaacctgctgtcgcggccagatggctctgcttccttcctgcaaggtgacacctctgtcctggcgggtgtgtacgggccggccgaggtgaaggtcagcaaagagattttcaacaaggccacactcgaagtgatcctgaggccgaagattgggctgcctggtgttgcagagaagagccgggagcggctgatcaggaacacgtgccgaggcggtggtgctgggcacgttgcacccccgcacctccatcaccgtggtgctgcaggttgtcagcgatgccggctctctcctggcctgttgtctgaatgccgcctgcatggcattggtggatgcaggtgtgcccatgcgggctctcttctgtggggtcgcctgcgcccctggactctgatgggaccctcgtgctgaatcctacatccaagccaagaaaaggaggcccgggccattcctgaccttttgcccctggacagcgtggaacggaagctgctgatgtccagcaccaaggggctctactcagacactgagctccagcagtgcctggctgcggcccaggcccgttcgcaacacgtcttccgtttctaccgggaatcgctgcagaggcgttactccaagagctgaggcaagctggggcaaggggccgctcccattgcctccacccactcaccccctacagcctgaagcaaaccagcagcccagccttgcctctctgacccatgggctccttgagcctgcagctctgtaaccacagggctcctgtggggaggccttggcctgtgatcacgccccaggcctgggggcacagatccccccagcaaggataacattcaaaggagctcacatttatggaatggatgaatcaataaattaattcactttaaaaaaaaaaa

SEQ ID NO: 58294 - DNA, 394 bp, Homo sapiens
gaattcctcgtcttaacatagtggaaaatcatactgagatgctatcagaagacagaggaaaaataattttagaggtcaagtaaactaagtagattttaaaaagaccagtatagcctaggcacagtggctcacacctgtaatcccagcactttgggaggctgaggcgggatcgcttgagcctaagagttcgagaccagcctgggcaacatggtgaaaccttgtctcatatacaaaaaatataaaaaattagctgggtgtggtaccacatgcctactctcaggtactcaggaggctgaggttggggatcacctgagcccggggaggttgaggctgcagtgagccatgattgcaccacgtgctctcacaacctgggtgacagagtgagaccctgcct

SEQ ID NO: 58295 - DNA, 995 bp, Homo sapiens
ttttttttcatgtgaggtatttattttgcagccattcagttcagctgtccagtatcaggttaccaaagacaaattttcaagctcccggttaatccccaccaaagtttctactgttcggctacttcaggatggctaacatttggagagaagaggatcccccaggtagtctgtacataattcagagagaggacatcagaattttccatggttctatttcaggtattaaggtaccacagtgaagcatgtcatttgactgtggtggcaaagggacggcactgagcatgcctaacctattccccggcatttcagtccaatcagcgcatgctcgcaatgatcatccatggggtgaaaagggaagagctgaaagacacatgtgctgagcaacatttaatttctgcttgttaaacgggtgattaggcgccagtgtggcaccatccagacactgggaatttgtgccactccatcagttctgctggctctgctcattctgctttcctgcagtggatgccacttcccaaagaaccatgctccaaaaaacaaaagagaatttcctcattagctggacttggctgcagcaactgtttggtttggagtagctgtagttgttgggagatggtccatctctggtgcatcaaaaaagtatgccaagcagcccacagaaagcagcatatggagcaacacaattgtcacaattgtggccaatgcaacgcgtcggttatcctcacgaacagctggccaaaatgtcattgccaagagagatcctgagatgcccagggcaatcatgactagaatccaacgaacagctttctgggggataatccacagtattgcggtggggatataaatgaagagggaatatccatagacacacacaatctccagaaatgaataggagacgatgttcataactttgctgtttctccacatgaggaaaccccagagtgcaagaggaaccagccaggcataggcatagatgatggtagctgctatggacc

SEQ ID NO: 58296 - DNA, 3334 bp, Homo sapiens
agaagctttttttgtttgtttgttttgaagacaacagattgaaggcaaaagaacacagagctttcacaagctcaaagaaaaatatttgctggctgatcgctgatttgtatgcactataaaacaattccataaataaaaccaatatatcatttcttaatcatgaccctatcaaaaccaagttatttcctaactattctttcaatgtcaaatgtaccctagagttgacgtttcatttttaagggttacagctacctcataggaactgaactagatgtactcttaccctttctctgaagtataacagtacaccactgcacaacagtatccaatttgaagactaatggtaaagaaaattcttcaggaaaaactgaaaatccatcaagctgaaaatctaaaattagttctactttctaatgaaaaatacataaaagtgcatcatcagaataagtaattcttatgccagtttgtattgcaaattttccaaacaatgcatcaaacataaacccaatccagatgtcagtcacgggtacaaacatagctgaaaggttttttcattttaagggcagtagtcctttgaaatagttaatgtaactgttgctgatacattaataacagtacctctagctgtcacatactaatgtggacttccgatcaagtgctgattagcccagtaagggaggtcaccaaaaaacccaaatccatttcagtcatgtctagtcttgtaccctccattctccttttttagcatttgaagacaacaggttgagttggcagatattgtttatggacccctgaggttgtttttaccgattcaatctcagttttactgaattcttgataacaggaataggatttgcagggagaacagggataccggaaagatctatactggatgttttctgagaggccaacagagaagccgctgtctgaatagtttctgattgagttgtacttgtctctgtatcaagttgttcctttgcttctgttttatcatgtccactcaaagcaagacagttagcatcttcacttgtttcatcctcttctgttttggttttcttgggactctcttctttatgaggtgaggatgtcctcttgactcctactataggagtagggtatttttgttgctgcatttcctgaagttgctgcatttcctgaagatctaggtggtgggtttaccagacgtgttgaagaaacaactctggagaccgtaggctttggtggtggagaaatggctggttgtgtggcagtttgaggaatgctttcactcgatgtaccccctgaagctttccaccgggaatttaccttgtggcacaggaaacttccagtagcctgtatgttggtcacagatgctgctgttacagctggagcaggactgtttctgccctgagagctgccagaactgttcaatggactggtcttcgtagcactagtaggtgaaggcacagacatgctgttatcactgtccatagacaagtcgaggctgctgtcattgagagctgtcaatttgacaccttctgttgaatgctttttctttttctgaagcacatgattaggtagtagttgatggagttgctttctttttacatgcattgcagcaattttcatatccacctcaaacatcttgctgtttattgcttgcctataaactgtatctgtgaaagactgaatatcataggtgagatcaacactgaggttttcagagttttctgtttttttaaacactaacccaatcacccacatcgtgcgaaattcttccttgtcgggattttctttgggtgctggaaatgactggggattcacatgagccagtgtaataaattcattcttctccaagcttccaaccaggattcggatttttgattccaccaagcccacccattccaggcgttgtttttctgttggtgcacttgctagaagtacaatataatgcttgtacttttgaaagaagtttggagcttcaaaaagtttggaccactctgccttactcagcacaaattcatctgtgatagcaagaccttgtttaaactcctcaaccatgaccatccgtgttgaaacggacacattgtacgtggagttctgttgtgggtatgctggtgtaattataggcataagatggtacctatcactggggtttacccttgggtcccatacaggcaaattaagattgcattcttcaggctgtttcaatagcactggatttggccattcccatttagaaaataccaagaaaaatttatgtacaagagttgatgctattgcatttggataaagctggcaagttcttgctactagcatagcccaggaaacaccaccgaggaaacctaatatattggaatagatgttgtggcgtttggcccatagtttgatagctctcagagttaacctgaagttgtcaatgtttggtactagatgtaaaatttcatcggttaccctgcaaccgttaagacttcttatacatcttatatctaaattttttagcagactgtcatctcgtagatccaaatcttcaggaattgtctgcagtgctaatcttgcaaacaaaatatcaatctctatcccatcaaaacagagtttaataactggtacgaatgcctcttcaacagctcttaaatcttttacttcttcctgtaatttcaacttatcatagaatgaggtgaaaaagtcacttcgatcaacatgtcttggtgcaacacacaacgcatcaatatcagcaccttttgtatgcactcctaatctgtaagatccaaatgtaaaaatttttcctccaacattttcaattacagattgtggaagattcttgctttcactgatttctcgtatccactcttttaccaggttatttagttttcccaaaattaaaatcctgcgctgaaagttccctcttccctccttcaaaaaaaacccaaatggtttcaatgtctcaattagtttctgtgtaagtacgcagtcagtctccttgggggctgctaagctgaataggagaagtaatgcccatagtgcttctgtggcggttgtgtttgttgtgatccctgtgttgtaactggaaacggcatcgtctccggcgccggcaccgcccagtcacttcccccccgcaaccgccgccgctgccgccctgggcatgatccactgaggcgggagggaggggggggcctgcctcagccctgggtccaacccctctcccgcaccgctcccgccgctttaagcgcttctcctccttccccttcgtcctaacctcgtgccgaattcttggcctcgagggccaaattccctatagtgagtcgtattaaattcgtaatcagtcataagggttttcaaagggtgtcaaaggagg

SEQ ID NO: 58297 - DNA, 1047 bp, Homo sapiens
tcatttgacaaggcggtggatgaattttattccaagatagaaggccagaaaattgacttaaaagctttacaacaggaaaagcaagcattgaagaaattagataatgttcgaaaggatcacgaaaacagattggaagctcttcagcaggctcaggaaatagacaaactgaaaggagagctcatagaaatgaacctacaaatagttgacagagccattcaggtagttcgaagtgctttagctaaccagatagattggacagaaattgggttaattgtgaaagaagcccaggctcaaggagaccctgttgcaagtgcaatcaaagaattaaaactacaaacaaaccatgttacaatgctgctaagaaatccatacttgttatcagaggaggaagatgatgatgttgatggtgacgtcaatgttgagaaaaatgaaactgaaccaccaaaaggaaaaaagaaaaaacaaaagaataaacagctgcagaagcctcagaaaaataagcccttacttgtagatgttgatctcagcttgtcagcatatgccaatgccaaaaagtattatgatcacaagagatatgctgctaagaaaacacaaaagactgttgaagctgctgagaaggcattcaagtcagcagaaaagaaaacaaagcaaacattaaaagaagttcagactgttacctctattcaaaaagcaagaaaagtatattggtttgagaaatttctgtggttcattagctcagagaactatctaattataggtggacgagatcagcaacagaatgaaataattgtgaaaagatacttgacaccaggagacatttatgtacatgctgatcttcatggagctactagctgtgtaattaagaatccaacaggagaacccatccccccacggaccttgactgaagctggcacaatggcactttgctacagtgctgcttgggatgcacgagttatcactagtgcttggtgggtgtaccatcatcaggtatctaaaacagcaccaactggagaatatttgacaacaggaagcttcatgataagagga

SEQ ID NO: 58298 - DNA, 1939 bp, Homo sapiens
ttttttttttttttttttaaaatatattccatatttattcagaatatcataatcaatgcaaacacagaactctcttctcacctgtaaaagttaagtacaatactatgggctagatacataatatttcagtcgagtcttcagtattagcttgtaaaaacaaaatctacaattatagatatccatcatacaaaatatatatacaaaagcataattgtagtgtagaaagataaagttaacaaaatacaacttatgtaatttactttacacaaaaatgtattctagttaattttttccaagagcttcaccaattagtcgaatagcaatactcttgccttcatctgtttgaatgacaagcaaagcttcaaatttgcctgcggacttcggtttgaactgcacgggcatgttgatgtaatgctgggctctcaaagagtacttggaatgtttgacatagaatggctctctgggactcaaaaacttcagtgagtgtgtaataaaagaattatttcgcagattgactttaagtgtccgtgattcccccacactagtcggcaggaacctgtacacatcctctggggcataaactccacgagcagtcacatcaagctgcctgtcaggtatgcgagcagaagcctctgacacagcttgtcttcggggcttaactaaatgatctattttaatgagggaatccgtggaaaggcatgcgttttcaggctcattttctgcttcgatgctttgtccagagagttggaatctcaacgtgtgtttcatgtgaggctccttaagagggtgacattcaacatcccaaaactgggcataatcccccctacctctgggcaaaaatgtgatggagactttttggatcccatggctttccagcagaccagaaataggagaacatctgaatgctgcataggtagctctaaaaacatctccactttcatcaactcccttgacataaggtggcgctaaagatgacagatgccatttcacgtctgtggtgccatgattctcgagttctagacagctctctgaagtttcaccaggttctgttgtaggaaaagtaatactcttgtttcttatttcaacttttgtggaaggcggttttgtcattggtttgaccaaatgactaactgaaggctcagatactggggaaagaattccaaatggtttggaggtcaaacgagttaaaagttccacttgagttaaatcttctcgaatttgaactttcacaattttcttctgtccatcgtcacagtgtatatagatcaaaccactccacgggaacattgactgttttgtggataaggaggaattaggactcacaagaatttgtagtttactctctggcgcgacacatccatgctgcggcgtgactgtgaggcaatgcgctggccagcacagctcaaatctcagtaacctcacagagttattcacaatctggaaacgtccagtttttgccatgtcacaaggagaaggagctaccagaatcaagtgctcgggtaggacagtccacggctcttcggaggccagctgatccggaggcgggcgagccgcccgtgagagaagaggagaaccctgaggacctttgactggtaaaacatccaaagagacgttgccaccatgtttcccagaagctcccaagtcgcttgtagattccaagctagctttggaagaaggctgaaggaattctctgctagaaatgcaatctctgaattctccaattactgaaagtataattttacacatgcttccataaaagagctgaacatcattaggtcgttggggaagatcatatacttcagttactaatagctcatcttgaaatgcttcaacaaaattaatgttttgaagcacactatgttctggaagtatctgttttatcatctctggtttatgtaacagggccctgcgataatgctgtcttgaaatttcatctcca

SEQ ID NO: 58299 - DNA, 811 bp, Homo sapiens
  misc_feature (1)...(811): n = a,t,c or g
tttgcatgttaaaaaacatgtttattttacaatatgtacaatcaggaacatattttaaaaccattatcattaaaataaatgaagatcataaatcacaatttagtttgttcttagtgtatatactcacattaaaatataaagaacatataccaaaaagagccaaaagtgtgcattttgctaaaacctggtatatacatattccattggaaaaaagcaatcaaaaatgacttaaaccaaaactaagttcctgtgatgtgtagtaaccattatattgtttgtatgaggtagtaactaaattattttggccatgtattaatactctaagtcaaaagaaatatgaaaaggatcataaaataaggccaacaaaagtaaaaattccaagagaaatttgaaccacttcactctatggaatgttacagttcttcagtgtgatcatatggaatggtttagtgaggactcctttaataatgctaattaattctttgtgcatactgcaattctgaccacaattgcagtattctatcatggtaccgctattctgtgattcaaaaatgttcaaaggtattgtttttaagcaaagacaagcaatcttacaggattctgcttaaatataaaaagaccagttactacaacatgtggttaattataattggtttgcttcacatagaaaacaatccaaatacatttgtggagccaaatgcttatagacaatgtcacagcttacttttgtgacttaatacatcacatatcaatactctgtgcaaatataaacaccagtgtacttgcatnaaaatnaaaaagattataaaat

SEQ ID NO: 58300 - DNA, 567 bp, Homo sapiens
tcacacctaaacaaatgtttatcttgccatagtgattgaaccataggctgaattgtaaaagctgatgtttgggagtctagctaaagaaaactaagttaataggtttaaagaagcaagagctggaagggtcttctcctggaaggtgagatattggtctgtggggtgtccaagggagagaatccagtcatgggttcttagcttctctttctggttggaccagtaaagcctcttcctcatccctcttttctgctcatcactagagacagaaactaaaaaccatggcttcagtctgctaaaagcctaaaacaaaacagaacaacaacaacaaataaggcaggttggacaagtttgctagagtctgtgtgacatttaaatatcttcgttaacccagctgtttaaggtatatgctcattgcttttcagaaattttgaattttaaaaatatctgaaaatggttgagtgctgaaagttaacagtgcaggcagttatcattgagaacacctgactttcacacattttaacaccactaacattggctagtcctttttattgtctagcaatagcccag

SEQ ID NO: 58301 - DNA, 355 bp, Homo sapiens; identical to SEQ ID NO: 25597

SEQ ID NO: 58302 - DNA, 1237 bp, Homo sapiens
gtcgacttttttttgacggtagtttcccaagtttattgtaagtggttttaagttaagtctcatccaaacaagttatcacacagcacttaaccaagccctgggatttactgtcttgatgactacacggctttgcacagtctgagatgcttcagtgtgcaaggcagcagctgggggggaggagggggtcttcacagggacagctggcaagagacttcctgaggcacatcagctacgttgggtcaatttaggggcacggtctggttctgcagcttttgaaaggtggattctttctattaggcacactttacaagagggattgtaaaggattaactcagtcaccagaaacgaaacaccacttcagaaattcagagacctctgatcaacagaacagacatttgggctttaactgctaaagcagctacctacttggggaaaccatggcattctgctgcctggacagcaggaattaagagagatttcagagttactggcacgaggacaaagcctctcagctcgcttcaccttggcaaccttaaacagtccctccttggtctctatgatagcagtatgttcctttggatggaatacttggtttggaaataatgtagtcaaatgtaggatatgtaagtactcctcaacagtcacaatccatcctagtatcttaaatagtgattttttttttttaatttacaaaagaggtttattggacttacaggttcccacgtggctgggaaggcctcacaatcatggcggaaggtgaaagccacatctcacatggcagcagataagagaaaaaaaggtagtgatcttttagtaaagaaacctgagactggtagtgggcttggagccagaggatcgcttaagtccgggagttcgagaccagcaccacttggtttctttcttgctcacatgccagtcgtgacattcagacaggatctaagctacaaacttaggagacctccctggcgtccttaacaaagcacatagaagccaaacagccgtggtttcccctaaatgtcaggaccctggagcagaggcaaggtcagagtcattaagcattctcattgccacaagctggcatacatcctacattccaatctgtttctaagagcacattcattttcttgaaatatgtaacaagcactttcattccacaataagggcataaatcaaatcctgggtacttgtgcattcctgccatctcatacagcctgtatcctcagagccataatcaaag

SEQ ID NO: 58303 - DNA, 428 bp, Homo sapiens
ccctctcccaccctcatcccgcctcctcgcttcctcggctccagcctccgccggcggagcccactatgccagacagtttcgacactttgcaaagacaaagagccctagaccggagggaggaggaggaggaagaagagcggagagagaaggaagaggcgatgtgagctgggaagggggcaagtgtccgggacacccacacccctgtattctcctccgaaccccttcatgcccaaatcccggaaactccagcgtgtctccagccgtgttggtaccattttcagatttcatcttcctaaactggaaatgtcaatgagaggaaattaacacccccaagagctgcagtgagcaaatgcattgagcttgggtcaggacaattccatttggggaccagagatggacggtcactcacctatggagatgaagaaact

SEQ ID NO: 58304 - DNA, 1366 bp, Homo sapiens
tttttttttttttgggttgaagcacttttaatcacaaacaatagtataagaccgtgaacagctcacccagtggctgttgccctcctccagccctcagctcaccctcttcccatgctccctccctgggtaccattgagtaaagagcagggtattggcagctgtccctgttgctatcaggtgattgataggaaggggatctagctagggaccacggcaatcctggccatccatccatggttctgtttctatacaacttcatcatgtgacatattccagctgtgaaagaggaacagtacagaaatgtgggactgaacttggctgctccattcagatggtccaggggtttagagtgtcaagagccaagggcaaaaaaggaggagaagtctggagtcggcataattcaagatgcagccaaatgtggaactaaggtgggttcagtggggacccagggaaggcctcatggccccagtccacaattgtgccccaaccccggcaatgaaactcacgcatatgcacaaacgcacatcaacaaacacacaaaaacacacagagcaaataacattactgaaagaacctggaggctattaaatacaaaatggcagttttctttcaaagtgaaaatatttgcttctttgatactcctcagtgccttgcagtctcccaatcacagaagagtagatatgggaagggccaagaggagtatgttgccagtggccctacaagtccatgtgtgctgaagtccctatagcaaccaccttactcttcagcccagtagctgcctcccatgtgaccattcacccgattggcaccattgctggagctactgtcacagggactttttgtgcaggtggtcacatcttcttcctctgagctgctctccacatcactgcgatcatccttcgatacatgcaagagatgaaactgtccagctcccgccaggcatagaaaaaaggaaggaggtgaggaaagagtggagagtacagggtctaatccttcctggacaggtcaccgaagaggcgaagactttggagccctaggctttttgcttggcctgcttgagtagatggggctcaccaggtttgatggagagagaacgtctgttgagtaatccctatcttccatacccaaaagaaagaagccatctttcatcctcacctttcccctgatcaaggctttcaaagcaatccgtgcaattaggtaggaccagatgacatgcagaagctgtagggtcagcagcaggccattgaggagccaccatgaagcataaggcccgattatctcccaactctcaaagagggtcgtgttcagaatccagaatggatagattcctagtcgtgtaaccataaaaacagcactgaagatcaca

SEQ ID NO: 58305 - DNA, 537 bp, Homo sapiens
  misc_feature (1)...(537): n = a,t,c or g
cctcttagacattgncctcataatgcactgacagaattcacanagctcttaatgaaacaatttaagattgatgtacgtacgtttgacttggtctcgctgtcggttaactgtaaagttagggggaagaaagacccaaaaattaaaagggtagacacagttgagagttttattttaaaaagctaagtcttataattatgaccattaacttgctttggctttattgcagtgactttccaagtttaattattcaaaactttttgaactgactgaattaacttggtatttttaagttgactttttacataaactttataaaccttttataaaaaggaaactataccattactataaatggaaaatcattttacacatcatacctagcaggtaataaaatttaaaaaataaaaattaaatattagaatgtgagaaatttattaaaatatagttctaaaaataagtttcttcctgagaagaatgatactgtttatgatgaatccatagtgaaaagacagtgacctctctttcatccagtctagt

SEQ ID NO: 58306 - DNA, 1400 bp, Homo sapiens
ctatttttgagaagctgaagcaactccaaggacacagttcacagaaatttggttctcagccccaaaatactgattgaattggagacaattacaaggactctctggccaaaaacccttgaagaggccccgtgaaggaggcagtgaggagcttttgattgctgacctgtgtcgtaccaccccagaatgtgcactgggggctgtgccagatgcctggggggggaccctcattccccttgctttttttggcttcctgggctaacatcctgttattttttcctgggaggaaaagtgatagatgacaacgaccaccttttcccaagagatctggtttttcggaggaatattagggaagcggtgtctttgatgatcttccctgcgctggtgttcttgggcctgaagaacaatgactgctgtggggtgctgcggcaacgagggctgtgggaagcgatttgcgatgttcacctccacgatatttgctgtggttggattcttgggagctggatactcgtttatcatctcagccatttcaatcaacaagggtcctaaatgcctcatggccaatagtacatgggggctacccccttccacgacggggattatctcaatgatgaggccttatgggaacaagtgccgagagcctcttcaatgtgggttccctggaatctgaccctcttctccatcctgctggtcgtaggaggaatccagatggttctctgcgccatccaggtggtcaatggcctcctggggaccctctgtggggactgccagtgttgtggctgctgtgggggagatggacccgtttaaacctccgagatgagctgctcagactctacagcatgacgactacaatttcttttcataaaacttcttctcttcttggaattattaattcctatctgcttcctagctgataaagcttagaaaaggcagttattccttctttccaaccagctttgctcgagttagaattttgttattttcaaataaaaaatagtttggccacttaacaaatttgatttataaatctttcaaattagttcctttttagaatttaccaacaggttcaaagcatacttttcatgatttttttattacaaatgtaaaatgtataaagtcacatgtactgccatactacttctttgtatataaagatgtttatatctttggaagttttacataaatcaaaggaagaaagcacatttaaaatgagaaactaagaccaatttctgtttttaagaggaaaaagaatgattgatgtatcctaagtattgttatttgttgtctttttttgctgccttgcttgagttgcttgtgactgatcttttgaggctgtcatcatggctagggttcttttatgtatgttaaattaaaacctgaattcagaggtaacgtaaaaaaaa

SEQ ID NO: 58307 - DNA, 618 bp, Homo sapiens
  misc_feature (1)...(618): n = a,t,c or g
gttgggaagaaaaattggtcagcttggctcggggagaaacctggtaacataaaagcagttcagtggcccagaggttatttttttcctattgctctgaagactgcactggttgctgcaaagctcaggcctgaatgagcaggaaacaaaaaaggccttgcgacccagctgccataaccaccttagaactaccagacgagcacatcagaaccctttgacagccatcccaggtctaaagccacaagtttcttttctatacagtcacaactgcagtaggcagtgacggaagccagagaaatgcgatagcggcatttctctaaagcgggttattaaggatatatacagttacactttttgctgcttttattttcttccaagccaatcaatcagccagttcctagcagagtcagcacatgaacaagatctaagtcatttcttgatggtgagcactggagctttttttttttacaaccgtgacaggaagangagggagagggtgacgaacaccaggcatttccaggggctatatttcactgtttgttgttgctttgttctgttatattgttgggttgttcatagtttttgttgaagcnctagcttaagaagaaacctttttttaaa

SEQ ID NO: 58308 - DNA, 598 bp, Homo sapiens
  misc_feature (1)...(598): n = a,t,c or g
ggcgcggtggctcacgcctgtaatcccagccctttgggaggccgaggcaggtggatcacctgaggtcagttgtttgaaaccaagcctggccaacatgatgaaaccccatcgctactaaaaatacaaaaaattanccaggcgtggtggtgcctgcctgtaatcccagctactcgggaggctgaggcacgagaaacantttaancccaggaggcggaggttgnaatgagctgaggtcgcaccactgcactccagcctgggtnacacagtgacaaaaacaaaagttggaggccagtgactgtctgcagatgttgccggctgcttcactggtcagaccccgtccttctgcacagtctttagcacccaggaccctcgagacctgtgccatggccccaacccatccacgtgggggtgtctcacaggcccccatggtgtgaaggttgcggcagtcaagctgtttgtgagagagagccctggaccacagcgtgtgaagctattgggcaaaagaacagagttttccagaatgatgactaggatggcccagtagaggaagatgatggtctgcaggcatttgcctttgaaggaagtcctgtcagttaac

SEQ ID NO: 58309 - DNA, 499 bp, Homo sapiens
gaaaaggtaccaaataacaggttatgaggaaatgagcgatatatgaaccgcataaaaacagaaattacccagtaaaaaggatgtcagaaattgacatacaaatatttacaatttttatgaatggtggtctttgcaaagagcatttatattttcttttttttttactaaaatgatatagggtttattttatattttcaaaaaaattgttaaacatcattcttatcaatgttaaatttacgttattaaaaaattacaaatgatagaatctttactcagggatgggcaataaaacagcaaagagctttgtgattgggtttgaaagattttgaattacagacagtgctcttaatagtttttaataagttgatatttttttctgtgtagatttaaataatttctttaaaagcgtaagctttgggctggggcatggtggccttatgccctgtaatccccagcactttgggaggcctacgatgggtgggatcacctgagggcaggg

SEQ ID NO: 58310 - DNA, 1178 bp, Homo sapiens
  misc_feature (1)...(1178): n = a,t,c or g
taaagttgtcatccttccacagaaaatgatagaccactagaaatacacggttattttctaattaaagttcaatgtgtacgcttttaaattctgaagttatccttcttttatgatatcaaaatagccctcttttttgaaatgatggtagatcataccttttggtctttttcattgtccttacataaaagttggtaatcatatgtcagtcccagaagttttatttgacacttactggtctataaaatccaaaggaatggggatcactgcctgccttaaaggtttttttgtgtgtttgtttgtttttttgtttgcatgtgaaggatttttatgtcacaaatccagctaacagtggatctaggatctaggcctcaccgaggatgtcactgaacctgtcagccccaatgacaggcacacaccttcaaagagcaagagtgcccatcactttctaggctccttgcctgctgctcattccatcatcacggatacagacttgtttctggtttcatcttccaccagagattgcaaagcatcctctgcccagtgcttctaggaggccttactgggatggttcataagccactttcctcttggtgacagcccctgtacactgtggcatgtacggctggctccacttggtatttgttgcaggagggaagaacatctcacttttgcttggctaaagggccaccccaggagagctattttgcctcagggtcttgcagggtttctctaggaaaacagtgcatctgatagttactctctgcccctaggaggaaagacagattcgcccttccttcccaagtcccaggctgtgtggttcccagccccaagggtagcaagtcagaacctccggagaggcttttaagcatgcacatgtccagggtcctcatcaagagactgaatcagggggtctagggctcagcacaggcaccctttttgtttttgcagtttcacaggaattctgatgtgccagtgattgtcaggtttgtccctgggcaggacccacctgcctgaccttctgtccccctgggacaacagtatttccagagaggtgcttcagttgccccaccacgacttccagcgccccccatctctgtatgcagctgagctcatgatgggagcccattgtgttgnttttttgtttgtttgtttaacatttcctattaaaaaatgttcca

SEQ ID NO: 58311 - DNA, 1652 bp, Homo sapiens
agatgtccctaaggtagaggtgttggaacgggagctggcctggctgaaggagcatctgtcccagctggagtcccctgtggtgttttgtcacaatgacctgctctgcaagaatatcatctatgacagcatcaaaggtcacgtgcggttcattgactatgaatatgctggctacaactaccaagcttttgacattggcaaccatttcaatgagtttgcaggcgtgaatgaggtggattactgcctgtacccggcgcgggagacccagctgcagtggctgcactactacctgcaggcacaaaaggggatggccgtgacccccagggaggtgcaaaggctctacgtgcaagtcaacaagtttgccctggcgtctcacttcttctgggctctctgggccctcatccagaaccagtactccaccatcgactttgatttcctcaggtacgcagtgatccgattcaaccagtacttcaaggtgaagcctcaagcgtcagccttgggagatgccaaagtgaccagccaccccatccctcccctacccatctgtctggccagacctgttctccagagctcaattctgcactctgggatccacacccttgggacagggtgggagaggggacacatgggtgtccagggagaaggctctgtccctgccgccagaccccagtggttgccactgaagacctcattctcctgtctggaggggctgataggacccccttccgggggtccccttcaccccaccaggcttgggaggaagtgcctgcagccaggtcctgaaccataaccacccctgggaaacacatcattcccagcctcaggccctgctggaattggggctgccttatatgtgtgtttaccccttcctggcctggggaaggaggcggggagggctcctttctacctccagtgccctgagcctccagtccgtctccccctgcatgccccatgtgggaggtgctgagctccaaaccagcatcacaccaactctgacacatggatgtacctatcttggtgatgggtgggggccaagaattgagcatgacatcttccccagcagccacctcctctgagatccctcaccttctccaaaccagatccaatcaaacctcagcccgaggaaacatgctccccaacgtgctctcctgtgcttctgttttgtccccctgctggggggacaggagagggagtggtgaggccctgggcctccagagcctggctctgctttgtgctgtggcttagccggaggggacgtggccaagggtgaggtggccaaaaccagaaccagcagtctcctgccttgttccctccctggccctcaggccctccttccagggatgtctctccagctctactttatgtcctgaagctgacccgaggtcttcctatctggaatgactagagggagccaagaggatggggtgggggccagggccccccagggcctatcgtgggagagcctgggcaggatcccatcagaaaggtgctgactaaactggttgcccggacactcaacagcctccacctccctttctaccctcacagctcctggggccttcctggctctggcccagaaagtgattcatttgtaaattatcatggttttctttctgcattaaaatgctcatttccggaaaaaaaaaaaaaaaaaa

SEQ ID NO: 58312 - DNA, 1647 bp, Homo sapiens
  misc_feature (1)...(1647): n = a,t,c or g
tttttttttttttttttcaaaatcaaactgctttactatactttattgatataaatacagcaaatctcaataagcaccagctaccattttaccactacacaagagaaacaaagtcaaaagaattatatattaatgcaaagagtaaacacagaatgctttcacttccactatagtcctctataacaaaacatcctacatactttgtacaatttgcttataattggttaaatatttgatatgaagcaaggttgatttttaatcaaacttctatttctcagtggaaaatgctctcttcatcagaggtggttgagttttcccgacatcaaacatcatttccaaaggtgggttattgagagaacaccaatcaggtatacggcccgtctgattataatattcctttgaaacagaacggctccccaagtatatcttgtaatgctcccaaaaatagcccctcccaaccaggccacacaattagcttttgcaggtggagtatgaattcgaaatgtcttagtgccaagtgcttttttatattttggtttttctaccaaataccttatttctgcaagcaatctgtggagaaatcctggcaacatagaagtgccacctatgactaccaaattctctgctagttgcttcctggtgtctatcggacactgtataagggaatccaatattaaagtggcaactgattgctcttcattatcttgttcaaaaagaatttcccacaactgaatctctgattgatccaaggatatgtaaaatcttctctccatctaatggatagtcaacatttgggggtggggagggacgctcattattcccatcaatattaaattttgctgcttggatttttagtcctcgcttcagatcacttacaaagcaagtacgcgctttaatgtcctctaagacaccttccggaactgaacccatcactgagggaaggctctgttctttagcaacacttgtgtcaacagtacattgttccaatagttgagtttccaactctttgtgaagagcttttcctcctaggggtagtgctccccaacaatttagaactgggattccttcatatatgggtaacaccaggctttccctatatccacaatctaggaccatggcagaattaattccaagcgtcagaagagccattagatgacttggagcaagcaagacagatggaacctcaaaatatttgaaaagaacacgagtgagtgtctctctgaagtgagaaggacataataccgattcgataatcacaactcggcggtctctgggattcaccaatagatgcctgaaatatagtatgtggatgaattcctttaggtaggaatataattcttctgtattgatattatactgaacaactctgacaggcttaggcatcccagctctttttatcacactaggaattatacatcttggaccagtttctccagcaaatccacacttggtaaaggcctctccccaggtcgatcacgaccgccgtcttctccccgccgctccccaggccctcgtagagcggcatggtagtaaggcagactgagagaagagggtcgcagtctcctcgtgccgaattcttggcctcgagggccaaattccctatagtgagtcgtattaaattcgtaagcagtcaaaacggntttcaaa

SEQ ID NO: 58313 - DNA, 345 bp, Homo sapiens; identical to SEQ ID NO: 25624

SEQ ID NO: 58314 - DNA, 772 bp, Homo sapiens
aggggcccagcagcccaccctttcctctccccactgcctcctctcccttcctacactcccagctcgagccgtccagctgcggtgggatctgagtatatctagggcgggtgggcgggtagcagtgctgggcctgtgtcttgagcctggagggagtctgctcctgccgccctctgccctgccagagacagacccatgcgctgcctgcccaccgtgcccctttgtccccatgtcaggcggaggcggaaggcccaccgtgccagaggctgggcaccagccttaaccctcactctgctagcacctcctccctttccccaaggtagcacatctggctcactccccactccgtctctggagcccaccagggaaggccctcatcccctgccgctacttctctggggaatgtgggttccatccaggattgggggcctctctgctcacccactctgcacccaggatcctagtcccctgccctctggcacagctgcttcctgcaagaaagcaagtctttggtctccctgagaagccatgtccctcgtgctgtctcttgcctgtcccacctgtgccctgccctccagcttgtatttaagtccctggggctgcccccttggggtgcccccccgctcccaggttcccctctggtgtcatgtcaggcattttgcaaggaaaagccacttggggaaagatggaaaaggacaaaaaaaattaataaatttccattggccctcgggtgagctgagggtttttgcaaggaaaaaaaaaaaaaaagtcgacg

SEQ ID NO: 58315 - DNA, 809 bp, Homo sapiens
tgacatgattacgaatttaatacgactcactatagggaatttggccctcgaggccaagaattcggcacgagtggcggagcagaacggattgcagggtcagccatgtcatctgagcctcccccaccaccacagccccccacccatcaagcttcagtcgggctgctggacacccctcggagccgtgagcgctcaccatccccctctgcggggcaacgtggtcccaagcccactgcccactcgccggacgaggaccttctcggcgacggtgcgggcttcacagggccccgtctacaaaggagtctgcaaatgcttctgccggtccaagggccatggcttcattaccccagctgatggcggccccgacatcttcctgcacatctctgatgtggaaggggagtatgtcccagtggaaggcgacgaggtcacctataaaatgtgctccatcccacccaagaatgagaagctgcaggccgtggaggtcgtcatcactcacctggcaccaggcaccaagcatgagacctggtctggacatgtcatcagctcctaggagatggtggaagcaccccttgtcctgtgcttgtgggagactttgcggggaggaggcagcagacactggagatgacattcttccacacgagacggggcttcagccgggcatggtccctctcaagtatctcctggaggaaggggtatggggggcaggtgtggggtgtggggtgttcccggccatcagcacagcctatgaccattgcaacaacctctcaccatctgaagagcattaaaagcatttaaaaaggaaaaaaaaaaaa

SEQ ID NO: 58316 - DNA, 1831 bp, Homo sapiens
gtttttaaaaaattaaacaaggctttgtgttcctagaagagcttcatttcagtgaatctggtgacctccatctgcttgctgtcataacccgacacggacttatttttgtcattagcaagggggaaaaggccaaaggacaagggcctcttctcccattggttttcctgtgggcagaagggctgaggaagatggcccagcccgtgggggctgcctgggtcaccagcacggcgtagggtgcaatctggtgtgtgttccagcagtgagacgggtgttattgtgaaggtggcattcatctgcggaccaaaacccagccatcggggaagggtcagggcttctgtggaacttggaacgtgccaggaccacctgcaaaagccagggtgcgttgatcattctcagatcattgattggcctccacttgggtatgtgaattattcatgtcccagaagaccaaaaagtgctctggttctgagatgagtattttattcgtgttctgtttccgaaacacttagcaaaagaaggtcacagtgatgtggagtcgccgcacccatctttgaagatagccagtgtccctgggatgaggtgatgatttcccgtcccaaggactctgtgaagtttagagtacagtttgttggggtccaaaagacaccatctctaccccacccaaataaaaatgcactcatctctgtagaacatctgctgtcaaaggccagcctgtcgttaggacatggcttatgcttgacaaaccagtaacaactgtgggatggcgatggtgggatgtgtcgcaagcaattcactagacaatcttcacatgaatgtcggtagccagggtctctcccgagggatggctttagtcttgatgaatgtgaaccatgtcggaattgttaggtagaaacctgggctgggaggcctcggaccccaggctccatccctggggtttcccccagccttgcggccgcaaggcaaaaccaagcgcgagatgcagctagcacccttcatatccatccccgttctcagcgggacaacaccatggacagccgttttcagagcctccagcatttgcacaccactactcaccctctctgctgctggcatgttggtagagtcatccctgtaatcaagaaatggcctgtggaatgttattgttcaacgttgtttacagctcttaaaacatggtgaggaatgcctaagtcttagtgaccaaacgtgaccttgaaagcagacatagcattgacagaccttcctagagtgtttggtcgggttcacagtgaccgagagtcaggtccagcacacacctgggaaagggatgctgccccaagggggaccaaaagggccggacgttacagggtgaaaccctctgacccctcgcgacaccgtaggacttgacttttgtttagtctttctaagaaatagatcatggagccaagtgaagtgcactttgtcaaatgtaagggtctgctttgttcttgttgcttttctgttttttaaccttttgttccgccatttaaaaaaaaaaaaaaaaaaaagcttatgtttcttgtcaaatgcagaaatgttccttccgccactcactgaagttttgcattctggcttgtgcagtttttattgtctgtgtcagacgtacagccagacatgttctctattggcatttttccgattctgttcagatgacagcgaccgccttttcattccccccgccacctgtactcaccctcacgctctttgaagaaaaaaaaaaaaatcaccttgtgtgttgtagctcatttgtttcaagagagaatcaacagatcgatattcagtgtcttgaataaattgctctattttgatattagag

SEQ ID NO: 58317 - DNA, 4315 bp, Homo sapiens
ggtttttgtcttttgatttcaagaggttagggagctcgagaaccgtttggcaatatgtacgacgcggatgaggatatgcaatatgatgaggatgatgatgaaatcaccccggatttgtggcaagaagcatgctggattgtaatcagttcctattttgacgagaaaggcttggttagacaacagctggattcttttgatgagtttattcagatgtctgttcaaagaattgtggagacgctccctcctatagacctacacgctgaagctcagcatgctagtggagaagttgaagaaccgccacgatatttgctgaagtttgaacaaatttatctttccaagcctacccattgggaaagagatggtgctccttcaccaatgatgcccaatgaagctagattaaggaatctcacgtattctgctccgctttatgttgatataacaaaaacagtcattaaagaaggtgaagaacaacttcagactcagcatcagaaaacttttataggaaaaattccaattatgttgcggtcaacttactgccttttgaatggcttgacagatcgtgatctttgtgagttaaatgaatgccctttggatcctggtggctatttcattattaatggatcagaaaaggttctgattgcccaagagaaaatggcaacaaacacagtttatgtgtttgccaaaaaggattctaaatatgcctacacaggagagtgtagatcatgtcttgagaattcttcccgacccaccagtactatatgggttagcatgctggcaagaggaggacagggtgccaagaagagtgctattggtcagcgcattgtggcaactctaccatatatcaagcaagaagttcccatcattattgtgttcagagcattaggttttgtgtccgacagagatattttagaacatattatttatgattttgaagatccagagatgatggaaatggttaaaccttctctcgatgaagcttttgtcatccaagaacagaatgttgcactaaatttcattggttcacgaggagcaaagcctggtgttactaaagagaaaagaattaaatatgcaaaggaagttttacaaaaagaaatgctccctcatgttggtgtcagtgatttttgtgagaccaaaaaagcctatttcttgggatacatggttcataggttacttctggcagctttgggtagaagagaactagatgacagagatcactatggaaacaagagattggatcttgctgggccgctgcttgcattcttatttagaggtatgtttaagaatttgcttaaagaagtgcggatctatgcacagaaatttattgatcgaggaaaggattttaacttggagttggcaattaaaacacggatcatatctgatggcctaaaatactctttagctactggaaactggggtgatcaaaagaaagctcatcaagccagagctggagtatctcaggtgttaaaccgcctgacttttgcgtctactctttctcacctgcgtcgtttaaattctcctattggtagagacggcaagctagcaaaaccaagacagttgcataatacgttgtggggaatggtgtgtcctgccgagaccccagagggccatgctgtaggacttgtgaagaatttagccttgatggcgtatatttcagttggatctcaaccatctccaattctggaatttttagaagaatggagtatggaaaatttagaagaaatttctcctgcagctattgctgatgcaaccaagatttttgttaatggctgctgggttggaatacataaagatcccgaacaacttatgaacaccctaaggaaattgagacgtcagatggacatcattgtgtctgaagtttctatgatcagagatattcgagagagggagattcggatctatacggatgcaggccgtatttgtagaccacttctgattgtggaaaaacaaaagctacttttgaagaagaggcatattgaccaattgaaagagagagaatataacaactatagttggcaggatcttgtggccagtggggtagtggagtatattgataccctggaagaagaaacagtgatgcttgcaatgactccagatgatttacaggagaaagaagtagcttattgttccacatatacacactgtgagattcatccctcaatgatccttggtgtctgtgcatctattattccctttcctgatcataaccagtcccctagaaacacataccagtctgctatgggtaagcaggctatgggagtttacatcaccaacttccatgttcgcatggacacattggcccatgttctctattatcctcaaaagccacttgtgactacacggtctatggaatatctacgatttagagagctgccagcaggcatcaactcaattgtggccattgcatcatacactggatataatcaggaagactctgttatcatgaatcgttcagctgtagaccgcggcttcttcaggtctgttttctatcgctcatacaaagaacaggagtctaaaaaaggatttgatcaagaagaagtttttgagaagcctacacgtgaaacatgccagggcatgaggcatgccatttacgacaagctggatgatgatggtttgatagctccaggggttcgtgtatcaggagatgatgttattataggcaaaacagtcaccttgcctgaaaatgaagatgaattggagagcaccaatagacgctataccaagagagactgtagcacttttctcagaactagtgagacgggcattgtggatcaggttatgggtaactctcaatcaggaaggatataaattttgtaaaataagggtacgctctgttaggattccacagattggagacaaatttgctagttcgacatggtcaaaagggtacttgtggtattcagtatagacaagaggatatgcctttcacctgtgaaggtatcacccctgatatcatcatcaatccccatgccatcccctctcgtatgactattggtcacttaattgaatgccttcaagggaagggtatcggctaacaagggtgaaattgggtgatgccactccatttaatgatgctgttaacgtgcagaagatttctaatcttttatctgattatggctatcatctcagaggaaatgaggtcctgtacaatgggttcactggtcgaaaaatcacatcacaaatatttattggccccacttattaccagcgtttgaagcatatggtggatgataagattcactctcgtgctaggggacctattcagatcctcaatagacagcccatggagggtagatctcgtgatggtggcctgcgttttggagaaatggaacgagattgtcagattgcccatggagcagcccagtttttaagggaaagattgtttgaggcatcagatccatatcaggttcatgtttgcaatctttgtggaataatggcgattgccaacaccaggacccatacatatgaatgcaggggctgccgcaataaaacccagatttctttggtgcgaatgccttacgcatgcaaactattgtttcaggaacttatgtctatgagtattgcaccgcgaatgatgagtgtttagctattttacaggagtcaacaagataattaaatatcttggtgtcttgtttctattgtgtggctttttaaaaatgacaaatatgtactgtgttgtgataaaaagtattttatttgtttaatgatatgcatgcttttcttctgtaaatatataataaatttttgtagatagtcttgatgtgtgatctttattttgtatttctctgtgtaaaaccagtgaatataactaaagtgttagtggattggattaaaagaaacttattaggcaagaacaggtaatgtagttatccatgactacttttaaccatgcagactaataatattctggaggtttatagctcggcaccttcaccttttttcactggtatttcatgtaaggcatcaaccactgtaatttttgctgatgctgaagcctgtccttgggaattggatgcatggcactcatattctccagcatcttccttacttagaggagataccagcacccagccagttacttcatgcttttctgggccaccccgggtctgaatggccaggttgtcccggtcaccaggcaggagttctgtcctttgaactccatagtgacccctttttaccttgttccagatgaggacaggtgtcgggattccgatgacctcacagctcaagtacacctgggcaccagtgacattccagatgtccttggggggcgtcactatggaaggaccttgctcgcaggtgcccttgctgacctggg

SEQ ID NO: 58318 - DNA, 3296 bp, Homo sapiens
  misc_feature (1)...(3296): n = a,t,c or g
ttttttttttttccatgtggttaattttttttttttagttctcatttttttctaagaaaaaagcaacaagaaaataattcagagtttatacaaaacatctttacattattttttttccaaaaagactagtatttacacaaatggcaacagaaacaaaaacaaaaacccttccgactgccacctggaaggggctggctgttctgctccctctcccacctggcactggggtgggcagctggccaggaggcagtgtggaggtggatggtgtgagggccagctccttccatggctgctctgggagtgcctgcaaggcgcactcaagtggcagtctgttagcagccgtgctggcaaggaactggggtcaaagtgcacagcgggctggcccagccccaggcagcctcttcctctttccaggccccagcccaagactgggacagcagcaggagctgggttgggtgggggttacccacctgtgctagggcccagaaaaggagcaggccacctggtcttatacccgcttaggtctccaccctgggcctctgtttccccaccaggccaaaggatgccaaaggtaaggagagaacagggtggggggtgggggtgaaactcccagctctgcagggcaaatagccacctgggcacctcacctccctccaccccccatgaggtcatctgcctgcagcagctctcctgttccccaggcaacagccaattaagaccattaattacccgtgagagtgagggaggcaggagatgcccaagaatcccacaaggaagggatttttttttntgctgtgtgtgtgtgtgtgtgtntgtggaagggtggcagtgactaccccattgcccaggataagccctcgtaggagggtcaggaggggagggtgggacaccttgcccagtggcactttccgtcttccctcatgggcgtgaacagccctggcctgccccttaccccaccagaaataccaaggaatctataaaagaaatggcatcctatgcttcctggctgaccacatcgtgccccaggccctcttgtgactggcttgggccaggctcacaaagcctggggaggggctgccttttacatttttccatttttcttcaaaaaacagatgaaaatgagttgacagctaaaaaatgaacacaaaagcattaaaaacagtgatgatagcggacaagcagtcctgggaaggtggcaaggggggcgagggaggggcaggaccaggggactgtctccctgcctgctgtccatcagtgtccagccctgccttccaagaaggggcgcccccacggagcccagaggcctggccagagggggaaggcacaagagcatgggggttaggggcacaagcacccccctccgaagcccagggggcagggaaaaagggggattataaaagccaagaaactacaaaactaaatacaaaggtgggcacagctggcaaggggagggggtgtgggggcgaaaggagaggtccggtccaggccgactgtccctggggcctgaggccgtgccgggcactcagaccttgtagtagatgttcgccgggctctggggcggcatctcttggacgatgtagacagggtgcccgtagtccccactcaccttctcatagtgggggcagtagttgttctctgtagtccgtaagggaatgatgatgtcgctgggctcggtgcccgctgtgccactgccccccttgggactggccagggtactgagcgagagggcagccgcccgctgctgtgtgtgcttgcggtgccgcttgcgtagcttcagtagtaggaccgtcaggaagatgatgatgagcaggaagatgacgcaaccggcaccgacagccgcgaacaatgccaccttggagttgaagaagccatcagggtccccgctgctgcccccacttgcacctgggccactcttctcttcctggttcacagtctcatgcttgccatcagagtcacccagggagccccgactaccaggggcctgtgtggccatcttgacagtgttgtctgcctccttgctgggcctgctggtagtcagctgctcaggcgtcacagcattgggatcttgcccaaccttcatgatgatcttcatggtgcgtgtgcggcacacaccgccctcccggttttccagcccctccaggcttccattggatgttgaggtaatgtagtaatcatggtgcttcttgaactccaggcccatgtagttggggctgaactcctggaacttgatggtaaagcgtatttcctgctctggcctattgcaggtgaccaacacgttggggtcgagaactgtgctacaggcagctgcctgctcaggccgcaccaggtacagcttgtagtactcatagggccgccctgcttctgctcgggggcagatgatgtccagcttgtctccaattttcggatagatcaccaagcccttcccactcaggaacttggggttgagggagctccaggatacgggctccaggttcttggccagcggtgtggcgagccggcacagcgcccacacgaccatcgccacaagccacttgccgagccaacgctgcccaggccgagccatcttcccgggggcagactgcacttcgggatcccttggcgcctcctcaccaaagctcgcctcgccttcctctgccgcgctgcgctcggagccgctcaggcgcccatcctccgcagccgccggccttgaagtgctcccctcccgccggcttcggtgtcgctcttctccgcccggccggccaggaggactcactgggcagccgcccccaacccgggcatgggcttcggcccccgagggctcgttctcctgggctctccgctgccgcacgaggcgcgacgggggctctgcgcccccgggtgatcccgcccgattccgctcgacttcccgagacgcttcggggctgcgcgccctctccccgacggggtcttcccgcagaggtctcggtgaccgccccgacgcctcgaccgtcccgggatcgctgtcccttggaagaagtgggggtttccccacagcacaagctcggtccccgggctcccgactgggccgccctggcacgggctccgttcctccgggccacactgggactccgggctacgcgcccccggacagcttctacttcagcgcgggccctgctcagtgtacttagaagagcggggagatggctgccgagcgagccagtcccattagtttgcgcccccgaagccttctgcgggtagcccggcancctcgcgtcgccgagtcctggctcccgggcgatcgagcccgagggtctgcggccagtgcgagcctcacaaac

SEQ ID NO: 58319 - DNA, 2644 bp, Homo sapiens
tttttttttttttcaaaaagaacataaaactttattaagaacatcttatactgtcatcagatacagccaaagaagaacgggtaaacaaacagggaaagttcatcttcccatgtgctattgccacctcagaacagactcctgtgtggatggctggaacaacagttggcaacaaatgctctgtataaataattcattaagtaacacaatgtttcctttctatacagagaagaactgggcttacattttaagttttgatatagtgcaacaactatgaaacaagactacatccttaggagctatttcttaatagaatacaaagcagtttagtagctttatgttatttcagataatgtaatttttttaatgaaaaattcagaaaggacattctaactttcccaattagttaatttgtactgttgagttttttctctctaaagatttctcagaatcagttcagtaactatactttaaaaagatgagttgctcatctacagtgataactgacaacttagttttgtgattttgcaaatcaagatgcctgggtcatccccacttttgctgattctgaaagatttcttatagaaaaaccctgattcagagtgcatgtgataggagataccaaaatagctgcatctggacagggaggttggctattgagcacagctgattctcagattcctggttcccctctatggtccttttacttactgtagtgatggaaggagagaaggagcgcccgagaatctgttcagattgtgactccagacagctctctgcactgtatgtggagaaaagagtgatggcatccattcaaaccatagcagccctacggcaccatgcttttctcttgaggggtcagaccaaactgcactcaaagatgcatgatctgcctcaggtgcacagtggagaaaacgctcatgatttacaatttggtattataatacccccaactaatcccatttcttgagaaaatgaagtcttccttttaggaagaatgtttgctgctaaggcttaccatgttaattatcacacggctgaaaagatgacttctaaatcagactgtattgtctgtgttcagttaatacgttaaccaacaactgaagtttgtggaggattggtcgaggggtgggattcaggtttttgagtactatcacttatcacaaatctcatcaagctctttaaaaaaataatgcatttttatcataaatatttagagcagatactggcattaaaatcagtatctaagtcagaagtctgtctgaaatggtgaaaatatttcaacaaacttctaaaagatttcaaatcttcccaggagtacatagtttataaattagttttaaatggaaaaaaatatatattttgaatggataaatcaccactttagcagatcataaataaggtcaagatattgaaaataagttaacatacaagtttttgctttcacattaataataaaaactaacttacttagtatactttcataacatgtacaaccaggtttcataattgtgcatctgtcacctccccacttggctgaatctttttcttccatttcctacacctagggacagaggtacacagacatcccagggtgtgagtgtggctgctgcatgctgtgtcctagttagagcagtgttacaaatgctggtcaggatctatgattagtaacctgtgaaccacgttacaagtgaaggacattcatggttaggtggattcagttcccaggtgagctatcagcggtagtgttagggaacctaactactattctttctgtgagaaaatgcaccccaagtcccaaaagttgactaaaaactttggaataagccatgtattattagtagtgcatggatgagcactacttatatgtgtctctgttttggagagaggtcaaattgttaaaagaactatttgcagaactacttggctattaaaaataaatgtctgcccttccttccatatgccaattcattgtaactataatttcctaatactgagaaagaaacaatgaagccattcagactagagagacataattggcttgtgggattttcaagatgttttattgactatctaatttgaatctacttacaaagagaagaaaaatgtctagtatgtaaagcaatgaatgaaaataaatgtttatcctaagtcattattgagtacaaatccacagcttaacaatgtgtttttaacagcaggagagcatgcaactgctctaacacacagggtcagaaataaaaggtaaaagtacatttgttttgtaactgtaaatatacaaatataaaatttaccatatctaccctgtagtgtggcactgcttaactgccaaatatacagtcattcaaaaaccttaaggaaacattgaaaatgtctcaggctactttactgaacattaacgaatattgtgttcttgagctattagagctaaaagtattatttttaaagttatatgagcaagggaataataaaagtatcatttcacgtgtcttttaatcccatagacggctttttgttaaagggattaattatgttaaaaggaaactgatttgacaaatagaaaccagttccagaaccaaagttgtcctcttggtagaatgtcaaaatgtatattatttccaaagtattttcattattaatctactca

SEQ ID NO: 58320 - DNA, 453 bp, Homo sapiens
  misc_feature (1)...(453): n = a,t,c or g
ggtgnnnnnnncctttnnnactgctatgacatgattacgaatttaatacgactcactatagggaatttggccctcgaggccaagaattcggcacgaggtaggtctgttggcctgtaggtttcggcacaagtttcagcgagagaaggagaaaactgccttggttggaaccttgcaggtcagtgtgaaggtgggattagcccaggaccatgggtgggggtggcggaggaggggggctgggatatgagagggccaggtccgagtcgccctctcctggccccttctttctccacacccactcccatttcagtgcagggaaaggggtgtggcggcctttgctggggaaatggcggacgacaagtggggcggaggaggcctgcgtccggaaagtcagtagagtatgagaaatattttaaactcaagtgtctaaaattcacaaaaacanaaattgggacc

SEQ ID NO: 58321 - DNA, 517 bp, Homo sapiens
gggtggagcccatcaagcggtatgggaaccattttcttttaagctgctcaaagatcttaaagcagctgttggtcagtatggtcccaattcgcctttcatccgatcgctattgcaatctgtggctcagaataagctattgactccgtgtgattgggagattttaacgaaagttacactttcgccctcccaatttcttcagtttaagacttggtggaccgacgaggctcaaaatcaagatcgaaaaaaccgtgctgctaatcctgctattgccattacatttgaacaacttctaggaatagggggtcaatggggaactgtaaacaaccatcaggacttcgagatgatgccattgaacaaattcgcaattgctgtttgagggcatgggagaaaattcaggatctgggaactacttatcagtcttttaattctattagacaaggctcaaaggaaccatatcctgatttcattgctcgccttcaagacgcagcacagaaggctctcactgatgaaagtgcca

SEQ ID NO: 58322 - DNA, 960 bp, Homo sapiens
  misc_feature (1)...(960): n = a,t,c or g
ggcacgaggacccttctagccccctgcatctagcagtgaagcatgaagcctggtggggatgtggtactcccatctggtgtggccaccagctctgccaatgttcctgtagccttggaaaacttgctctctcggttcttttgggtgctgtgtactccccagcttccccccttccccccccattttgcacctgggtttagtgaaaggatggcatttggttgacccatatagaaacccagaatgaggtctcagggccaggaggcctggtatttgtaggccagggaaggggaagaggcaagtggtctggggtatcaccagccagccctctctgatttggcctctactccccataagtcacagtaccataagcaggcttctggcctcagcaatttggtctttgtgcccaagtttattgtgagaatttcctgaaaactctataaaaggtctcttcctactgtaggcctctaatgtttctcccctttttgcttcagtccactcttcagtcttgtaggcctagttttcaaacctgcacatgtgtcctacctggccacaggcatgcaggcctcaggcagctgggccagtttgggagcctcgggtgatgtctgcacgatctggggctgcctctgcacccctgctgtgggcttcagggttggagaagggctgggaccaaccgggtgagatccacaagtctctggatgtggctgaaggcaaatacacaattgaagtactttctgttttgaagtgctttcccttttgaatctggtttgaaacatgcagcttctgtctctagcccaaggaaagaccaaaacatagggaaataaaagcatttatctttgtcttggaagtaattgttgaagttgtgcagttgatcaagtgcacagttagatggcaatgtttatagaaattgantgttaaaccaaatttacactggcatgtgtgggtgtagtttcnaaaaaggcactt

SEQ ID NO: 58323 - DNA, 1748 bp, Homo sapiens
aattgatgggacacttgggtgttgtattgtatgagtatttgggtgaagagtaccctgaagtattgggcagcattcttggagcactgaaggccattgtaaatgtcataggtatgcataagatgactccaccaattaaagatctgctgcctagactcacccccatcttaaagaacagacatgaaaaagtacaagagaattgtattgatcttgttggtcgtattgctgacaggggagctgaatatgtatctgcaagagagtggatgaggatttgctttgagcttttagagctcttaaaagcccacaaaaaggctattcgtagagccacagtcaacacatttggttatattgcaaaggccattggccctcatgatgtattggctacacttctgaacaacctcaaagttcaagaaaggcagaacagagtttgtaccactgtagcaatagctattgttgcaggaaacatgttcaccctttacagtactccctgccttaaatgaatgaatacaggagttcctggaactggaatgttccaaaatgggagtgtttaaaatcgctttccttcttgtttgaatatattggtgaaatgggaaaagactacatttatgccgtaacaccgttacttgaagatgctttaatgggatagagaccttgtacacagacagacggctagtgcagtggtacagcacatgtcacttggggtttatggatttggttgtgaagattcgctgaatcacttgttgaactatgtatggcccaatgtgtttgagacatctcctcatgtaattcaggcagttatgggagccctagagggcctgagagttgctattggaccatgtagaatgttgcaatattgtttacagggtctgtttcaccccagcccggaaagtcagagatgtatattggaaaatttacaactccatctacattgggttcccaggacgctctcatagcacattacccaagaatctacaacgatgataagaacacctatattcgttatgaacttgactatatcttataattttattgtttattttgtgtttaatgcacagctacttcacaccttaaacttgctttgatttggtgatgtaaacttttaaacattgcagatcagtgtagaactggtcatagaggaagagctagaaatccagtagcatgatttttaaataacctgtctttgtttttgatgttaaacagtaaatgccagtagtgaccaagaacacagtgattatatacactatactggagggatttcatttttaattcatctttatgaagatttagaactcattccttgtgtttaaagggaatgtttaattgagaaataaacatttgtgtacaaaatgctaatttgtgtgtgttttttgaacatgacttgtaaaatgcggaactttgataaagtattggtttatgtggaataagtggcttaatttcattttctgtcacatggtttatagaaagtagttagctgaataaaaactatataaagtgatggcatctttgtcaaaattccattgttgtgttaataatgacagcaagaagagtagcctcaggggatgttcccctcaaactagcacaaccattccatcatcgtagaaaagtagcacttttgctaaactgtcttgaatattttgtacttacatagcgcctttcatctcttgatttctcaaaatgctttatgaacacatttaaagaaagtggtttaagtcttgtcccaacacttgacaggtctgctgtgtttagcaagt

SEQ ID NO: 58324 - DNA, 1019 bp, Homo sapiens; identical to SEQ ID NO: 15593

SEQ ID NO: 58325 - DNA, 1504 bp, Homo sapiens
tttttttttgctgttatgattagatatttattgagcaccaggagagagtcagaacattagacttatagtggaggagcagaactgaaccctggcctgtgaaataacaatttcaattaaaagctgtctggccctgaagaaagagaaatgatcctggatatagctggtcctctgagctggcagagctgagcctccctcgggtcttctggtggcaagatgccaaagttgaatagtgtctgtaggcatgatgaccaagtcctagtgctatgggcatcttccctctggtatttagagaggagtaccagaagcccccggcagagatactagaagggcccagagccaaatccagcagctggcttacttgagatgcatctggcaaaattccagggcaaagccagtgactcccagcgggctccagtgttggtaggcggacactttgggctatccaggaagagaggtagcagggaagaaggccatgcagaaggcaaggactgactaggcaattatgtcagcagatcctggcctaatggggcatttttaacagacacttttgccctcagtggccgagaaactcataatccagaggaactgtgtccagcaggcgggcgtagttgccattgatctgggcgatgatctggtactcctgtcctatgcagggctcatcagagtagttgttgccccagattctgggaagttggctcatcactggagcagcccacttgcgaagatggccaccctcatggtttctccagagtcgttggcctctctggcatgtgccctggctgcttcgtagacatgctcttgttgggatgtcttccgacagagcatgatataggccatggtaaaaaccaccatacagcacaaggagatgatgaggatgatggcaaagacaggcaggctctttcctggcccagcactggtctctccaaggtagccatccatgtcagtggtccagtcccaggactgcttcactgtagatgttgctttcaaggggtatgtcatggttgtaggtgcctcagtcttggtcttgagtagctttgaggagtctttgaccacaaacttcacaatgtcgctgtgctgctcagagccaacctggcccttggcagtgcagaaataggagcctgagtcggctatcaccgcaggcttgaagagtaaggtacttagggttgctactttgatgggttcctggttattagtctgttgcttataccaaatataactgatgggaggagaaccccgagcctggcattgaaggctaatcctcattccctggggcaccgtgaagccataaccgctgccagttgtcactgtgggcttggagacagagagtttctggacacggagctcagtaatcttatctctcacgacttggttgccatcaggagtctgccaggtgacttcacacgtgtagtggctccggtcatccatctccagggtgctcaattggagggatacatctcctggaaccttgtggctcacatgcaggcggccctggtactttgcctgc

SEQ ID NO: 58326 - DNA, 456 bp, Homo sapiens
  misc_feature (1)...(456): n = a,t,c or g
nccttgganganccgttatgacatgattacgaatttaatacgactcactatagggaatttggccctcgaggccaagaattcggcacgagcggcacgagagtctcaagtggacaatgttatcttacagactggagagagtgctagtgaatgcttttgtcttcaatgcccatctcttggaaatattgaaggtggagtagcaaccgggcattatattatctcttggaaaaggacctcagcaatggagaatatccccatcatcacaactgtcatcactctgccgcacgtgattgtggagaatatccctctccatgtgaatgcagatctgccgtcatttgggcgtgtcagagagtcgttacctgtcaagtatcacctacagaataagaccgacttagttcaagatgtagaaatttctgtggagcccagtgatgccttcatgttctcaggtctcaaacagat

SEQ ID NO: 58327 - DNA, 743 bp, Homo sapiens
gggaccgtaaccgcctccgtgcgtggcatatggtccctgcatgctgttcgctctgtatagtacttagtattcgctgaggctaagaggcctcaggtgcctgggcttctgcccttggactcctggatatccagcctagtgctaattgaatgctaagcagtggtaattcaaaatgagagggtcccctgcctctagagtcatcatctaattggggacaggcagacctagataagaaaagcagagaactactttggaaaacagtttatctgctgtaattgaacattcagctaccctataacccagttaatccaatactggggataaatcctagagaaactcatacatgtacaccaggagatgtgtacaagaatattcatagcaaccctattcacaaaagcaaaagcctagaaataacccagatgcccatgagcaagagagtggacaagtaaactggaatattcacataatagaacattatacaattgtcaaatgaactataatgatacctaaccatatggatgaatctgagcaataaaataattaagtgaaaaaagtttaatcccagaagagtaaatgtagcatgatgccctttctaaatgaaaggttttttcttttctatggagttattctttacatacaatatagttcataaattttaaatatattgtttaataaattttgataattgtatataatagtatagtcaccatcaagatgtagaaaatagaaaataggctaggcactat

SEQ ID NO: 58328 - DNA, 660 bp, Homo sapiens
gcggcacgagcagagactctgttctatcccatgacctcttgctgtactttctttcaaatctaaattttcttgattatttttcttaatttacagtttcaagattagatctgttgggagcattctgtgctctacctcagcccctggttgagctatggattggtgtcccccatggtgacgtggtctggactcccttttgtgtgaagagctgtggcagggcagtgaggttttgtggaactcagggagcatctggcactatgtatgaggttgtgaggtgggagagagctcttaaatctaccagccttgttgatcttgggaactaggagagagtgctagggaagccagtgccagcaggcctggagcctcatatttctttggcatttgtatgataccttctagtacttcgttttttgacttatatatgaactaactcaatttagatgcttagaaaataaacggccactggacctgcaagagattagtagtggtgttccatagccttagacatttcttacacttttatccacagataagaaaaaaatagtgatatttgatttgttttgccaaggcttagaaggatctaatatgtgttactcgttgagcagcgggaagcagcagacatttctagggtttctccctgtcaccattcaggagacagtgcac

SEQ ID NO: 58329 - DNA, 2528 bp, Homo sapiens
tttttgtttttttttgtttttagacaagatatttattttgaagttccaaatgacattagcagaattgtgatttttatgtttactgaatggtgcatgggataaaaaggggttctaaaacactttactagatcatccaaaccctacaatagacacttatgcatcaaaattcttgtaaaaggaccacttccctactccctccaccctcccctcaaaatacccatgttcacaaagaacaaaaccttacagcttaaccaacaaaaaacgtgtcatacaataattctaaggcaatggttctatgaagacaggagaggtagcaggctgaaccgcattcactgaccctatctctcagctgctcctcctcactagtcaggtttttcctgtgtaccccacttcattatttccatcatgcttacctctctgtttactggacattccccttgatctaataccaaacttagccagtctaactgtaactcagatgataatctgaccacttcctggtaagaacaaatggttaatgttgtcacagtgattaataaatacaaatatgaattaatttaacaatgaattacattttatcccatccaggcatgaagaagttaaaacctggactcactgaccctgtgttaaaatttagtgctaaatgtaagcaacaacactggagcattgttattttatcaagacacctgaacatagcaaaattaattttgttcatttttattaacataggacatactaaccaaatattatcatttaataaaatcaacgttacaaagaaactcactagcaaataaacaaacgatattcacttgactcttctcttggttgaatgattttctattaattagtagtacacagctatttttatcaatttatgcttaaactgccttatgatttcaatgaaatttcttagcttttacttgttgaataattttttcaattgggaatcttttcataattcaaaatagttcctgaaaattaatgcatccttcaatgtcttctacttaagctgggtgcatttaaaatgcaacacaattctttgaaaggagactatgacatttgagcataaagcctataagaaaaagaaatgtcttccctccccccatgcttcacagagactatatgaatgttccatactcttcatatttagcaacaggagttccttagagatcaaacagcagaaaacaggaggaacttaggccatcaatggacttgtaaaacagataaaactccaaatgtattttaagattccatcttctccacagatgagaaagtgctgaaagggctcttcaacttttctttagcgacatcctctgtgccccaattagaaaaagagttgcaggatggtagtcctccttaaacagcacagactcaaattctgggaaaagagtggccaggaaacccccttcttccccccaaaccaaatggtatccccccgaaaaataaaactgccaaagtgcaaggagggaccaatctttcaggaataaataatattctgaagggactgacaaaacagactatttttagacaaagaacacaccaaatactccgaaatttcaggataaccatacatcaaagtacttcgtgcaagtaatatttttaccagttaaaagtcattatgaaacacacattcttttaactgaatttcatatgttatataaaacttgaaaagtgtggcacatttctactattaaccattacattgttttttgttttttaaaaaaagtatatattaatcaaaagtatacattacccagaccttttgatttaaaatataactgaaggaaaatataaactctgagtaaacaggcattcttctacacaaacatgagttatttcagtaaaaaaacaacaacaaaaaagcaatttcaatgtaattaagccacctctgattaatacatattttcatgcatgtggaaaaattatttttaactagaactttaagaataagttccatagcaaacaagttacagcatttattcaataaggaatattaaaataattcattagtaaaaaataaaataacttcaaccatatacgtattataatttatcatgtacatactccaaaatccccataatttaactaggaaatttatagaacatctttttaaagtatgtcttaggaaaaccaaccaaaacaattggtgccttaactaaagagaatgtgcatacacattgctatttgacctatatgcaaaagtggaatgaaatacataggaaattaaggttactgctttcaaaaatttctggaatattagtacttaagtcaaaacacttacctgcagaataaaaacagcctgagtatttccaaagctgaagtaattttctgaatgttaaatatcacaagaatgaaaacagtctccattaagcatttacatgtggtttacagttgaggcagaagatgaaggtctgccaagcagttttcccatatcacctgaattctttcttcccttataaagtataagcttcaagggaaatgattacatataaaaacattccaagtgagttggggttcctgactgcaac

SEQ ID NO: 58330 - DNA, 2284 bp, Homo sapiens
ctagagcaaatttctctttctagaaggggagggtcacagggtcacagattcaccaaagctgaaagggctgaggagctcatggtagcctgggttgacctactctggagcacggtgtcttccttctaaactgagtgactgtagtactatctgtgcctctgatggtaataaaactgacaagatgtctaattttttttttaagtaggaccaaaggaaaacaagatttagatagtctgactttgcttttgaacaacagacattgcaagtcaaaattgttgtcaaatttacatatggtaaatgatgaactttaaaaatgtgtccaggtgttagatgagttcattagactcttttaatgctaatggctagtaccgtttaaacaaaacagcagttctctgctgcaatattcccattgaccacttaaatgaccataagtggtcatttaagaacatgttagggttagccctgatctgaatataaaagtgagaaaagggctacagtgcatttcttggtaacttaaactgagtcttgaagttataatgatccattcgagttctgtgatccttattgttcttaattgtgtttctctacgtattgttacagatgagccatacgtttctttgtatcaatgtagacatgacttcagatacctctgaggacctacccagcagtctaggaccctgggccaagtgctgggactatggtactaaatccagtagatgggctgtgtagcaactctcccagggaacacactagggtacttagggaggtgctttgtggagcatgttgaagctttgagatctgagcaggaggcagtgatgtccctggtctattcagggaaagatttcagtgtgaaatggtaaacatccaattgacaggatttagattttgcttagtttttctgctttttaatgtttctatcccccatctcagtgttttctttatccatcccagtgatgccttatttgaaactgggcttaaactgcaaaaagaatgaagttggatttaggaagctgttagatcattgagtggtgttgagagtgaagtttcactagcagggaagtttccttgagcctaaaataaagagaaaaaattaaaaagaatcagtttttttaattaaaaaaatagaaagctgttaggctcctaattcgtggggttttttttgtaaaaacagtttagataatcctgaatgcaatcattaacttggttgctaattacaagaatgaaaattataatggaaaaggacaaaataatataccagctggtttgttattatagtccgtgtattaaaatactattgaaatacgttaaaggtaaatttttaaggtttaaaaaaaatttagtaacttacagggatggagaatttagatgtcagaggtggggagatttatttttataaggtaatttttatcctgataaggacttaaaaaaaagttttgcaactgaaattttaaagtaaacatgttaagtacagttaaaaagtaagcattgtagtaaatagtggattctctggtgtgtattttttatctcagtgttgaaaattggaaaagaatggactgaagtctaaaaactggaataatgaaggacactaaatgcctttattgtagatactatgtttgtaagtctatagctaagcaacttaagccaaaaaggtctttcaactgaagctttaatcaacttattttggagatgttctcttcccttatctcatgcgtcatccctaaaataataagatacatgggatcaaatagcccttgccttttcaacacaaatcagttggaaaattatggtttgagtcctgttgctgccatggcttctgtttctcagaaatgagtgtgtatgaacataccaatctatgtaataggctacctttttttgtcttctttggaactttgtacacaaaccaagacaatatcagggtgacaggtgaatgaacttaaattctcagtcttgtctattcaccaaaaaagtatactgcctgttttttctttaattattcaaggttgatgacttttaggaacatgttttatactgtattttttaattaaagcaagtgccttgatgtaattccatgtaaatcattgcttaaccctcttatgggatgaggatgagttattaatgtattgcagcctactggaaaggagggggagttggttaatagcagatacttttcttctagaagcttatgttttatgctgtttattatgtaagatcctgtatgtgtgttgagatttagaggtttcatttgttttgtctgctaataaattgttactctaataataacaaaaaa

SEQ ID NO: 58331 - DNA, 1474 bp, Homo sapiens
  misc_feature (1)...(1474): n = a,t,c or g
aaacattagcttcttttaccaacctgagaaaattaggatgacctggcaaataagatcttgaataggccaaaagcaagtatcttgctgtgtgtagtctcttggttaaagtgaagaaacagtactgttcacacctttcttcactgagattccagtgtacatgagaacatatatttattgcatgattttctagatacacagtctatgcattattcatatacatttattttagcctaaagtggttttcaaatccagttcttcaagccataaatgaccaagatccaagcaatctgaatttgtttttgtgattatttgactggaatgcttcttaagtggaataactatactccgttatccacccgatttcctaatgtaattgaaagattttcctattttgccacacacttggagacaataagggtttttagttttatctactcttctattgaagttaaagaaagaaaaaaagatttttttatttgtattaatgaaaagctttagtttaaaataaggagatccagaataaaaagaagagactgatctcttcaattattgtcatctgtagccaccagcacatcactcttatgtaatccccaaaggcttggcatgccgtaagtgtgtggtgggtagactgctgccggggaatcgtacttcttatttagtaatgataagacttttcattatttttggaattttaaagatgacataaataagtttaaatatcaatttggggagtaaggtttaatattgccatcgggtattgagacaggaggaagtttctgtttttctccatttagacataggtcaattaaaatatttgggtttaaaatgactaaatgctttaaacatattgtagcttaagatatatgtgttaagatatatacatgagaaactttaaaaggtaactactgtgcatgcctgatgcttaatagaatacttagtggcatcaaatgtttgcagcagtctccataattatattcagtcccttctaatactgtatcaatgtaaatgaaataaatatattcaaattggctttttgatatgcatcaagtggcattttgttcctgtgtttaatagtgatctgtatacagctgtgcacatattgtcatcacttattctagcatcactgttaaggctgtgattatgtttgatattcacctggattttaatacaagccaatatcagcttcccattgtgtaataacttgggtgtttaggagtcttttcacattttttggggatatgaactagatgttcaagaactccttctggactgtggatactgaatcagtgtactattggctgcagaatttgtttcaattgaaaatagactcaggaagattgctgctcagaatatcatataatgtttattttttgaggtgtttttgtttttatttgtgtgtttttnttttttttaagtcagcttggaacttttttcctgggtagtatttgggagagggaaaggctgtactatatat

SEQ ID NO: 58332 - DNA, 2708 bp, Homo sapiens
cgcgcgcacagagcgagctcttgcagcctccccgcccctcccgcaacgctcgaccccaggattcccccggctcgcctgcccgccatggccgacaaggaagcagccttcgacgacgcagtggaagaacgagtgatcaacgaggaatacaaaatatggaaaaagaacaccccttttctttatgatttggtgatgacccatgctctggagtggcccagcctaactgcccagtggcttccagatgtaaccagaccagaagggaaagatttcagcattcatcgacttgtcctggggacacacacatcggatgaacaaaaccatcttgttatagccagtgtgcagctccctaatgatgatgctcagtttgatgcgtcacactacgacagtgagaaaggagaatttggaggttttggttcagttagtggaaaaattgaaatagaaatcaagatcaaccatgaaggagaagtaaacagggcccgttatatgccccagaacccttgtatcatcgcaacaaagactccttccagtgatgttcttgtctttgactatacaaaacatccttctaaaccagatccttctggagagtgcaacccagacttgcgtctccgtggacatcagaaggaaggctatgggctttcttgggaacccaaatctcagtgggcacttacttagtgcttcagatgaccataccatctgcctgtgggacatcagtgccgttccaaaggagggaaaagtggtagatgcgaagaccatctttacagggcatacggcagtagtagaagatgtttcctggcatctactccatgagtctctgtttgggtcagttgctgatgatcagaaacttatgatttgggatactcgttcaaacaatacttccaaaccaagccactcagttgatgctcacactgctgaagtgaactgcctttctttcaatccttatacgtgagttcattcttgccacaggatcagctgacaagactgttgccttgtgggatctgagaaatctgaaacttaagttgcattcctttgagtcacataaggatgaaatattccaggttcagtggtcacctcacaatgagactattttagcttccagtggtactgatcgcagactgaatgtctgggatttaagtaaaattggagaggaacaatccccagaagatgcagaagacgggccaccagagttgttgtttattcatggtggtcatactgccaagatatctgatttctcctggaatcccaatgaaccttgggtgatttgttctgtatcagaagacaatatcatgcaagtgtggcaaatggcagagaacatttataatgatgaagaccctgaaggaagcgtggatccagaaggacaagggtcctagatatgtctttacttgttgtgattttagactccccttttttcttctcaaccctgagagtgatttaacactggttttgagacagactttattcagctatccctctatataataggtaccaccgataatgctattagcccaaaccgtgggtgttttctaaatattaataggggggcttgattcaacaaagccacagacttaacgttgaaattttcttcaggaattttctagtaacccaggtctaaagtagctacagaaaggggaatattatgtgtgattatttttcttcttatgctatatccccaagtttttcagactcatttaagtaaaggctagagtgagtaaggaatagagccaaatgaggtaggtgtctgagccatgaagtataaatactgaaagatgtcacttttattcaggaaatagggggagattcaagtcgtatagattcctactcgaaaatcttgacacctgactttccaggatgcacattttcatacgtagaccagtttcctcttggtttcttcagttaagtcaaaacaacacgttcctctttccccatatattcatatatttttgctcgttagtgtatttcttgagctgttttcatgttgtttatttcctgtctgtgaaatggtgtttttttttttgttgttggttttttttttttttttttaacttgggaccaccaagttgtaaagatgtatgtttttacctgacagttataccacaggtagactgtcaagttgagaagagtgaatcaataacttgtatttgttttaaaaattaaattaatccttgataagagttgctttttttttttaggagttagtccttgaccactagtttgatgccatctccattttgggtgacctgtttcaccagcaggcctgttactctccatgactaactgtgtaagtgcttaaaatggaataaattgcttttctacataaccccatgctgatgggttttatttagtataaaacatccatcaaacaccagtctctggcttctagaagagtccttcagatgacagttgttgtccatggtctttgactatcaagagcagaattaaatgtaatagtcccagagctgtagaaaagaactttactccttcccagggaaagtgaaagacataaaacactgaatcagaggtggcacagattagtctttgataaggtaacgtttctttgaagtctgtctgtagagaactacatggacttccaagagtgtcaaaggcagtgtggtagagagaatttaaggcaagatttaaatttggaaaaggtgcttgaaccttttctcagaggttttatttccccagtatgtttttcacttggggccctcgtgccg

SEQ ID NO: 58333 - DNA, 303 bp, Homo sapiens; identical to SEQ ID NO: 25716

SEQ ID NO: 58334 - DNA, 1880 bp, Homo sapiens
gccagcgtgagactgaggccccctggtgcctatcaaggaccagagtgaaggggactacatctcccagcccttcaccttttaaatatgagtggttttaaaaggaaaaaaatgaaaccaggcaacagcaacaatattctgtttttaaaatagggacaagactgttgtcactttttagacatgtatcccattccttttggctctgcaatatttggggctgtagctccttccaagcccatggtagtccctccccgagtctctcccagtagaatgcagcctcccttccctggccccttccctctcagtgacggtgactccctggggccttctcgtggaacccagaggggctgaggactgtggccctggctggcgggcccaacgtggtgctcctcaggactgcagcactgagatggaacctggcctcagtttaggaacaggggccacaacagggcaggaacccaccaccctccacataggaatacaaccagtggggccacatcatgtgaggcatcagacccacactgtcagcccagcaggccgggctgtgtccttcagacccagtgctgccctagactctgactcgggactccagcttgccacgtgccctctcccctcttgaatgtactctggtcttgcagtgtgctgctgggactttcttgctcagccatcactctggtcaccttgtttgctctgggtctggctgaattttctgccctgagatctgggcataaagtggatgaaacttgaaagaccttcagtgtagatccagatggccaacctgtccttgttaagttacttgcttcttgggaatcagtgtcccctgctgagctgaaaaggaaatggattccaatctcttccaacctttaaggtgatagatagtttgagcaagactggagaatggacaacactatgaagctgtggctagaaagggactgtcatgtcccatcctttggccagattgactggggatgtccggacagatgcctgcatgggtggtgagggccacatctgcacacgagccagtggctgcttgcagttcactgctgtgatgccagagtgtgttcaaaggtgactctcctgctcttctggactcttctctcaggcaagaaaggctgcaggctgcctgctaatgtgatgcctgagcacaaagccaaggaactgaactaagtctttctgttaagtcctgagtttgtcattggcaggtttacttgtggccagctctctctgcccttgggtgtctgagcaggcagaccagaagaccaggcactggacctgcatgccaaagggactggtcatctcctgaggacctgtacatgaccctgtggactgttccgcacgatccggaacccactttttattcactccccatgtctttggccttcctcttctttctctttccctctgccatcctgacactgatagtttgtcatataaattccccgggttgtgtttttttttctagaaaaaaattaaaagggaaaacaaaaccaaaaaaaccagaaaccacgaataagaatggaaatgacaatggctgcctgtcatttttctgtcacgattttcctgatttggtttgttccctttgtctcagagaagcaggagatgttgatgaggctgtatttttttttctttttcttgtttttgagacaagagtctcgctctgtcacccgggctggagtgtaacgtggcatgatctcagctcactgcaacctctgcctcctgggttcaagcgattatcctgcctcagcctcctgagtagctgggattacaggcatgcgccactatgcccagataatttttttgtatttttagtagagacagggtttcaccatgttgccaggctggtctggaactcctaacctcagggtatccacccacttggcctc

SEQ ID NO: 58335 - DNA, 383 bp, Homo sapiens; identical to SEQ ID NO: 25725

SEQ ID NO: 58336 - DNA, 1427 bp, Homo sapiens; identical to SEQ ID NO: 15612

SEQ ID NO: 58337 - DNA, 753 bp, Homo sapiens
gaagtaatgaagcgagtacgagaagctcagtcatttatctcagcagctattgaaccagggtggctgcactcaacgagtttatgcaatgactttcttggatgtttctgaaggaggaggatgtacagagagtaggccccttgcactatatgtggtacattccacttgtgcctgattattaactgggatctttaattgttctgagcttacactgcaaagtgattttttcctcccagagtctggaaagagcaatgaaagaaaaggcggtcgatctcgttcccatactcgctcaaaatccaggtctagctcaaaatcccattctagaaggaaaagatcacaatcaaaacacaggagtagatcccataatagatcacgttcaagacagaaagacagacgtagatctaagagcccacataaaaaacgctctaaatcaagggagagacggaagtcaaggagtcgttcgcattcacgggacaagagaaaagacactcgagaaaagatcaaggaaaaggaaagagtgaaagagaaagacagggaaaaggagagagagagggaaaaggaacgtgaaaaagaaaaggaacggggtaaaaacaaagaccgggacaaggaacgggaaaaggaccgggaaaaagacaaggaaaaggacagagagagagaacgggaaaaagagcatgagaaggatcgagacaaagagaaggaaaaggaacaggacaaagaaaaggaacgagaaaaagacagatccaaagagatagatga

SEQ ID NO: 58338 - DNA, 959 bp, Homo sapiens
ggaaaggaaaaccttgattgcagtggtttaaacaaacagaagattgtttttccacatagcatggattctggagatgggtggctaatggtattggttcaacaactccacgaaggtaggggtcacgtcttggatccttttgccttaatctcagtgctcgttacttcatggtcccaagatggctgctgtatccccaagaatcatgtctgcgttcaaggaaggaggggtggaggaagaggaagggccaaactagctggacccgtcaccttctatcagaaagtaaaacctcgtcagaagtctgtttcctgctctctccctctgcatatcttcacttagatgcccttggcccgagccagctaccattgcacctctagctgcaaacaaagctaagacagcagggaacagaattgtcatggctgaatagaccaatcgtgttccatctactgagactggcacactgcctcctgcaataaaactgggatcccattaccaagagagaaatgcagaattgtgtaccagttagcttttgctgtgtaacaaaccatccccaaacttggcagctagaaacaaaccctgtattttcccacaatcctatgggttggcaatttgggctgggctcaacagggcagttctgctgctcacacctgggatccctcatggagctaaggtcagctgttacctcagctgggcctggatggtctaggatagccttactcacttgcctggcaggtgacaggctgttggctggaattgcttggttctcctccatgtggcctctccagcaggctagctcaggcttattcacatgatggcttcaggattccaaagagagtgagagtagaagctgaaagacttcttgagttcttggcctggaactgggactaggacagtgtcacttctgctaagttcttttggtcagagcaaatcacaaggctttacccagattcaagggatgagaaaca

SEQ ID NO: 58339 - DNA, 413 bp, Homo sapiens
  misc_feature (1)...(413): n = a,t,c or g
tttganaccnctatgacntgattaccaatttaatacgactcactatagggaatttggccctcgaggccaagaattcggcacgagcggcacgagttaatctcttaatcctgtcagccgagaaggatgtgtatcgtctcaggacctgtaataattgcgttaagtacacaaattgtacagcgtgtgtgtttgagcaatatgaaatgtgggcaccctgaaaaaagaacaggatcacagcaattgttcagggaataagagagataaccttaaactctgaccgccggtgagccgggcagaacagaaccatatttctcttctttcaaaagcaaatgggagaaatatcgctgaattccttttctcagcatggaacgcccttgagaaagagaatgcgcacctaggggtaggtctctgaactg

SEQ ID NO: 58340 - DNA, 970 bp, Homo sapiens
aaaatggttttcaccaggctgaagtcttgtcagtgcggctttgtttctccacggaggctctggggcagaatccaatgccttttccagctcctccaggggccacctcatcgcctggccccaggccttcttgccatcttcacagccagaagcttccttgcttcatgcgcagaccctcgtgactccccttcccttataagggcccccatgattactcagggcccacctcaaccatccacggtcatctccccaccacgaaatcctgaactgaagcacaggcgccgggtcccttttgccacgcaaggtaacactttcccacgtcctggggttccaaacctggacatctctgggggctgttattccacccaccgtcatcagtgaggcgccttcaggaggggctgtgaggtcacgtgaggtcggcttcagaagggctaggtttgagtgcctggaggacactggcaggaggcgcccctgggctccatccatttaccacgcacgcactcagcacccctgagaccatccctggggcctacaggagaaccctgtacctcagcagccctgaaacctgctttccacttccggacctttctgaaatcaagacgcatctttagatcaatggcatcttactgtgtcaccggcaggcctcttctttcttagtgacgtttaaaggaaggtatcttacccctgatggcttcttggagtgaatgaaattccggtgtgagcaggcactagaaggggcctcacaagagtgtcaggtgaccccactccgccctggcccccaagtctttcctagttgctcatctggccctttctgacctgggatcccaagtgtcctgcagctccagtgcccagacccccataactaacagaccccactaaagccacacacatgctcagctctccaaccacggtggggtccaggagccacccctcccgctagggtgtgcctaaaccatggggatctgactcaggg

SEQ ID NO: 58341 - DNA, 3980 bp, Homo sapiens
  misc_feature (1)...(3980): n = a,t,c or g
ttttttttttttttatcagaaacttcaacttttatagatctttattcttcaaactttatgtcaaattacaaataaatagtccataccatgtagctctttatgatacacgtcttcaggcagaaaacagcaacaaccaagaacacatcggaaatgaactcacagtaaataaccaattttaagtagagaaaggatatatgacatttcagtgtgggtccaatatgtacactgtttaaaagcgggatccccctgttaaaacatcacaggatgtacataattcttatggggaaaaaaagaggcccatacatcagaggatttttaaaagtttttttcaaaagttgtatcacagggactggttgtttaaaaatggcaaaatcttgagtattttagcagcaaacaagtaagttattccaggttaatctatttttaaacgttgctgaaaaagttgcaagctttagagaacattataaatatcaaatccactactgaaaagcaaagtagtatttagaaagtagatactactttcaggtttgttctgtgtcagcaaaaactttttcatgaagtttctgctaagaaggatgtcagtggaggagcagtggggaaataaatggaggtggccaccagtcttggctctaagttgctaaacttactggaacatgtaatgcttacgaattcttcatagagcttagtttattcccagtaaacaataggttcttaagaaccattcttttagatctgtatcttattgtcagatatttgtattagatttagcaatttgaaattccttaaaattttgctccccaaatatctcctggttaaaccagtatttcttatatgagtcataattgagtggttttttcattgaacagttttttcctcttgaaagggtaattttagaggatattattttttaagtcactaaagatagttttgcttacagagaaatttgtttaaaaggggactctacttaatttcacgttctactgtggcatttgacacctggcatctgacattttaggactgaaaggaattataaacttcatatgagaaaacaaacgaaactaaatagagtttaagcctgcctcattagatggttccatcagtgatcagctacataattcatctgacactatttcaagtcacaattatcagtatctctcctttgaagcattcacacttttttcctagatacaatctcctttttttaatcatctgaaagcaaacaattattctaaagacaaggcatcagaaacaaattctctccgcccactgagatttaatttttagatcacagcatcctcatatagaagttccattcaatatttttacttcttcttggcagttatcccaaacattaatatttaattatgaaaagagaaaagcattcaaaacataatacaaatatacaagaatacaagaaaagttgaaaacaaaaaacactgtattgcaatgtctccacatacgatgtttgtgatgcaaccaaacacacactacacagtcctggctgctcctaacactccccttactttacacagacctaggttcnttttttttttnnttggttttngnttttttttttttgattttgccttttgatgcctacagtaactgagaatcaacaaagtaactagtctgacatgaaaaatgtggtgcctatgatttaagtcctgatttgagcacatcttaattggtgcactattgcttttgataatccagatataacaacagacaagcagtaataaatgaagagacttactatgtatcacacaagcaaggtttctgaattacaaataacttcaacaatgacatcaaaacctatgaattaaatcttaactcacgcggttataaagttaaattctcatgtgtcttagtgagaatgctatcatcaaatacattctaaattctttcattttttagtgtacaaaggttatgggagaaaggataaggtgctttttaaataagctaccactgactcacacacatccatacacgcatcagtgcaaactatgaaaaacactaattttaaaatgaaataatgattatctagactaaaaggagactttgggatagaataattttccatgactaatttgtttacaaatatagataactcaatgtacatatagtcaatgaaatattcaaagaataactttatatactcttgttctttaaattctatcctctctttcagaattcttccatttaagtttgggtattttcctagtttcaacagatgaacagaagacttcattgaacattttgacagtaagctactagagaccaattatcaactggtgctacacatgctgtgttatctcccttactattaaactataaccctctcttgctattttgtttcatgcatcaccaaccaaacttcattttttctaataaaaaataaatatataaagaagacactgacaggcatatattcacaagatctcaacttcttaaaacataagtatgggtatatttatttctctcaaatgcatacaagacaataattacacagcaacaaatcttttgttcaacaatgatttgattcataagcatttgaaatttacataatttcatatcaatacccttgtatttttaaatacagtaagtaaaaaagcccccaaataaccaattcttatatttcctatttatccctctatacatccaaacttttaaaaagttacaaactgaacattatacagaacatataaatcatgtttaaaaacttgaggttttaaaatcactgcttccccaatatgattcagaaaaattctcatactggacaagtacagtcataggtggtaaagtaagttggtggcgggggaaaatggaaagaagagacagacacaagtttgctgtcttaatgttttactaatcctgtcagttaaaaatggtgacgtcatgagaagtaatagtttaatatgaggaatggagtttgccttgcagcttgagacatgcatttcaagtattttcctatttgatctgagctcactgtagcaaactgatgccagaagagaataattattttcttccatacattcgctcaatgtccgcctggtaatgtgttttaagctctttgcgtttcagcttgaaggcatctgtcaccagaccagtttcaggggtccacggttcaggactcaaacgaatttttactggaatttcaaacttttccagacttgctgaaatagcagcttcggaaagcactttaagtacctcattttccatttcacaactgttacacagctcctcccaagtccctttaagtcctttctttcgagctagttcagttagttccttttgatttggcacaacaaatccaatgacataagaatgataactgtttgcatatgcacaaatgttatctactagtggaagattcttcaaagctgcctctactttcccaagagaaacatattcccctgcctgtagttttacaaggtcctttttacgatcaataatctttaagcatccatcgggttcaaactctccaatatccccagtacagagccacctttgtccattttcatcttcaaagaaatcagcttttgtttttgcttcatttttgtagtaccccattgtcacactttggcccccaataagaatttcacccctggggtgtggcttatcagtattaaagtatccaccttcctcccagttttttaatttgatttcacagcaaactaatggtgctcccattcttccagtattgtagtcccacacttcggaaattgttccagccccagcagattcagtgagcccgtatccctgaccaacaggacagcagaaacagatgttcatgaatcgctgcgtggttgcagaaagtggagcgccaccacacaacaggagacgaatatttccccctagcaagcttcgaactttccggaaaacaaagctgtcgcacagtggagtattacgtccttttgaaatctgttccattttgtaattataggccagaataaacagattacgttgaaaactactcattc

SEQ ID NO: 58342 - DNA, 364 bp, Homo sapiens
ggggtggggcagcagcctgtgtgtcactcatgcgtggccaggtgtggctgaagataaggaggggacccaagcccagggtgctcttcctgggtacccatggtcccagatgaaacccaaaaatagcttatgcactaccaggcatgggcctagcccaaaagagtttgacctgctctttctctggggtgaacactctccttagcctttcaaagcacgagtaagaaattctacccttgagatgagtaatgcaaagacagcagaggaaagtggctgcccttctagctggcaggctccatgctcggcacgggctcaggccctgctgtggggtaggacacgccacttgcagaacgcatcttcctcttgtcag

SEQ ID NO: 58343 - DNA, 1080 bp, Homo sapiens
  misc_feature (1)...(1080): n = a,t,c or g
ttttaatgggcaaaagaacaagttgcagtcaatggctgcagaggggtgtctggggtccaatgtgggctgcactttgtgggtactgaggaaatgggaagatgctgcttctaggtcagctggtgggttggaggttgggggctgtaattagcagcagccttagaactgggatgcctttcaatccctcctggccccttatctctgtggggcagtcacaggacatcatctgttttattcaaagttgggacttgcagcaggagaccctgtcctgcatggagtaggggtcctctgttgacaaacttcttggtttccagctcttccccatctgcagcaggcctctggataaattctctctccccaggaccccttctccctccgatgggaggaaggacagaacacagctcacagcccaagaggtgggcagacccagtccagctgtgactggagctggttttggcttggggctcatgaaacccactcagtgcagacatcagctgcccagagagccctgggctgtcagcagctgggctccacatagttcccagggaagaatccagtcccctctgagctgacgccctcgcaccagccatcggagtagcggcgagtgacacagatgacagtgccctcagagaaggagagctcattgtccttctggctggtgtatgggtacagtgtcaccactttctccaagtatgaggcaggcacccagctgggctcatcaggcccaaatcctggtgggggtggaggcagccccaattcatctccatccaggggtggaggaggaggcaggtccagtggcaggggcagctcttcgtccggtgggggtggggacaactcctccagcgtgggaggccgctggaacacctcgacggctgctggtggaggaggtgggtccaaggagctggggagaggtggggctggaggtgctgcctgccccttgggcgtgggggccccaccgacaccttcggcgctgccggccgaggccagctcgtgccgaattcttggcctcgagggccaaattccctatagtgagtcgtattaaattcgtaatcatgtcatagctggtgntcaaaggaagggggg

SEQ ID NO: 58344 - DNA, 2236 bp, Homo sapiens
  misc_feature (1)...(2236): n = a,t,c or g
tttttttttttttttatcgtagagtacgttctgcattttatttctgcaggcaacacttttgctcaccagcaagaacacagcccgaggaagggacccaataacctttcaaaatgcaaactgctgcctgcggtgagggcccagggtcctccacggagaggacaggcatcttcctttcccaccaggaaggagtcagcctggagcctctgctatgtgcaaggcggtgtgcaagcaccggctgcggctctttgctgtctcttctttctctttggggctgggctgggtgtgcgttctggtgctgatgctttggcctgtgaggctgagctagagaagtgtagatgttagatgtgccagtaccatcctgcgcctcccaagcatgcccccactcactcacgtcggcatctcgacccgttcaattacagcaacgaagaagccaccgctaagcgtggtcttgggggaagcccggaggcagtgctcggcacccgggaacgtgctcaggcctcggtggggccgggcaggcagggcgggagctagcctgaaggcgcccgggttctgctgcagcgcatctggtaccatgtcttcattctcctcctggcagagggagcacatggagtagacgagccgctgcagggaagggaaagtgagcgcgtggcacagggctcgctgctggaaccctgccagggcatgcagacgcaccgggctaggtgtccctgccccgggatcctccagctgtctgctcggcatacctaaggaaaagcgtgtctcggttacacagcttcacaggctgcctcagtcctgaaatcctcgctcctgaaatcctcgcttcacagaggagaacttttgctccagggtcccaagcccattaaagtgtcagaactaagaccaaaacagatgactccaggtctaagctgctgtggacctctgagtccctcagccacgccttctcaccatctcacccgagccactgcaggaaggntccagcaggacatagtggacctcacgatagcgcggntctaagggggagaccgcccaggaagtcctcctcagccagttcacagcaagagacgccagcccgggccagcagcgtggcccatggatgccagccgcttggcatccaggtcaaaggcaaagatcttcccttggttcttcagaagagcagccaagtgactggtcttatttcctgggttggcaacaggccatcgatgacatgggagcctggcgggggtccagcagcatggctgggagacagctggccctgtcctgcagaatgaggtgtccggcccggtacagtgggtgttcatgcagatctgtctgggcgggaaacaccagcagctccggcatcaaggggtccaggagaaaatgcttccccttgagggctcgtaagtcatcgaggctgccagggaagaaccattcattcatcatttcctgaatttctccctgccaggccctatttcaacggtccattcatgcaacaaatgttaccacagctatggagaaatcaacagggtgataagggaatccgggatccgcagttgagggaatgggttgtcaagccagacttatgggtcaggagccccctctactgtttaccagcagtgggagcctgggcaagtgattcaatctcaagccccactggcatctctgtaaaatagtaggtgtgaggattcaatgagccaatatatccaagatacttacgtgccacaatttaataaatgttagctattcctgttgaagcataaccttggagaaaggttactttacaggggggtgaggagtggggaagtgagagctgagctcattcttgatggatgaggagttagtcatgtgaggcgcttaggttaaaactacattcactataactcagtaaagcagtcccgcccactctccgacccatgcagaaataggcctagagagtcacatgtctcagttcagaaatctatcgaagtggcagagctggaattcaaacacaagcagccgttctctgctattccaccctggtgtccaagcaacatggtagggcagaaggaagaggatcttacaaagagtaagggaaagggagaggggcagaggctgcttctcagagccaccaaaggacaaaataagacaggtgtgagcccagtggaggaggcacggggcagagaccagccactgttgctggcacgctggtgcacgtagcactgtggcagatggacctggagaggaagcaggagggacagcacaatggagccaagaaaggacc

SEQ ID NO: 58345 - DNA, 1167 bp, Homo sapiens
tttttttcttgattggcaaacgtgtgttggatttgcagaacatattataaatagacatacagatgtaacctcggtgtcaacagcagctggttctaccttcatgagggagccaaattttccctgtccagagctgtcaaggaagggtttctgaggtgtgtccctatatggcatggtggcaggtccttcgtgggagggttgccacatatgtgagtgtgcaggggcgagcgtggcgcagtggcatcgtctcactgtcctcctccgttgcagggccgcatcatcgagtgcacacactgtggctgtcgtggctgctctggctgaggctggcgcgctccaccctggactctggacttcgcaggttcctgcctgtcacgccacccccttcctgggagcagcgagcagtgccccaggcccgagttggagcacggtctctatggggaaggcttcgctgtctatcagctgtgatttgtaaaaataaaatctttaaatctctcgagccccacgtctcttctttcagagcatcggcctatggaacccggcggggcggcccaggccccagggaccagatgccccagcccccttgtggtgtgtgaaggtgacacacaaaggtagctggagctggaagtcccgtgaaggtgacacgcaaaggtggctggagctgcacttggacctgctgggagcacaggcaccttgggcctagtgtgtgtcctcaccaacacctgtgacacgctgcggctgttcctcagggcctggctcttcccccaggcaggaggtgacaccagctcacttgtcctggggctcccacagagcactgggggccgagcacattgttccagctgtgctcccatcacctgcccccaagggcacatccgtcatcagcctccttgccggtgtcctggtccccctggggcttggtccggaacttctgccaggggtgcggggtttcctctgcgggcatcactgtcagccactgcttgtaataggctcggaagccgtcaatcttctccaggtaggtgttcttcccttggtaccggtcaaaggtgggagggtactgggctgcaaactccagctggcggatgaccacttcgttcaccgggaccctgttctgcttcatgtccttcaagatgctgatgagataggtgtagttcagcttcctgatggccgcgttgc

SEQ ID NO: 58346 - DNA, 917 bp, Homo sapiens
cgcgtccgctatgatcagcatacaactgtcttttggaaatttttaatgaagtctacatttagccgtcggatttatctttcttaaatctttgacctaaacttttgtaagagcagctaataatttctaagattttccctgtttctttttcctacctttccttttctcataactgattggagaaattaatcagaagtcaaatacaagggacttcataatctagaaaccagataatcagctcccaagtcatgtagctaactatgcatttaaaataagtctgtctctttagttcttaagtcatatatttgtttgttaattacagtaaatgaactttaattggggtttttaaaagacagaattagcgaagtctaatttttataatgaaataagtttttgatattgctctacttggacgattttagtgaccaaaactatggataaaactgcctaagcataacattaatatatttagaatggcattcttcagtgctagtatttgaaattggaattagtacattgtgcattcttagtagtctttatccctagaatcaattctctcagcatcaccaaactgaattggtgaaatagtgctaagattctgggcaataggaagattagtgaatatgatacattgattccagggtgccagggattggctgacattaaggaccagctggctatggtcctcaggctacggtcctcagtattctagtatttgagtagtggaggtaaatccaaaggcgactggttatattttacttctaaatgtgtgctgaagtgtctcttgttcaaaaattctttgatatttagagcttcaagttaccacatttaaaagtaaagactttgcacggtggcacacacctataatcttagcacttttggggaggccccagtggatggtccaatgcagtcaggatttt

SEQ ID NO: 58347 - DNA, 1624 bp, Homo sapiens
tttttttttgccctctcatcccatttattaaagaaacagtaagaaaagatacaatgcaggaaaaccaccaaccatccttgcacaccaggccgaacaaagcacagtgatttcttcccttcatcccccacccccaccctaattcccatattcccatccacatcagtttaaattttgaggttctttgattgattgggagtaccagtgaagagggagttggatgagtagaggggccttaaatctggccacctctaagtcccaggagaagggagctgcaggcccagtcagtcaagcagaaactgcattcggtgggtctttctttgaagtggttgtccatctccctgttctgtgttcaagcccccagggaaaggtatggcagtagaggatgaccaggtccaagctgcccaggtcagagctacggaagcatggtccgttcaccaacgccacgtttctagagagcagtgagctgattctccaatggtgagcaggggactacatgtgaactgggacctgcaggccaatgtatccctgaggaaaagtccacaagaacaattcaagaaactagtaagaaacaatgggcagaaagctgtgggacgaaagcacagcaggcttctgggaggctggagatcctttctctcaagggcaggattattcccacctgccacagttcacatgccacaaataacatctcaccttcagtcaagaaaaacgcaaaggaaaaagatggctcatttgaacttgagcccaagctatgttcttcagactgtagctccacaactacccttttacctaagacagcccctgccaagaaccacagtgcctagaaaccaaggtggtcctggagggaaaatggtgtttaagggggcaacattccatttgggtacattgcagccattggaccccctggtctggggaaagcagctgggtttgtgccagggaggctccccactctaggaaatgggacgaaactcttgcctgcagggccattcatccttggaaaggaagctgggttgagacccagggtcccagttggccttgtgaaaggagctgggttgatacccacagggccagctggagaagggcccagatgcccggcagctggcctggggaaagtaacttgaccagggcctaatgggccagtagaccttgggaaggtagttggacttggaccctgcatgccagtggcccttgggaagttagctgggttgtgccaagtggcccagaggctcttgggaaaatggttggatttgagccctggaggccagcggacctttggaaggtagctgggtttgatgccaatgtgccagaagactgagaaaaggcagatgaacctgctcccctgggaaagggattggcatttacccccatggggccaactggccttgagaaatgagctgaattagggcctatggggccaggagcccttgacatgggagatggatttggccctggaaggccaattccccgagagctaggacccgagtttgggcccatggggccaggtactcttgccatggaggatgggcttgtgcccatgtttccagaagcctgtgagaaagaagctgaatttgctcctaaaagacctgctgctcttagaatgggggcaagatcgaggccttgaggtccc

SEQ ID NO: 58348 - DNA, 484 bp, Homo sapiens
cagagaccactgtgcaagcgtaatcacttcccaagaagggttttgctttaaagttttgttatgagttgctaaaatggtgaaatgctgctccgccattggatgtgcttctcgctgcttgccaaattcgaagttaaaaggactgacatttcacgtattccccacagatgaaaacatcaaaaggaaatgggtattagcaatgaaaagacttgatgtgaatgcagccggcatttgggagcctaaaaaaggagatgtgttgtgttcgaggcactttaagaagagcacaatctctggtacattacaagtgatcaataaatgagtgaatattccatgcaagtatttagaaaatagcttgtgctgtaataaatgtatgtacaaagttctctggaaacacagaagagggaaggccattgtgtctaaaaggagtcagggagtcgacgcggccgcgaattccagatctatgaatcgtagatactgaaaaaccccc

SEQ ID NO: 58349 - DNA, 2009 bp, Homo sapiens
tttttttttttttgtatcaattaatttttttattcagaacctggatctttaagactggtataaacaaaaataaaatacaaacaacttgttattaacataatagctgcagttattaactgcaagaatacagtaaaaaggagtcatactaaatgttaatgttcttgcaacagaattttcccaatcaccttaaggtagcaaattctggcaagaaatgataattcatttcttattaaaaatacttaaagaatttccaagattgatcagttgtgccacaaataaaacagcagtttattcaaaagagcccttacctttctcttattttcctaaaagatctgccatttacaggtaactactaatttcagatcagttattcaaaccagggttcttcctgtaaatccacatcttagctttatatatagtaaacttacactcatattccctttccagtcttgaagctaaacacttttgtaaaaggaacaatctaatatcacttcatatgaatcttggttcttacttttcttctatctcatttttattttcttctattatttgttcttcctcctcatcaccaaaagtctgttcctgcatggtggtaaaggagagagatctagcagccacttctgcagcaaggccagcagtgaaggtaaaatctggtgacagctgtagccgtgccagcctctgcttaatggagggctgtaatgagtccctgggagttggaggggcagtggtcagaccacttccatctgcttgtggttcatcttcactctcacattggtaacacattctttcttctgctccttgggggaagacttcatttgaagaattatctttatttttaccttctagagagttttcacataaatactcagtcctacttatttcattgtctgttgtggcggatttattactttcctcttcagtatcatttttactgacttttcccatatctgaattcattgatggttctgaattacttatgggttccactgggtctacaggagacaaggatttcaacacggcatgatcactaaatagaagttgcttccacttctgcctttctgcctctgaagctttaaatcccagcacagattttaattcttggagcaccctcttggattcttcatgctcacgcttctgtctctctttgtcttcttgagacaagtaataaaaatcatcctttctgaaatcactatcaatatctatatcatctacataagcttctaattcctgctcctctgggattggatctttgtctgcaatgtgtagagtaggctgcttcaaaggtactactgtacaatgtgggttttcacatgctatttcaggcttgcccttttttatctgtatttcttcgtagcagtttgtcgacctgagaaatggcctcttcccagcaattgttgcttgcttgaacgtggggctgaatcaactttaatttctgttctaggatgggataagcctctgacactagttcttgtgtttctttagtacaaacaagcttttcaagttcatcttcaagaattattacctcattcagtaatgctttcagatggagctgcaactacgcactgctgtgtgaacattattcagttctcttgacttctgttgagttttggataaacactgcggtactgactggtgctgagtttcaaagtaccgatagaactcatagctgcgcttaagctcttccaaacaggcagaatgagcatgaggtagaccttgagtcacatcagataagatacgatgaggcagaagtgctggagtaagtaagggcccaggaggtgaattggctgtagaaagtaatagggctaaccgtctgaagaactctgaactctgtgccacccagagttggaacaaaaccttcaatgcaggcaggctgaagccatctgtaaagttatgtgcttcctcttctgaaatctgctcttcactaagtccaaggcccagctctttaaaaggcaccacacagatgtagttggttacattgtcactctcagagttcagggggtagtttttcc

SEQ ID NO: 58350 - DNA, 370 bp, Homo sapiens; identical to SEQ ID NO: 25787

SEQ ID NO: 58351 - DNA, 1038 bp, Homo sapiens
cggacgcgtgggctggtgctgggaagatatgtccccatttacaaatagtttactacagtggatgccgtctgagcccagtgatgctggattctgtggaattttatcagaacccagtacttcggggactgaaggctgcaacctgcatcaacccacttcaatggtagtgtctgtgaaaggcctggcaaaccacagtgctaagcagtgccggacaccatgtgccttgaggacagcatgtggagattgcaccagcggcagctctgagtgcatgtggtgcagcaacatgaagcagtgtgtggactccaatgcctatgtggcctccttcccttttggccagtgtatggaatggtatacgatgagcacctgcccccctgaaaattgttcaggctactgtacctgtagtcattgcttggagcaaccaggctgtggctggtgtactgatcccagcaatactggcaaagggaaatgcatagagggttcctataaaggaccagtgaagatgccttcgcaagcccctacaggaaatttctatccacagcccctgctcaattccagcatgtgtctagaggacagcagatacaactggtctttcattcactgtccagcttgccaatgcaacggccacagtaaatgcatcaatcagagcatctgtgagaagtgtgagaacctgaccacaggcaagcactgcgagacctgcatatctggcttctacgggtgatcccaccaatggagggaaatgtcagccatgcaagtgcaatgggcacgcgtctctgtgcaacaccaacacgggcaagtgcttctgcaccaccaagggcgtcaagggggacgagtgccagctatgtgaggtagaaaatcgataccaaggaaaccctctcagaggaacatgttattatactcttcttattgactatcagttcacctttagtctatcccaggaagatgatcgctattacacagctatcaattttgtggctactcctgacgaacaaaacagggatttggacatgttcatcaatgcctccaagaatttcaacctcaaca

SEQ ID NO: 58352 - DNA, 1537 bp, Homo sapiens
gtgcagctctgaggtaaacttttatttcttggctgacaggacttccacacccatgctcctcctggcaccttttactctgcccaagcagtggcagcccagtccaaaaggtgcctgccatggccaaaggggttggggagtcacttcacattccaggctggaggagtgagaggacttgggggtactcctcccaccccattgccagcaagaggccatgactcacctcaaccccaagtcctgcatcctggtgggaagtgacaatgcctcctcccagctctccatacctaatggggtcatgaccagacagggtaggacccaggcccccagcttcagttggtaacggtggcctccacggctgccccctgtccaggtgacaaccccagcccccatgatggggcagcaaaggtctcttctcctccttggtcctcagcaacagacagagccctccacaccaggcaggacagaggcaaagtcagaagcagcagcggtggcagggaaggagcagccagcacaggcccagggctctcctgaagtcatttaagctgtctgccatgcggctctgggactggccactaggtgggcgtaggcggctgtgatacaggtacttggacacctttctgtcctgatgctagctgatacttgtctttggctgctgcccgctccttggcatcaaaataccagacagtgatggcgtacctggtggcataggctggcttcacctcgtgggggttccgccggtcagaccagaaaatgagcaaccggtcaaagagtggctcgatgttggctaccacgggccggccctcagggaagatctgcagcaggccgccatgcaccttaacgtcccagttctgattcaggtaatagatacaggtgatgcagcgcccatcgccgtggggattgtcaacgtgccttacgtacccgagcccgttgcctgggtaacacgccaccatggccttggtgcgcccgttgatgacatagctgcccagccgccctgcgcagtggcggatgacggcgtccacatgggccatgagggcaccaatgcttcgacagcctggttcatggccttccacccaggcaatctggtccccacggatgctgcgcggcgggatcgccctctggctcactagctgcccgtctcgcaggcgcccaccccgtttgagggcctccacctcggccagcacgcgaccgcccagtgctgccccccaggaagctgtccttgaacgaaagatgccgtaagtaccgcatgcagggcacgatatagtccagggccagcggctcgggcgcaagaggcaagcgcctcctccatcaagcccagcactggcctcaccactgccactcgtgcagctgcagctcatgccaccctcccgctctgcctcctggttctcttgcctggcccagggccgtttgctgggtgaaggggcatccccaccatcctcggcccatttccgtttggcgggcctcaggccgtgcgcccctgggctgccaatcgctggcaccccttggtgaccacgctgcagcgccttcactctgcagcggccgc

SEQ ID NO: 58353 - DNA, 386 bp, Homo sapiens
agctgactttgagcagttctagaggcagaaaaatctttacggagtgctttatttagcttgagcatgtgagtcatttgttctgtatgagggagagctactggcaacaaatgaggaagagccttcggatcaataaatttcagacagttgacactggttaatagctggggagaaatacacttccctgggatcaaatgacatctgaatttctacaattttactaactaaattcatataacaggttacctcttcccaaatcaggtcttgtggccagttccagtggctaagctcaggacttctatgaagtatttttttatagaaaattagaattttatactaagatctaatatgatttcacagtttttacaaattgctttatcgtgatactt

SEQ ID NO: 58354 - DNA, 698 bp, Homo sapiens
  misc_feature (1)...(698): n = a,t,c or g
gcggcacgagcaggaattctgaatcttagaacttttttattgaaagagatcttagaagccatctaaccaacccagactgcttaatgattgtctgggttcacatagctatgggtgatagaaaccgggattcgttgtgaccagtaattctccattctttctccctaatgtgcagcacatctccagtacttctgaatagattacacagcttttctttggctagtttgggggcttgacctgatgcaaaaaggaatttttttcctctgccaacaaaatttctcactgcactgcttgctacacagacaagattcaaaataaaagtaatggtnnnnnnnnnnnnnnnnnnnnnnnnnnnnnnnnnnnnnnnnnnnnnnnnnnnnnnnnnnnnnnnnnnnnnnnnnnnnnnnnnnnnnnnnnnnnnnnnnnnnnnnnnnnnnnnnnnnnnnnnnnnnnnnnnnnnnntgttacatgaaaaacatatttgaaactgtactgccatttgtgtaaaacaaggtatgtggtgtgtgaacatcttatttgcatatgcatataattatctctaaggatgcacgagaaaccagtgataattatgcctccaagaagaggttcaactaggtgggctgcttagaatctagttttgtattatttggacttttgttcacattatcctttcaaaatacattttaaaaatactatatgca

SEQ ID NO: 58355 - DNA, 328 bp, Homo sapiens
tgatagggtatctcccactgtactccacaaaatgtccaatagcttggagatatccttaataagcgacaatgagttcaagtgcaggcattcacagccggagtgtggttatggcttgcagcctgatcgttggacagagtacagcatacagacgatggaaccagataacctggaactaatctttgattttttcgaagaagatctcagtgagcacgtagttcagggtgatgcccttcctggacatgtgggtacagcttgtctcttattcatccaccattgctgagagtggaaagagtgctggaattcttactcttcccatcatgagcagaaa

SEQ ID NO: 58356 - DNA, 414 bp, Homo sapiens
gtcggcgtgggatgggagactcgggagttatgtgcagtggagagacagaatctaataggctgtcactggttgatctttagagagaatacatagtctctaaatactttcctttatttactataaaagggaaaagagtaagtcaacaacagagaaagcttcagtctccacctaatcaaggggtcaaggtgaccatgaccttggatgggacaagccatggtcagcgccacctgtgattcagagatgagaatatgcattaccactgggtgtttctgcagagaggcatcatctaaaccaaatcatcaccacaccttggccagacaacccaagtgaggggtggagagtccaaatccttagtcccttctgacgtgtgctcacagaaccactgtctggcaggatccagccctgattcccgat

SEQ ID NO: 58357 - DNA, 974 bp, Homo sapiens
tgtggcctcagtccttcgccgtccctcgccgtccttcgccatcgcacgccaccgcaccccatctctcgaaatctgcagacatcttgatttttcccacgctgtctgtcaggtctccgccgccactcgacgccagggcgccgggccttgtgggctgtgctgcacctcggacggcttcgcaccagccagcgccctctctctcctgcagcactctgatctgcaccccctgaggggcttccactgtccgcggggtgagaatgcccctgggagtgtaacatgactgccgccccatgtgtgtgagaggcgtcctctgggagagcatggatcctgaggtcccaggattgtcagctgacctctgtcctgtgtgcccagtggccccaggtgacgtgtcttcaagaagaggctgagctgcggtgcttgtaagagtcatgtgctgttcctggggcttggatgatgtaggggaagcaaggtgaaagtggtatcccgtggttccacgttctgtcctgctgtggggctgtccctcacatgctttcagtggctgttgcagaggaagagcctccggaaatctgcgtgggtctcagccttagatccaaggacagtccaaggaagtcctaagaccatggagttggtgatctgggatctgggtttgctgatatttctcaccgtgaatctcttggtggtgtttgtgggcacgagaggggcagagaatggagagtgaggctaccacatgaagcgtcaccagagctgctccctgctgcctgctcagagcaccccggatccactgttcaatctgcacaagattcggggtccagacatgggagacttcagctgcctcagaggaccgtggacagggaaggccagcctcgcatccctctgtccatgcctggaatgactttaataaccaagagttttatttttgaatttgtagctgtcgttcactttttacccacccattcaataaaccttacagaattgca

SEQ ID NO: 58358 - DNA, 793 bp, Homo sapiens
  misc_feature (1)...(793): n = a,t,c or g
tctaccttcaagacttacctcttttcagccatgcatcccccttttctaagacatgcttctctttgtgttcttgacctcattccttcccatctaagaccatattccaccctgtttaatttctagtcttcggtttctctttttactagtttctttcctccacctctacatagctgcaggtcttctctgtcttaaatcaacaataacaaaacaagacaaaaacctttccttaacttggcctcttcccttgaactattttttctctctccttcctataattgttatacttctttaaaaagtaattgttactttttgacaaaagtaaatattgtcccttttttccctactttcaagtcctctctgtcttgtgacattctggcctccatacctgcttaattttttttgagatggggtcttgctctgttgcccaggctggagtgcagtggcacaaacacagctcactgcaacctccacctcccaggatcaagcaatcctcccatctcaccctcccaagtagctgggactataggcacccgccaccatgcctaattttttgtatttttggtagtgacagggtttcaccatgttgtccaggctggtctcgaactcctgagctcaagcatctgtccgactcagcctacacagtgttgggattacaggcgtgagcaccgcaccagcccacttgaatttatgcattatgatctcacatcccccntgaaccactacccttgncccanttccgctttgtatctcatttctcctggcngaccctnaagcgngngncaantnacccaac

SEQ ID NO: 58359 - DNA, 1227 bp, Homo sapiens
gaataatcccaaagcttcttggttttattttgatatacataattttatggcctgggctttccaaatttgttttcctgtttggtttttttcctgcttttgctcaaaaactgccatatgctgacagatgcactcagggcatgagcagcggcattgtatttgtacataggttcaagtgtaacacctaactaaatcatttttccttttcctttagagttatggtcatgtctcatgtttcattactactttggggctgttctaaatagatgctttatgtgataaacaactgaaaccattatacctattagtttgtgaagtaagcctacagtataataaagacactaacgtatttttaactgatggagcaaaaaagcaaactaatgaatcaggattacttgaggtaatggctgtgtgagtttttgtaacatttattttcacaagatgggacacatatttgtatgctttggcatttacatccacttcaaatgttaaaaaacttatttttaatgttttaggtttaagcagcttgtaatttattgatctacatggcattaattgatttaaccattatacctgaaataattcttcagtgtttgcctttgagcagtgataggttgtgtattttttaattgcctaagagcatatataccaaacaccacgcccagccaccactacgcactttaaaaccaaaaaaagctcaaagggatggatcattgtccatggctcaggagccccactgtggggtaagtgtgatgtcgatggattaatttagacagtggtgtattcatcagggcaaaggaaattcttccagaggtgatgatgcggcagatattcccagtgctctcccaaagcaagctggccctcttgtcatcctctcagtgggcggcaccagctgcccctccttccacaagtactcaagcctgtttgtaaatactgaaggaattgatggggttgaggaaaggaggtgcatgtgaccagggtcccaaggccacagcttttcagatcctaggaagcaagtggcatttgcttgagttgtggcctcggaaggagaatgtttatctgttttctaactttgctgacaccaggattctccctgtcattgagaagaaagcattatctaattaccttcaggtggtttacttattctgtaaagaatatgtgtaaatattttgtacagagccctgtatcaaataaacagccatatgtggttactaatcaaaaaaaaaaaaa

SEQ ID NO: 58360 - DNA, 1808 bp, Homo sapiens
  misc_feature (1)...(1808): n = a,t,c or g
ttttttttttgaattcataatcatttattgtaaatcactcacagtttacacattaccagtggcaaaataacactgttaaacacctactggatgaagaacttcattgtgactatttccaattgccatcatatctttttctaaaatttaaaatttaacttttaaatcctacatcttttctgaaaatatctatcttcaaagtgctccaatactaacactataagccctttcttttgctctaacatctaacacaaagggcacactgtcccattaattccacatgcactttacaaagcaacttcacacacaaatttttttaatccagaaactacataatgatcactttatattttgctacaaaattaatgaaggctgcatgcaggtgaaacattagtagacacggaattctagataactgttggttctcaagatctgatggcctgatgtggaaaattaatatgcttatttagcagaagtagctaaagtacatgcatcagtggctgggatcaattagaatataaattaggtgtttaaacatttaaacgagagcttaatttgagcttaatttgatgtctggcatgtcagagttatacacctttaagataacaatagcaaacagaacaaaatcaaacatctaaacaggcatgatttataaggtggggctgggccttagggctcaggacacaaaacgagctgggcagtgaacaaatctctcttgaaacaaagacagtagagcattaacaaggctgtaaacacagccaaaaaaataaacaagagccatttcctgtattctcatttttttcagtttttgattctcttaagcaaacaataaaaccacacacacacaataattaacaaaacagaaacattctttagttaccacatagatcccccttctgtcttctaccctgcctctctgctccttcagatggttgtttaaaagcaatgatgggttaattggtagaaaagaaaacaaatgctctcctgaactacactgaaagaatattactttccttcatcctgtcagggttagcatcatgttcaagcacatgacaacgtatatttgacgtattttagctatagcgattaaatcacatgtccacactctaatgttaaatcgtagtaatattgacttgaaaagttttttaggctgggcgcgctggnnnnnnnnnnnnnnnnnnnnnnnnnnnnnnnnnnnnnnnnnnnnnnnnnnnnnnnnnnnnnnnnnnnnnnnnnnnnnnnnnnnnnnnnnnnnnnnnnnnnnnnnnnnnnnnnnnnnnnnnnnnnnnnnnnnnnnttttttcggcagggtgcggtggtgaggttgggtcacacctcctcagttggtttgttttgtacctgaatgtatgagttctccagaagaaaccccagtaacacagggggtgcagaggctctgcctccctcacatggcctgagctgaccatagtgaggccctggcaatgggcaggagccttgctgactcctttgggctttgggctccacctcaccatcataaccccttggcactcaggtctgcctggtggctgggaagcttccatctagaaaaccgcactggaaaggattctttaaccatgttgctcttacagggctgtgcactgttcagtacatgccatgcagatttctgcttccttgcttttgctcatgtgtttttcatctcactgtctgtcctgccattgactacaacccaaagcctcagaggcacagaactttcccagaccatctggtctaccctgatcttatctactataaacgtctttagatagtccttgattttctgcttgatgtgcagc

SEQ ID NO: 58361 - DNA, 1640 bp, Homo sapiens
  misc_feature (1)...(1640): n = a,t,c or g
ggctgatcacccgaggggaatggcagtcggaggcgcaggacaccatgaagacagggtcatcgaccaacaacaacgaggaggagaagtcccggctgttggagaaggagaaccgtgaactggaaaagatcattgctgagaaagaggagcgtgtctctgaactgcgccatcaactccagtctcggcagcagctccgctcccggcgccacccaccgacacccccagaaccctctgggggcctgcccagggggaccccctgagccccccgaccggcttagctgtgatgggagtcgagtgcatttgctttataagtgagggtagggtgagggaggacaggccagtagggggagggaaagggagaggggaagggcaggggactcaggaagcagggggtccccatccccagctgggaagaacatgctatccaatctcatctcttgtaaatacatgtccccctgtgagttctgggctgatttgggtctctcatacctctgggaaacagacctttttctctcttactgcttcatgtaattttgtatcacctcttcacaatttagttcgtacctggcttgaagctgctcactgctcacacgctgcctcctcagcagcctcactgcatctttctcttcccatgcaacaccctcttctagttaccacggcaacccctgcagctcctctgcctttgtgctctgttcctgtccagcaggggtctcccaacaagtgctctttccaccccaaaggcantctccttttctccactgtcataatctctttccatcttacttgcccttctatactttctcacatgtggctccccctgaattttgcttcctttgggagctcattcttttcgccaaggctcacatgctccttgcctctgctctgtgcactcacgctcagcacacatgcatcctcccctctcctgcgtgtgccccactgaacatgctcatgtgtacacacgcttttcccgtatgctttcttcatgttcagtcacatgtgctctcgggtgccctgcattcacagctacgtgtgcccctctcatggtcatgggtctgcccttgagcgtgtttgggtaggcatgtgcaatttgtctagcatgctgagtcatgtctttcctatttgcacacgtccatgtttatccatgtactttccctgtgtaccctccatgtaccttgtgtactttcttcccttaaatcatggtattcttctgacagagccatatgtaccctaccctgcacattgttatgcacttttccccaattcatgtttggtggggccatccacaccctctccttgtcacagaatctccatttctgctcagattccccccatctccattgcattcatgtactaccctcagtctacactcacaatcatcttctcccaagactgctcccttttgttttgtgtttttttgaggggaattaagggaaaaataagtgggggcaggtttggagagctgcttccagtggatagttgatgagaatcctgaccaaaggaaggcacccttgactgttgggatagacagatggacctatggggtgggaggtggtgtccctttcacactgtggtgtctcttggggaaggatctccccgaatctcaataaaccagtgaacagtgtgactcggaaaaaaaaaaaaaa

SEQ ID NO: 58362 - DNA, 1260 bp, Homo sapiens
gcaaaatgacaacatttaatgggatgataaggaaataagacttgtcaagaaaccatagcccactgcagactgttcacgatgtcagatggttcatgatttttttccaggtttgatacagaagaatcagtttgttaaaagaaatgcttctccatcagagacttttctttcttcaactattgtccctatccttattcaggttttcattttcttactagatgtgttttcaatggtttatgacgtaataaaatttctttacttcttccagtaattgctttgtctcactcggaaactgaactactgttgatgtggtaaaaagctagggcatattcttctttttcgtagtaatcgtagaccatgcctggggctggctgaatgttgaacacaaggttgctctgctcagcagaaaaagtgaaactgtctgctcgaccaaaaacattttccaagtagaaaagaacatggtcattcttgacttcagtcttcatcacttggcccttgttttcaagctcttcaatggatgacatggttggagtaaatcctgatagcatttttacatctataaccaccatactggatttattgcgaattccagtgtatttgagggtcactgtgaggtcaaaagcagtcgaagagtagttctttactatttccaaggaaagagaaaatccagatgccttcttaggtaggagaacattgtacttaagggtggcctggataaatgtacaaccgtgtccttccacatctactgtgtattgtccaggtgcctgtgttacttctgaacgttggaccagtaggcggttatgaccgttaacctggaaaatctcactggatccttcactgctggaggactgtgggttttaggtgtccaagaagaaagctcagatcttccagcagaaggtaccttacttgggatttactatccgacaggggtctggaggactgtgggtattaggtgtccaagaagaaagctcagatctgccgacggcaggtaccttacttgggatttactatccgacaggggtccgaacgcagcccgggatcagaaagaaagcaggtcgtttgcaatctaccggagcctaagggcagaaggcaggtgagagaattcttaggagctgtggggttttgtagactgtggatcccaaactttgcagtattagccaagactttgtatgcggtcaccaagggggcggggaccgcgaacctttggaatgcagatcccaacaacagcaagtctttcatgagttaaaggaaaaacttctggca

SEQ ID NO: 58363 - DNA, 715 bp, Homo sapiens
tttttttttttttttttgctggagcaaaactttactgtcagaggctctgctgggccacaggtcttcagaacaccgggctcgcccggcctcctctaaggcattcaataatattagtaattaaatagcaacgctcatcccccaaccggaatgtacaacagaggtcccattgtgccatgtggtcccaaggggtctggtcccatgaggtctggtactcaagaggcagagggggctccctgatgcagaagggttaaggccacaaaggaaaaggagaagggatggggtctggggacagctgagctggtccatcacatccaggaatctggctcagccctcggggtgactgagtgcagggcatgccatgtccccagctctgcgggtccggaggggcggcgggggccccgaggcgtggggatacgtgagggtttacggtctggctgtgtgtccatccgaccccgtgcccaggtcctcgagggttcagtgcaagccagggggctcccaggtgcatctagtggcccccccatgccagggcaggggctgccttcatcggaggagctggaaagggcttggcttcggggcccaggcagcccattggccgtccggccagagtccccaggttggccacatttgccacccaggacgctgagggacgaagaggaggaactggaggaacaataggcagagtcaggagctggagggtcggggacccgagctgggt

SEQ ID NO: 58364 - DNA, 2649 bp, Homo sapiens
gcgggaacgtcgccgtcaccttgtctcggggcctcggcgctgcttcccgccaaaacacgtttaccgcgcgcccgggcctcccaccttgcggaagggaccccaccaccacttggatttctgttgcaggttgagaacaaaaacatgcacctggagtttccccggagccctctgcgtggttgagcttcggtggaatttcggggctcttggctgccagccgcgcttgcctggtagcaacagaaaccagtcctgctcgcctccgtggacatttcattaccatccagaagtgtctcccactgaaggcatccgtggttgtttttaagccacaaaaaagccacacccaagatcaccttgacacccaccctgttcaagtgtccatgaatgctgggccctgagggaaggtgaaggctttgtggtcaagctccgtggcctgccctgggtcctgctctgttgaggacgtgcagaacttcctctctgactgcacgattcatgatggggccgcaggtgtccatttcatctacactagagagggcaggcagagtggtgaggcttttgttgaacttggatcagaagatgatgtaaaaatggccctgaaaaaagacagggaaagcatgggacaccggtacattgaggtgttcaagtcccacagaaccgagatggattgggtgttgaagcacagtggtcccaacagtgccgacagcgccaacgatggcttcgtgcggcttcgaggactcccatttggatgcacaaaggaagaaattgttcagttcttctcagggttggaaattgtgccaaacgggatcacattgcctgtggaccccgaaggcaagattacaggggaagcgttcgtgcagtttgcctcgcaggagttagctgagaaggctctagggaaacacaaggagaggatagggcacaggtacattgaggtgtttaagagcagccaggaggaagttaggtcatactcagatccccctctgaagttcatgtccgtgcagcggccagggccctatgaccggcccgggactgccaggaggtacattggcatcgtgaagcaggcaggcctggaaaggatgaggcctggtgcctacagcacaggctacgggggctacgaggagtacagtggcctcagtgatggctacggcttcaccaccgacctgttcgggagagacctcagctactgtctctccggaatgtatgaccacagatacggcgacagtgagttcacagtgcagagcaccacaggccactgtgtccacatgaggggcctgccgtacaaagcgaccgagaacgacatttacaacttcttctctcctctcaaccctgtgagagtccatattgagattggcccagatggaagagtgacgggtgaagcagatgttgagtttgctactcatgaagaagctgtggcagctatgtccaaagacagggccaatatgcagcacagatatatagaactcttcttgaattcaacaacaggggccagcaatggggcgtatagcagccaggtgatgcaaggcatgggggtgtctgctgccccaggccacttacagtggcctggagagccagtcagtgagtggctgttacggggccggctacagtgggcagaacagcatgggtggctatgactagttttgttaggaacatttgagttacttcaatcattttcacaggcagccaacaagcaattaagagcagttataatagaggaagctgggggacccattttgcaccatgagtttgtgaaaaatctggattaaaaaattacctcttcagtgttttctcatgcaaaattttcttctagcatgtgataatgagtaaactaaaactattttcagcttttctcaattaacattttggtagtatacttccagagtgatgttatctaagtttaagtagtttaagtatgttaaatgtggatcttttacaccacatcacagtgaacacactggggagacgtgcttttttggaaaactcaaaggtgctagctccctgattcaaagaaatatttctcatgtttgttcattctagtttatattttcatttaaaatcctttaggttaagtttaagctttttaaaagttagttttgagaattgagacacaatactaatactgtaggaattggtgaggccttgacttaaaactttctttgtactgtgatttccttttgggtgtattttgctaagtgaaacttgttaaattttttgttaactaaatttttttcttaaaataaagactttttcacaatgactggcacagattactcagcaaaagatagcaaaacgggtggttgaagataattcattttaatcgtaatgtattttagtgtgaatttaaaaatttcatacatcaaatctatgatctcccttatattcttatgatgaggctaaataaaagtctaataaaaatgttaaatatgtgaatggtggaaatggtgactagcagcacacattctgggaagcatcaaatagacacacggccccagccacctgcaacttatgtgcactgttgtaaaccattcagaattttcctgctaggcccttgatgctggagtcacatctgttgatagctggagaactttagtttcaagtactacattgtgaaagcaattattttgtttctcgtttttataaaatgctgacttaaactttaaa

SEQ ID NO: 58365 - DNA, 1430 bp, Homo sapiens
  misc_feature (1)...(1430): n = a,t,c or g
aaaacaacatgatggtgttggtgtcgcgtgctgtggagcatccgagtgtgccagagtctccagaattcgtcagggtcagatcatatgaatcccaaatggttatccgtccccacaagtcatttgatgagaatggctttgactacttactaacatacagtgacaatccccaaacggtgtttcctcgctactgtgttagttggatggtttccagtggcatgccagatttcctggagaagctgcacatggccactctgaaagccaagaatatggagattaaagtaaaggactacatctcagctaagcctctggaaatgagtagtgaagccaaggccaccagccagtcctctgagcgaaagaacgagggcagctgtggccctgctcggattgagtatgcttgacaggctttgggataagaagggacaaggtgcttctagccctgtctcagtccgttatcactctgctgtagaagggggacatgccacatgtattagaaggcatctgctgtaacttccagtgcaagataattcaataactgatgtcccatttcattcagagcccttattgctcttatcaaaacagaagaaggctacatttgtgggagtgttgtcatattctcaggccaactgttttgaaattcggtatctcactgagctaatctggaacaaacctctcacctcaggccagaaggggatgacctccatttgcttctctgagtagtttcctctgctgacattccaaatcccaccatcgattgtgcagcgctttggatttccttcagttctccaggtccacctggaaagtatagttggccagttgagtctctcaaatgaggggctactgggagtgctcttggtaacaatcatgatgtgaatgggtgtgaacgatacttggctatgttaagtgccttgtccgcaccttgcttttatctctagagacatgaagttattattaatttttttttttttnaagnanananggagtttnactctgtttcccaggctggtcttgaactcctgggccatgcctggccagggacatgaatttgtacaaagaaatttccctccctgcctgcacaatatcacccattgactcaccttatccaaagcaagtttcctgtgaatcggccagttcttctatattcattggatcattgcctccttcctaaccttccccatttaccaagaacactgggagactaatccttttagatagtagctttttgatgctcaaaacatcacatttaaatttagtttaaaaattttttaacttttgtgtcaaatagggagttgagggaattgaggcaggatttctaccctagtccgattgtataggaaaacaccattttggattcagggtattatttttcatatttcagggtttggacttgttcttttcaggagggcttaaagtcngggggatggggggctggg

SEQ ID NO: 58366 - DNA, 6051 bp, Homo sapiens
cgggtcctcagcctggaatcaccccttgagaaggaccccagagtcctcggcgcccagtccgtcccccgaggcagggcactgaaggggttaagtcccctggggctggattccgccttccggcttttcccagaccccagagccggtccctggaacactgcagtcctgagctctgggatggagcccgagactgcgctgtggggcccggatctgcagggtccggaacagagccccaacgatgctcacagaggtgccgagagtgaaaacgaagaggagagccctcggcaggaaagttctggggaggagatcatcatgggagacccggctcagagtccagaatccaaggactcaacagagatgtccctggagagatcctcccaggacccctctgtcccccagaaccccccaaccccactgggtcactccaatcccttggaccaccagatccccctggaccccccagccccggaggtagtccctaccccatctgactggaccaaggcctgcgaggccagctggcagtggggcgctctcaccacatggaacagccccccagtcgtccccgccaacgagcccagcctgcgggagctggtgcagggccgcccggcgggggcggagaagccctacatctgcaacgagtgcggcaagagcttcagccagtggtccaagctgctgcggcaccagcgcatccacacgggagagcggcccaacacctgctccgagtgcggcaagagcttcacgcagagctcgcacctggtgcagcaccagcgcacgcacaccggcgagaagccctacaagtgccccgactgcggcaagtgcttcagctggagctccaacctggtgcagcaccagcgcacgcacacgggagagaagccctacaagtgcacggagtgcgagaaagccttcacccagagcaccaacctcatcaagcaccagcgatcccacaccggcgagaagccctacaagtgcggcgagtgccgccgggctttctaccgcagctcggacctcatccagcaccaggccacccacacaggcgagaaaccctacaagtgccccgagtgcgggaagcgcttcggccagaaccacaacctcctcaagcaccagaagatccacgcgggcgagaagccataccgctgcaccgagtgcgggaagagcttcatccagagctcggagctgacccagcaccagcgcacgcacacaggcgagaagccctacgagtgcctagagtgcggcaagagcttcggccacagctccaccctcatcaagcaccagcggactcacctgcgcgaggacccgttcaagtgcccagtgtgcggcaagaccttcaccctgagcgccacgttgctgcggcaccagcgcacgcacacgggcgagcggccctacaagtgcccagagtgcggcaagagcttcagcgtcagctccaacctcatcaaccaccagcgcatccaccgcggcgagcggccctacatctgcgccgactgcggcaagagcttcatcatgagctccacccttatccgccaccagcgcatccacaccggtgagaagccctacaagtgttccgactgcggcaagagcttcatccgcagctcccaccttatccagcaccgccgcacgcacaccggcgagaagccctacaagtgccccgagtgcggcaagagcttcagccagagctccaaccttattacccacgtccgcacgcacatggacgagaacctgttcgtgtgctccgactgcgggaaggccttcctggaagcccacgagctggagcagcaccgggtgatccatgagagggggaagaccccagcgcgtagggcccagggcgacagcctgctggggctcggggacccctccctgctgaccccgccgccgggagccaagccgcacaagtgtctcgtgtgcggaaagggcttcaacgacgagggcatcttcatgcaacatcagaggatccacatcggagaaaacccctacaaaaatgcagacggcctcatcgcacacgcagcccccaaacctcctcagttacgatccccaaggctccctttcagagggaattcctaccccggggctgcggagggcagagcggaggcccccggacagccccttaagccgccggagggtcaggagggcttcagccagaggcgggggctgctgtcctccaagacctacatctgctcccactgcggagagagcttcctggatcgctctgtgctcctccagcatcagctcacccacggcaacgaaaagccctttctctttcctgattatagaattggcctaggggaaggcgcagggcccagccccttcttaagtgggaagccctttaaatgccctgaatgcaaacaaagctttggcctcagctctgagctgctgctgcaccagaaagtccatgcaggcgggaagagctcccagaagagtccagagctggggaagagctcttccgtcctcctggagcatctcaggagccccctgggggccagaccctaccgctgctcagattgcagggcctccttcctcgaccgcgtggccctcacccggcaccaagaaacccacacccaggaaaaaccccccaatcccgaggacccccctccagaggcagtcaccctgtccacagatcaggaaggtgagggcgagacccctacccccacagagagcagcagccatggggaagggcaaaaccccaaaaccctagtggaagaaaagccctatctgtgccccgagtgtggagccggcttcacagaagtcgcagccctcctgctccataggagctgccacccaggtgtctccctgtgaaatgggtctggagaccaggggcctcgctctctccagagaggaacactggattttttcccccaaaaaaattacatggggaagggaggataaccctatcagatggtagtggagtggaggagaaagaaccctgggaaaaaatagtgcttttacatcagtgatgagaaaccctataaaattgttggtgggaagcacttataaggcagtagagaaaaactgttgggttagaaaccctataaatatgtaggaaaaaaaaaagccctttaagtctgtagcagaaaaaccctataaaccatagtggataaaagccctattaattgtaggaagaggtcccaatatgtctctgaacaaccctataaaattgtatcaaaatccttaggaaaatcctatagggtcggggaagtaccgcaatggcactgacccgggagtaacgaccctcagatgatgcagaaaacacctctccctcactgttccacaatgttctctcccagcagccctggacagttctcatggaggaagatgctcagctgggggagtggtgtgggaactgggtggaactgaaaaggaagaaaataggagaaaaataagtgaccaggggctctggagcccccagaggagataagacagagactaggaagaaaaggtcccactcactgcactggggtccttggggtttgaggacaatgttagatgcattgtgtgttttagggaaagaggcctatggaatcccttatcaaaaccccaaaatggggaagaaaaaacaaattggcaagcctttttaaaggctgaagtttggggtgcagaaacatggtcagtataagaatactgagaaaccaccacaaaaattagggggaagcagggggcagtttctgttagattgctttgaggggagcaaaccaaggtggggaaactgctcacatggaacccagctaactccaggccccttcttgcttccggaagcttgcgaaactgcaagtagcaggcaggtcccagctctcagagtgcaagggttctccccacaccaggcaggaccaccctttctccctgcccagccagggacttctactctgcaaggcctccagggatggcggttgcctcccaccacattctcaggtctcaccttcaggaggtttttcctgaaatctaactgccgccagtggcagctcatttcctcaaattctgtcctcagtggagagggagaaccgctgctagtcgacctccaaagaataaagcccttcagagacttagggcctgcgtgtgggcctccccagccttctccaagtcatcagggccacagaatttcttagaaagctttgattagccagcaacttgattttaaacttcagctattcatctttgttggtagcaaggctgccccgcaggataaggcagccctcctccctggtggggatccagacaccccacagactgagccacaggtccctgaagagtccgcagaggccgtatcaccctcttcaccctggtacctggagccctccagggttgtgagatccagcccaatctcagccttgagatggatgggatggattccactcacttggctcccctctcctccttggccagaaaccttcagaaggaaacagaaggatgagaaagcctcccttgccaggcccatctcacctcccacaccacacagttacacattcataaacagccaagcctgctcacaggcctgggcatatgtggctggggagagactgttgccctatgagatggtggaagacagaaaactcttgaatgaaacatctgtaacaagactcccactccctaatcctggagaccccttcaaaaggagaggactctgctcagcgctgggtcagaaaggaagtgcttgccaaccccagtaatgcgctgtcctggagtaagaggactgagatgccagctgtggggcccgtcaggagtcacgtctcaagagaggggtgacccagatttttgcaaagctgtggaagagacctctaattccatgacctaaagtttcacacaacctttatgcaaatccttcgccatttgtctatcctggccccagcaggatgaccctcacatttaaaaggatcaaaatctcaaacattgtgggaggaaaacgccaggcctgctggggagagggagaaggcaggcctcaggattgtgcggagaaccatgttgccatctgcataacgccccagcctatccaagtgccaggaagggaagcactactgaggggggtgctgcctgtgggtctcttcctaacagaacgccaacgaagggggtgccctgtaagaatgagaagtctgccaagtctaaggagatgtccccctccccaagatggtagcagaaactgaagttgtaaagacaaacctctcgcaaagccagaagcagatgctctcaaaaacaggcctaaggaatctgttcccagaagaggcctggggagcagcttttggggctcagaggccagtctggggggaggcaggcagtgtgactgaaggccggcgcaggcctgtttcggactagggtgtagcatatttagtaggatgctcacatgttgtagggatgggtgagggctaaggggcttggctcttgtacgggatggatgatgtgagcgcacagttcgtagggtcaggcgtcttgcggtaggaaaggggcagggttcgatacctctggggtgtggcgtgttctctcttgcccacctccccaagctcctttaaccaggagcttccctcccagagtgagctacgtcttgggaggattgaagcagggaggtggcagtggctagagttgctcagatcggctcagatgaaggcccaggggtcaaagcatttgctcaccacaactgagtctggaaggcactgtgcagccaaaccctcttgtccaatcacatgcaggccccaggcccctcagaaacgccctggtggagggaggagcccaacagatagggtcagggagtcagtggggaaagcagaggggagagcttagagtgaaacttgaaactgctatggacatggaggtcagatgggaacttggaactgggcatgaatcctgaatggtggggaaacttgaagccatcacagccaagaggtggggttccatgacctgccctgaggtcagcagctcccagactcctttgccctcactagggaagccccagtcaccggacttgtccccatggagtgaagagaggccccatttttgagtgttgtgtgtccaaaacagtgttgtgtcactggtggtcatgttgcttagttgaagagaataaagggaataagatttcctggg

SEQ ID NO: 58367 - DNA, 2450 bp, Homo sapiens
ctctttttttctctcggaagttcaattgtctttatttttcttatacagattcagagaagtaaaaaccagtaccaaactccaggtaaaatggtttgatctgatcgatttggctgcatactttcggtacgtataacattctaaacttaaaatagaaatttttatattacaaaacgtagaagtaaaattttaaaaagttaaagtactagcacatatatgtgttaggaaaatggtctctgtcaattgcccattttcccaattaaattaacctacgatttcctttttttaacagcttatttttttcataaaagttgtactttgagaagttactttctaattacgtcatgagaacacaacttgtaattagcaacacttctgtcagtctagatcacttcttctgcagagagcttttcaaccaagttggcatcaaccagcacaataaagttttcactgttttacctgtttcccggtatatggtgtaatcagtgaaagaaatggcatttcacatcctaaataatacggtgaaacactgtctaaaaattacttagatttaacagaattggcaattaggttttgacaatgtatttacttcaagacaatgtattttatcaggaaaaaatatcttgaaagaaagatctctgaaattatttttcatttgatacgccttttctgtgacaaaattttggggtgaaatgatgatgtttgctgattgatttagtactaaaaagactagtactaagaagactaaagacagttatcttataataagaaatatagtataaatagcaccttatcaagaattctgcaggggttttaacacttacaataataggaaatagccattaaaaagttgctctaactttagatttctaactttagtgttctttaacaaaggccatattttgtggccttaaaaacaaaaaattatatctggctttatctattagtaaacacaaagggtccatattttattctgaaaaaatatttattatattcattcataaatgttctaactaatttaactaaaaaaatcttctagtattttctgatgccacaagcttactagaaaattacttctaaaaattggtaatataaatcatcaatgatttacctactttaaaaaagaggggtatctgtttctcttacatttaataacctgaaaatgagtctataaaaatatttttaaaaaatacagtaacactgctgagttttgttaggtcccttgtttttttaattttttatttatttatttatttttagcaagaatgtacaattctttttgcaattttttgctaacaaaagacaaaaagaaatagtgctcccttcaatttagtagcaataaaatcatctatcttcatctctctcagagggcttagggagagtgaaaggaattagaggaacataaaccatgggtccttcaggtaaaataagtcatttcatagtgatggaggcaacagcaggctacgctcttgtctgcctgtacgctcagcatcagcatgccctgcccctcctcctcccacataaggtgcaccaaagccttcttttcttctacaacagagtcttccggtataaaggtggcaacagaaaattgttgctttgtccttttggggcatctcttgcatctcctgcttgttttgcttttggggtactataacttgtctctttccatttcacaactagtatcctttccacgatattccataacttcgctacttcatctctgaccttttcactggccttctttccaacatgatccaatgtactctgtacatgtatattccggtagatcaaaaggaatcttatttaagatccccaacaaataagtcccccatggaaattgaaagtatcctctcagagactcaaattattaaagtctttcaaaaaagattaaattcatagattataaataatattagttcaaaatattaaacagttgaggacttcattggcaatgcaggcagactgcatgccagttgaacatgatgctctctcagtccttaaaagctaattaaaaatggttttggttacataagaggtattgaatacatatttcatgcctttttataccaactgtagcaaacaggattaggataatatacttaggaatcaattttactgaattcagaaacatttatctccaccatacaccctcaaagggcatttttttttacatgtcagtcagagatctgcttcatccttcagtttcatagatagaattattttaaacacttgaaatctaggaagcaaacctgacaaggcttcagaatttaaaaagcaacagctcactgtgtgtggtgtgctatcaggttgaaatctatgttgtcctgatgttttcagagttatttcaaaagacaaaaatacagttgccactgatttatcaaaaacatttggctgccttttgtcatcagctacaaaattacagtgctttataaaataaacatctaggccccggg

SEQ ID NO: 58368 - DNA, 1631 bp, Homo sapiens
aatcacttatgaaactgttagcccttaatatgcatcacatttgtggttccatagtgcttctcctttgcttgtttgatctctgcatggcagcagtggggcagctccacatttggagcccatactccaaaatgcagagcactcttctcacagcacacattcccagccccaaacaaaacctgaattttcaactctgcccattaaagtgaatgtatccctgtaatttagtatgtacttattatgggaaaatgtaacaaaaggcagagaagtgtgattttcattctgtatcacaaattgaagcaaatcaacagcaaatacagcaggattcagggaggcttagtttacaacgtactttgtacctcctgccatttaaattattttgccactctgggcttctgaaaacacaaagggagatacagccctccaactatgagccttgcagagagagagacaaaagggccagaggtcctgggatggaatactagagcccccatcttctcatgctttggaaacctgccagagcgcttaccctgctggaagattaatgaagactccattctgtgtttcataacagtagcgttgttttctccatcaaaaacagagggtcacagaaatgtgctgaaaagatgtggtccagcaaggttctgtagtcccacctcagtgcctgtgggctgtgtttttcactgtaacaagcactttggtaaactagaaagaataaaggattctcaggatgtgttcaaagctaaggaggagtttttcattttaaaaagaaacatacatacttcactccatggctttcctcatcctcctctcttttttcttcttggtgggaagctggatgcggggcatgcatcattctgtatggacaaatgtgttatgtccacccatactcttgtgacaactccccagcactgtcctggcaataccatgctggccttggtagtaaaactccttggtatctgtgagagtcctctttttctatgccctagactacttttaaccacttttctctggaatgactcccacatttggttgggtattgaaagggtaacagcaaaatgatgattgtggagatggatctattaggtctcatgttggtcccctggttgaaactattttcaaaaaagccccaacaatgggcctgtcaccttgctagtcatccattcttaatgcctatttatcagccctctgaggtcatataaaagttgcaccttttgaaccaagtatttgtatttactatgggaaaggtgtggactacagattcgtattatattattttaatggattttaagtaatttataagtatgctgagtgtaaattttttttaaaaactgtattataaaaggacatatcctgtgaaatataacattttactgtttaatagaataattctataagaagaatgatttatctcacccacggaactgattacattccggatgcaatcaataggcactttgtaatttcctttttgtttttttttctttgctggggggttgaggggtaacaagataccatctgtataaagtgcagtttgtgtcactcaaaatatgcactgtatggctacacaaaagcagcttgatgaacaaatcaccccatggctcattaaagaacaaagcttccaaaaaaaaaaa

SEQ ID NO: 58369 - DNA, 1734 bp, Homo sapiens
ttttaaaggttgggagatatttattttctttaaacaaggtcataaataacaaaaaacaaagtaggtcccagactccggaccatgcagcaggacaggggtgggaggttgttgagtggaaaggtggagggggctacacatcacctaagacagtcacagaaaagatgggcttcaggacactgccccttcctgcccttggaaatggcgtgcctgggcaatagggacaggccacagtgctgtgtcgaggcagctggaagaaggcaaagactggggatgccaggctgtaatgtttctgtgtggagtgatgtgaaatccacaaatggcaaagagaagctgtaggtttgaagaggcaagggggcactgcacacctccaggaaccagttatgaaaatggttaaatttgatgattaaaaacaattccataggctttggcctgtggctttgtgcatgggctgtatttaacctgggttgctctgtggcaggtgagggcgcaggaggcccctggagcagcctggcctcagcccagggcaggtgcccagacatgtgggagtgggacagtgggctctcccagatgggaggccatgtgcttggaccggctggacctgattttcaggctcgtttcttgtgatgctatccaccaccaccgctcgctatggctaaggatgggatcttggcctctctgggtcttccaaacctggaagagtacgactgggataaaacggtacctgactagtgttttatttgaaagggaaaaataaagaccaccccatgcattgtccatcccatgaggcagggctgggccatgccaagacaatctcaaggaatggaggtccctgagcctgggaagacatttgaactcagatgtatcgcctgatgctaggaagaggggctcagtatggcaaatctggaggctttaccctaggcaacgcagggagagcaggcaggagctaccccagtacagggaagggaaaggagcaggggcatcacagtggcctctggtgcgaacgtatttaccaacagagctcgatgttgaaggaggggtggacagcaggtcactaacagcccaggaaacacacactggaatccaccgatgggttctgcaaacctgtgccggatcaggaaagtggcaacagcttcagctaccttgtcaggggcatcctcatggactgcatggccacactggggtaggacctgcatctggaacttcccttgcatctggccaatggtcagatctttatccaatctatcaacaccagccaagagcagcaatttaggaatgggacaactaagaaagagattggataagcctcggaaccagccgtcccagtatttttctgtttttgccagttcaattctccaggtgtatggatggtctttcttggtctccatgtcatcttcctttttcctcttgcttatagactcacttccttcctcatcttcttcttcttcctctatgattccttccactatagattttgagccttctggacttgtaattccttcacactgtttgacttggccaaccattgagacacgggcagactccagatttcgaatctggccactcttcacactccattcaatagcattctccagagacttgaaggttttaggacgaccccgtaagaaattctgcatgctattaagtgcatccatagctgtaccttctacaacatcaatcatgcacagacccaagaggcttggtaccatggttggatgatgctgtgtggactgcaag

SEQ ID NO: 58370 - DNA, 772 bp, Homo sapiens
cagggcttgaggaacccgcgccatgaagtgcgtgtttgttaccgtagggaccaccagctttgacgacctcattgcgtgtgtgtcggcgcccgacagtctgcaagtgagtgagggaggcgagcaggcggcggcttggctcgccacccgccatctccggccatactgccagccgcgttagccttgcctgaccgtcgcgctcggaaagaaacccccgcaactctaccacagaaaatcgagagccttggttacaaccgacttatcctgcaaattggtagaggaacggtggtacctgaacccttcagtactgagtcgtttactctggatgtttacaggtacaaggattccttgaaagaagacattcagaaagcagatcttgttattagtcacgcaggtaaaggtgcaggaagctgtttggagactctggaaaaaggaaagccactcgtagtggttataaacgaaaagttgatgaacaatcatcagctggaactggcaaagcagctacacaaagagggtcatctcttctattgtacctgcagcacgcttcctgggctgttacagtcaatggacttatcaacactgaaatgttatcctcctggccagccagaaaaattttctgcatttttggataaagttgttggattacaaaaataaacactaaactctcaacactttaaaagcaacccccaaattcaacctatgtaatgtgattaaatcaaattaaatacataatatatatttacaaaataatataattaataaacttcctacatct

SEQ ID NO: 58371 - DNA, 1893 bp, Homo sapiens
cttcccacctgaccagccatgggggctgcggtgtttttcggctgcactttcgtcgcgttcggcccggccttcgcgcttttcttgatcactgtggctggggacccgcttcgcgttatcatcctggtcgcaggggcatttttctggctggtctccctgctcctggcctctgtggtctggttcatcttggtccatgtgaccgaccggtcagatgcccggctccagtacggcctcctgatttttggtgctgctgtctctgtccttctacaggaggtgttccgctttgcctactacaagctgcttaagaaggcagatgaggggttagcatcgctgagtgaggacggaagatcacccatctccatccgccagatggcctatgtttctggtctctccttcggtatcatcagtggtgtcttctctgttatcaatattttggctgatgcacttgggccaggtgtggttgggatccatggagactcaccctattacttcctgacttcagcctttctgacagcagccattatcctgctccataccttttggggagttgtgttctttgatgcctgtgagaggagacggtactgggctttgggcctggtggttgggagtcacctactgacatcgggactgacattcctgaacccctggtatgaggccagcctgctgcccatctatgcagtcactgtttccatggggctctgggccttcatcacagctgggagggtccctccgaagtattcagcgcagcttcttgtgtaaggactgactacctggactgatcgccttgacagatcccacctgcctgttccactgcccatgactgaggcccagccccagcccgggttccatttgcccacattctctgtctccttctcgtcggtctaaccccactaacttcaaggggttttgctttggtccttttgttgaccgttaagtctctaagctttaccaggagcagcctgggtgtcagccagtcagtgactgatgggtttgaatctgcacttatccccaccacctggggacccccttgttgtgtccaggactccccctgtgtcagtgctctgctctcaccctgcccaagactcacctcccttcccctctgcaggccgacggcaggaggacagtcgggtgatggtgtattctgccctgcgcatcccacccgaggactgagggaacctaggggggacccctgggcctggggtgccctcctgatgtcctcgccctgtatttctccatctccagttctggacagtgcaggttgccaagaaaagggacctagtttagccattgccctggagatgaaattaatggaggctcaaggatagatgagctctgagtttctcagtactccctcaagactggacatcttggtctttttctcaggcctgagggggaaccatttttggtgtgataaataccctaaactgcctttttttcttttttgaggtggggggagggaggaggtatattggaactcttctaacctccttgggctatattttctctcctcgagttgctcctcatggctgggctcatttcggtccctttctccttggtcccagaccttgggggaaaggaaggaagtgcatgtttgggaactggcattactggaactaatggttttaacctccttaaccaccagcatccctcctctccccaaggtgaagtggagggtgctgtggtgagctggccactccagagctgcagtgccactggaggagtcagactaccatgacatcgtagggaaggaggggagatttttttgtagtttttaattggggtgtgggaggggcggggaggttttctataaactgtatcattttctgctgagggtggagtgtcccatccttttaatcaaggtgattgtgattttgactaataaaaaagaatttgtaa

SEQ ID NO: 58372 - DNA, 370 bp, Homo sapiens
ggctcggcgtgggaggagaaacctgggagaggaaaataattctttttaaatctaatctccaaaaaacaattataaaaaagtagcacagtgcttagggcacagcactggcagagcagatgagacctttgtggcataaggaacatgtatctggtctctgccccctgttcctggaacagaacttctaaaacccctgtaatttctcgggtgacaggaacgtcttttgttctaataaggtgactcttggtgggctcctggatgggggctggtcaccagaaagactgagccatgattagaagctgggaacttccagtccacccccatcctctggggaggggagaggagctggagctggagttaaaaatcgataatg

SEQ ID NO: 58373 - DNA, 1284 bp, Homo sapiens
atcattttttttttaacctcttcaggatttattgggtcagggaagggcctggccagagaatctgtcctgaggtgtccctggtactgcactcctgagtttctccctgagttgtctgccgctccttgttcagccataccaccatggggtgactctgtcaagcacctgggggtcctgggtgcccagcttgccaagtgatcttgggcctattccttgccctccctgagcctcagtctctcatcctccatgggaggatgtaattttcctgaaaaagacagggccgggcccacccagggtccacttccactcagcatcttggattccagggaagcagacagcgttcaggtcctgcccttctgtgactccctgcagccactgcttcttgaagcctttgtctctaagcttctgtccagctcaaacccacccaggtgccagggtctttggacaccagggagccaggtgtccacattccctggcaggagtaggaggttgacatgaagcaggaggccgatgcacaggccaggtaccagagtatgatcaggaggagctgggcttcccccactgttggggtagagcttgcgcaagctggagtccaggaggaaatccaccgacctgtcaatggggtggataatgatggggatggtcaacagcccaagcgcggtggtggtccacttgcggacagccaggggccagcgggtggcagtgcccaggacatagagagaggcagcacacacgcggttgatggtgaagcccggaatggccacagaggctagagcctgccatacaaaggtgtccaccacagccacagtcaccctggcgctgcggcttgcttcaagggctgggcacctctcaagccttctttgcctttgtcaatggcatccgccagcacgtaggagctggccacgccatagctcagccacaccaccgccgctggcacaagagagcggaaagcctcgcccaccttattggcatagcccaggtatcgcacccacgtgtcccggtagagatcgcgctctgcgccccgcggctgcggctctgacatgactctcccgccacgggccccggccactacagccggtactggctccactgcagtctccgccgccggcacttgggtctgcccggccgggacccgccgaaagtcccgcgccgaaggacaggtcaggaaatctccgccagcagggagcgtctgcaaattccccccgcgcaccgaagcccctctcccaggctcgggttttacagactggttttcgtcacgttttctctgagctgttggcgctaatcgcc

SEQ ID NO: 58374 - DNA, 2484 bp, Homo sapiens
  misc_feature (1)...(2484): n = a,t,c or g
tttagagaaaaagtatttaatcaacaactttaatgtaagagcaagagtgagtaatggaaatccagctcttgtagtagagagcatctacttgtggcagccaaagatttctttgcagtaacttttagctaggtttagggataaaaagaagaatgagatgaacacattacaatatgatgtaaaccactggtatggttttcacaaaagtggaaaagatttaatcagtgaataaatgctacaaatttgccaatcgatttttaacttcccctaaatttatatttcgataagcaatctctaagatttcaactctacaatatttgatgcacaaaaacacagaaaaatgttttaagggaagaataaattattttaagttagtcagactgttaagatatatttaaaaacctgtattccagaacaaaagtcacagatgactaacagaaaaaaaagaacgcacctatatctgggtaaacaaagctatgtaatacacaattacaataaattattatggtataactttggatactgttatatatttagcccagttttccaaataacaagtgcatgctttctctctagaaagtggaagatgcactattgtacaaagcaaagatagcacaggagaactgggcactgtaagaattggaggataaaggttaaatcatttcattcaaatctttgaattctaattccatcaactcaaaagttaagaagggctttagctttcaagggttatcacatgcatacatatttgaatacaggcacaaaaactcatcatttttatttggataacaaagggtctccaaattatattgaaaaataaatcctaattaatatcactcttgtaaaaaaagtttagcacacttttcacaaatgatttatgtaaaagagaagaaaatacacataattttacataatatcttaaactcttttattccctaccatagacattttgtcttttgttttctttccgttttctacaatttccaacttgtacctgtgtttaatactgctttagtctgctaaagacattaactgattgcttttctaaatctaaggattatatatttttagtataaatatatatcacatattttcgtaaaattttgacaaaaccgaataagcatgccttgttttaagtccatgctccttccactgtttataaaatctgatttaatgatcaaaaaattcttggttgtcactcttctgtaaccacaatcttccttctgaactgccacccagtttttacataataataacaagcaatagaaaaaccaaagaaattatgttaatcttagctcttcctttgcaagtgtcttttcttcttacacccagtgcttagaaataggcactcctcaaccagtgttcactgaattcaactgctgaaattgtaacagttaaattatcaacacaactcttaataaataaacattcctttgggaaattgtgggaaatcaaaacacttttaagtttatacaagtattcataaacataaaatattctagtttatcctaatgccctagctcttatgagtgctatagaggcaattaaaaagggaaaatttcttgagtagttcacatgtggagaatttgttaaaaccgaaaagcagtccaaaatttttaaaaggcatactaaatattagctatactcactattacatggtatatagcaatttagtaattcatagtaccacatattttactttaaaagcaggtcccatattaaggcctgcttttaaaattgccactaaaaagaaaatattttcaatttgtatatttaaaccattaatttagataacatcttttaaagtctacaaatttaacatagccaagagttggtatttgagaaaaaggtttcagtacagggtgtgaacaatgaaaaattataaaggcatgtaataaaaatgttccataaaaacaaagatacctcaagcaggtccacctatacctctagtttagtttagaaactaattcagtattttaagaatcatataattttaaactttgcactaagcctaacctttttaaaaaatggtcagggccaggtgcagtgcctcaagcctgtaatcccagtgctttaggaggctgaggtgggaggacttgcttgagtccaggagtttgagactgcagtgagctgtgattacaccactgcactccagcctgggagagcaagaacctgcccattaaaaaaccaaacaaaaatgggcaggtgtggtgtctcatacctgaaatcccaacactttgggaggtcaagacaggaggattgcttgagcccaggagtttgaggccagcctggaagctacagcgagcccctgtctctattatgtaaaaaaataaaaatttttttaaaaaagaggttttcttatgtgtacctgaagcaaagtagtaagtatatcttttcctcgtgccgaattcttggcctcgagggccaaattccctatagtgagtcgtattaaattcgtantcatgtcataacggtatccaatnaagg

SEQ ID NO: 58375 - DNA, 437 bp, Homo sapiens
gaagcatttacttacaggctatcatactctgaggccaattttatctccaaagcaataatatcattaagtgattcacttcatagaaggctaagtttctctaggacagatagaaaacatgaattttgaaatatatagaacagtagttaaaatactatatatttcaaccctggctggtagattgcttattttactatcagaaactaaaagatagatttttacccaaacagaagtatctgtaatttttataattcatcaattctggaatgctatatataatatttaaaagactttttaaatgtgtttaatttcatcatcgtaaaaagggatcatctcagagagaacagcagtattctgcgtatttttaaaaatgctctagagtaacatttgaagtaattcactgtagtgtatgccagtcctagaaataatttttttaattt

SEQ ID NO: 58376 - DNA, 2076 bp, Homo sapiens
tttgctttttataccactttattccaacctgagcacctcaatataaaactaaacactggtgaaccgttttcctaattctgcattatcataaatgtacaagttctcctagcagtccaacacttaaatagattaaatcatctctgacacatggtagctttcatataatgaaaatacctaaaataattagtgcaatatactgaactgatcaaaataaaatgaactttggaaaggaaggctgcaagattgttactaacatattgcaatactttatgttacaaattacgggtacattgtttattatggttctagccatggaggaacaactgaagccccttcctgtcaaagggggagagagaaataattagctgttttagtaacagtacattttgtatgcttttaagcaactcttaaatattacagaaaagtaatacagatatggagactacaatgcagtaccctatttacagtacagctgaagatcgaatttaaaataatcaagtttgaatatacataattgttagtgcattgactatattatgtcaaaagggaacaaaagccccctccccaccccaaacaacaaaacctgtgtaatggccagcggtgattaattagaaatcacagacacctggtttatttcatttttgttaaagaactcacatgtttgaaaggaacactgaccattaaggtgcatttattagttctcaaaattcctaaaacaagatggggttgcatttgatttttaccccatttaaaaaaaaaaccagactgggtataattaagataccattaatactcttccccacccctgaccttgtatatgtgggattattttcttgtggttaatttattaaaatgtggaatgtacattttaaatacaggtaccaggagaaatgaaacatttgcctgaaatactatggctaagcatcataaataactttagaatctccttctaaacaaagaatgtttttgaaaagcccaaattagtaagttcccaattttttttttcacaggtgactactgtaccagtgtggagaaatgggctggttaactgtgtgggcccagacagtcatttgtctatattcctagtgatgagaaattattccccctaaccttccaatgaaacaagtgtccacatagttctcatttttccctattgttgaaacattagtgagagggacccatgcatgttattaaaaattaagttcaaaacacttaaaataattctgtattagaaacttgactctatcataagtctcttcttttggaagtcatactgggctggttaaatgctccaattccattgttattaacatttaggaagcagaagactattccagctagttcaaactagaggtttagttactacaacactgattcctggttggttgtgtgggttcggtaaggtctactcctcttcctctggcagaatttgctcctggattttgtggttcattctttggcaattttttagctattgccatgaatatttcatttacattcattgatgttttagcggatgtctccatgaataataaactattgtcatctgcataggactgtgcttcctggaaatctactgctcttttatttgctaggtcggccttgtttcccgataaagctattacaatgttaggacttgcttgcctctgaagttctttaacccaattttttgctcttgcaaaggactcctcatttgtgatatcatatacaactatggctgcttgtgctcctctgtagtacattggtgctaggctatggtatcgttcttgaccagctgtatcccatatttcaaactttactgtagtgtcatcaagacatacagtttgggttagaaaagcagccccaatggtactctcttgaaattcatgaaattggcctttcacaaaacgaagcactaggcttgatttgccaacagcggactctcccagaagtactagtttgaactggcatattttatttccagtatttggcccgttgggtcttgttgcgcctcgactagccatgtccaaatttgaaataagtccctaatttcagactcttcaatgaacttccagaattcaaggggccaatattctt

SEQ ID NO: 58377 - DNA, 1558 bp, Homo sapiens
ggttgggtggaaaaagactttcttctctattttcctaggtatatatgctatcatatgtctgtttttctcctcttgaagtttccctgaaacctgggctcttgaagacgcatcactggagcagatggataatggagactggggctatatgatgactgacccagtcacattaaatgtaggtggacacttgtatacaacgtctctcaccacattgacgcgttacccggattccatgcttggagctatgtttgggggggacttccccacagctcgagaccctcaaggcaattactttattgatcgagatggacctcttttccgatatgtcctcaacttcttaagaacttcagaattgaccttaccgttggattttaaggaatttgatctgcttcggaaagaagcagatttttaccagattgagcccttgattcagtgtctctatgatcctaagcctttgtatcccatggatacttttgaagaagttgtggagctgtctagtactcggaagctttctaagtactccaacccagtggctgtcatcataacgcaactaaccatcaccactaaggtccattccttactagaaggcatctcaaattattttaccaagtggaataagcacatgatggacaccagagactgccaggtttcctttacttttggaccctgtgattatcaccaggaagtttctcttagggtccacctgatggaatacattacaaaacaaggtttcacgatccgcaacacccgggtgcatcacatgagtgagcgggccaatgaaaacacagtggagcacaactggactttctgtaggctagcccggaagacagacgactgatctccgaccctgccacaggttcctggaaagactctccaggaaatggaagatactgattttttttttaaatcacagtgtgagatattttttttcttttaaatagttgtatttatttgaaggcagtgaggaccagaaggaagttttgtgctttggcagactcctccatgttttgttcccttccccctgagtatgcatgtgcctgttcagagtctccagataccttttttataaaaagaagtctgaaaatcattatggtatataatctacccttaacagagcttttcttattacagtgctaaaatgatttctgataaaatggtccctaactcaacctagaagggcctaaaaataccaagaatgaaagaataagcagagtactcatgatgcctttgagaaaaatcaaaacatcatgtagggtgacctagtttccaaaccaataaataagtagtattgtaatattaaaggaaaactgttccaatcatttaaaagtacttattaagtactgctttttacagttatgacaactgtttctttctatgcatataaatcaaggaaccaaatatctgtagccatggaaatgtctgactagaaatatttatattgaattctgaatacaaaatgtccctgtggtagaaaacttactctttatgcctggtgcagtataattcccaagtgtactgtctaccagaaaaaaaaaacaaaactaataaaaaatgaaatatg

SEQ ID NO: 58378 - DNA, 1136 bp, Homo sapiens
  misc_feature (1)...(1136): n = a,t,c or g
ttttttttctatcccattttttcatttatttttatgaggagcctcaaaaaatagaagtggccttggtagggaaggaatgtcgtgattctgagtacagtatggcaaattcttttgcctcagtttccctaactccatccagtgcatatgaaaatgtctatgtgcgtacaaggtaggtctggactaagctctggccctccggttgttttcccattgcgggagcctaagccagggtgcccaggactcctgtgtggctggtgggcctgatgcccacagctgatgattcaggaaggaggggcctggagtctgctgcagactctcccgccccctacagcccaaaccgggcactgcagcaatgaggtggtcagtccagggagaggtccgacaagttctcggcacaatgctgcaggaagtcaaagtcaggcacggagaagggcacgcgggaccactttttggcctggatccgcccctgaggggtctccagcagcatgctgcggaactttgagcactggcagcttcactgacttgtagatcatctgcagaccccagacctccccacagttcctgcagctgatgacacccccaggcttccagtccttgaagactttgttgatgaccacaggatccctggagacattatagtagttcgagaagttggggttcacattgacatggtgggtgccctccaccttccgcaggtcgctgccatggcccacagccaccatgcagttgatgcagagtagctgcacgtgctccactgggaactgctgccgctggttctcccgctgggctgcctgggccgcccgcttggtcaaggctgcctgctgcagatcccggatcttggcctggtactcggcctggtccattttctgcacagcagccactgcctgctccatcagcgtctccagcgcctcgttgaatcantcncgcttcagctcccggctaccttnagttgctacaaacgcgtatacactctggantcgcccggcnacgccctggcctggaccatggagatttcattggtcaagagcccataacgcaccaccacattgcaatgtgggatgtccagcccctccntcncnacactcgtggccaccagaaggttcagggttccatcttggaanttccggatcacttct

SEQ ID NO: 58379 - DNA, 470 bp, Homo sapiens
acagcttgacatgattacgaatttaatacgactcactatagggaatttggccctcgaggccaagaattcggcacgagtgtggagaatggggtctcgctatattgcctaggcaggtctcaatttcctgggctcaagctatcctcctgcctctgcctccctaagagctgggattacaggtgtgagccaccacacctggcaaggggtagcttcttaaaggtggtgacacctgaagtgaaatggcagggtaagcaaggagagcctaatgaaggtctcaacgtttacatgggaaacagtgatgttcgaatagctcaacctaacggagtgagtaagaacttattcccagctactcgggaggttgaggtgggaggatcccttgagcctgggaggctgaggctgcggtgagctgaaatcgtgccactgcagtccagcctgggtgacagaatgagaccctgtttcaaaaaaaaaaaaaa

SEQ ID NO: 58380 - DNA, 569 bp, Homo sapiens
gaggcccgtagccaacactatgacttggttttaaatggcaatgaaataggaggtggttcaattcgaattcacaatgcagagctgcagcgttatatcctggcaaccttactaaaggaggatgtgaaaatgctctcccatctgctccaggctttagattatggggcaccccctcatggaggaattgccttagggttagacagactgatatgccttgtcactggatctccaagcatcagagatgtcatagccttcccaaagtccttccggggacatgacctcatgagcaataccccagattctgtccctcctgaggaactgaagccctatcatatccgagtctccaagccaacagactccaaagcagaaagagctcattgaatcatgcataccatgcagaaagttgagcttttaggttttgtcctctttgcttccccaaggctaaagtcagatctagagttctgccacaggtctaacaatcaagtctttagatggaaggaatccaggcaacattcttcaccacaacgaagaaacagataaaagatacccaattttgacttgaaaaaaaaaaa

SEQ ID NO: 58381 - DNA, 3778 bp, Homo sapiens
tttttggctcaacttatttgacctttattttcatcatcatcggccactatttgatgtcaatctactatgctgtgagcaaacattaaaattaggaagccaggggtatgggaaccactgattagcatcatatgccagatgtgcttccatccaaagcacatgaacagaatgatattaaattacaagcctatcaggaacagaccagctttctgcctccctttctatgaataccaagtcccatgaaccttgtattcatgtggagttttaagtgcatgcttggaagttatgaggagacagcctggtatgttcgggaaagaaaataaaggttaggtacatggtagggctttggctcagccatttgggcaaatgacttaacctctctgaacctcagtttctgtttctatgaagtgggaattgtaatacctaccttcttcagattgttgtgaggattaaatgagaagatgaatgtaatacccttgaggcacacagcgtgggttacacccacaaatgcttcaaccaacaggcaggcgatggacagttttagggcaactaccacaagaaagattttgaacatgttccccatttcgatttttggtttcccattcaagatctagtgaatttaacctaagtagcagaaaagaagattaagagttcctttccacagctttattaagtttttatattcacctggatgttgtcaaaagtgacttgatcattcaagagataggggacatttggcttccggtttgtgtgagagcttttctttccccatcagctcaacagtcagtccccagatctagagatggagagcttgggacaaggtcagaatgaaacatcaccagtcaatcctgctcaacaggtaactcttgcagcaatccttaaggaaaggggtgcagggtctcttcatgtttccatggtaaggtctatagctgctgcttcatggaataagcaaacaaagcccatgttgtgtgaccgggtggcaacactttcagacttggatcctgcacattctgatgtgtaaattccacgatagggcaaaagcatgccactccacactaatgctgccctctcactaaattaaaccttggaaaaataagatgtggcttggctttaaaactcagtgaactatctttatggtacagttggtttccatagctgtaaacacaaaagatctatggtttctgcctacccaggatagtcttgtctctagacaatgtattgatgatgcaaatgttctggaactaaatagtggtgatggtggcacaaactgtgaatgtactaaatgtcactgatttgtacgtatttaatatgaattaaatgttaaaatggtgaattatatttatgtatattttaccataataaaaatatgcattggaagatgcattttttgtgaccctgagttgtaactgtatttttatttgtgacatgtatataccacctacctcatagtaagccctgatgtttgaatgcatatatttacatctgctttttgcaaatctcaggtctgagtgttccactctgtagcatttgggtatcacctaggaatatgtgatttattgacatacctgctttgggtgggattgagaactgtattgactgcatgagcacatatatttccttataaaactctttggctttagcacatatttgcctactgtagaaaattctcctacccacagagcaggctgggaatggaatgtgtgtctgccttctccaaaggcatcatatggctttcttaatggatggcaaacaggagagagaaaggggttcttaaagagtacaactgaaccagttcctgagattcttctttcagcccagctcagcctcctatcacaggactcaagactctcagttcttctagacaaagtcaatattgttcttttataaagcaaagattatgaaaggtgtcaggtctttaaaacctatacaagcacaaagtacaaaggagaaaggtgtagctgggaaaaactcatgaaagagacagtatctgccgaagtccttgaggcaaaggatattgaatacctccaaaagaaaggcttcagtaaaagccaaggaagcttcacactcgtcaagactggccctggcagacagggaaggatggccttgaacactgcgatggaggaaaatgctccctggacgatttttttcctcactccagccagcatatttcagctgcttttgctataccatatctttccagaaatatgaaggcttgtgaaagataagcaagcctatgatggccactgtgaaaaggaccagggagaatagaaccatgaggaagacataggtggagtgggagagaggtgtggacaatggttgctcagctgggatcatgttggtcaggttcagcatgtagcccaaagtccagccggcgtcgctgccctggatcttgccaatgaaatggatgtgctcccaggaatcagctgtgaaatgatagccttgcagaaggagggagagaatgtaggtaccagaaaagcagtattcactcaggtacttctcctttactccagcgtaagatgtttttatctcctcccaaggctgagcacagaactttttcatcatctcagtcaccttttcctgagagactttctctgatgtcaagtttaaaaacttcatcacaaagtaaaaagctgaaaatgccccaaaatccccctggagtggtggcaagaaaatcccattgaaggcacactgggagtaagggcagtaactggtgttgaagagctccaggatgctttgatggcattgttgatagtttccaataccctggatttcaaactgctggaatggaagagtcatctcaaatctcttggtgcagggggtcttgtaaaggtcacttacgttcactaccttcttatatccaggatgaaagcatgggtccctgagaatttcattacttgcaacctgaatgtccttggccagtttctgccagagtgcctgatccttcccatagcacaagaagctatgtgtgtagacattgtagtccttgccatagaggcgaaattgcagagcattatctggggactcgatagtctggttttggggtacaaaagtgacttgtgtagaggctcccccaaggtccaaagctccaaaggtttcctgattattggtttcatatgggactatgctgaaccaccttgttttctgactgaatttgcccagcagatagttgatagtaatccagccataggcaccttcctcttggccagtaatgatcctggcaccctggaagtcaaaggggtagttgctgaggctcctctccaccacatccagaaccctgtctgccaactcttcactttccatcctgagcaaccgcatgcctgccgtggctcccaggtaaacgggtgtctcttggtgctgggaccttggaatcacttccctagctctttccatgcaatcagtcaggtaaatgcctatttcatttactttctgaacaaattttgagattccaggacctttaaccctgcattcttctacttgatgcaccacgcctgtgtcattctccttttctgctggccacttatagatgtataaacttgtgtgagaagaacccgcatccagcacaatcccatacttaacgttttctggcaatgctttgttctgggtcaaccccacagcaagcaaagctatcacagctatgatagaggagaagccaaggatggctaggatattcttggagcaaaatgtcttcacgttagactcctttgtatcttccataagtagcagcttttgttttcctcctctttcctcgtctttcccccccccagccgctgcttggtgtggt

SEQ ID NO: 58382 - DNA, 1170 bp, Homo sapiens
ggcgaaacgattgagacaccagctggacgtcacgcgccggagcatgtctgggagtcagagcgaggtggctccatccccgcagagtccgcggacgcccgagatgggacgggacttgcggcccgggtcccgcgtgctcctgctcctgcttctgctcctgctggtgtacctgactcagccaggcaatggcaacgagggcagcgtcactggaagttgttattgtggtaaaagaatttcttccgactccccgccatcggttcagttcatgaatcgtctccggaaacacctgagagcttaccatcggtgtctatactacacgaggttccagctcctttcctggagcgtgtgtggaggcaacaaggacccatgggttcaggaattgatgagctgtcttgatctcaaagaatgtggacatgcttactcggggattgtggcccaccagaagcatttacttcctaccagccccccaatttctcaggcctcagagggggcatcttcagatatccacacccctgcccagatgctcctgtccaccttgcagtccactcagcgccccaccctcccagtaggatcactgtcctcggacaaagagctcactcgtcccaatgaaaccaccattcacactgcgggccacagtctggcagttgggcctgaggctggggagaaccagaagcagccggaaaaaaatgctggtcccacagccaggacatcagccacagtgccggtcctgtgcctcctggccatcatcttcatcctcaccgcagccctttcctatgtgctgtgcaagaggaggagggggcagtcaccgcagtcctctccagatctgccggttcattatatacctgtggcacctgactctaatacctgagccaagaatggaagcttgtgaggagacggactctatgttgcccaggctgttatggaactcctgagtcaagtgatcctcccaccttggcctctgaaggtgcgaggattataggcgtcacctaccacatccagcctacacgtatttgttaatatctaacataggactaaccagccactgccctctcttaggcccctcatttaaaaacggttatactataaaatctgcttttcacactgggtgataataacttggacaaattctatgtgtattttgttttgttttgctttgctttgttttgagacgga

SEQ ID NO: 58383 - DNA, 1943 bp, Homo sapiens
gacagcacagccatccagcattatcttacaatgacaataatatctgtgaccttggagatacctcatcatatcacacaaagagatgcagatagatctttgagcatacctgatgaacagttacactcatttgcggtttccaccgtgcacattatgaagaaaagaaatggaggtgggagtttaaataactattcctcctccattccaccgactcccagcaccagccaggaggaccctcagttcagtgttcctcccactgccaacacacccacccccgtttgcaagcggtccatgcgctggtccaacctgtttacatctgagaaagggagtgacccagacaaagagaggaaagccccggagaatcatgctgacaccatcgggagcggcagagccatccccattaaacagggcatgctcttaaagcgaagtgggaaatggctgaagacatggaaaaagaaatacgtcaccctgtgttccaatggcgtgctcacctattattcaagcttaggtgattatatgaagaatattcataaaaaagagattgaccttcagacatctaccatcaaagtcccaggaaagtggccatccctagccacatcggcctgcacacccatctccagctctaaaagcaatggcctatccaaggacatggacaccgggctgggtgactccatatgcttcagccccagtatctccagcaccaccagccccaagctcaacccgcccccctctcctcatgccaataaaaagaaacacctaaagaagaaaagcaccaacaactttatgattgtgtctgccactggccaaacgtggcactttgaagccacgacgtatgaggagcgggatgcctgggtccaagccatccagagccagatcctggccagcctgcagtcatgcgagagcagtaaaagcaagtcccagctgaccagccagagcaaggccatggccctgcagtcgatccaaaacatgcgtgggaacgcccactgtgtggactgtgagacccagaatcctaagtgggccagtttgaacttgggagtcctcatgtgtattgaatgctcaggaatccaccacagtcttgggcacccgcctttcccgtgtgcgatctctggagctggatgactggccagttgagctcaggaaggttatgtcatctattggcaatgacctagccaacagcatctgggaagggagcagccaggggcagacaaaaccctcagaaaagtccacgagggaagagaaggaacggtggatccgttccaaatatgaggagaagctctttctggccccactaccctgcactgagctgtccctgggccagcagctgctgcgggccaccgctgatgaggacctgcagacagccatcctgctgctggcacatggctcctgtgaggaggtgaacgagacctgtggggagggagacggctgcacggcgctccatctggcctgccgcaaggggaatgtggtcctggagcagctcctgatctggtacggggtggacgtcatggcccgagatgcccacgggaacacagcgctgacctacgcccggcaggcctccagccaggagtgcatcaacgtgcttctgcagtacggctgccccgacgagtgcgtgtagtatctgttttatttgactgcagtctccttggtgcaaaaacaaaatgggaaaaataaggataactcagaatttcaaaaggaaatcacaaattcagctagtaatagcattttcagtacttttcgtaaactaagtaaatacacaaaatgttgatttttctgaccataagacgtattttatgtccttttgccaaggtggatttgttagtctcaggccctcctggccacattgcccaagtcacacaggcttctgtattatgtatttagataaaatgtgtgaaaacatatttgaaataaagttcataaatatgcattgatttttgtaaaaaaaaaaaaaa

SEQ ID NO: 58384 - DNA, 1632 bp, Homo sapiens
tcatggcatacggttctgcaaaagatctcatctgtacacacttcatggatggcatgaatgagctggcgattgcttacatcctgcagggggtgctgaaggccctcgactacatccaccacatgggatatgtacacaggagtgtcaaagccagccacatcctgatctctgtggatgggaaggtctacctgtctggtttgcgcaaaccttcagcatgataagccatgggcagcggcaggaggtggtccacgattttcccaagtacagtgtcaaggttctgccgtggctcagccccgaggtcctccagcagaatctccagggttatgatgccaagtctgacatctacagtgtgggaatcacagcctgtgaactggccaacggccatgtcccctttaaggatatgcctgccacccagatgctgctagagaaactgaacggcacagtgccctgcctgttggataccagcaccccccgctgaggagctgaccatgagcccttcgcgctcagtggccaactctggcctgagtgacagcctgaccaccagcaccccccggccctccaacggtgactcgccctcccacccctaccaccgaaccttctccccccacttccaccactttgtgagcagtgccttcagcgcaacccggatgccaggcccagtgccagcaccctcctgaaccactctttcttcaagcagatcaagcgacgtgcctcagaggctttgcccgaattgcttcgtcctgtcacccccatcaccaattttgagggcagccagtctcaggaccacagtggaatctttggcctggtaacaaacctggaagagctggaggtggacgattgggagttctgagcctctgcaaactgtgcgcattctccagccagggatgcagaggccacccagaggcccttcctgagggccggccacattcccgccctcctgggcagattgggtagaaaggacattcttccaggaaagttgactgctgactgattgggaaagaaaatcctggagagacacttcactgctccaaggcttttgagacacaagggaatctcaacaaccagggatcaggagggtccaaagccgacattcccagtcctgtgagctcaggtgacctcctccgcagaagagagatgctgctctggccctgggagctgaattccaagcccagggtttggctccttaaacccgaggaccgccacctcttcccagtgcttgcgaccagcctcattctatttaactttgctctcagatgcctcagatgctataggtcagtgaaagggcaagtagtaagctgcctgcctcccttccctcagacctctccctcataattccagagaagggcatttctgtctttttaagcacagactaaggctggaacagtccatccttatccctcttctggcttgggccctgacacctaagtctttcccacggtttatgtgtgtgcctcattcctttcccaccaagaatccatcttagcgcctcctgccagctgccctggtgctttctccaagggccatcagtgtcttgcctagcttgagggcttaagtccttatgctgtgttagtttcgtcgtcagaacaaattaaaattttaagagacgctgaaaaaaaaaaaaaaaaaagtcgacgc

SEQ ID NO: 58385 - DNA, 1861 bp, Homo sapiens
tgagggtcacgtcggtggttacgggttttaacaacttgccggacagatttaaagactttctgctgtatttgagatgccgcaattattcactgcttatagatcagccggataagtgtgcaaagaaacctttcttgttgctggcgattaagtccctcactccacattttgccagaaggcaaggcaatccgggaatcctggggccaagaaagcaacgcagggaaccaaacggtggtgcgagtcttcctgctgggccagacacccccagaggacaaccaccccgacctttcagatatgctgaaatttgagagtgagaagcaccaagacattcttatgtggaactacagagacactttcttcaacttgtctctgaaggaagtgctgtttctcaggtgggtaagtacttcctgcccagacactgagtttgttttcaagggcgatgacgatgtttttgtgaacacccatcacatcctgaattacttgaatagtttatccaagaccaaagccaaagatctcttcataggtgatgtgatccacaatgctggacctcatcgggataagaagctgaagtactacatcccagaagttgtttactctggcctctacccaccctatgcagggggaggggggttcctctactccggccacctggccctgaggctgtaccatatcactggaccaggtccatctctaccccattgatgacgtttatactggaatgtgccttcagaaactcggcctcgttccagagaaacacaaaggcttcaggacatttgatatcgaggagaaaaacaaaaataacatctgctcctatgtagatctgatgttagtacatagtagaaaacctcaagagatgattgatatttggtctcagttgcagagtgctcatttaaaatgctaaaatagatacaaactcaattttgcatagaaaggtgtattttgaatagttcccatgttgtgttctcacattagagtaatttctgtattaaaccatgaaaattgcctttatgagtgatacccatttgagggcctctaaacccttcaatttggtactcacgtgaagagggaaagcggaagatggtaatttttttttacggatgatatggcaggatgattggttctgatcttaccggctagtggtcatttttaaaaaacttgtaccctcttatctgaaatcctgtttctggaatttggccattttaagtgattttgtttgccctcttctataatattcctacttcccataataatgactgatttatttgtaattcaggtatttataaacctattggctacaaagactttgttaaacattatccagtggttttcgtgaaatggaattatgtttatttttatgggatttgggtaaattttaaattgtctagaaaactgaaatttcagttgtcagttgtggaattcagtttttcaattgtggaaatttcctgccaccccaacagtatttttgtgtgttaattaattttgcaaaatgagaatcatggtgtgacactcatctaatttatcttgttgtgatgttatggtcataataaggagaaagagggtttaatttttcttgtatttggtttcctggtggtatcatagtgtaattttagtatttgaaaatcagtgtgattccttaatggccaactgaagattgaattgccgctaacaaccatatcgtgttagtgaattttcaatatggaccaggaaggcatatgtattttgaacttgagtgaaaaggttgaagttacagacttttgcatagatggtttgtcaatttaaaattccagaatttattattgccatattttcacatgctgcttatacaagattattattgagtagtaactgcttccctgctatgtaa

SEQ ID NO: 58386 - DNA, 648 bp, Homo sapiens
atggagtactacgacaggcattttacccagccgcacgcccaggatttcttgcgtgcagtttgtgaagaaaaaattaggctgatggtctcaggctcagctgccctgcccctcccagtgctggagaagtggaagaacatcacgggccacaccctgctggagcggtatggcatgaccgagatcggcatggctctgtccgggcccctgaccactgccatgcgcctgccaggttccgtggggaccccactgcctggagtacaggtgcgcattgtctcagaaaacccacagagggaagcctgctcctacaccatccacgcagagggagacgagagggggaccaaggtgaccccagggtttgaagaaaaggagggggagctgctggtgaggggaccctccgtgtttcgagaatactggaataaaccagaagaaactaagagtgcattcaccctggatggctggtttaagacaggggacaccgtggtgtttaaggatggccagtactggatccgaggccggacctcagtggacatcatcaagactggaggctacaaggtcagcgccctggaggtggagtggcacctgctggcccaccccagcatcacagatgtggctgtgattggagttccggatatgacatggggccagcgggtc

SEQ ID NO: 58387 - DNA, 1200 bp, Homo sapiens
ttttaatcattttttggttatgccaggtgtctcctgtgtgtccctccagatccctctccagccctagaaacctgagctctataaatgttgcctctctccactcatcttctctttggcttcaggttgagttcagccaacagatgcccctgtaggatttggacacagggagccaggggagaggggcatcagctgcctgggttagcagggctgtgatgattcttctacctatgactctcagtgctgttgcctcttcctctggatcttggaagcttccatgctgagggtctgaaggtgggctccctgcctcccactgatgtccttagaatcccatcctcacctaatacctggtattgaacactgcctttcttagatgtcatttaggctctcgtttcaattcccagtatgcttcctgcaaagacctcgatagatggactgaggggaatagtgcaaggtcctcccatccccagtattgggatctaggggcagggggtcccagctgtgcagtaggttaggactacacttccatcatcaaagccacagagggaagaggtgaggatgaaacacactagaattgacttagaaaacacactggccaaatcttagctatttgaggaatgtagggagaaaagccaccttctctctctatgtctgaaggttcccatggctgtctctttgcccaaggggcaaactttccatcagggcatcttctgtgcctctgaggatcattttccaattataggcaatggtagtacgtgtttcagtgcagaatgagatagagttgtttaatttgacaataaagcgatgcgtcaaaaacctcagtcaacacagtaagtgttttcttgttttcctgctgaccaacctaattctggtttcatacagggcagccaggtgcccacctaaaagactgcacttctcaacttccagttgtttctatggataatggttggaagcagaaattgggttggggcttccagataatcccccctcacagggactgcttcaagagaaagggatgccctttggttctttctcctttccactgcctggaatgtgatgtctgacactgtggcagccatactggcataatgaggccaactctctgccatgctaagagtggcagagctgggaattgaaaagagcctgctaggccttgggttgcttccccttgatcggctcattacttggaagagaacacaccct

SEQ ID NO: 58388 - DNA, 2069 bp, Homo sapiens
gttcgcaaacttgccggtgaaaaacagcaacagatatgatgtggaaatgacagatgaactcgttgggttacctttttcctctcatacctattcccaagcctctgaattgcccacagatgctgttgattgtatgagcagagagcttgtgtcccttactagccgaaatcctgatcaaagaaaagaatctttgtgcattagtatcactgtgtccaaggtagacaaagaccagccttccaatttaaactcctgtgaagacccagttccagggatgttgttttttttgccacctggtcagcacttgtcagactattcccagttgaatgaaagcacaacaaaagagtcttcagaggccagccagcttgaagatgctgctgggggtgacagtgcatctgagggaaaaaagtggggtctgctggagccatttgttaccgccagcctcttctgtgggaaagtacattaccagtgcttgagggcatccagttggaagaagcaggtgtcgcatgacttcccgggagaccaggttttaaaatccagcagctttttggagcctcagcagtacatggcttttctgccccaccacattatggtaaaaatcttcaggttacttcccaccaagagtttagtggcccttaaatgtacctgctgctatttcaagtttatcattgagtactacaatatcaggccagcagattctcgctgggttcgagatccacgctatagagaggatccttgcaaacagtgcaagaaaaagtatgtgaaaggggatgtgtccctgtgccgatggcaccccaagccctattgccaggcattgccctatgggccagggtattggatgtgctgccaccggtctcagaaaggattccctggctgtaagctggggcttcatgacaatcactgggttcctgcctgccacagctttaatcgggcaatccataagaaagcaaaagggactgaagctgaagaggaatactaaagtccatgtgagaggcaacaaaaggaccggtttctaaagctgcaaaacacctagatacaccgttcaaatgagcgtagccccctgagtcatcactctagaagaatctgtacatcatcaggactgcattgctcaggcattttctaaactctaaatttacgagctgtacaaaaaaattggtcttgttgtttatagtggcatctcatgtttgaacccgggtggtatcccacagttggattcagttggctgtgaataactgcctgttttcctaaatcaaacccatcctcaaaggatgaagactcaccaccatccaggacattcagaagagttcactgcagatgctgcaggtagtcctcaaaaatgggttccagaaatgttttgagcactggcaacatatttgaaataagtgaatattgtcctgtgaaaagaatagcaggacttttagatgaaaagtattcttaaaaagaaaagtcaggcaccccaccttagacctcgtatgcttgatcctgtgagattgatgtttgtggctggaggtggatttcatgccctgtggtgtttacagtgtatataatggttgtgttttcatgggggctatgaaagtgcacgttaaacctgagcgcctttacctttaggaggagtgctttggcccctctgtgaatagccacgattaaaatccagttgtatataatggacagctaacggaacaatataatcaccacaatgcagctaggatagtgttgcggctataattttgtgttttttttttttaattgtctagtcttaaatttgtacatcttgtataaaatatgaatgtttcccaaataaactatgaatgtttcctgtataatatatgaatgtttctgagaagaaactctaaatagttgaaaggctaacctgctcaaaggataccaaataatggtttaactggacaacctgaaaattagcatagaaaacaatcctttgttatattttagtgatccacaagattgagaaaatattatatagttagataataacattcttgtctactttatcctgtctggttacaaaattttttaaaacttaaataaaaacatgcatcttaaatggaaaaaaaaaa

SEQ ID NO: 58389 - DNA, 531 bp, Homo sapiens; identical to SEQ ID NO: 15719

SEQ ID NO: 58390 - DNA, 2168 bp, Homo sapiens
aaataccaaaattattaatactttttccagcaattttgcaagaggcagaagtgtgacattgaattgagtgagacgagcgtgtgggtgggttggcgaggagcccttctcctgacgcaggctgctggcttgtcaaggaatggctggttccaccgctgggcccgtgtttactcttttgcttcaaggaaaagggtttcttgagggaacaactttacctccaataatgatttatttgggtccagttgagttacgtctctcctaaggaaaggtgctcagtaacttgtactcatcccatggaaatcctttggaagctacaaaatcaaagacaatctggagcttgttgctggccaggaaacgccgctccaagaactcgccactgggggtccggatccgcagtttgctcacaggctcagcattttcttcctttggctcaggaggcagggcttgctctaaggacagccggatggcctcacgttcctcttcttgttctttgcgaatctgctccaaacgaaactgttctgccatctctctctcgtgagcttccctctttgctctgtcagcctcaagtgaaaggcgataggcctcatcttgctctctcttcacattttctctggcttcacgttcatcctcgtcctttatatcttcctgttgttgggctgtgaagatctccattgcagccatgagtctcatcattaactcatctactgttgtgttcccttgtatcacattcaacacttcattagatgatcgctttcccataataatcaggaaaagcggaaactgatccgttttttgagtccgaatggtttgtgccacaacactgccaaagtgtctattgcacatagtgagaaatcttgctctgttggagtcctttgtcagatcccaagcccaggttataaaattttgactcagataagaaacaatggattcagcacaaagcatttgtgagcagaacacgttgggttaacacactttcatcatggtggaggtagatagcaagaagctttctatctcgggctttcacatagaaggcctcttgaaaagcagcttctaatgagccaataaaaaatacaggatggcaatcaccatatcttgaagaaaactctgctgtaaattgtaataaggcatctccttcattttctgcgttttctggcatcattggagattttctcaaggcagatgacgccatgccaaatacttctccatcatccaccccaaattctgtagcatcttcaaagtcatctccatcgctatcactaaccatatgaacatcggtgatttgttcttccgactgttcccgggtctgtgcaggtgaagatcttcttcccactgtaagtcgatggcagggataagagagccctgattcagcaagacacattgagtcgtctgtagcagaagttggccagccctcccataattggtggcgaacggggatacttgtaaggtcatacacatttctctttacctcttgaatagtactgcttcctgagaagttcaggttgtactcccgctggacttctcggtgggtgatgatcagcatgaagttttgatttaatgactcctgcagggcaccagcatgactagatgatgaaggtggtggcaaatctggtgtaaggacataaagactgttgttttttggcaagtgtagagattttaggaccgtactgtcttccacatctcccgtcttccagccttttaacagcattttggacacaggtatctgaagttcattttctagaatctgtttaatctctccaacagtacaggtgtcttcaagtaccacatcaacatttctgtctctgtattcaaccctgaagtccagcatccgaggttgcctttctacaatctgcctggatggcattacaggtcgaaacgctgaagaagaagaggaagtaggagctgaagctggatgacttgctggattaaatgcaggtcctggtatggtctcacctccatattcactttgtagaatgccattttcctgtggtattacaccattgatagctgccactaagtcccaattattttgttcaagcaatgtaatagcttcgtcaatgttttcaatgccagtacatgcctgaaaatccgccaggatcatctcccggtccatgttggacgccatggcggccgccgagttccgcggctccgggagcgaagcgcgcacctgggag

SEQ ID NO: 58391 - DNA, 1767 bp, Homo sapiens
ttttttttttttttcaatgtgtttaagagtttattaggataggcacataacagaaagctcaaaggacaacaaagctgcaccttcctaaaggctgaccctcaaagcaccattttgttagaactcagaggagaagctcgatctctgagccttccctcctcacagtttgggaaacatgcacaggatgaaggtaaatcctgcatagaaatcttgtaattccagaattagtcaaacaaatttgaaatacacacatttaaaaatacttacattctcatttagcgttcatgaagtgattactgacatttacaattacatcttgacatcacagagcaagcctttgcagggatctaattcaagcttaagccaaatctatgcaaagaacttcagctcagaggaatagtgggcaaaatctgctgaaaagaactgcttgccaccttgcagataagagcaacagcacaataaagggattccagagcttctacctaaaatagaagggcattatctacaagaacagaccaaaacacaatttatttttaaacaagcccttcagtgagtatttgtctcaggaatctagtatgaaaatagtgtctttgattagtgaatatatggagaattcggattatcatctctatttttagttgagaaaatgcacaaaccatatagatttaaaccatgggttttgcagccgaagtagagacagatgttttctgggatcatatctcagattcccaagctaaagctattgttcaaggtgatggaaatatgtagggggcattaaaccattttgcagctgctagaaagctgtgttttcctgttttcctgatttagacaatggagaagctaagaagagaaataataggaaaggctttcctatgttagttttaaaaagactgtgttatttttaattcaatttttttttgtcaaatctcatctctgttctcctagttttcacagaaatatttacaggaataaaggttgaaacaaaagtacctaatgatcatctccatccatcgaaagattgctcagggataagacactcaaacaagggcttgtgatgaggatggaaaagacaaagcaacttgaagagaaaaaaaaattcttttaaactcagttcatcctgcaaaatggacataacacatgcatataaaggtttgactttttaattccacttttttgcctgatcgcagggaagatggcatgtggctggcccttcctgaagccttgctcctccaccactggctaacagacaggcctccaggtggccttgcaaggccgacagtgaccgcagcccacttccccacatccttaatcagagcctcatgcagttcatccccacattacccaaacataacgtcgtagtgctacacgtagatgtgttgcatcatgatgctatggcaatgacgatgacgcttaggtgtgtgggccaccgaaggcagagaccagatgtggttggtcttgcctggaagccaagctgttgagcaggggtggagtccctctacagaggatgctcaccaagttctaatgcattgtcgataactgtcctgccctggtttttctgcattcctcagattatctgtgggaattgtcctcctgcatcctttctcaaatgacaaagaagaaagaaagagcagtgatggcacctgaaattcaggaatgagtaggcatggcgagctgggtgtgtgagatgttctctctttacattgtctgctttgagatgtgggatgaggggagggagagagttggtcctgaatatattcagttttttccaag

SEQ ID NO: 58392 - DNA, 1656 bp, Homo sapiens
  misc_feature (1)...(1656): n = a,t,c or g
ttttttttttttttgagcggttttcttaagtgtctttaatactccactcagggcagcccctccctctactgagaggctcttggctctggccccaagagcagctggaaggccctggcctgacttcaccacttgatgtccaggctgtgtgtgccacgctcctggctctggtacgtggtatgcagcacctctcgggccttgggggagttgatcccctccagccactcctggtacagctcctgcacgtgtgcactggactccggacgccgcacagggatgtcagcgtaaatgccttccatctgccgcagcagggccttatccgcatgtccgtctggagtctgggcttggcctctgccatttaagcatcctccagcacaggcgaggacctccacaaagtggaatgggaacttgcccttcttaagcttcaggatcatgttctggatgtttcgaaagccataggctgcagcaaagcgtaacaccacctctccgttcttctcaagggtgacctcttggaagtctttgtttctcagggctcggtaagtgacctcctccacatcctcgttgaacagctccttggccgcatgtctgaagatgtgtgccaggtgcccgtctgagctggctccatcatgacgcgtcactttgtcctccttcaagtctccaaacagagtgtcgacggcagcatctctcactgagaggtcaccttgctcccattatttgagcaatttcacctgatgttaacacgcaagtcagcaccccgggagcccatgcaaagccagggggaaggctttccctgaagagcctccagcttcttgtcataacaaggggccaccaatgacgtggaaaatcttctctggagacaggttctgctgtctggcgaaataatccttcaccaaagagcccatgacctgctggggggacttggcggtgccaagaaggtgggccagtgatggggcgaccccagcacccgctcgggcgtatcggaccccagcccaggacaggcagaggtcagcatgggcagggtgcgttccctccctcactgtgctggcgatagcgacgcacgaattctttttgactctcccaggatactaaaatccgcagctatcgtcgtatcaaatacatagtgcaccccaagacttttgaggaaaccacagagtcttctggatgcatcagttacactgaggttgaatttagcagcaaaataaggcaaagattgaggacacacagacactaacccagctttgtgctttgaggtatcacatttcttgttaaggttcagaacgcggaagaagtccttggcattttgctgggaaagttggactccttcctctgcagtcatacagctgtcacatgccaggcagtcgctcaaaaatatcttggcatcagccaacttgtggaattctcccttctctccattttcctgggctggactcggtgcatcggctgacacattctcttggtcatcagtttttgttttcttactacattccttgcgcgtgcagtgctcacacttcatctggagcgcggcgggcgggaggccgggcgcctcagcctcagggaagcaccggctcgtgccgaattcttggcctcgagggccaaattccctatagtgagtcgtattaaattcgtaatcatgtcatagcaatggnatcaganntcaaa

SEQ ID NO: 58393 - DNA, 435 bp, Homo sapiens; identical to SEQ ID NO: 15726
  misc_feature (1)...(435): n = a,t,c or g

SEQ ID NO: 58394 - DNA, 459 bp, Homo sapiens
gcggaggaggagcgggcgccatggcggttctactggagaccactttaggcgacgtcgtcatcgacttgtacaccgaagaacggccgcgtgcctgcttgaatttcttgaaactgtgcaaaataaaatattacaattattgccttattcacaatgtacagagggattttatcatacaaactggcgatcctacagggactggccgtggaggagagtctatctttggccaactgtatggtgatcaagcaagcttttttgaggcagaaaaagtcccaagaattaagcacaagaagaaaggcacagtgtccatggtgaataatggcagtgatcaacatggatctcagtttcttatcaccacaggagaaaatctagattatcttgatggtgtccatacggtgtttggtgaggtgacagaaggcatggacataattaagaaaattaatgagacctttgttgacaagg

SEQ ID NO: 58395 - DNA, 2109 bp, Homo sapiens
ggcaagaaggggcagggccatggggaaaagaccaattcccagaggcccatataccccagttatttggctgtgatttaggagttaagtcctcccgcaccttaaaaatggacaacacacagctttcctgctatataattaaagtatggaatgaaacaggaaaataaccatcggattttatcaaacttagagctaaagcagacacagtaagatttttttaatttgccagatattcttttaatgagaattataaaagaccaaaaacattttttgcaaactgcctttttaaacaaatgatttgcttttaattacaaatactgtgcatgacgatgccttcttctgcaaaaccaataaatacaagaacaaattttaaaatatgtgatttgtccaagatatctgaaaaaggaaacaaaagcctgatttgcagtatttataaaaatcaatttattctctaacctttcaaagattaagctcaaaggtgtgactcatctgtagaagacagaaagagagcaccttatagatgctttaaataggcttttggattatttttccgatgtcacctttactttctggaactcatggcttcacaaaatagctgattttaaaatatttctaatgaactgattaatgggggaaaagaaaatattgaacacgttataaattttttaccataaacaaatatgcatatcaaaagatactaactttaaaatggtacaaaaaaaggaaaaacctgaattacagaaaagtcaaatttatttaatgaaaaactaaaattaataaaaattagcaaatacacacaaaaaaagcacacagcagcactatgtattgactcacaaagggaaaagcagtggcccatgaccactcaagatggcttgtcagttaaaggaaaaaaacccaaacacgcacacacccacgcaggcacacactcccacgcaaaaacaaactttttcaacaatacaatcaatctacaacaaacacaaaactcagaattattttacaatgcttcctttcttaatacaaaagatgcccatcttgggtgtatatacatatattttttcagtggtttactgttgacttatttttaaatatattagtgttactacatgcaactgtttcctgtatttaacagcctttctttttatttaccttcatgtgtctagcttccacctaccgaaagagttttaggttggcagacagatgggtgccttattttctgtgaaactgaagttttaaacactggccagaaaatgtttgattgccatttcaacacatggaaatagttacattgatgcctaaattgccattttctgcaaaaagctgtgcaatgctggtgtcaaagactagacagtcgctattcataatggctgttgcaattccttcatgaatagatcgaggagtcgcttcccaagtcaatcgtcgcctatgaccatttagctcaagtcggtaagcaaaattttcagcttgcttgcgtgttcctatcagctgtacgattgcgaagaactgctggtgaccatcgtatttttcctgtttctctaagactaacatgaagtgaaagccaaaacaggactgcatcatcacccagtcaacagcaccaggaagattaatgtctgtagcaagaaaaactatatcctctccctgtagggttgtaatggacttatgctgatgcatcagatggggcattacagcatccagagagccttgccatttacaggaagcaccagggcacggacaggaataaggcctaaactcacagagctcttcatggtctgctttttctgtgtgtggcagagttatttcacatccagaagacgcatatttacaggggaaaagtactgaattagccactttctccatagccaagttgcgaatggatcccaaagggccccggcaagttggacaacatgtgagctttgggcgacagttgctacaaacaagatggccactctgacattgaagaatgggcggtaacacatagtcaaagcagactggacactcaaaaagactcgccaagtcattgttggatgcagttgtgccagtcagggcaggcaccctctgggatggtggacacttcgaggtaccggtaggtaatgctgtagcagtctgacggctcat

SEQ ID NO: 58396 - DNA, 493 bp, Homo sapiens; identical to SEQ ID NO: 25903

SEQ ID NO: 58397 - DNA, 2821 bp, Homo sapiens
tttttttttttttgttttaatttccgaatttattaaaatgattaacctcaatactgcaagtgcatgtacaaaatatttgtaaaaaatgtttttaatgaaacgttaaagaacttacctcaaatgctgaaaaagtcctttttcattctttcagtacaaggaatacattgtatctcaaaagtattacaactcagcaaaaacaatttataacagtaatttgaaaatgattgaaaattgaatactttacatatatttctatgatcatctcctaattcttacaatgccaaaatcttaaccaatcattgcataagctcaagctaagagttttattgaatgcaacctcttctaaactggtcaacggtgtgtggctgtcaccattccacacggtgaagttctacagcagatccggaacagttccgaggcccctacctttaccaacggaaattaggtttccctagaaggcatcaacagtggctgctgagtgcttgtgcataccgactcctgagaggcagtgatttactaccaaatgtcactgctttgagacccatgggaaggttgcctccaaagaggaggccatgataaaattaaaacatcaaaaataagttactaaaattcagctgaaaaatgaaaatgggaaatgtgttttgtcactttttaagatcgaaattcccaaaatagctatcgttggtattcaaataaggtttaagatttagtctctgaacctcttcaaaacaccccaaactaaggtgggaatacaagaggtgacccgctgccctccagcacctccagacacagggtctaccttcatcttcctcagtggcaggggttcacatttctatgcagggaccccatgagggctggacgtgctctgcaaagtgctccgggtgcctcggacaggtgctcctgagaggctgtgtgggctgccctacttcactgttgaagacctccagacgcagtgaacgggggtatgggtgggtgtggaagaaggtctaccacatgctttccaaacgcctgaggagttcgactgcaccacaacaaacaaggatgagactatgtaagactgcagaagtagttccttagagaaccaggagaaaacaatctactttctaaaaatgttcatgagtcttaatttctatttggaacctatgggcaatcaacagtcttaaggagcgtcattgaaacaatatccccccaaacctggaaactagtaggaatcaattagtagtaacagtaagcattgagattttctccactggacttttcatgaccttcagattccttttcatatttcaagacatgggctactttcctatagacactatacaaatcccctgaattgatttttacttaggaacactgtatatcagaaagtacaggtacacatttcccagaaataaagagacctactggtgtcaaacacctgttacagatttatattcccaaattctctgtccaatgatttgcaaaataatccagagaaatgaaaagaacctggtattgaacataaagtagtaataaaaatttgctcattaagttaattaaaattaatttctcaaagtgcttcaaaaaacaaattaaatctgactcctttttgtttaactgataatatagtcaaaaaaatctttgatgttttcataataactacataactacatagccaagactcccactgatgcaggcttaaaactatatatttataatttcctattttattggcatggaatatttctaacttaaaaaccttcctggtaagttcttttaatttcttatgacaaaaatttctcacaacacacaaatatttacaacatatacattgttttcagttctttacattgaatctcaaagacaaactttttttataggttaccacagaacaaaagctgtgactcatgtttttatttcataaactattataagttaaagtgaatagatttttttaatattccttgtagcattttacaagtgcaacagaaaacttgaagaaccaaattaagatagctgtagttcattagataaatgttgcttgttgtcatcacgttgttcacagcaaatttttgaaaaaataagcaccaatcattcttgcaaagaacaattttatctaaaaggattgaaaagagttaaatacaaggtttttaatttacatgacaagcaataaatacgctgtatcgaacctcatcccacacactgctaccctcggtacatataatgaactgaaaagtgagctgtcacgtatgtcgtttttttttttttttttaagaaaccaatctgactcccaaccaatggtttgcgatattaacaaaggccacaaacagtacacctgggccagcaaacagtgtgaaactgacaaaactccaagggggaaacatctagcaaataaatcaaaaagccaaagatcattgctggtgatattagcatactagaaacccttaatatgctgctactatgatttgttttaaattattgtttagtcatatattaaagagccagctgatgctcttacagttaaaaaaactgtgtagccacattactgttttcaacgtcctgtgtggaaagttgctatcactgtacaattttgcttgagcctttattttacaacagggctttacctctaactcagaattgcacgtaagaaggctatttaaaaagtacgataaaaatttgcacaaatcagacttaagaattgagtcagtatgctgtacactttctacaatagtatgctgataagtgaagggacaatagaagtgctgccactaaactttcagttgaggaataattgactggaattttttatttctttaaagtagttatcccaggtcaagttaag

SEQ ID NO: 58398 - DNA, 1028 bp, Homo sapiens
ctcgtttgcccctcgtgttcatgggagctcgttttcttttcctctaggcagagaagaggcgatggcggcgatggcatctctcggcgccctggcgctgctcctgctgtccagcctctcccgctgctcagccgaggcctgcctggagccccagatcaccccttcctactacaccacttctgacgctgtcatttccactgagaccgtcttcattgtggagatctccctgacatgcaagaacagggtccagaacatggctctctatgctgacgtcggtggaaaacaattccctgtcactcgaggccaggatgtggggcgttatcaggtgtcctgggagcctggaccacaagagcgcccacgcaggcacctatgaggttagattcttcgacgaggagtcctacagcctcctcaggaaggctcagaggaataacgaggacatttccatcatcccgcctctgtttacagtcagcgtggaccatcggggcacttggaacgggccctgggtgtccactgaggtgctggctgcggcgatcggccttgtgatctactacttggccttcagtgcgaagagccacatccaggcctgagggcggcaccccagccctgcccttgcttccttcaataaacatcacaggacctggatgtggctcttcgcactgaaggccaagtagtagatcacaaggccgatcgccgcagccagcacctcagtggacacccagggcccgttccaagtgccccgatggtccacgctgactgtaaacagaggcgggatgatggaaatgtcctcgttattcctctgagccttcctgaggaggctgtaggactcctcgtcgaagaatctaacctcataggtgcctgcgtgggcgctcttgtggtccaggctccaggacacctgataacgccccacatcctggcctcgagtgacagggaattgttttccaccgacgtcagcatagagagccatgttctggaccctgttcttgcatgtcagggagatctccacagtcgagcgccgccgaatttagtagtag

SEQ ID NO: 58399 - DNA, 2930 bp, Homo sapiens
  misc_feature (1)...(2930): n = a,t,c or g
gtctagagccaccgtccagggagcaggtagctgctgggctccggggacactttgcgttcgggctgggagcgtgctttccacgacggtgacacgcttccctggattggcagccagactgccttccgggtcactgccatggaggagccgcagtcagatcctagcgtcgagccccctctgagtcaggaaacattttcagacctatggaaactacttcctgaaaacaacgttctgtcccccttgccgtcccaagcaatggatgatttgatgctgtccccggacgatattgaacaatggttcactgaagacccaggtccagatgaagctcccagaatgccagaggctgctccccccgtggcccctgcaccagcagctcctacaccggcggcccctgcaccagccccctcctggcccctgtcatcttctgtcccttcccagaaaacctaccagggcagctacggtttccgtctgggcttcttgcattctgggacagccaagtctgtgacttgcacgtactcccctgccctcaacaagatgttttgccaactggccaagacctgccctgtgcagctgtgggttgattccacacccccgcccggcacccgcgtccgcgccatggccatctacaagcagtcacagcacatgacggaggttgtgaggcgctgcccccaccatgagcgctgctcagatagcgatggtctggcccctcctcagcatcttatccgagtggaaggaaatttgcgtgtggagtatttggatgacagaaacacttttcgacatagtgtggtggtgccctatgagccgcctgaggttggctctgactgtaccaccatccactacaactacatgtgtaacagttcctgcatgggcggcatgaaccggaggcccatcctcaccatcatcacactggaagactccagtggtaatctactgggacggaacagctttgaggtgcgtgtttgtgcctgtcctgggagagaccggcgcacagaggaagagaatctccgcaagaaaggggagcctcaccacgagctgcccccagggagcactaagcgagcactgcccaacaacaccagctcctctccccagccaaagaagaaaccactggatggagaatatttcacccttcagatccgtgggcgtgagcgcttcgagatgttccgagagctgaatgaggccttggaactcaaggatgcccaggctgggaaggagccaggggggagcagggctcactccagccacctgaagtccaaaaagggtcagtctacctcccgccataaaaaactcatgttcaagacagaagggcctgactcagactgacattctccacttcttgttccccactgacagcctcccacccccatctctccctcccctgccattttgggttttgggtctttgaacccttgcttgcaataggtgtgcgtcagaagcacccaggacttccatttgctttgtcccggggctccactgaacaagttggcctgcactggtgttttgttgtggggaggaggatggggagtaggacataccagcttagattttaaggtttttactgtgagggatgtttgggagatgtaagaaatgttcttgcagttaagggttagtttacaatcagccacattctaggtaggggcccacttcaccgtactaaccagggaagctgtccctcactgttgaattttctctaacttcaaggcccatatctgtgaaatgctggcatttgcacctacctcacagagtgcattgtgagggttaatgaaataatgtacatctggccttgaaaccaccttttattacatggggtctagaacttgacccccttgagggtgcttgttccctctccctgttggtcggtgggttggtagtttctacagttgggcagctggttaggtagagggagttgtcaagtctctgctggcccagccaaaccctgtctgacaacctcttggtgaaccttagtacctaaaaggaaatctcaccccatcccacaccctggaggatttcatctcttgtatatgatgatctggatccaccaagacttgttttatgctcagggtccaannnnnnnnnnnnnnnnnnnnnnnnnnnnnnnnnnnnnnnnnnnnnnnnnnntttgttgccccaggctggagtggagtggcgtgatctgnnnnnnnnnnnnnnnnnnnnnnnnnnnnnnnnnnnnnnnnnnnnnnnnnnnnnnnnnnnnnnnnnnnnnnnnnnnnnnnnnnnnnnnnnnnnnnnnnnnnnnnnnnnnnnnnnnnnnnnnnnnnnnnnnnnnnnnnnnnnnnnnnnnnnnnnnnnnnnnnnnnnnnnnnnnnnnnnnnnnnnnnnnnnnnnnnnnnnnnnnnnnnnnnnnnnnnnnnnnnnnnnnnnggaagggtcaacatcttttacattctgcaagcacatctgcattttcaccccacccttcccctccttctccctttttatatcccatttttatatcgatctcttattttacaataaaactttgctgccacctgtgtgtctgaggggtgaacgccagtgcaggctactggggtcagcaggtgcaggggtgagtgaggaggtgctgggaagcagccacctgagtctgcaatgagtgtggactggggggcccagtgcccgggttccgggaggggaacaaaggctggagactgggtcagtctgcgggctgcatgacaacaagggagggggtggctccattcataactcaggaaccaaccgtccctcctcccctccgcccacggctggcacaaggttctctgcctcccctgcttctaggattgggctgcttccccctcggcagcctctcaccaaggattacgggatttaaatgtcgtgatttacgaaggctgagcctccagggtggccatcttcgtccatcagaagtggcaggatacctgggttccaagggaacagggtgg

SEQ ID NO: 58400 - DNA, 15 bp, Homo sapiens
  misc_feature (1)...(15): n = a,t,c or g
cctttttntttttgg

SEQ ID NO: 58401 - DNA, 15 bp, Homo sapiens
  misc_feature (1)...(15): n = a,t,c or g
ccaaaaanaaaaagg

SEQ ID NO: 58402 - DNA, 12 bp, Homo sapiens
aaaaaatttttt

SEQ ID NO: 58403 - DNA, 12 bp, Homo sapiens
aaaaatttttta

SEQ ID NO: 58404 - DNA, 11 bp, Homo sapiens
aaaaatttttt

SEQ ID NO: 58405 - DNA, 12 bp, Homo sapiens
aaaaattttttc

SEQ ID NO: 58406 - DNA, 12 bp, Homo sapiens
aaaaattttttg

SEQ ID NO: 58407 - DNA, 12 bp, Homo sapiens
taaaaatttttt

SEQ ID NO: 58408 - DNA, 12 bp, Homo sapiens
caaaaatttttt

SEQ ID NO: 58409 - DNA, 12 bp, Homo sapiens
gaaaaatttttt

SEQ ID NO: 58410 - DNA, 11 bp, Homo sapiens
aaaaaattttt

SEQ ID NO: 58411 - DNA, 1088 bp, Homo sapiens
tgaacatgaatccacagatcagaaatccgatggagcggatgtatcgagacacattctacgacaactttgaaaacgaacccatcctctatggtcggagctacacttggctgtgctatgaagtgaaaataaagaggggccgctcaaatctcctttgggacacaggggtctttcgaggccaggtgtatttcgagcctcagtaccacgcagaaatgtgcttcctctcttggttctgtggcaaccagctgcctgcttacaagtgtttccagatcacctggtttgtatcctggaccccctgcctggactgtgtggcgaagctggccgaattcctgtctgagcaccccaatgtcaccctgaccatctccgccgcccgcctctactactactgggaaagagattaccgaagggcgctctgcaggctgagtcaggcaggagcccgcgtgaagatcatggactatgaagaatttgcatactgctgggaaaactttgtgtacaatgaaggtcagcaattcatgccttggtacaaattcgatgaaaattatgcattcctgcaccgcacgctaaaggagattctcagatacctgatggatccagacacattcactttcaactttaataatgaccctttggtccttcgacggcgccagacctacttgtgctatgaggtggagcgcctggacaatggcacctgggtcctgatggaccagcacatgggctttctatgcaacgaggctaagaatcttcgctgcccgcatctatgattatgaccccctatataaggaggcgctgcaaatgctgcgggatgctggggcccaagtctccatcatgacctacgatgagtttgagtactgctgggacacctttgtgtaccgccagggatgtcccttccagccctgggatggactagaggagcacagccaagccctgagtgggaggctgcgggccattctccagaatcagggaaactgaaggatgggcctcagtctctaaggaaggcagagacctgggttgagcagcagaataaaagatcttcttccaagaaatgcaaacagaccgttcaccaccatcttcagctgctcacagacgccagc

SEQ ID NO: 58412 - DNA, 375 bp, Homo sapiens
aaggtgacatgtcagctgtggccagaaaaaattgagggtgcaagccatgcgggaatctcagggaacagcattctaggctcagggaacagcatgtgcaaagacagagcatgagagggttcctgaatcgtgccaggactggtgccccagccttgcagctggtgagctgtggacccaaggttttgtgccacgtgtgtctggctctaaaacacagtgacagagcgtgggtccacacacttgcacacgtgcatgcatgttctaacagtggagcttcgggcaacaagatggtccacagggaggtgtttttcactcaggcagcgtcaaatcccaccacagaggagccatttacactttgcccttctctgaaatctgcaggtt

SEQ ID NO: 58413 - DNA, 366 bp, Homo sapiens
cccacgcgtccgcccacgcgtccgatttagaagcttgtattaaagtaattataacctggagtcccatcgtgacttatacaagctcttggatacagatgtgtttcagaattcagatcttttttatatttcagaaacacagtaaggcacacatactctataacactcaatgggatctgataatgtaccctgtaatcaaatgaattaatttttccaataaaataaataaatatttacactatgtggaataaatatagactagatacactctaaagtcagtccaagtcaggctttgctgtcagatgtgttcaggtcaggtcagggtttgttataaaagaaactacacagaaacattcaaatttgtagctt

SEQ ID NO: 58414 - DNA, 738 bp, Homo sapiens
cccacgcgtccgggacattgagcttgaaaatatgaaagctggcgggaatgctaagttccaagagttcctggaggctcaggaggattacaaaccttgctgggccttgcaggagaagtacaacagcatagccgcggccctctttagggataaggcggtcgctctggccgaaggcagagagtggtctctggagtcatcacctgcccagaactggaccccacctcaccccaggacgctgccgtccatggtgcaccgagtctctggccagccgcagagtgtgaccgcctcctcggacaaggcttttgaagactggctgaatgatgacctcggctcctatcaaggggcccaggggaatcgctacgtggggtttgggaacacgccaccgcctcagaagaaagaagatgacttcctcaacaacgccatgtcctccctgtactcgggctggagcagcttcaccactggagccagccggtttgcctcggcagccaaggagggcgctacaaagtttggatcccaagcgagtcagaaggcgtccgagctgggccacagcctgaacgagaacgtcctcaagcctgcgcaggagaaggtgaaggagggaaagatttttgatgatgtctccagtggggtctctcagttggcgtccaaggtccagggagtcggtagtaagggatggcgggacgtcaccacctttttttcggggaaagcagaagggccctttgaacaggcccctcggagggccac

SEQ ID NO: 58415 - DNA, 414 bp, Homo sapiens
ggctactctggaggctgaggtgggaggatcattttagcctgggaggctgaggctacaggaagccgtcaaccactgcacactcgagcctgggcaacagagtgtctaaaaaaaaaaaaaaaaaaaaagggggggggccttttttaggggcgagttaacctttgcggggtggaagggggaaaaaaaaaaaaaaactggcgtttttttttaaactttaaaaataaggcccaaggaaattcgaaatcagggggggtcccaacagaggaaaagggcccaactagggaaactgcaacaaacaaaccctgttttaaactttaaggcccccttttttggggagcagggggattactataaaagctttttcaaaacctgcttggataacttaccccgcaggggcaagggagtttttttttttag

SEQ ID NO: 58416 - DNA, 348 bp, Homo sapiens
gctgaacagtgcatagagactggggaccagtttgagagcttaggctgccctaggccctgcccagcttctctaaggcaaaaagatttaatatatcagcatgattgtgacacattggaggcataccagttgggaaacactggtttgaactattttcatatctagctatttcctcttgtgaatggggcagatggggacaaaccaatagtaagtgacctgaaatcacttttaatggttttcagaaagcatctggtcacctgagatctatagagaagaaaccggaataaatttcaaaaaggatatagatacaacttagtatgccggactgttgtcttggtataatgaggtgga

SEQ ID NO: 58417 - DNA, 499 bp, Homo sapiens
cacattcatactgtgggcatgcggcggcagctgcaggaggagttggaggaggtgaaggctcgcctccagccctacatggcagaggcgcacgagctggtgggctggaatttggagggcttgcggcagcaactgaagccctacacgatggatctgatggagcaggtggccctgcgcgtgcaggagctgcaggagcagttgcgcgtggtgggggaagacaccaaggcccagttgctggggggcgtggacgaggcttgggctttgctgcagggactgcagagccgcgtggtgcaccacaccggccgcttcaaagagctcttccacccatacgccgagagcctggtgagcggcatcgggcgccacgtgcaggagctgcaccgcagtgtggttccgcacgcccccgccagccccgcgcgcctcagtcgctgcgtgcaggtgctctcccggaagctcacgctcaaggccaaggccctgcacgcacgcatccagcagaacctggacc

SEQ ID NO: 58418 - DNA, 848 bp, Homo sapiens
  misc_feature (1)...(848): n = a,t,c or g
ttcaagagtcagatactgagctcttattctctggactgggatcaggagaagaagttttacctactctaccaacagagtcagtgaattttactgaagtggaacaaatcaataacacattatatccccacacttctcaagtggaaagtacctcaagtgacaaaattgaagactttaacagaatggaaaatgtggcaaaagaagttggaccactcgtatctcaaacagacatctttgaggtagtggggtcagtaccncacaacattaatagaaattttaagtgacactggagcagaaagacccacggttgcnacctctccctttttcactgacatctgacatactcataatcaaactgtgnngtgggccgaagaaaatcccactatttgacacacaacatatttgtgaagagcttttagaatttttttcaccggaaattccagaaacaacctcttttctactgtttttggaagacttttggttaaaagggccaaatattgtccttccccacaacctttgttgttaacacctttgaaaagtttggaaggggagtggattttctttttgttctctggccccaaaaaggccccacttttttggggcctgaaaactggggccagcgaaggtgtggggagtcccaatgtggtgcctttttaaagaaaaatctcttttctcccctttacttttaaagcgcacggtttccttgtgggtttgttctttcccaaccccttattccgagagaagataggacccctctttccgggaaatattttctttttgtgacacaacctctcagaagaaaaaacccttggggggccaaaaaaannnnccccagcttattataatataag

SEQ ID NO: 58419 - DNA, 442 bp, Homo sapiens
ggaattcacctgccgagctcagaacgctcagggctcccagcacatttccctgagcctctccctgcagaatgagggcacaggcacctcaagacctgtatcacaagtgacactggcagcagtcgggggagctggagccacagccctggccttcctgtccttctgcatcatcttcatcatagtgaggtcctgcgggaagaaatcggcaaggccagcagcgggcgtgggggatacaggcatggaagatgcaaaggccatcaggggctcggcctctcagggacccctgactgaatcctggaaagatggcaaccccctgaagaagcctcccccagctgttgccccctcgtcaggggaggaaggagagctccattatgcaaccctcagcttccataaagtgaagcctcaggacccgcagggacaggaggccactgacagtgaatactcg

SEQ ID NO: 58420 - DNA, 524 bp, Homo sapiens
gaacaggcctgtctcaggcaggccctgcgcctcctatgcggagatgctactgccactgctgctgtcctcgctgctgggcgggtcccaggctatggatgggagattctggatacgagtgcaggagtcagtgatggtgccggagggcctgtgcatctctgtgccctgctctttctcctacccccgacaagactggacagggtctaccccagcttatggctactggttcaaagcagtgactgagacaaccaagggtgctcctgtggccacaaaccaccagagtcgagaggtggaaatgagcacccggggccgattccagctcactggggatcccgccaaggggaactgctccttggtgatcagagacgcgcagatgcaggatgagtcacagtacttctttcgggtggagagaggaagctatgtgagatataatttcatgaacgatgggttctttctaaaagtaacagtgctcagcttcacgcccagaccccaggaccacaacaccgacctcacctgccatgtggact

SEQ ID NO: 58421 - DNA, 872 bp, Homo sapiens
ctggaggactgggggggccgtggagcacgtgcccactatgatggcttctccctggaacccgagagcgaccactaccgcctgcggcttggccagtaccatggtgatgctggagactctctttcctggcacaatgacaagcccttcagcaccgtggatagggaccgagactcctattctggtaactgtgccctgtaccagcggggaggctggtggtaccatgcctgtgcccactccaacctcaacggtgtgtggcaccacggcggccactaccgaagccgctaccaggatggtgtctactgggctgagtttcgtggtggggcatattctctcaggaaggccgccatgctcattcggcccctgaagctgtgactctgtgttcctctgtcccctaggccctagaggacattggtcagcaggagcccaagttgttctggccacaccttctttgtggctcagtgccaatgtgtcccacagaacttcccactgtggatctgtgaccctgggcgctgaaaatgggacccaggaatcccccccgtcaatatcttggcctcagatggctccccaaggtcattcatatctcggtttgagctcatatcttataataacacaaagtagccacaaaaaaaaaaaaaaaaaaaaaaaaaaaggttttttttttaagggggccgaagttttttcccttttggggggggtaatttttatttggccccggcccggtttttaacacggggggacttggaaaaaaacttttttttttttgtgcccccccccccgcggttgtggggagaaacgaagtgctttgtggtcaggaaaacgacccctccggtgtgaaggaagatgaagtagggtgtgggttggctgcgccgcgcccc

SEQ ID NO: 58422 - DNA, 357 bp, Homo sapiens
tggtagcaattgtctccatgccatttccattgttctgtacaagggctgcacctgtgtgctgctgcactttcccccatgtgtggaagctgcctgaggctctcagaagaagcagatgctggcaccatgtttcttgtatagcctccagctttgttatacagctcacgacagagtttttcagccacatgctgcagacttcctgcaagctttatattctggacttgaagagattgcaactcttgggacgtatttcctaatctttcttccatttgagaaatggtgtcttgaccagtattggagagctggtagtactgaaaaaacaaaagccccagggctggcagccctatcagcagcaccaag

SEQ ID NO: 58423 - DNA, 2318 bp, Homo sapiens
  misc_feature (1)...(2318): n = a,t,c or g
ccgcacgagggaaagaacattaggaatgccttttagtgccttgcttcctgaactagctcacagtagcccggcggcccagggcaatccgaccacatttcactctcaccgctgtaggaatccagatgcaggccaagtacagcagcacgagggacatgctggatgatgatggggacaccaccatgagcctgcattctcaagcctctgccacaactcggcatccagagccccggcgcacagagcacagggctccctcttcaacgtggcgaccagtggccctgaccctgctgactttgtgcttggtgctgctgatagggctggcagccctggggcttttgttttttcagtactaccagctctccaatactggtcaagacaccatttctcaaatggaagaaagattaggaaatacgtcccaagagttgcaatctcttcaagtccagaatataaagcttgcaggaagtctgcagcatgtggctgaaaaactctgtcgtgagctgtataacaaagctggagcacacaggtgcagcccttgtacagaacaatggaaatggcatggagacaattgctaccagttctataaagacagcaaaagttgggaggactgtaaatatttctgccttagtgaaaactctaccatgctgaagataaacaaacaagaagacctggaatttgccgcgtctcagagctactctgagtttttctactcttattggacagggcttttgcgccctgacagtggcaaggcctggctgtggatggatggaacccctttcacttctgaactgttccatattataatagatgtcaccagcccaagaagcagagactgtgtggccatccttaatgggatgatcttctcaaaggactgcaaagaattgaagcgttgtgtctgtgagagaagggcaggaatggtgaagccagagagcctccatgtcccccctgaaacattaggcgaaggtgactgattcgccctctgcaactacaaatagcagagtgagccaggcggtgccaaagcaagggctagttgagacattgggaaatggaacataatcaggaaagactatctctctgactagtacaaaatgggttctcgtgtttcctgttcaggatcaccagcatttctgagcttgggtttatgcacgtatttaacagtcacaagaagtcttatttacatgccaccaaccaacctcagaaacccataatgtcatctgccttcttggcttagagataacttttagctctctttcttctcaatgtctaatatcacctccctgttttcatgtcttccttacacttggtggaataagaaactttttgaagtagaggaaatacattgaggtaacatccttttctctgacagtcaagtagtccatcagaaattggcagtcacttcccagattgtaccagcaaatacacaaggaattctttttgtttgtttcagttcatactagtcccttcccaatccatcagtaaagaccccatctgccttgtccatgccgtttcccaacagggatgtcacttgatatgagaatctcaaatctcaatgccttataagcattccttcctgtgtccattaagactctgataattgtctcccctccataggaatttctcccaggaaagaaatatatccccatctccgtttcatatcagaactaccgtccccgatattcccttcagagagattaaagaccagaaaaaagtgagcctcttcatctgcacctgtaatagtttcagttcctattttcttccattgacccatatttatacctttcaggtactgaagatttaataataataaatgtaaatactgtgaaaaaaaaaaaaaaaaaaaaaacctcgggggggggccgggcccccatttccccttatggggggcggttnnnnnnnnnnnnnnnnnnnnnnnnnnnnnnnnnnnnnnnnnnnnnaaaangnnnnnnnnanncntnggnggnngggggaaacnnntgggnngnanagggaaatacatngggggaaacatnccttttatcttgacaggacaaagaagggcattaagaaaattgggcaggtcacttccccggaatggtacccagcataataccccaagggaattctttttgggtccgcccccaatttcgtgcttgtttcccttaccccaggcccatcaggggaaggaccccccatcttgcctttggtccttggcccgaagagcccaaaagggggtgggccccctcggtttttgggaaatctccaaaancccaaaagggcttttattaggcatttccttttcttgggggcccattttagggactcttggataaattggggtggcccgc

SEQ ID NO: 58424 - DNA, 561 bp, Homo sapiens
gagcgtgagtacaagcagaaggatttgtgccggcgtgtgactgtgcacacactcgtattcacatgtgaggatgcctgtggggaatggtgagcgtgtgtgttgctggacatggatggattctgcatctctgcacctcagggcagatatgtaggtgtttgcttgtgtttgccggatggtgtggcatgtgctaggtttttgcacatgtctgattcttgggcatgccctcttcgtgtgcgtgtgtgtgtgtgtgtgtgtgtgtgtgtgtacttggcctctgctaggcctaaagagcatgtatgtccaggatccagagctgggactggggaaggcaagactggccacgcccgaggcagagctgtgtacacacacccttcacatcacagctggcggacgggaggagggctgctgtggagacagtggggtgggtgacctcacaggcattgggtcagagcacgcagtggcgcctggatctgccgggggctaggcctatcggggctaacctccatgcacgtgtcgaaatctcctcacgggaatttgggcgtgccagacccctgatccttg

SEQ ID NO: 58425 - DNA, 353 bp, Homo sapiens
ggatttgttcacatagtgttatgcatgatcttcgtaaggttaagaagccgtggtggtgcaccatgacatccaacccgtatatataaagataaatatatatatatatgtatgtaaattatagcactgagggccctgctgccctgctggaccaagcaaaactaagccttttggtttgggtattatgtttcgttttgttatttgtttgtttttgtggcttgtcttatgtcgtgatagcacaagtgccagtcggattgctctgtattacagaatagtgtttttaattcatcaatgttctagttaatgtctacctcagcacctcctcttagcctaattttaggaggttgcccaatttt

SEQ ID NO: 58426 - DNA, 911 bp, Homo sapiens
gggatttgaacagcatcttgctgaggacattttggttgagcccagaatctatcaaccattagtgagaatagcgtgccctggacttattagaggaatgtattatttaaaaagtgttagtaatgtcaaagagccatttttcaaatgcctctttttcattaggaaaaaatggttggaaaaagcatttggttatccctgcaatcagaagataatggcttctttctgccatggaatggaggagttgctgagacttctaaaagctgccccacccagggaaagaaagaggaaggatgctctctgtgctcttgccctcttttttctttaaggaagacaacagtcaagacagctccacaagccccagccctaaccttaactacctttttgttttatagaagatagcagaaaagatgaacaccataactttaacttttaccccaagcctccttttatccttatgggagacgctttccatgataactactattccattaaagacacatgaagtcttcttgaatgtttgacaaaatagatgtgtttgctttcttttatcccatcaaagaggcattttctcctatcaaaatgcattttcatgtggaacatctgtgcacagccaggttaaatttcactgcctttcttctacctaggggtggccatgttgtcatgaatggaatgtaatcagcaaacttctgtgccactgtggaccaaggcttgcaggtggtagggggtggcacccccatgttcttattagcaagatgtgggtggtgccacagctgtagagactggtggggccacaagaggagagatgccaggatactgtctgcccacatggaggaagacagcaccctgccgggaattgtgccttaaagtgctccatgggcaaaaaagcaagtatgcatgttttgtcgacgcggccg

SEQ ID NO: 58427 - DNA, 542 bp, Homo sapiens
cctctggccgccacctccttccagctcacttcctttagtgcggccagtaccgcccctgcctaggcatgtcgacctgcagggacccttttctggctcttcgaggcctctgcccaccatcccctctttgttctccatagtcccttccccctgttctctctcgtttcatcttactggtctggcaaagtccccggccttgggcgagcccagacctcctcagtgcctgcacacagctgcccacagccagagaaatccatttaagcagactgcctgcatccttcttaacagtgcaaggcaggcactccctgccacaagagaccctgttccctagtagggcagcttttctcctccccagaacctcctgtctatccccacccaatgtctcctcacaggcatattggggaaacaggtcaggctctcccaccgtatctgcaagtgtactggcatccatctgtcttcttcctacccctacagtagaaacagtgtctgtccccagctgtgctctgatcccggctcctttcacctcaaagcttggaaaattgagc

SEQ ID NO: 58428 - DNA, 449 bp, Homo sapiens
gaggtggaattccagccacttggagagaggcctggtcacctccaaaaccatgctgcccaaggaaaaggtgacctgggacaaagtgacagtgaataggtccatctgaaaccgctctaagcagctgtctgaagcctgctctgtgtcgggctttggctggtggaaaatctcaatggcaagtgagccctcagtggggaggtccacagggctggacagctgcagccggagctcagcccatgccagatcctcttgttggctcaggaaggagaagtcaaaagcaaacgtccagttctgcccatccactgccacatctgggtaggagaaaaccaagaaagaaggagggtgagtgagggcctcccccagcctcagtcagtgtcacaaccaccatagctcttgctggaggccttaccttatatagaattaccttcgaattctcaccccaactctatgag

SEQ ID NO: 58429 - DNA, 1053 bp, Homo sapiens
  misc_feature (1)...(1053): n = a,t,c or g
cccggctactgcgggtcctgggtcttcacctgcggagccttacggcagctgagcggtgggagggacctgagccgcggcgctaggatgggaaacagtgcgctccgcgctcatgtggaaacggcgcaaaaaactggtgtctttcagcttaaggaccgagggctgaccgagttccccgcagacttgcagaagctgacgagcaatctcaggaccatcgacttgtccaacaacaagatcgaaagcctaccgcctttgctgataggaaagttcactctgctgaagagcctctccctgaacaacaacaaactgactgttctgcctgatgagatatgcaatctgaaaaaactagagacgctaagcctaaacaacaatcaccttagagagctgccgtctacctttgggcaactctctgccctcaagaccctgagcctctctgggaaccaactgggagcattacctccccaactttgtagcctacggcacctggatgtgatggatctctctaagaaccagattctaagaatacctgactcagggggagagctgctagtcattgaactcaacctaaccagaatcagatatctcagatctcagtgaagatatcttgctgtccacgccttaaaattcttcgcctggaagagaattgtcttgagctcagcatgcttccccagagcatcctcagtgattcccagatctgtctgcttgctattacatgggcagacacaaaggccacagcatttgttgagttctgttaaagtcttctctgtctctctcatgtccttatttatttggtccaagccttcttctatgcggtttagttgttccttttgttcatccagcatagtgatggtcttgattcctgcatcctgagactcaatggctaaacccaggattctcctcgtactttccagagactcatcagtaatctggtgagctctctgttgaatttcttctgatgacagattatccatgatgaatcaaaactcaagcgggcgaggccactcctctccggcggcactcgtgccgaattcctgcagccgggnggcgagggtcaaa

SEQ ID NO: 58430 - DNA, 618 bp, Homo sapiens
  misc_feature (1)...(618): n = a,t,c or g
cggacgcctggggataattcattttggataggcctttctcggccccaaactgaggtaccatggctctgggaggatggatcaacattctcttctaacttatttcaaatcagaaccacagctacccaagaaaacccatctccaaattgtgtatggattcacgtgtcagtcatttatgaccaactgtgtattgtgccctcatatagtatttgtgagaagaagttttcaatgtaaggggaagggtggagaaggagagagaaatatgtgaggtagtaaggaggacagaaaacataacagaaaagagtaacagctgaggtcaagataaatgcagaaaatgtttagagagcttggccaactgtaatcttaaccaagaaattgaagggagaggctgtgatttctgtatttgtcgacctacaggtaggctagtattatttttctagttagtagatccctagacatggaatcagggcagccaagcttgagtttttattttttatttatttatttttttgagatagggtctcactttgttacccaggctggagtgcagnggcacaatctcgactcactgcagctatctctcgcctcagcccctcaagtagctgggactacaggtgcatg

SEQ ID NO: 58431 - DNA, 974 bp, Homo sapiens
  misc_feature (1)...(974): n = a,t,c or g
tttcgtcgctgcggagcgcggcgggtccatgtgcgcagtgagtggcgctattcctggcccagtagcacccgagccccgggtttgaccgagtccgcgctgcgatggaccccaacaccattatcgaggccctgcggggcaccatggacccagccctgcgtgaggccgcggagcgccagctcaatgaagcacacaagtctctgaattttgtctcaacactgctccagattactatgtcggaacagctggatttacctgtgagacaggcaggtgttatctatctgaaaaatatgataacacagtattggcctgatcgagaaacagcaccaggggatatatccccttatactattccagaagaagatcgccattgtattcgagaaaatattgtagaagccattatccattctcctgagctcatcagggtacagcttactacatgcattcatcacatcatcaaacatgattatccaagccgctggactgccattgtggacaaaattggcttttatcttcagtccgataacagtgcttgttggctaggaattcttctttgcctttatcagcttgtgaaaaattatgagtataaaaaaccagaggagcggagtccattggtagcagcaatgcagcattttctgccagttctaaaggatcgttttatccagcttctttctgaccagtctgatcagtctgtcctcatccagaaacagatattcaagatcttctatgctcttgttcaggtaatatctgtgaagcagtttttatgcataaaaagttagtctgtcatttaccgtgttaaaaattaacaaagaatttcagcatttgaataatagttaacttgaaaatctacattaagtggatgattttctagcaaaatagaaattgcaaaaattataagtctaaacaagcatacttcctccccaaatacataaacaacccttgtattgcggccgctctangaggatnccccccaaaaa

SEQ ID NO: 58432 - DNA, 1016 bp, Homo sapiens
  misc_feature (1)...(1016): n = a,t,c or g
atcttaacagactagttgtttaaaagaactatccaactgcctcacttgaaaactctcattttgaatggcaataaactggagacactttctttagtaagttgctttgctaacaacacacccttggaacacttggatctgagtcaaaatctattacaacataaaaatgatgaaaattgctcatggccagaaactgtggtcaatatgaatctgtcatacaataaattgtctgattctgtcttcaggtgcttgcccaaaagtattcaaatacttgacctaaataataaccaaatccaaactgtacctaaagagactattcatctgatggccttacgagaactaaatattgcatttaattttctaactgatctccctggatgcagtcatttcagtagactttcagttctgaacattgaaatgaacttcattctcagcccatctctggattttgttcagagctgccaggaagttaaaactctaaatgcgggaagaaatccattccggtgtacctgtgaattaaaaaatttcattcagcttgaaacatattcagaggtcatgatggttggatggtcagattcatacacctgtgaataccctttaaacctaaggggaactaggttaaaagacgttcatctccacgaattatcttgcaacacagctctgttgattgtcaccattgtggttattatgctagttctggggttggctgtggccttctgctgtctccactttgatctgccctggtatctcaggatgctaggtcaatgcacacaaacatggcacagggttaggaaaacaacccaagaacaactcaagagaaatgtccgattccacgcatttatttcatacagtgaacatgattctctgtgggtgaagaatgaattgatccccaatctagagaaggaagatggttctatcttgatttgcctttatgaaaggctaacttttttttgacccctgcaaaaagcattaatgaaaatattggaaagcttcattgaaaanaagctataaagtccatc

SEQ ID NO: 58433 - DNA, 358 bp, Homo sapiens
tctggataggtatgcagaggagataaaaaaattttaattccttagaatattttttaaaaattgattcttattttaccttctcatcttcttattttccaaattacagcatatatatatatatatatatatatatatatatatatatatacctttattccattactgggatttttcacaaagtaacatttattcgcgaaatgatttcatttactacgcccttattccccgctataacttcctcttttagcttgcccagctttattgagaagaatttttttgacatttcaaaaaagggcccttgtttttttttggacaagaactcctgaggaaattttcaccatgttctgtttccacataa

SEQ ID NO: 58434 - DNA, 868 bp, Homo sapiens
  misc_feature (1)...(868): n = a,t,c or g
tcgccgagatcggtgtggcacaagcgatgcttatgtgaaatttaagctgaatgggaagacgctgtgcaaaagtaaagtcatatataacaacttgaacccagtatgggatgagatagttgtattgccaatccaaagccttgatcaaaagctacgtgtgaaggtatatgatcgagatttaaccacatctgatttcatgggttctgcatttgtcattctcagtgatcttgagcttaacagaacaactgaacatattttaaaactggaagatccaaacagtttagaagatgacatgggagtgatcgtcttaaatttgaacctagcggtaaaacagggtgatttcaagagacaccgttggtcaaatcggaagcgattaagtgccagcaagtcctctttgatacgcaacctacggctctctgagtccttgaaaaagaaccaactctggaacgggattataagtataactttgttggaagggaagaatgtctcaggaggaagcatgacagagatgtttgtccagttaaaactgggagatcagaggtataaaagtaagacactgtgtaagagtgcanatccgcagtggcaggaacagtttgactttcactacttctctgacaggatgggcattttggacattgaaatgtgcggaaaggacaacaaaaagcatgaggaacgtctgggcacgtgtaaagtggatatctcgggacttcctctgaagcaagccaactggctggagctgccactggacagctgtctggggctcttcctttgttgacacacttacaacctgtgcggagtttcccctctgaactggtggctggccctttcagacttctcgaagaaagagatacccacgacattggtaccaaca

SEQ ID NO: 58435 - DNA, 1576 bp, Homo sapiens
gctcttgtggcctctggcgggcctccagccagttagaccatttgaccagaacgtgtgcagctcagccagccacagaactggaatttttcaggagcagggggagcatggagtttggactttgctgagcaactgaagtggagcgcagagcttgctcgcttaggagagagcatcatggatggcaaacaagggggcatggatgggagcaagcccgcggggccaagggactttcctggcatcaggcttctttcaaacccattgatgggcgatgctgtgtctgattggtctcctatgcatgaagctgcaatccacggacatcagctgtctctgaggaacctcatcagccaggggtgggctgtgaacatcatcacggcagatcatgtttccccactccatgaagcctgtcttggaggtcatctctcttgtgtgaagattttattaaagcatggagctcaggtgaatggtgtgacagcagactggcacactccactgtttaatgcttgtgtcagcggcagctgggattgtgtgaatttgcttctgcagcacggagccagcgttcaacctgagagtgatctggcatcccccatccatgaagctgctaggagaggccacgtggagtgtgtcaactctcttatagcttatgggggcaacattgaccataagatcagccacctgggcactccactctatttggcttgtgaaaaccaacagagagcctgtgtcaagaagcttctggagtcaggagcggacgtgaaccaagggaaaggtcaggattccccacttcatgcagtggccaggacagccagtgaagagctggcctgcctgctcatggattttggagcggacacccaggccaagaatgctgaaggcaaacgtcctgtggagctggtgcctccagagagccccttggcccagctcttcttggagagagaagggcccccttctttgatgcagttatgccgccttagaattcggaagtgttttggaatccagcagcatcataagataaccaaactcgtcctcccagagggatctgaaaaacccagtttctcctacatctttaaatgcatctagggaatggattcacaaacgatgtgaaaacattattgagtgttgtagccactagaattttaaaatcaagttggatttatagagtttgactagttttttcgattagatttgtatttgttataaacttgtttatggagtttgactaattttttctattcaatttgtatttgttaaactcaagccagggtggaaagaccctgcatacgtttgtattattagttagaaggcatgaagacttttttccctgcttggagagtgtcataagttattgttttgcatatttactgcatgccaagcactttttgcatcatctaatttagccctcacagccactgggtcaagatgtccaattttccagagtaaggatagaggagtcaaattcaaatacaggttttctgacattaacttatgtgatgacttgatcgaggcaggcttttccagcatcactgtcctggttccatctctgctatatggaagaaaaaaagaaacataggcatggtcaatcaaa

SEQ ID NO: 58436 - DNA, 999 bp, Homo sapiens
ctgttctggcttcctgactttcctgccctgccaggcgggctttgggcggccagacggagaatactggctgggccttgaacccgtgtatcagctgaccagccgtggggaccatgagctgctggttctcctggaggactgggggggccgtggagcacgtgcccactatgatggcttctccctggaacccgagagcgaccactaccgcctgcggcttggccagtaccatggtgatgctggagactctctttcctggcacaatgacaagcccttcagcaccgtggatagggaccgagactcctattctggtaactgtgccctgtaccagcggggaggctggtggtaccatgcctgtgcccactccaacctcaacggtgtgtggcaccacggcggccactaccgaagccgctaccaggatggtgtctactgggctgagtttcgtggtggggcatattctctcaggaaggccgccatgctcattcggcccctgaagctgtgactctgtgttcctctgtcccctaggccctagaggacattggtcagcaggagcccaagttgttctggccacaccttctttgtggctcagtgccaatgtgtcccacagaacttcccactgtggatctgtgaccctgggcgctgaaaatgggacccaggaatcccccccgtcaatatcttggcctcagatggctccccaaggtcattcatatctcggtttgagctcatatcttataataacacaaagtagccacaaaaaaaaaaaaaaaaaaaaaaaaaaaggttttttttttaagggggccgaagttttttcccttttggggggggtaatttttatttggccccggcccggtttttaacacggggggacttggaaaaaaacttttttttttttgtgcccccccccccgcggttgtggggagaaacgaagtgctttgtggtcaggaaaacgacccctccggtgtgaaggaagatgaagtagggtgtgggttggctgcgccgcgcccc

SEQ ID NO: 58437 - DNA, 700 bp, Homo sapiens
gctcctcacgtcatcatatgatggaatctgcagaatttggccgtagtccagcacactggcgacttattggactggtgagcctgaagtgggccgcctcgtggagtcatggtggtgggagcagcctctgcacaatcgatgctggactacgatccaacgcaggctacaaggcgcagtcatcttctgcactacctggcagcactataaggtgggcacaggtgggcagaggcagggaaggggagggagcctgttctggcttcctgactttcctgccctgccaggcgggctttgggcggccagacggagaatactggctgggccttgaacccgtgtatcagctgaccagccgtggggaccatgagctgctggttctcctggaggactgggggggccgtggagcacgtgcccactatgatggcttctccctggaacccgagagcgaccactaccgcctgcggcttggccagtaccatggtgatgctggagactctctttcctggcacaatgacaagcccttcagcaccgtggatagggaccgagactcctattctggtaaggagaactcctattctggtgagaggataggggaggcgggactcctgttctggtgagggaatgaaaggaggtagggtaggtaagacgcccctctggtaagtataaggataagcaagcttttattccgtcaagagaacaaaggtcagga

SEQ ID NO: 58438 - DNA, 1162 bp, Homo sapiens
  misc_feature (1)...(1162): n = a,t,c or g
ggatgagagggagagacaacgtgtgtcttacacatctcccaacagccgacttagatgtgatccgttctcccagagggagcaggtttctttgaacttttcctttttatgtacagcatagtgctgagcagatcactgcactgtgcaggagttttaacgacagtcaggccaacggcatggaaggaccgcgggagaatcaggatcctcctccgaggcctctggcccgccacctgtctgatgcagaccgcctctgcaaagtcatccaggagcttgtggacacagagaagtcctacgtgaaggatttgagctgcctctttgaattatacttggagccacttcagaatgagacctttcttacccaagatgagatggagtcactttttggaagtttgccagagatgcttgagtttcaaaaggtgtttctggagaccctggaggatgggatttcagcatcatctgactttaacaccctagaaaccccctcacagtttagaaaattactgttttcccttggaggctctttcctttattacgcggaccactttaaactgtacagtggattctgtgctaaccatatcaaagtacagaaggttctggagcgagctaaaactgacaaagccttcaaggcttttctggacgcccggaaccccaccaagcagcattcctccacgctggagtcctacctcatcaagccggttcagagagtgctcaagtacccgctgctgctcaaggagctggtgtccctgacggaccaggagagcgaggagcactaccacctgacggaagcactaaaggcaatggagaaagtagcgagccacatcaatgagatgcagaagatctatgaggattatgggaccgtgtttgaccagctagtagctgagcagagcggaacagagaaggaggtaacagaactttcgatgggagagcttctgatgcactctacggcttcctggttgaatccatttctgtctctaggaaaagctagaaaggaccttgagctcacagtatttggtttttagagagccgtcatactggtttataaaagaaaactgcanactgaaaaagaaattgcccttcgattncccggcctggacacaacttttacttggaattgggcccccattttaaattccgctgggttgattccccatcttccgcggcttaa

SEQ ID NO: 58439 - DNA, 1908 bp, Homo sapiens
cctgcccacaacctcggccccagcctcggccccctccaatggcaactgctcaagctacacagaaacccagcatctgagtgtggtggggatcatgttcgtggcacagaccctgctgggcgtgggcggggtgcccattcagccctttggcatctcctacatcgatgactttgcccacaacagcaactcgcccctctacctcgggatcctgtttgcagtgaccatgatggggccaggcctggcctttgggctgggcagcctcatgctgcgcctttatgtggacattaaccagatgccagaaggtggtatcagcctgaccataaaggacccccgatgggtgggtgcctggtggctgggtttcctcatcgctgccggtgcagtggccctggctgccatcccctacttcttcttccccaaggaaatgcccaaggaaaaacgtgagcttcagtttcggcaaaaggtcttagcagtcacagactcacctgccaggaagggcaaggactctccctctaagcagagccctggggagtccacgaagaagcaggatggcctagtccagattgcaccaaacctgactgtgatccagttcattaaagtcttccccagggtgctgctgcagaccctacgccaccccatcttcctgctggtggtcctgtcccaggtatgcttgtcatccatggctgcgggcatggccaccttcctgcccaagttcctggagcgccagttttccatcacagcctcctacgccaacctgctcatcggctgcctctccttcccttcggtcatcgtgggcatcgtggtgggtggcgtcctggtcaagcggctccacctgggccctgtgggatgcggtgccctttgcctgctggggatgctgctgtgcctcttcttcagcctgccgctcttctttatcggctgctccagccaccagattgcgggcatcacacaccagaccagtgcccaccctgggctggagctgtctccaagctgcatggaggcctgctcctgcccattggacggctttaaccctgtctgcgaccccagcactcgtgtggaatacatcacaccctgccacgcaggctgctcaagctgggtggtccaggatgctctggacaacagccaggttttctacaccaactgcagctgcgtggtggagggcaaccccgtgctggcaggatcctgcgactcaacgtgcagccatctggtggtgcccttcctgctcctggtcagcctgggctcggccctggcctgtctcacccacacaccctccttcatgctcatcctaagaggagtgaagaaagaagacaagactttggctgtgggcatccagttcatgttcctgaggattttggcctggatgcccagccccgtgatccacggcagcgccatcgacaccacctgtgtgcactgggccctgagctgtgggcgtcgagctgtctgtcgctactacaataatgacctgctccgaaaccggttcatcggcctccagttcttcttcaaaacaggttctgtgatctgcttcgccttagttttggctgtcctgaggcagcaggacaaagaggcaaggaccaaagagagcagatccagccctgccgtagagcagcaattgctagtgtcggggccagggaagaagccagaggattcccgagtgtgagctgtcttggggccccacctggccaagagtagcagccacagcagtacctcctctgagtcctttgcccaagattgggtgtcaagagccctgtgttccattctggctcctccactaaattgctgtgtgacttcaggcaagacattgatcctctctcagcctttgcttgctagtctgaaccaaagagttgtttgggcatttgctgtgttggccatttcttgagcaagaggggtctttttcttcttcccccagccagccagctg

SEQ ID NO: 58440 - DNA, 1509 bp, Homo sapiens
gaaaagcgctggaccacatggtctcaaggatgtcattgtccgagatacatgagtttatgacccttactaaaatatattttatgttcttcagcaagagtactaaatttcaggaaacaaacacaattatttagattttattttctaattttggggactgtaactaataatgttatcagtagaaatttgaagaaaataacacatctctattttttaggtgtccctggcaaccttgtgtgtctatttcttactggatgaaggaaacattttaacagccactaaagtgttcacatcgatgtctttgtttaatattttaaggattcctctgtttgagttaccaaccgtgatctcagctgtggtccagacaaagatatccctgggccgtttggaagactttctcaacactgaggagcttcttcctcaaagtattgaaacgaactatacaggagatcatgctattgggtttacagatgcttctttctcctgggataaaacaggaatgccagttctaaaagaggctctgtggcttatgtttctcagcaggcctggattcagaattgcattttgcaagaaaacattctctttggctccatcatgaagaaagagttttatgagcaagtattggaagcctgtgctctccttccagatttggagcagttgccaaagggagatcaaactgagattggagaaagagtaaggaaactgtaatttatcatgtaaagaaatataatcccattcagctgtgctaataaaatgtttatggcctttttcttgaagtctcgaagagctatacaactataattttaaaaaattattatgtaattcctatgtaagagatggcagtattaaggacaagtaattatttataattgactgtttggaaaacagattaaaaatcagtcggaaattctgttgttagtatccacgtgggggaataaaagcccattaattagatcatcatacttttgttttggtggctggcacaatgcagttcactttctaaagagtgactaatagttttgtttattcctgtatctctggtacgcaaagtcagggctaaaacaggagcgaaagagcatcagtctccagcagtggcacccgagtccagattctaaagaagctctgataacaacactgttatgaacgtgccttctccacgtttgctcattcctgcttaagtggaacttgtttcccagtcgtctctctttgttctatttcattttcattgtgttagtaaatagtcattactctgctcagtgttttggatttaaaaaatatatatatcacgagccgaagtatgaaccacgagagattatctccaccccctgactaaaatctccattaattaaacatgaatgcaaaagtagcctctgcctacaattcatgtgtgccataaagatgaataaataatccttactgagtgctttgaatctctgaaaagagagcgagcatacaattgttagacatctttacacctgccctcatgttatctaataagcgtcgacgcggccg

SEQ ID NO: 58441 - DNA, 1619 bp, Homo sapiens
cccctgttgctctccctactggtgggcttcctggaagaggggcaggagccactaagccacggcctgctctatgctctggggctagccggtagggctgtgctgggtgctgtgctgcagaatcagtatgggtatgaggtatataaggtaacacttcaggcacggggggctgtgctgaacatcctgtactgcaaggctttacagctggggcccagccgccctcctactggggaggccctgaacctactaggcactgactctgaacggctgcttaactttgctgggagcttccatgaagcctggggcctgcccctgcaactggccatcaccctctacctgctgtaccagcaggtaggcgtggccttcgtgggtggtctcatcttggcactgctgctggtacccgtcaacaaagtgattgccacccgcatcatggccagcaaccaggaaatgctacagcacaaggatgcgcgggttaagcttgtgacagagctgctgagtggcattcgggtcatcaagttctgcgggtgggagcaggcactgggagcccgagtagaggcctgccgggctcgagagctggggcgactccgggtcatcaaatacctggatgcggcctgtgtatacctgtgggctgccctaccggttgtcatctccatcgttatcttcatcacctatgtcctcatggggcaccagctcactgccaccaaggtgttcacggccctggcactggtgcgaatgctcattcttcctctcaacaacttcccttgggtgatcaatggtctcctggaggccaaagtgtccttggaccggatccagcttttcctcgaccttccaaaccacaacccccaggcctactacagcccagatccccctgcagagccatctacagtattggagctgcatggagccttgttctcctgggacccagttggaaccagcctggagaccttcatcagtcatctcgaagtgaaaaagggtatgctggtgggcatcgtggggaaggtcggctgtgggaagagctccctgctggctgccatcgctggagagctccacagatgggaacaagtacaatgtggtggccatactctccactgagctcctgaacagatgctgcgtgggcatgtggcagtgcgggggctgtccaagggctttggcctggccacccaggaaccctggatccagtttgccaccatccgagacaacatcctctttgggaagacatttgatgcacagctgtacaaggaggtgctagaagcctgcgccctcaatgatgacctcagtatcctgcctgctggagaccagacagaggtgggggagaagggtgtcacccttagcggaggacagcgtgcccggattgcccttgctcgtgctgtctaccaggaaaaggagctctatctcctcgatgaccctctggccgctgtggatgcaaatgtggccaacccacctgctgcacaggtgcatcctgggcatgttgagttaccccacacggtgctctcaccccccgcactgagtacctgaaaagggctgacgcggtgctgctaatggaggccgggcgcctcatccgggctggacctccctttgagattctgcccctggtacaagctgtccccaagtcgacgcggccg

SEQ ID NO: 58442 - DNA, 2975 bp, Homo sapiens
ttcccgggtcgacgatttcgtgcaacgcctctgcccgacctcgctggggaaggctggcgctgctgcccggccggagccaggggcaggctgcgcaaaggcgacttagggagaccttgcgggccgccctgggtcgcgcctcccggatcggctcgcctcggctcgactggaggggaggaggaggagcaggccgagcgcattcgcgctggagcttgcgaggagcgcagggtggagcgcgccagccggggtcctcggatctggcccaggtgaggaattttaaattggaacaagagcaagaaaaaaacaaaatcttgtcagaagcactggagacgctggccactgaacatcatgaattagagcagtctctggtgaaaggctctccacccgccagcatccttagcgaggacgagttctatgatgcgctgtcagattccgagtccgaaaggtccctgagtagattggaagcagtgacagcacgctcctttgaagaggaaggagagcatttgggcagtagaaaacacagaatgtccgaagaaaaagactgtggtggcggagatgctctctccaatggcatcaagaaacacagaacaagtttgccttctcctatgttttccagaaatgacttcagtatctggagcatcctcagaaaatgtattggaatggaactatccaagatcacgatgccagttatatttaatgagcctctgagcttcctacagcgcctaactgaatacatggagcatacttacctcatccacaaggccagttcactctctgatcctgtggaaaggatgcagtgtgtagctgcgtttgctgtatctgctgttgcttctcagtgggaacggactggaaaacctttcaacccactgctgggagagacttatgaattagtgcgagatgaccttggatttagactcatctccgaacaggtcagccatcacccaccaatcagtgcatttcatgctgaaggattaaacaatgacttcatctttcatggctctatctatcccaaactgaaattctgggggaagagtgtagaagcagaacccaaaggaaccatcaccttggagctccttgaacacaatgaggcatatacatggacaaatcccacctgctgtgtgcataatatcattgtgggtaaactgtggatcgaacagtatggcaatgtggaaattataaaccacaagactggggacaaatgtgtgttgaattttaagccatgtggcctttttggtaaggaattacacaaagttgaaggctacattcaagataaaagcaaaaagaagctctgtgccctctatgggaagtggactgaatgtttatacagtgttgaccctgccacgtttgacgcttacaaaaaaaatgataagaaaaatacagaagagaagaagaacagcaaacagatgagcacctctgaggagttggatgaaatgccagtgccggattctgaaagtgtattcattatccctggaagcgttcttctatggcgaatagccccacggcctccaaattctgcccagatgtataattttactagttttgcaatggttttgaatgaagtagacaaagacatggagagtgtgattcccaagacagactgcaggttacggcctgacatcagagccatggaaaatggagagatagatcaagctagtgaagaaaaaaaacgacttgaggaaaaacaaagagcagcccgcaaaaacaggtccaagtcagaagaggactggaagacgaggtggttccatcaaggtcctaatccctacaatggagcacaggactggatttactctggcagctactgggacagaaattacttcaatttgcctgacatttattaaaatgcatacaagtcagggtgtttggctaatctacaaataagtcttaaacctatgtttttaaatttttttcccttggtttctacttatcttttaaaaaaaaaatgaaaaaacactcatgagataactgcatttcacccaacaaaagcagggtataaggcgatattggtgatgaaagtcttaggaaaaatgcataattttgctataaaatgtacttatttggaatactattttatatagaggtaagagaacactgctggggaatatgctttttatggttgctgttgccatatttactgaaggtttatacctaaatgtaactttagctttatggaactatatagtaatcccaaatcaagttattttgaatatttttatgctgtcatgcttgaatgttttagatgtaacctttgacatatttagaactctcctcctatacaatgtttattctcagatatagaggttatgtcattttataaagacttcattgataagatggcttttattcatactaatcctcccaatgttaccccttccatcttccaagaagaaaaaaaatgcctgaatattcagaatagatatttctgatttgaaaattctaaagaattaaactggaaaagtatttcatttacttagtgctctgaatttacttttacagttttctgcagtcagtatcattaaaatggttaagtttacatttgaactgaaaatatgtataaaatctagcaattcacaaaaatgccctagaaatatagattttaatcaccattacataatgacaaaccttgttaaatgcttccacttccagtggcaaatgccactagggaaagtaagttgcactcatgtaagtatcaaactatataaaaggaggccttgtgcatttcaagtttgcaaagtacctgtgtacttaaaatatgtgtggagacctactgtacagtagttttgcccctttaattggggcacattcatcttaaatcttatagtatttatccacccaaaccccagactgagatactgctcccaggggcctaggtagctgccagtccgtgattttaattgctgtcttgaagttaacaagtgttataatgaaataatctacctgatgctaaataaaggctttagaatgttaaaaaaaaaaaaaag

SEQ ID NO: 58443 - DNA, 759 bp, Homo sapiens
cgggggctttccagctcggccctgccgcgcctcaccgaggccgaaaggaggctgctcaagggcacggtcgacttctgcgcgctcaaccacttcaccactaggttcgtgatgcacgagcagctggccggcagccgctacgactcggacagggacatccagtttctgcaggacatcacccgcctgagctcccccacgcgcctggctgtgattccctggggggtgcgcaagctgctgcggtgggtccggaggaactacggcgacatggacatttacatcaccgccagtggcatcgacgaccaggctctggaggatgaccggctccggaagtactacctatggaagtaccttcaggaggtgctgaaagcatacctgattgataaagtcagaatcaaaggctattatgcattcaaactggctgaagagaaatctaaacccagatttggattcttcacatctgattttaaagctaaatcctcaatacaattttacaacaaagtgatcagcagcaggggcttcccttttgagaacagtagttctagatgcagtcagacccaagaaaatacagagtgcactgtctgcttattccttgtgcagaagaaaccactgatattcctgggttgttgcttcttctccaccctggttctactcttatcaattgccatttttcaaaggcagaagagaagaaagttttggaaagcaaaaaacttacaacacataccattaaagaaaggcaagagagttgttagctaaactgatctg

SEQ ID NO: 58444 - DNA, 2102 bp, Homo sapiens
  misc_feature (1)...(2102): n = a,t,c or g
gaccactctgctcccccgcctaagccatgcacctctgtgggagcaatgggctgctgacccagacagaccccaaggagcaacaaaggcagctgaagaagcagaagaaccgggcagccgcccagcgaagccggcagaagcacacagacaaggcagacgccctgcaccagcagcacgagtctctggaaaaagacaacctcgccctgcggaaggagatccagtccctgcaggccgagctggcgtggtggagccggaccctgcacgtgcatgagcgcctgtgccccatggattgtgcctcctgctcagctccagggctcctgggctgctgggaccaggctgaggggctcctgggccctggcccacagggacaacatggctgccgggagcagctggagctgttccagaccccgggttcctgttacccagctcagccgctctctccaggtccacagcctcatgattctcccagcctcctccagtgccccctgccctcactgtcccttggccccgctgtggttgctgaacctcctgtccagctgtcccccagccctctcctgtttgcctcgcacactggttccagcctgcaggggtcttcctctaagctcagtgccctccagcccagcctcacggcccaaactgcccctccacagcccctcgagctggagcatcccaccagagggaagctggggtcctctcccgacaacccttcctctgccctggggcttgcacgtctgcagagcagggagcacaaacctgctctctcagcagccacttggcaagggctggttgtggatcccagccctcaccctctcctggcctttcctctgctctcctctgctcaagtccacttctaacctggtcttcggagctgggttggccccttctttgggctcaggaagcagccttagcacacgggcctctcctccctcactactgggtgctgccctgcgtggctgaccagctggcccaggatttcacagtcgaaaaggaagccaccactgatgcctcccactgtgacaggccctgtcaccaccaatatcttatttcaacctcacagttgacctgagaaatcgagattatcactccactttttcagacaaggaaactgaggctcagggaagccaagtgacaagtccaaggtcacgaagactttcttggagcccgaaacaccaccctctgctcnctcctttctcctgtcctgggcccaaggcattctaaggggcttgaaaatcctgggaaaaccccgtggggccttgggtgttgaaaaaaaggggttttggccaatggccttccagaaggccaagaagaaaagggggctttctttccccactggtttcgggaattccaaggcccaagagcccatgccagtccccagaaaacccccaaccctaacttgggggcaggtcccagagtccaagccctggtgggtagaggcccaaccaaaagccctgaagtggactcttgcttcccctagtagtgttttcagtgccaagaaactgaaactgtgagctgaaattgggaagaggtatgaaagaggcccctctggtatttctacagcctgggtacccatacccacaccaaggcttttgggagattctgcagggtcagctttccaggctgttcccaaatagctccctgcctccccactgcccctaaagccacacgcaaaaaagccattcatctcataaacaaaaaggaagaggaaagaatgaggaaggcccctgcgcaaggttatttgcaggcagggatgggcttgtacctgacagcacccacccctgtgtggcccccaggccctcatcaccctcagacccctcctaagcagttccctcattgctctttggcctaggctgacagcaggaagagcagggcccatgcccgggtggaagttcagttttggtgtctgcttcaagagggggttttacactttgattccaggacaagctctttgaggcgggtgggggagagaaaccctggctcttcacccaggtttcacacacatgtaaattaagcactatgttagtatctaacacactcctgcgatacagaacacaagtcttggcacatatggatgggaaancaacgtanggtcaatcaaaagggcgcct

SEQ ID NO: 58445 - DNA, 981 bp, Homo sapiens
ggacatggttcaagcgctgcttagctgccaggcagatgtcaatctgcaggaccatgatggatcctcggccctcatgctggcctgtcaccatggcaacgtggacctggtgcggctgctcctggcacacccagcctgcgacagcagcctgactgacaaggctggccgcacagctttgtccatcgctctgaagtcacccacccatatggaaattgctgggcttctgagagcccacgcggagcagggcaggtccctggggctgtaggggctgcagaagaactggccgtggggaacaaaagccttcttctctggactcctccctcgcccttgaagagggcagaggtcacaggccagagagccacccttctagagaagaaactatgtcaaatatgcacatacattcctgttgtataattctgctcattaggatgctttgtagtttttgccttaggccaagcctgaaaactacacgggcttcagagcagggttcaaggtgcaaggtgaggggtacgtcggtgtcatccaaacatccaaaacatcttcagccttgaattcctcatgactctaccctctgtaacattgtgtagcaagcaggcaggcaggagcacattagcacattagaaaagcaatactttttacatggaattttacagtgcactatctttctgttttttaagcaagtgtatacaaatatgtcccattgatatgcatgtctatagatgggaggggatttaagccaaccccctggcaagcattctgtaggggaccctagaagaatcaccgtgcagactggtgaaactgaacaagcaccatttgggagctttgtttcgatggggttgacagagaaatcttaaaatctgacagggtagaagagcactttggcatcaatgccatatgtacagtcttgactattttttcccttgagtcatctagtggctcccatttgcctccaggaaatttgaattaattaagaaaattattagc

SEQ ID NO: 58446 - DNA, 1690 bp, Homo sapiens
  misc_feature (1)...(1690): n = a,t,c or g
cggacgcgtggggtgtatatcttgcatccaaagccagagggaaccacaatgactagtaaaacggtggtctcaatgcccacttagcctctgcctctgaatttgaccatagtggcgttcagctgatagagcgggaagaagaaatatgcattttttatgaaaaaataaatatccaagagaagatgaaactaaatggagaaattgaaatacatctactggaagaaaagatccaattcctgaaaatgaagattgctgagaagcaaagacaaatttgtgtgacccagaaattactgccagccaagaggtccctggatgccgacctagctgtgctccaaattcagttttcacagtgtacagacagaattaaagacctggagaaacagttcgtaaagcctgatggtgagaatagagctcgcttccttccagggaaagatctgaccgaaaaagaaatgatccaaaaattagacaagctggaactacaactggccaagaaggaggagaagctgctggagaaggatttcatctatgagcaggtctccaggctcacagacaggctctgcagcaaaactcagggctgcaagcaggacacactgctcttagccaagaagatgaatggctatcaaagaaggatcaaaaatgcaactgagaaaatgatggctcttgttgctgagctgtccatgaaacaagccctaaccattgaactccaaaaggaagtcagggagaaagaagacttcatcttcacttgcaattccaggatagaaaaaggtctgccactcaataaggaaattgagaaagaatggttgaaagtccttcgagatgaagaaatgcacgccttggccatcgctgaaaagtctcaggagttcttggaagcagataatcgccagctgcccaatggtgtttacacaactgcagagcagcgtccgaatgcctacatcccagaagcagatgccactcttcctttgccaaaaccttatggtgctttggctccttttaaacccagtgaacctggagccaatatgaggcacataaggaaacctgttataaagccagttgaaatctgaatatgtgaacaaatccaggcctctcaaggaaaagacttcaaccaggcttccttgtacccacaggtgaaaaatgtgagcataatacttctaatattattgataagtaaggtaaccacaattagtcagcaacagagtacaacagggtttctatttacccaccaactactatacctttcatgacgttgaatgggacatagaactgtcctacatttatgtcaaagtatatatttgaatcgcttatattttctttttcactctttatattgagtacattccagaaatttgtagtaggcaaggtgctataaaaatgcactaaaaataaatctgttctcaatgaagtacggaaatggaaaaaaaaaaaaaaaaaaaaaaaaaaggtttttttattaagggggcccaagcttttttccttttagggggggttatttttatttgggcctggcccgttttttaaaaaggggggaatgggggaaaaaaccttttttttnnttnttctttttttccccaccccccccccacaatttaaacctctccaacaaaaataaaactttttaacctttatttttgtccaaaccacaccccaaaaattttttaatacaaaaaatttttnnnccccncnccncnnnnccctc

SEQ ID NO: 58447 - DNA, 1032 bp, Homo sapiens
ttcaataccctgtctcaaaataaataaataataaaagattacaaattgggaaatattttacactgaatgacaataaaaaaaagactgcacatcaaaacttgtgggtacagctaaggctgtatttagagggaaatacatagccttcggtacatacatttaaaaagaaagggaaaggacaagatccacaggaaggtataagacagcaagatggaacagactggcccaactcacctcatcacctcaatgtagcccttggcagcagccacgtgcagggcagaggcgcctgtgcgggggtgccgggcctctggcatggcgcccccattcagccagcacctcgtgtcatgaaggagcaattcctcttctgcccgcttggctgcctccacatccacacctaggaggataagaggcacgaggtaggactcacaccccatgacctgaaatacccagggtcatacactgggctggccagggttcagcccagtgacttgcccagagctcttccccctgctcccctctgagactcaggaggcccagactagcccagttgtttcccaactgtactccatgcagtcgtgtgtcccactcagggtctctgagtcagcgctaagcactgggaaaacggagatcacaggcctttccccatttcaaccagaaattcaccgtatttttattatttttaatataaaaccatggccgggcgcggtggctcacgcctgtaatcccagcactttgggaggccgaggcgggcggatcacgaggtcaggagatcgagaccatcctggctaacacggtgaaaccccgtctctactaaaaatacaaaaaattagccgggcgtagtggcgggcgcctgtagtcccagctacttgggaggctgaggcaggagaatggcgtgaacccgggaggcggagcttgcagtgagccgagatcccgccactgcactccagcctgggcgacagagcgagactccgtctcaagagaaaaaaaaaatttagttttccagtatgagttttctgatattcgcaattatatttt

SEQ ID NO: 58448 - DNA, 1487 bp, Homo sapiens
ccttgaaattggaattaacccctgcccaatctatgtcagggacaatctgtaagtatcaaacaaacaaacaaataataaaaaggaatgcaagtgaacctgtaagactccactgtgctaatgcctatattgtttctctgatttcagtgcttccctcattcaccaagacccccatggatctcaccatccgagctggggccatggcacgcttggagtgtgctgctgtggggcacccagccccccagatagcctggcagaaggatgggggcacagacttcccagctgcacgggagagacgcatgcatgtgatgcccgaggatgacgtgttctttatcgtggatgtgaagatagaggacattggggtatacagctgcacagcccagaacagtgcaggaagtatttcagcaaatgcaactctgactgtcctagaaacaccatcatttttgcggccactgttggaccgaactgtaaccaagggagaaacagccgtcctacagtgcattgctggaggaagccctccccctaaactgaactggaccaaagatgatagcccattggtggtaaccgagaggcacttttttgcagcaggcaatcagcttctgattattgtggactcagatgtcagtgatgctgggaaatacacatgtgagatgtctaacacccttggcactgagagaggaaacgtgcgcctcagtgtgatccccactccaacctgcgactcccctcagatgacagccccatcgttagacgatgacggatgggccactgtgggtgtcgtgatcatagccgtggtttgctgtgtggtgggcacgtcactcgtgtgggtggtcatcatataccacacaaggcggaggaatgaagattgcagcattaccaacacagatgagaccaacttgccagcagatattcctagttatttgtcatctcagggaacgttagctgacaggcaggatgggtacgtgtcttcagaaagtggaagccaccaccagtttgtcacatcttcaggtgctggatttttcttaccacaacatgacagtagtgggacctgccatattgacaatagcagtgaagctgatgtggaagctgccacagatctgttcctttgtccgtttttgggatccacaggccctatgtatttgaagggaaatgtgtatggctcagatccttttgaaacatatcatacaggttgcagtcctgacccaagaacagttttaatggaccactatgagcccagttacataaagaaaaaggagtgctacccatgttctcatccttcaaaagaatcctgcgaacggagcttcagtaatatatcgtggccttcacatgtgaggaagctacttaacactagttactctcacaatgaaggacctggaatgaaaaatctgtgtctaaacaagtcctctttagattttagtgcaaatccagagccagcgtcggttgcctcgagtaattctttcatgggtacctttggaaaagctctcatgagacct

SEQ ID NO: 58449 - DNA, 592 bp, Homo sapiens
gacggccccacccacgcgtccgtccacgcgtccggttgtatctataaaaactttgttagaatacattttgtaagagtatttcaactatggataatgttgattggataatgcacatctcacttacaagcagtactcatagtttaatatccatgtaacggggcatcaatatattgctatataaatatgtctgtgtgcatataagtgaaaagtggtcaaacaagagtgatgacagctgtctaaaggtttttttattcattttatataaaaactgttatggaaagaccaaaatgtttatgaactattcttatgtaaatttacaattgtcctttactgtacttttttgtttacagtatagtaccttattttctgctgtgttaagtgggtgtcaaactccaagaagacatacactttctataacttctattgaagatattggaatttccaatttttcatgtgtactatgttagaaaatgctttcgattttatttttaaatctaacatcggatggcttttccggagtgttgtaaaaacttcaatcatacataaaacatgttcttacaaaaaaaaaaaaaaggggcgcccttttaaaaga

SEQ ID NO: 58450 - DNA, 1064 bp, Homo sapiens
agctttacggagcttttgctttttctgccaacttcacagattctgttacaactgggaggcagattaatgactatttgagaaggcaaacatacgggcaagtcgtggactgcctcccggagttcagccaggacacgttcatggttcttgccaattacatcttcttcaaagccaagtggaagcaccctttcagtcgctaccagacccagaagcaggaaagtttctttgtggatgagaggacttctctccaggtccccatgatgcaccaaaaggaaatgcacagattcctctatgaccaggatttggcttgcaccgtcctccagatagaatacagaggaaatgccttggcgctgctggtcctccctgacccggggaaaatgaagcaggtggaggctgctctgcagccacagaccctgagaaaatggggccaattgctcctgcccagtctgttggatttgcacttgccaaggttttcaatttctggaacatataacctggaagacatacttccccaaattggtctcaccaacatactcaacttagaagctgacttctcaggagtcactgggcagctcaacaaaaccatctccaaggtgtcacacaaggcgatggtggacatgagtgagaaggggaccgaggccggggctgcttcaggcctcctctcccagcccccatctctgaacaccatgtcagacccacatgcccacttcaacaggcctttcctcttgctcctttgggaggtcaccacccagagcttactcttcctgggaaaagttgtcaacccagttgcagggtaaccatggtgggaggccaggagttatcttatctcatcctggaccaaacagataggccagaaccagcctgcatcctggggctgctatgtggttcagttaatcagtgtgccaagattctaataaagttgaccttgggttctgtgaaaaaaaaaaaaaaaaaaaaaaaaaaaaaaattttttttttaaggggcccgaagttttttccttttaagggggggtaattttaatttggccctggcccgttttttaaaacggggggaggggaaaaaaaaa

SEQ ID NO: 58451 - DNA, 1212 bp, Homo sapiens
cggacgcgtgggcggacgcgtgggcgaaggtcaccaagcacctgctctcaaaccctgtgttcacctgcatcatcctggccgcctgcatggagattgcagtggtggctggcttcgctgcctttttggggaagtacctggagcagcagtttaacctcaccacctcttctgccaaccagctgcttgggatgactgcgatcccgtgtgcttgtctgggtatcttcctgggaggtcttttggtgaagaagctcagcctgtctgccctgggggccattcggatggccatgctcgtcaacctggtgtccactgcttgctacgtctccttcctcttcctgggctgcgacactggccctgtggctggggttactgttccctatggaaacagcacagcacctggctcagccctggacccctactcgccctgcaataataactgtgaatgccaaaccgattccttcactccagtgtgtggggcagatggcatcacctacctgtctgcctgctttgctggctgcaacagcacgaatctcacgggctgtgcgtgcctcaccaccgtccctgctgagaacgcaaccgtggttcctggaaaatgccccagtcctgggtgccaagaggccttcctcactttcctctgtgtgatgtgtatctgcagcctgatcggtgccatggcacagacaccctcagtcatcatcctcatcaggacagtcagccctgaactcaagtcttacgctttgggagttctttttctcctccttcgtttgttgggcttcatccctccacccctcatcttcggggctggcatcgactccacctgcctgttctggagcacgttctgtggggagcaaggcgcctgcgtcctctacgacaatgtggtctaccgatacctgtatgtcagcatcgccatcgcgctcaaatccttcgccttcatcctgtacaccaccacgtggcagtgcctgaggaaaaactataaacgctacatcaaaaaccacgagggcgggctgagcaccagtgagttctttgcctctactctgaccctagacaacctggggagggaccctgtgcccgcaaaccagacacataggacaaagtttatctataacctggaagaccatgagtggtgtgaaaacatggagtccgttttatagtgactaaaggagggctgaactctgtattagtaatccaagggtcatttttttcttaaaaaaaaaaaaaagg

SEQ ID NO: 58452 - DNA, 903 bp, Homo sapiens
  misc_feature (1)...(903): n = a,t,c or g
gtctaaaagccctgatgaatacgcagtatggcttggaaagaattatgagtgaggagaggagcctttccttattggccaaagccgtggatcccagacaccccaatatgatgacagatgtggttaaacttctctctgcggtatgcattgtaggggaagaaagcatccttgaagaagttttagaagctttaacttcagctggtgaagaaaaaaaaattgacagatttttttgtattgtggaaggcctccggcacaattcagttcaactgcaagtagcttgtatgcagctcatcaatgccctggttacatctcctgatgatttggatttcaggcttcacatcagaaatgaatttatgcgttgtggattgaaagagatattgccaaatttaaaatgcattaagaatgatggcctggatatccaacttaaagtctttgatgagcataaagaagaagatttgtttgagttatcccatcgccttgaagatattagagctgaacttgatgaagcatatgatgtttacaacatggtgtggagcacagttaaagaaactagagcagagggatattttatttctattcttcagcatcttttgctgattcgaaatgattattttataaggcaacaatacttcaaattaattgatgagtgtgtatcccacattgtattgcatagagatggaatggatccaaactttacatatcgaaaaagacttgatttagaatttacccagtttgtagacatttgcctagatcaagcctaactagtagaagtttgagagaaagcatcagaactttacaagaaatttgaaaaagagtttaccgacccaccaggaaactcaagctgaatttgcagannaaagaagccaagattaatgagctttcaaacagagctacaaagcttttaaa

SEQ ID NO: 58453 - DNA, 1218 bp, Homo sapiens
agtatatataggtttttcttctttgactctttccatgtaagagatttccccaaaatgtccatctcagctaatctcttgctatgctctgcaccccgtaattttaactcatgtctttatgacttccagactatttgctctgctgaactccagcgtcacttgcctggtggacagcttcaggttcaaggcccacttgctcctactcctcctcactgtcgttgaccttggcttgacttgagtcctcatcagctctcccttcctatggcttcctaactggtcttgtctgtcctcttccatcagtaaactgtcttattcacagggtgatatggtttggctgtgtccccacccaaatctcatcttgagttgtagctcccacaattcccacatgttgtgggagggacctggtgggaggtaattggggacgggtctttcctgtgctgttctcgtgatagtgagtaaatctcacaagatctgatggttttataaaggggtgtttccctgcacaagctctcttctcttgtcttctgccatgtgagacatgcccctcaccttctgccacggttgtgaggcctccccagccacgtggaactgtaagttcattaaacctccttcttttgtaaaaaaaaaaaaaaaaaaaaaaaaaaaaaaaaaaaggttttttttttaaggggccccaacttttttcctttttgggggggttattttttttttggccccgcccctcttttaacaaccccggggggggaaaaaaaccccccccccccccgctccccgccttttctccccgggggatattttgtcccgggcccctccccccccccccctttcttggggtagcggccccccccctccccaaacctatagggcgccgcccccccttcacaacaatctaccaccgcccccctctactctcacccgtccctggcgggggtgaaccacaacaccccgttacgtcgcccgctgactttctcgctctccccctcccaccaatccttttttgggtggcccgccacacgaaaaaccctcccccctccatcgccaactattctccccccccccttccctctctatttcctcccccccccacctatttttttccccccatcctccccctcattccgggggggggaggatcctctcttggtggggccacaaccctacattccgcgcccgaaaaaattccaaaaaaaggggggggaaacataaaattttcgccgcaag

SEQ ID NO: 58454 - DNA, 1264 bp, Homo sapiens
tcacaatttaggaactggtatgttgatgagccttcctgcggcagcgaggtctgcgtgggcatgtaccatcagccatcggcacccgctggcatcggaggcccctacatgttccagtggaatgatgaccggtgcaacatgaagaacaatttcatttgcaaatattctgatgagaaaccagcagttccttctagagaagctgaaggtgaggaaacagagctgacaacacctgtacttccagaagaaacacaggaagaagatgccaaaaaaacatttaaagaaagtagagaagctgccttgaatctggcctacatcctaatccccagcattccccttctcctcctccttgtggtcaccacagttgtatgttgggtttggatctgtagaaaaagaaaacgggagcagccagaccctagcacaaagaagcaacacaccatctggccctctcctcaccagggaaacagcccggacctagaggtctacaatgtcataagaaaacaaagcgaagctgacttagctgagacccggccagacctgaagaatatttcattccgagtgtgttcgggagaagccactcccgatgacatgtcttgtgactatgacaacatggctgtgaacccatcagaaagtgggtttgtgactctggtgagcgtggagagtggatttgtgaccaatgacatttatgagttctccccagaccaaatggggaggagtaaggagtctggatgggtggaaaatgaaatatatggttattaggacatataaaaaactgaaactgacaacaatggaaaagaaatgataagcacaatcctcttattttctataaggaaaatacacagaaggtctatgaacaagcttagatcacgtcctgtggatgagcatgtggtccccacgacctcctgttggacccccacgctttggctgtatcctttatcccagccagtcatccagctcgaccttatgagaaagtaccttgcccacgtctggcacatattagagactcaataaatgtcacttgggtgggtgtatctaaattttaaaggacagagctttacctggcagtgataaagatgggctgtggagctttgaaaaccacctctgtgtttcttgccctatacagcgccccatattattttacagacagaaaatccacaatctttttttagcccacctattggaacacagggtgggctgtgcctcggcaaatttcatatatggtttttttcaaagaataaaatcccatatagagccggaaaccaaaaaaaaa

SEQ ID NO: 58455 - DNA, 1093 bp, Homo sapiens
gcatctcaagatccccacaaacgtgggcaaggcctgctttgggcccaccaaactgagccccatctccgtcctctacaaggatgacatgggggtgcccaccctcaagtaccattacgagggcatgagcgtggcagagtgtgggtgcaggtagtatctgcctgcggggctggggaggcaggccaaaggggctccacatgagaggtcctgcatgcccctgggcacaacaaggactgattcaatctgcatgccagcctggaggaggaaagggagcctgctctccctccccacaccccacccaaagcatacaccgctgagctcaactgccagggaaggctaaggaaatggggatttgagcacaacaggaaagcctgggagggttgttgggatgcaaggaggtgatgaaaaggagacagggggaaaaataatccatagtcagcagaaaacaacagcagtgagccagaggagcacaggcgggcaggtcactgcagagactgatggaagttagagaggtggaggaggccagctcgctccaaaacccttggggagtagagggaaggagcaggccgcgtgtcacacccatcattgtatgttatttcccacaacccagttggaggggcatggcttccaatttagagacataaaacacaggcagatcaagtagcattgatcaatggcatgattccaactcagatttgtgggacaccaaagcccaggatcttcccaagtgccctgctgcagtttagcaggtcctctccagctaaagagcagtgagacattgggagcccaggagtgttgaggccaggccaggctgaggcccatcagtcacaggtgtgactgggctgcttgtcacacacagggcgtggtctggccactgttgccagtgctcactcagcggccacatgctttttaatatgacccctgaggcactgaaaaataaccccaggccaactgcaggatagagagagaggtcaggacagcagccctgtgggctgcatgatacactgtggcttgggaggttatttttttttggacccctggtgcagtgctcccacggccagtggtgcacacagggccatttcacttgtccatagac

SEQ ID NO: 58456 - DNA, 3012 bp, Homo sapiens
tcccgggtcgacgatttcgttgcagctgcaggcagctcccggatccctgtgtgcgctccgggcggaggatgagagtgtcttactgcttaggccagacagagagctgagcaaccgctctgtctatgggatgtttccattctggtatggtcactacccctatcaagtggctgagtatgatcagtgtccagtgtctggcccatgggactttcctcagcccctcattgacccaatgccccaagggcattcgagccagcgttccattatctggaggccctcgttctctgaaggcacggaccttttcagctttttccgggacgtgggcctgaaaatactgtccaatgccaaaatcaagaagccagtagattgcagtcacagatctccagaatacagcactgctatgggtgcaggcggtggtcatccagaggcttttgagtcatcaactcctttacatcaagcagaggattctcaggtccgccagtacttcccagagacctggctctgggatctgtttcctattggtaactcggggaaggaggcggtccacgtcacagttcctgacgccatcaccgagtggaaggcgatgagtttctgcacttcccagtcaagaggcttcgggctttcacccactgttggactaactgctttcaagccattctttgttgacctgactctcccttactcagtagtccgtggggaatcctttcgtcttactgccaccatcttcaattacctaaaggattgcatcagggttcagactgacctggctaaatcgcatgagtaccagctagaatcatgggcagattctcagacctccagttgtctctgtgctgatgaagcaaaaacccaccactggaacatcacagctgtcaaattgggtcacattaactttactattagtacaaagattctggacagcaatgaaccatgtgggggccagaaggggtttgttccccaaaagggccgaagtgacacgctcatcaagccagttctcgtcaaacctgagggagtcctggtggagaagacacacagctcattgctgtgcccaaaaggaaaggtggcatctgaatctgtctccctggagctcccagtggacattgttcctgactcgtccaaggcttatgttacggttctgggagacattatgggcacagctctgcagaacctggatggtctggtgcagatgcccagtggctgtggcgagcagaacatggtcttgtttgctcccatcatctatgtcttgcagtacctggagaaggcagggctgctgacggaggagatcaggtctcgggcagtgggtttcctggaaatagggtaccagaaggggctgatgtacaaacacagcaatggctcatacagtgcctttggggagcgagatggaaatggaaacacatggctgacagcgtttgtcacaaaatgctttggccaagctcagaaattcatcttcattgatcccaagaacatccaggatgctctcaagtggatggcaggaaaccagctccccagtggttgctatgccaacgtggggaatctccttcacacagctatgaagggtggtgttgatgatgaggtctccttgactgcgtatgtcacagctgcattgctggagatgggaaaggatgtagatgacccaatggtgagtcagggtctatggtgtctcaagaattcggccacctccacgaccaacctctacacacaggccctgttggcttacattttctccctggctggggaaatggacatcagaaacattctccttaaacagttagatcaacaggctatcatctcaggagaatccatttactggagccagaaacctactccatcatcgaacgccagcccttggtctgagcctgcggctgtagatgtggaactcacagcatatgcattgttggcccagcttaccaagcccagcctgactcaaaaggagatagcgaaggccactagcatagtggcttggttggccaagcaacgcaatgcatatgggggcttctcttctactcaggatactgtagttgctctccaagctcttgccaaatatgccactaccgcctacgtgccatctgaggagatcaacctggttgtaaaatccactgagaatttccagcgcacattcaacatacagtcagtcaacagattggtatttcagcaggataccctgcccaatgtccctggaatgtacacgttggaggcctcaggccagggctgtgtctatgtgcagacggtgttgagatacaatattctccctcccacaaatatgaagacctttagtcttagtgtggaaataggaaaagctagatgtgagcagccgacttcacctcgatccttgactctcactattcacaccagttatgtggggagccgtagctcttccaatatggctattgtggaagtgaagatgctatctgggttcagtcccatggagggcaccaatcagttacttctccagcaacccctggtgaagaaggttgaatttggaactgacacacttaacatttacttggatgagctcattaagaacactcagacttacaccttcaccattagccaaagtgtgctggtcaccaacttgaaaccagcaaccatcaaggtctatgactactacctaccagatgaacaggcaacaattcagtattctgatccctgtgaatgaggataggagctggaaactcaattagtcctctgtgacattactggagggtggaacattcttctgtcgcttgaagcagaactcattcaatcaaataatttaatttctctgactagtatatgggtaacaaatgaatatgtctgaacctcagctataatactttctactacctttgcaaggagatgggataggaacaatcactcagaggaggcgttgcatggacagggtcatagggggaagaaagtgggttagctggtttatttagccatttcagggggctcttcacaagaggagacggtggtagagggtgaactagagaagattagaatggcttcctaggccggatgcgtggctcacgcctgtaa

SEQ ID NO: 58457 - DNA, 1031 bp, Homo sapiens
gcccagggagtgacccctgccaggtgcagatacaaaccagacacggtctgtggctactttgtgttattataagatatgagctcaaaccgagatatgaatgaccttggggagccatctgaggccaagatattgacgggggggattcctgggtcccattttcagcgcccagggtcacagatccacagtgggaagttctgtgggacacattggcactgagccacaaagaaggtgtggccagaacaacttgggctcctgctgaccaatgtcctctagggcctaggggacagaggaacacagagtcacagcttcaggggccgaatgagcatggcggccttcctgagagaatatgccccaccacgaaactcagcccagtagacaccatcctggtagcggcttcggtagtggccgccgtggtgccacacaccgttgaggttggagtgggcacaggcatggtaccaccagcctccccgctggtacagggcacagttaccagaataggagtctcggtccctatccacggtgctgaagggcttgtcattgtgccaggaaagagagtctccagcatcaccatggtactggccaagccgcaggcggtagtggtcgctctcgggttccagggagaagccatcatagtgggcacgtgctccacggccccccccagtcctccaggagaaccagcagctcatggtccccacggctggtcagctgatacacgggttcaaggcccagccagtattctccgtctggccgcccaaagcccgcccacaggcttggtggggaccgcagggtgacctgcaggcatgggagaagccatgggctcctgctgtctctgggtctggtctctctggggctctggggctgggtccagcatcctactggtgtcactggtgctacccacaagacggaccggaaccacaggcaccagtgggggtggcggcaggacctgctgctgcccgcccgcgcctcccgggcacaggcgctccaggcgggcgatgagactgctctgctgggacgaaatcgtcgcccgggaa

SEQ ID NO: 58458 - DNA, 1603 bp, Homo sapiens
cggccgcgtcgacggtaaagtggttgcctcttggcatctgttgaatgattgtgtaggatagttgaccattaatgtctgcatcagggtcatgtgcagtcactgaaatgacagatgtaccaatgggaatgttctcaacaatagacttgaaaatatctccaggaggaaagctaggaggattgtcattaaagtccctcacgtgaataaccactgacattgtagatgaacgaggaggtcttccttggtcttttgctgttatatttaatttatacaaagactgtgtttcaaagtccagttttttggcaagaaaaatactcccagtgtttgggctaatgctaaaagttccgtggttgttagtcccagtaatactgtaatataaatcagcattgtcacctgaatcggaatcagttgcagtaacagaggacacgagttcaccaattctcatgttttccaaaacatcaacaaagagtgttgatttagggaaagaaggggtattgtcattttcatctaaaatatcaatatttaaagtacacgttgaattgagggggattgtccctgaatccactgcttgaattacaagggaataggcaggtgttgcttcatagtctaatttgccaattagtgttacctgaccagaggtactgtctatagcaaactgtctttcttcatttccttttattatagaatagtgaataagtccattattaccttcatcaacatctgaggcagatactcttaacacttgtgtcagattggctgctgattctgatattgtagcttggtaaaagtcttttaaaaatttgggagcattatcatttatatccttcatgtaaacatgtacagtggcctgatccttgagaggctgagggatcccctgatctgttgctatgactgtaaagctaaacacagcagtccctctccgcctcataagagactccctgtcaaactgatgagtatttgtaatttccccactgatggcatgcaactcaaaatctggctgcaccatttcaaaagaataccttacttctccatttggcccaaagtctttatctacagcacttactttgcccacaaacgacccagccctctgctcttcttcgaagtaaaatgtgtaattggtactgttaaaaagaggtctgttatcatttacatcttctaaaattacagtaacattcacagtagcactaaggggttccactgctctgtcagaagcaacaaccattaaaacatatctgtcttgaagttcacggtccagttcactttttatatacaattgaccatctgggaatatgccaaaagcatcccctgtatttccttcagcaatggtgtatgcaatttcaccatttgctcctgaatccttatcagaagcttgtactttaaagaatcgagaattcacaggttctgactcagaaagggtgacttcataagagagttggtcaaacactggtgaattgtcatttacatcatggacataaactgttaagatgacactagaggagagctgtgggacacccatgtcagatgccaagatctctatttggtaggagccagcatgaacatccaggggcccaagcagactaatagtgccattcttttcattgatagc

SEQ ID NO: 58459 - DNA, 1958 bp, Homo sapiens
  misc_feature (1)...(1958): n = a,t,c or g
ccaacatggatttgatcaacctgctcacgctttccctggacctctatcacactgaagatgatatttacaaactgtcactggtgctggagcctagaaattctaaatcgcagcctacctcccctacgacgcccaacaagcctgtggtacccctggagtgggcattaggggtgatgccaaagccagaccccacggtcatcaacaagcacataaggaaattagtggagtctgtatttagaaactatgatcacgaccatgatgggtacatttcccaagaggactttgaaagtatagctgccaattttcccttcttggattccttctgtgttctggacaaagatcaggatggcctaattagtaaagatgaaatgatggcttacttcctgagagctaaatcccaactacactgtaaaatgggaccaggatttatccacaattttcaggagatgacctatctcaagccaaccttctgcgaacactgtgcgggatttctctggggcataatcaagcaaggatacaaatgcaaagactgtggagccaattgtcacaaacagtgcaaagacctcctggttctggcctgcaggagatttgcccgggcgccctccttgagcagtggtcatgggtcactgcctggaagcccctcgctgcccccagcgcaggatgaggtgtttgagttccctggagtcactgctggacacagggatttagacagcagagccatcacactggttacaggctcttctcgcaagatctctgtgaggctacagagggccaccaccagccaggccacccagactgaacctgtctggtcagaggctggctggggggactcggggtcccacaccttccctaaaatgaaatccaagttccatgacaaagcagcaaaggacaaaggctttgccaaatgggaaaatgagaagcccagggtgcatgctggtgtggatgttgtagaccggggcacggagtttgaacttgaccaggatgaaggagaagagaccacacaggatggtgaggatggctgacttcaggctgcggaaactgaaggcaataatgttggcttttggaaggggcaagacgagaaactctgaagaaagctctgactctcaggaagttatctggaaagatacctggatgtttactgccttgggacactgtgggatctccatgtttggactatgggacagagaattgaccctaactaactatgaactatttatttcctcctcccctacccctagttaagtgccacaaagactgtgttatgtagtcagtacttttctcatgtatctttctctagaccatttatatacgggtgaaatgaaagcttttttgcatgtacttgatactcagtctgtaaactcagacttcgctttttttgtgagactatcctttcaatatttttataaacttttgtgtgtgctgtggcagggaacagttaacaaggagtttatttagaggggtttttttcattttttgtttttcttgttttgttttgttttgttcttcttggtgtgctttttggatgggaccagaacttaacattttcctgaggactaggaagctcatcagacactggaatgcagtgattcttctaatgatggtcaactgcaaggagaaactgtttacatccttcccactacacagttgctatgatatgtaacaagtcacacatgtatatatcacacaagtcttaccaattctgcgtcactaggaagctatagcatggtcgtgaaagctctcctaatacttacttaaatagccatggaagaaaattatgcttgtcccttctgactgggttaagccatctttcttaagattcctgaagtagaaatagcaattaagaaattaattcaagttttgacggttaacatttagcagaaaaacaaaccattgaataagctactaggtgaaatgcaaaacaaccatcaatttttttaatctcaatcgcanggtccatcaaa

SEQ ID NO: 58460 - DNA, 1919 bp, Homo sapiens
tttcgtgcgggacttccgtgttggcgggattctgaacgctgccatggctcagaccgtgcagaatgttacattgtcgctcactctgcccatcacgtgccacatttgcttggggaaggtacgtcagcctgtcatatgcatcaacaaccatgtattttgttcgatttgtattgatttgtggttgaagaataatagccagtgtccagcttgcagagtccccatcactcctgaaaatccttgcaaagaaattataggaggaacaagtgaaagtgaacctatgctaagccatacggtcaggaagcatcttcggaaaactagacttgaattactacacaaagaatatgaggacgaaatagattgtttacagaaagaagtagaagagcttaagagtaaaaatctcagcttggagtcacagatcaaaactattctggatcctttaaccttggtgcagggcaaccaaaatgaagacaaacatctagtcacagataatccaagtaaaattaacccagaaactgtagcagagtggaagaaaaaactcagaacagctaatgaaatctatgaaaaagtgaaagatgatgtggataagctaaaggaggcaaataaaaaattgaaattggaaaatggtggtctggtgagggagaatttacgactgaaggctgaagttgataacagatcacctcaaaagtttggaaggtttgcagttgctgctcttcagtccaaagtagaacagtatgagcgtgaaaccaatcgcctcaagaaagccctggaacgaagtgataagtatatagaggaactagaatctcaagttgcacagctaaaaaattcaagtgaagagaaagaagctatgaattccatttgccagacagcactttctgcagatggcaaagggagcaaaggcagtgaggaggatgtggtgtcaaagaatcaaggcgatagtgccagaaagcagcctggctcatccacctccagttcttctcacctagcgaagccttccagcagcagactgtgtgacaccagttctgcaaggcaggaaagtaccagcaaagcagaccttaactgttctaagaacaaagacctatatcaagaacaggtagaagtaatgttagatgtgacagatacaagtatggatacttatttggaaagagaatgggggaataaaccaagtgactgtgtaccctacaaagatgaagaactttatgatcttccagctccttgtactcctttgtcccttagttgccttcagctcagtactccagaaaatagagagagctctgtggtccaagcaggaggttccaaaaagcactcaaaccatctcagaaaattggtgtttgatgatttttgtgattcttcaaatgtttctaataaagattcttcagaagatgatataagtagaagtgaaaatgaaaagaaatcagaatgtttttcttccccaaagacaggattttgggactgttgttccacaagctatgcccaaaacttagattttgaaagttcagaggggaacacgatagcaaattctgttggagaaatatcttcaaaattgagtgagaaatcaggcttatgtttatccaaaaggttgaattctattcgctcttttgaaatgaaccggacaagaacatccagtgaagcatcgatggatgctgcttaccttgacaaaatctctgagttggattcaatgatgtcagagtcagacaacagcaagagcccttgtaataacgggtttaagtcactggatttggatgggttatcaaagtcatctcaaggcagtgaatttcttgaggaacctgataagttggaaagaaaaactgagctaaaccttttccaaagttctctaactaatgatcagttagaaaaaggcagtgaatggaaacccccttcttttttttctcctctctccctctgacccagaaatgaatgaaaga

SEQ ID NO: 58461 - DNA, 3022 bp, Homo sapiens
  misc_feature (1)...(3022): n = a,t,c or g
cctgcagggcctcagagaagcatgggaaagcccttcaggtgttaggggaaggtgattttgagttgttccttcactttgttgaatgtctctgaaatccagttctggggcttggcaggaatgttgccgcttgcagtggctgccgttcagcttatctgggatgtgtcccaagatgctggagttgtctggggccatccagactggggctgggatttccacacccatggagccacgactaggactgggagtgacagaacgagtttgggggtgctgccagaggggcactctagattgttcttgggatagcacaggttcccagatacagttctaagccattgaggggctaggagcagaatcgtcttagtggaggtgattgctaactctgaggtgtacttgccatgagccagttgctgttaggggatgagctgattcctgtcactcccactttagaggggatgctgacacagctagtgagaggtggggcagggacttgaacctctattctttagctatagaacttctgtccttaaccactatgctatgcctaaaatctgaggagacttctggtaggactctttctcccacagcccaaaggaaaaaggaagccccaagaaatgttttatcttagggaaactttcttggaaccacttccttccctcaggcctgcactggtttttgtagtgactctaaggatgtctgtcatgcaaggatgtgttacctatggccccatgtcaggagaatgattaggttcctgtgaagtttaaaaaaaatcctgttagatactagagatacacagtaactgccatatattactttctacatgcaaggcacttgtacagaggttgaaaagatgtctccatttaagcgtccatttaagcaggggagtggtggagtcttctgtgaaggtagaccagcacatggtttgcattgccacagagacactgggaagagcctctgaaacccagaggaacgcatgcgtatgggcagtctggggcaggtagaagatgtcaaggtgtccagagataaaggggtcagcatgtgcaagggcacctggtatgagcagatagtggtgggatcgtgggtatgtgaggagaggagaggttgcatggggttaagtgccaggttaggaggagagtttaggtgtcctgttaaaaatgacagtcagctgggcatggtggtatgcacctgtagtcccggctattcaggaggctgaggctggaggattgcttgagcccaggggtttgaggctgcagtgaaccatgatcacaccactgcacaccagccagagcaacagatgagatcccgtctcaaaaaaagtgagagtctgttcccatgatcagtttggatttctcaggctcttggagctagaggcagggaggacaaggtaggaggtgtgttgcagataagatgtaattagagataagcctggtggggcagtgaggttggaaagtggttgtttggtgattcctaaggataggattcagggtctccttggtatctgcccattgctttgcaaatcctccctcttcaaggccagaaaggattgcttgtaaagtgtacttaggaagtagccctagattcctgctttcccaaacagcctctggaaagacctcaagtttcctggagagagatactcatatttccctttgtaggcaaaaattgcatcaagaaggtgggcccggtggctcacacctgtaatcccagcactttgggcggctgaggtggatggatcactggaggtcaggtgtttgagaccagcctgggcaacgtggcaaaatcccgtttctactaaaaatgcgaaaattaaccgggtggggtggcaagcacctgtaattccagttacttgactggctgagccacaagaattgcttgaacctgggaggcagaggttgcggtgagctgagatcatgctactgcactccagcctgggtgacagagtgagcctccgtctcaaaaaaaaaaaaaaaaaaagggttttttttttagggggccgccccttttttctttttagggggggtaattttaatttggcctgggccggccttttaaaaacgcggggggggaaaaaaaaacccctttccctcccctcttccctctcttctctcctctcctcttcctctccctttctttttttcctctcccctcttctcctccctctcttttcccctccttttccttcttncctctttctcctcttctttcctccttcctttctctttctccttccctccctctcttctctttcctccccccctctcccttttctgcctcttcttcccttcttcccctccccttctctttcttcctctctccccccncccttcctcctctcttcttctccttctctccgccctnccctcttccttcttttctgcggggggggctcttccctctttcggcccggcggccggggtccttttctctttcttttctcccgcctgcctgcgccctcccttttcttcgctctcctgctggcgtcggtccctctctcgctcgccgcccccttccctcccgggccgcctcttctttcttctcttcgctctccctggctcgctctcttcttgcccctctccgctgcggcctctccttttggtgttctccttcccccgcccctccgtctccccgtgtggtccttgtccgtcttctttctctctccctctctcctctctccgcgccctcccttctttctcctccttgcggggtcgggggacggactatgctcataatcctcgacaacctggcggtgctccccgctgccgtcggcgagacgaactatgatccttgcctcggggcggggggattagaatctatataaatagtatttcttgacccgtctccgtgtagttacagcgcgcccgcaatatgattaactatataaaatagactattattgacacctcgctctcgctcttacatgtacattatatccacgtctcanccgtctctgtactntcactcgtcacatatacttataccacacacatctcgatactccctcgctgcgctgtgccacgcacatacaacc

SEQ ID NO: 58462 - DNA, 1500 bp, Homo sapiens
agcgcctgtgcccgggaggcgcgggcgggcagcagcaggtaacctcgcagcctccccggagagcagcatcgtctgtgaaatgggggttttgcaaccccacgatctcttatccacagttctgaaatccgcaaaaccctgaaaaccggattcctactcgccccttctggtcctgccgctacccccactggtgcctgtggttccggtccgtcttgtgggtagcaccagtgacaccagtaggatgctggacccagccccagagccccagagagaccagacccagagacagcaggagcccatggcttctcccatgcctgcaggtcaccctgcggtccccaccaagcctgtgggcccgtggcaggattgtgcagaggcccgccaggcaggccatgaacagagtggagtgtatgaactgcgagtgggccgtcacgtagtgtcagtatggtgtgagcagcaactggagggtggaggctggactgtgatccagcggaggcaagatggttcagtcaacttcttcactacctggcagcactataaggcgggctttgggcggccagacggagaatactggctgggccttgaacccgtgtatcagctgaccagccgtggggaccatgagctgctggttctcctggaggactgggggggccgtggagcacgtgcccactatgatggcttctccctggaacccgagagcgaccactaccgcctgcggcttggccagtaccatggtgatgctggagactctctttcctggcacaatgacaagcccttcagcaccgtggatagggaccgagactcctattctggtaactgtgccctgtaccagcggggaggctggtggtaccatgcctgtgcccactccaacctcaacggtgtgtggcaccacggcggccactaccgaagccgctaccaggatggtgtctactgggctgagtttcgtggtggggcatattctctcaggaaggccgccatgctcattcggcccctgaagctgtgactctgtgttcctctgtcccctaggccctagaggacattggtcagcaggagcccaagttgttctggccacaccttctttgtggctcagtgccaatgtgtcccacagaacttcccactgtggatctgtgaccctgggcgctgaaaatgggacccaggaatcccccccgtcaatatcttggcctcagatggctccccaaggtcattcatatctcggtttgagctcatatcttataataacacaaagtagccacaaaaaaaaaaaaaaaaaaaaaaaaaaaggttttttttttaagggggccgaagttttttcccttttggggggggtaatttttatttggccccggcccggtttttaacacggggggacttggaaaaaaacttttttttttttgtgcccccccccccgcggttgtggggagaaacgaagtgctttgtggtcaggaaaacgacccctccggtgtgaaggaagatgaagtagggtgtgggttggctgcgccgcgcccc

SEQ ID NO: 58463 - DNA, 1623 bp, Homo sapiens
tatgatcttatgaccatttttgtttatttttaatttttttgccagagagggctttcagtaaatgttttatttagaacattctttgaaaaatttgaagtgcaaagccacaaaaagcaatggatttaaatatataatgcgtagtagagttaggattatcacactagctctttttaaatctcactgctgttagtagtttcttttaattcttccatcactaattcctgttggggtttttcagcacttttcctataaagcaaggtttccccatgagggttttgaaatgtagattcctggacaagctgattagatgtgtttatgagcacatggcttttagcttttagggcataagcttccataggctttgctcttttttggcagagctggagctggaaagcttcttggaaaccacggcggaaattctcgttgaagaaaccataaatgatgggattgacactgctgttgccgaatgccagccagtgtgcaaaagggtagatgtagatgttgatgatctgcagttcatttggagaaaggtcagcgtagtctgagagcatcattagagtccacaggggcagccatgagagaataaaaagcagggccacaatcaggagcatcttaatgatcttctgcttcttcctggacaccacgtgccactgctcctggttcttcctgcctgtgtgaggaactgcagccctgaagagtgaaattccaatccttccatacatgatgacaatgagggagaggggagccaggtagatgttggcaaacagcacagtggtgtagatcttcctcatttcctgatttggccagtcttcccggcaccagtagactggactggttttattctgggagttgagtctcactcggtaatatttttcttcttgcacatgtaacattactgcagatggagacataatggtgatggctaggacccagatgatcataataatgacaaacgctgtcttgatagtgagctttggtttaaaagggtagaccacacactggaacctatctacagcaattgcaactaacgtaaagactgaagctgcgacagatattccctggaccaatccactgatcttgcacatcgtgtttccaaatggccatcctgctataatattgtccagcagtgttataggcatgcagaatatgccaactagtaaatcacttatggccaggtttaagatgaagagattagtgactgtgtgcatatgtttgttcctcattacaataaagcaaaccacagtatttcccatcatgcacaaaaagaagatcagaaagtaggaaataatgaagattgctgccacttgaggctggtgaagatagtagttcacataggtaatattaatatctgagtacagatgatgctttgtgtcattgacattccagatgggatgccagttttctgaagagtttgtgtcccatttctcattcatgatgaacctctcccggcgagccctgtcggcggcaggaaccagaatccaccaagcccgtctgcagcaacaggttctgtccctgctccggctccagctacttttcgcagtctgccggctcaatcccagccgacgtctgtcccccgcggactgcctgctccactccaggcttccgctccaggctggcccgccg

SEQ ID NO: 58464 - DNA, 1878 bp, Homo sapiens
acaaatgtacccttcactttttgaccccaggggtgaataattctgggtcatatatttgtagacccaagatgattaagagcccctatgatgtagcctgttgtgtcaagatgattttagaagttaagccccagacaaatgcatcctgtgagtattccgcatcacataagcaagacctacttcttgggagcactggctctatttcttgccccagtctcagctgccaaagtgatgcacaaagtccagcggtaacctggtacaagaatggaaaactcctctctgtggaaaggagcaaccgaatcgtagtggatgaagtttatgactatcaccagggcacatatgtatgtgattacactcagtcggatactgtgagttcgtggacagtcagagctgttgttcaagtgagaaccattgtgggagacactaaactcaaaccagatattctggatcctgtcgaggacacactggaagtagaacttggaaagcctttaactattagctgcaaagcacgatttggctttgaaagggtctttaaccctgtcataaaatggtacatcaaagattctgacctagagtgggaagtctcagtacctgaggcgaaaagtattaaatccactttaaaggatgaaatcattgagcgtaatatcatcttggaaaaagtcactcagcgtgatcttcgcaggaagtttgtttgctttgtccagaactccattggaaacacaacccagtccgtccaactgaaagaaaagagaggagtggtgctcctgtacatcctgcttggcaccatcgggaccctggtggccgtgctggcggcgagtgccctcctctacaggcactggattgaaatagtgctgctgtaccggacctaccagagcaaggatcagacgcttggggataaaaaggattttgatgctttcgtatcctatgcaaaatggagctcttttccaagtgaggccacttcatctctgagtgaagaacacttggccctgagcctatttcctgatgttttagaaaacaaatatggatatagcctgtgtttgcttgaaagagatgtggctccaggaggagtgtatgcagaagacattgtgagcattattaagagaagcagaagaggaatatttatcttgagccccaactatgtcaatggacccagtatctttgaactacaagcagcagtgaatcttgccttggatgatcaaacactgaaactcattttaattaagttctgttacttccaagagccagagtctctacctcatctcgtgaaaaaagctctcagggttttgcccacagttacttggagaggcttaaaatcagttcctcccaattctaggttctgggccaaaatgcgctaccacatgcctgtgaaaaactctcagggattcacgtggaaccagctcagaattacctctaggatttttcagtggaaaggactcagtagaacagaaaccactgggaggagctcccagcctaaggaatggtgaaatgagccctggagccccctccagtccagtccctgggatagagatgttgctggacagaactcacagctctgtgtgtgtgtgttcaggctgataggaaattcaaagagtctcctgccagcaccaagcaagcttgatggacaatggaatgggattgagactgtggtttagagcctttgatttcctggactggacagacggcgagtgaattctctagaccttgggtactttcagtacacaacacccctaagatttcccagtggtccgagcagaatcagaaaatacagctacttctgccttatggctagggaactgtcatgtctaccatgtattgtacatatgactttatgtatacttgcaatcaaataaatattattttattagaaaaaaaaaaaaaagg

SEQ ID NO: 58465 - DNA, 668 bp, Homo sapiens
cccacccaccatgagggccccataggcctgagcctgtgaccatgctctgtgctctggcaggatcaccaatgtgttttatgagcagtacctgaccatcctccctgaggggctcttcatgctcagcctctgccttgtgcccaccttcgctgtctcctgcctcctgctgggcctggacctgcgctccggcctcctcaacctgctctccattgtcatgatcctcgtggacactgtcggcttcatggccctgtggggcatcagttacaatgctgtgtccctcatcaacctggtctcggcggggggcatgtctgtggagtttgtgtcccacattacccgctcctttgccatcagcaccaagcccacctggctggagagggccaaagaggccaccatctctatgggaagtgcggggtttgcaggtgtggccatgaccaacctgcctggcatccttgtcctgggcctcgccaaggcccagctcattcagatcttcttcttccgcctcaacctcctgatcactctgctgggcctgctgcatggcttggtcttcctgcccgtcatcctcagctacgtggggcctgacgttaacccggctctggcactggagcagaagcgggctgaggagggcggcggcagcagtcatggtggccctcttgcccaaatcacccctcccg

SEQ ID NO: 58466 - DNA, 1433 bp, Homo sapiens
ttcccgggtcgacgatttcgttgagcggctgcggctcctgcacctccccggggagccgccccgtcgatgccactaaggccaaggacatatagacggtctgccctcccccactcaaaccgggatcatgacggtccccaaggagatgcccgaaaagtgggcccgggcccaggcgcctccctcttggagccgaaagaagccctcttgggggacagaagaagaaaggagggcgcgggctaatgaccgagaatacaatgagaaattccagtatgcgagtaactgcatcaagacctccaagtacaatattctcaccttcctgcctgtcaacctctttgagcagttccaggaagttgcaacacttacttcctgttcctcctcattctgcagttgatcccccagatctcttccctgtcctggttcaccaccattgtgcctttggttcttgtcctcaccatcacagctgttaaagatgccactgatgactatttccgccacaagagcgataaccaggtgaataaccgccagtcttaggtgctgatcaatggaatcctccagcaggagcagtggatgaatgtctgtgttggtgatattatcaagctagaaaataaccagtttgtggcggcggatctcctcctcctttccagcagtgagccccatgggctgtgttacatagagacagcagaacttgatggcgagaccaacatgaaagtacgtcaggcgattccagtcacctcagaattgggagacatcagtaagcttgccaagtttgacggtgaagtgatctgtgaacctcccaacaacaaactggacaaattcagcggaaccctctactggaaggaaaataagttccctctgagcaaccagaacatgctgctgcggggctgtgtgctgcgaaacaccgagtggtgcttcgggctggtcatctttgcaggtcccgacactaagctgatgcaaaacagcggcagaacaaagttcaaaagaacgagtatcgatcgcctaatgaataccctggtgctctggatttttggattcctggtttgcatgggggtgatcctggccattggcaatgccatctgggagcacgaggtggggatgcgtttccaggtctacctgccgtgggatgaggcagtggacagtgccttcttctctggcttcctctccttctggtcctacatcatcatcctcaacaccgttgtgcccatttcactctatgtcaggtatgtgccttctctgacctggggtctctccagggagtcaggcggtcccatagaacttttcttttctatgaagatgaagtccttgagaagtaacgagaagtcctcttcttcctgtactgtaaacatttgatgttatctgtttatctttgtgggcagagcaaactttttaccacagtttcctggtacttgggactgtattagagaaaaaaaaaaaaaagg

SEQ ID NO: 58467 - DNA, 1222 bp, Homo sapiens
  misc_feature (1)...(1222): n = a,t,c or g
tgacacgctcatcaagccagttctcgtcaaacctgagggagtcctggtggagaagacacacagctcattgctgcgcccaaaaggaaaggtggcatctgaatctgtctccctggagctcccagtggacattgttcctgactcgaccaaggcttatgttacggttctgggagacattatgggcacagctctgcagaacctggatggtctggtgcagatgcccagtggctgtggcgagcagaacatggtcttgtttgctcccatcatctatgtcttgcagtacctggagaaggcagggctgctgacggaggagatcaggtctcgggcagtgggtttcctggaaatagggtaccagaaggagctgatgtacaaacacagcaatggctcatacagtgcctttggggagcgagatggaaatggaaacacatggctgacagcgtttgtcacaaaatgctttggccaagctcagaaattcatcttcattgatcccaagaacatccaggatgctctcaagtggatggcaggaaaccagctccccagtggctgctatgccaacgtaggaaatctccttcacacagctatgaagggtggtgttgatgatgaagtctccttgactgcgtatgtcacagctgcattgctggagatgggaaaggatgtagatgacccaatggtgagtcagggtctacggtgtctcaagaattcggncacctccacgaccaaactctacacacaaggccctgttggcttacattttctccctggctggggaaagggacatcagaaacattctccttaaacagttagatcaacaggctatcatctcaggatcaagcaactctcctgcctcagcctcccgagtagatgggattacaggagaatccatttactggagccaggaacctactccatcatcgaacgccagcccttggtctgagcctgcggctgtagatgtggaactcacagcatatgcattgttggcccagcttaccaagcccagcctgactcaaaaggagatagcgaaggccactagcatagtggcttggttggccaagcaacgcaatgcatatgggggcttctcttctactcaggatactgtagttgctctccaagctcttgccaaatatgccactaccgcctacgtgccatctgaggagatcaacctggttgtaaaatccactgagaatttccagcgcacattcaacatacaggcagttaaccgaatggg

SEQ ID NO: 58468 - DNA, 550 bp, Homo sapiens
tttcggtgaacaaacacagagtttataataacaacaattacaataatagtatcagtagtagtaatagtagcattagctaacatttattgactacttgccagacactatatttttttccatttaatcctgaccataaccctatgggatggagaccgtgattatccccaggaaaccaaagcccagcaatttgtgcgctgtcaaacaacagtgtatatgtacatatatacactggagatgtccacttttctttcctaataaaaccttcaggaaaactccatgagccctacctttcctctccacctgaatacttgggtccatttgtaagttacctctcagagcctcgtgagttggggatctgtggagagcatcatctgatatttatggcattgtgtggatacatttgtatgtgtcttgttccccagattaaaaaataaatccccagtggccaggcacctttaagttctttctagctctccagagtgtgactcaaagcatgtctcctgagtggtctgggccaaggctagggatggcatctgcttgggcagagtca

SEQ ID NO: 58469 - DNA, 1589 bp, Homo sapiens
gtgatgcagtgctgaagacctgggcccctgctcagtgcctttgctctagaatgggtccagcttggctttggctactgggaacagggatcctggcctctgtccactgtcagccccttcttgcccatggagataaaagtctgcaggggcctcaaccccccaggcatcagctctcagagccagcccccgcctaccacagaatcacacccaccattaccaattttgctttgcgtttgtataaagagctggcagcagacgcccccggaaacatcttcttctcgccagtgagcatctccaccaccctggccctgctctctcttggggcccaagctaacacctcagctctgatcctggagggcctgggattcaacctcacagaaacccctgaagccgacatccaccagggcttccggagcctcctccacacccttgccctgcccagccccaaactcgaactaaaagtaggaaactccctgttcctagacaagcgactaaagcctcggcagcactatttggacagcatcaaggagctttacggagcttttgctttttctgccaacttcacagattctgttacaactgggaggcagattaatgactatttgagaaggcaaacatacgggcaagtcgtggactgcctcccggagttcagccaggacacgttcatggttcttgccaattacatcttcttcaaagccaagtggaagcaccctttcagtcgctaccagacccagaagcaggaaagtttctttgtggatgagaggacttctctccaggtccccatgatgcaccaaaaggaaatgcacagattcctctatgaccaggatttggcttgcaccgtcctccagatagaatacagaggaaatgccttggcgctgctggtcctccctgacccggggaaaatgaagcaggtggaggctgctctgcagccacagaccctgagaaaatggggccaattgctcctgcccagtctgttggatttgcacttgccaaggttttcaatttctggaacatataacctggaagacatacttccccaaattggtctcaccaacatactcaacttagaagctgacttctcaggagtcactgggcagctcaacaaaaccatctccaaggtgtcacacaaggcgatggtggacatgagtgagaaggggaccgaggccggggctgcttcaggcctcctctcccagcccccatctctgaacaccatgtcagacccacatgcccacttcaacaggcctttcctcttgctcctttgggaggtcaccacccagagcttactcttcctgggaaaagttgtcaacccagttgcagggtaaccatggtgggaggccaggagttatcttatctcatcctggaccaaacagataggccagaaccagcctgcatcctggggctgctatgtggttcagttaatcagtgtgccaagattctaataaagttgaccttgggttctgtgaaaaaaaaaaaaaaaaaaaaaaaaaaaaaaattttttttttaaggggcccgaagttttttccttttaagggggggtaattttaatttggccctggcccgttttttaaaacggggggaggggaaaaaaaaa

SEQ ID NO: 58470 - DNA, 683 bp, Homo sapiens
  misc_feature (1)...(683): n = a,t,c or g
accctgcctccgcatcatcatctctgtcatcatgtgaatcaaacaggtcagcatcacttgttccattggacaaggaagaattaagtgattctgtggtatctgggcgttttagactatttcccgagctgctgtgtgtcaggactgaggcagatccagaagaatctattaagcgctttggggatgagccactttgatggaattcatcagcatcataaaattcatcttcactgctggagtaagagaactctgggactgtatttggagacaagttcacgtggcttggagaagtgagactgctactcggtggtgaatggccactgcctgtactatttggtgtaggagtctgatgatgtcccaaggtagccaacacaggtccaactggtagggaagatggacgctgctctgacttacacaactgaacaggttctggaggtaacacagtctgggaaggcattgtgctgatcacaggttccaaaggactaggttgatatatgcatctacgggattaatagtactcttaaataaaagaaacacantatggctattttttattaagcgggccgaaagcttatttccctttagngaagggttaaatttactttggccctggccgccgtttttcaacggtcggaactggggggaaaaaaaannggnnnngggnngggggntggggggnnggggcg

SEQ ID NO: 58471 - DNA, 1671 bp, Homo sapiens
  misc_feature (1)...(1671): n = a,t,c or g
ggcagtatatcaagtgcaaacatccttttggatgatcagtttcaacccaaactaactgattttgccatggcacacttccggtcccacctagaacatcagagttgtaccataaatatgaccagcagcagcagtaaacatctgtggtacatgccagaagagtacatcagacaggggaaactttccattaaaacagatgtctacagctttggaattgtaataatggaagttctaacaggatgtagagtagtgttagatgatccaaaacatatccagctgcgggatctccttagagaattgatggagaagagaggcctggattcatgtctctcatttctagataagaaagtgcctccctgccctcggaatttctctgccaagctcttctgtttggcaggccggtgtgctgcaacgcgggcaaagttaagaccatcaatggatgaagttttaaatactcttgaaagtactcaagccagcttgtattttgctgaagatcctcccacatcactaaagtccttcaggtgtccttctcctctattcctggagaatgtaccaagtattccagtggaagatgatgaaagccagaataacaatttactaccttctgatgaaggcctgaggatagacagaatgactcagaaaactccttttgaatgcagccagtctgaggttatgtttctgagcttggacaaaaagccagagagcaagagaaatgaggaagcttgcaacatgcccagttcttcttgtgaagaaagttggttcccaaagtatatagttccatcccaggacttaaggccctataaggtaaatatagatccttcttcagaagctccagggcattcttgcaggagcaggccagtggagagcagctgttcctccaaattttcctgggatgaatatgaacagtacaaaaaaaaaaaaaaaaaaaaattttttattaaaccgccccaaacttaatccctttaagggggggtaaatttaacttggccccggcccgccttttaaaaccgccggaaggggaaaaaaacgnttcnttcnncgnnnngnnnnnnnannctctnaancatcacataccttcaantgaaaatgaaaagaaatcagaatgtttttcttccccacctacacgctgggagcactactgcatcaccccgtatacaaaagacttaaaatccccgctgctgttaaaggagctgatgtccctgactgccaggaaaaacacgtgcactaacaacctgaccggagccctaaaggcaatggagaaaagagccgtctatatcatcttttatgaagaaaacgtattagaaataaccgacccgggttggaccaatttttgaacttatccaaaaggaaccggaaaaaggaggtaacagaaactttcccaagggagaagcttctgaagcactcttaccggtttccttggttgaaaaccacaattctggcctctaagaaaaagcttgaaaagggacctttgaacccaaacaaaatatggggtattaaaaaaagacccgccctaacccggttttaataaaaaaaaaactgcccaacccggaacacgaaaaatggggccctccggatttccaaaaactggaaacaaaaacccttaaaccagactgtgggaccccattttcaccctcctccccaatttggaaccccgaaaaagtccggcgctggaaa

SEQ ID NO: 58472 - DNA, 2130 bp, Homo sapiens
aaaaaaaatatttttttttcccccccaggtccggcgttgtaaaaagcgggcagggcacaagtaaaatttaccccccctaaagggaattagcctttcggcccctttaattaaaattttttttttttttttttttttaattcaaacagtttattctcagagcagaggaatcaatgctagtgaaagaatcaaacttatctgtcatccaaggaattccatttacaagatatttatgatgggcctttccccccttacctgattaattcatacgtttctcccaagagtggattaaatggtttgccggtcctctcccactgggaagccacagccgaaacagcaaaagcagccacagactgtaaataatccacgggggggacaggcacagcttcagttaggaaacgcgctggagaagatggcctcttgtggagggcggtgggcacctggtttctgtcactatttgttccgtgtgagttttcagttttccccgagcagtgtgtctgagattataggacttccagggaatgcccttcatcacccgccactcccccgacagcacagaaagaaggaactgggtgctgccttccacccccggagccaggcccttctggcagatgctgcagcaatgtcagccactccgtctgatatgcacacacaaggccacacactcaacacacacaccccaagcactcattcacagaggcatgcgcacacacgtgcacacgttatgtgcacccacagtcacacacttgtattttgttattttttagacacagggtctcactctgtcacccaggctggagtgcagtggcgtaatcgtggctcactgcagcctccagctcctgggcacaagcgatcctctctcatcagcctcccaagtagctggcactgcaggcatgcaacactgcacctggctaagttttaaaaaatttttgtagagatgcggtctcactgtgttgcctcagctggtctcaacctccaggagcaattcatccacctcagcctcccgaagtgttgggaccacaggcatgagccaccgtgcgtgcccagcccacagtcacacacatgcacacacatggggtgcggtggtgcaacaggacccaagagaagcccaagggcagagcccaccgccaccttcagctccaagaggcggagtctcccggcaggaggcggcagcagggagctcttggggccactgagagctcaatggcatttccggcaagttctgtcatcacacacctgtggtgacaggacaaatgccacgaccgccaggcaggatggcactgaacactggggggagctgtgcgagtcctcacagatgcctggggccccaagactgtgtggccagacatgcaaggggcatcactttcatgacaaactcctgcctggcacccctaaggcccacctgcatcctctccaggggctggggctggcaggaggccctgtggatgaggtacacgtgctccatgtactccgtgatccgctgcaagaagctcagaggctcgttgaaggcgattggcatcgtgatcttggacagctccaggccaacacacttcttcaggatggtccacacgctgaagtcgcttctgctgaacatgggagccggcagcgatgtcctgtgtttctgaattccgttctcttgagagggcctctccccagttttcccaatcctattatttttgctggtgtctaagtcaatcattcccgtgactttctgatttgcctctgaaaattccccagaagagttatcagaatcaaagcctgtgacggcatcaaagaattcttcctctccgttcatccttcagcagccagcctccactgcccctgacatgtgctcttctactgaatcatcgtatctgatccacatctacagtgtaaggaattttacaaactttctcttggaaaaatccaatagacactgaagatctcctcccccaggtttctgggtctgggtttatctctttatctgggtctgcacccagagctgccccattagatcaaacagggcttggcttccaggaacgccgggtgccttggcattgctggcctggctggcagctgctggctggtgagccccagctgaggctgtctcctctccccaggcactccccaggcctttagagaggacattctccc

SEQ ID NO: 58473 - DNA, 848 bp, Homo sapiens
catctgaggggggatggcttgaaggatcttaatgagaccatgctggacagcctgtcctttgtaatgctgacgtccaaaggctggagtctggatgccagttgctggcatgaggacagcctctttcgcttctgctattacatcttgttcacagctggctacctgagcttgttcggctacacgaaggacaaggagcaggacctgctacaggcaggagagttattcatggagttccgcaagtttgaccttcttttcccaaggtttgtctactccctgctgtggccccgggagtggctagaagtgggccgactccagcgtctctttcacaagatgctctccgtgagccacagccaggagaaggagggcatcagcaactggctgggcaacatgcttcagtttctgagggagcagggggtaccctcagctatgcaggacaagttcaacttcatgatgctctgggcctcccaggggaacacggggcctacctctttctgggccctcttgtacctcctgaagcacccagaagctattcgggctgtgagggaggaagctacccaggtcctgggtgaggccaggctggagaccaagcagtcctttgccttcaaactcggtgccctgcaacacaccccagttctagacagcgtggtggaggagacgctgcggctgagggctgcacccaccctcctcaggttggttcatgaagactataccctgaagatgtccagtgggcaggagtatctgttccgccatggagacatcctggccctctttccctacctctcagtgcacatggaccctgacatccacgccgagccctatgcagtctcaaaaaaaaaaaaaaaaaaagatct

SEQ ID NO: 58474 - DNA, 805 bp, Homo sapiens
tttcctctgaaggagcacgtgacccagggagacaaacacttggagatacttggggctgagtttgagcaagactccctaacctgtgtctggacaagtctgatgtcctgtgtggcccaagaagaactgaccccgtgtctggagctcccaccgttattgcatccctgctgtggctcacctgctgctgtctccaggagcccctgagaagatttgcttcctctcccctgctaagctccaggtcctgagattgaattaggggctggagctcactgcactccagcagtcatgggacccaggatagggccagcgggtgaggtaccccaggtaccagacaaggaaaccaaagccacaatgggcacagaaaacacacctggaggcaaagccagcccagaccctcaggacgtgcggccaagtgtgttccataacatcaagctgttcgttctgtgccacagcctgctgcagctggcgcagctcatgatctccggctacctaaagagctccatctccacagtggagaagcgcttcggcctctccagccagacgtcggggctgctggcctccttcaacgaggtggggaacacagccttgattgtgtttgtgagctattttggcagccgggtgcaccgaccccgaatgattggctatggggctatccttgtggccctggcgggcctgctcatgactctcccgcacttcatctcggagccataccgctacgacaacaccagccctggtggtatcagcctgaccataaaggacccccgatgggtgggtgcctggtggctgggtttcctcatcgctgccggtg

SEQ ID NO: 58475 - DNA, 1197 bp, Homo sapiens
ggggatttttttcaaattttctacaatatatatgctttattcttagaatttaaaaaaattgaaaattcctcaaaaagttcctgctagggtaggaatttcctcaggaaccaccagcgccttcaaacctgtttccaccccagcttttacttgttatgaccacagctgtggtcttctcttggccaagggccatgttgtggatggttcaggacacattccccagtgtgctgtccctgactctgctagacactgctatttggaagagcccagctttttccagagagtgggcctctgacagggatggaagtaccctgccttgaggttctctccacttggcccagggctctgggaaccatcccacctatctgcacaccagcagggcctctgccagggtatggtcctggccatggccctcttcccccatagcctcctgtgatgaacaggggcagctgttaatggaacttgtcctctctccactctctccccacgctcctcctaatgggataagccagtctctagctttattctcagacatttaaaaattcacccatagcaataactgtatcacatgattcagattcctgtgggcacctcggtccccttttaaaaattacttttcagccgggcatggtggctcatgcctgtaattccagcactttgggaggctgaggtgggaggatcacctgaggtcgggagattgagatcagcctgaccaacatgaagaaaccccgtctctactaaaaatacaaaaattagccgggcgtggtggcacatgcctgtaatccagctactcgggaggctgaggcaggagaatcacttgaacctgggaggcggaggttgtggtgagcccagatagcatcattgcactccagcctgggcaacaagagtgaaactccatctccaaaaaaaagaaaaaagaaaaaaaaattagctggccatggtggcgggcaccagtaatcccagctaactcaggaggctgaggcaggagaatcacctgaacccaggaggcgaagttgcagtgagccaagattgcaccaatgcactccagcctgggcaacaagagcaacactccatctcaaaaaaaaaaaaaaaaaaaaggttttttatttagggggcccgaaggttatttcccttttagggggggtaaatttaacttggcccctgcccgcgttttaaaaacgcgggaatgggaaaaaaaca

SEQ ID NO: 58476 - DNA, 1365 bp, Homo sapiens
acagactcatgcagaaaataacaataaaattggcttttttccaagcacacaggtgcagcccttgtacagaacaatggaaatggcatggagacaattgctaccagttctataaagacagcaaaagttgggaggactgtaaatatttctgccttagtgaaaactctaccatgctgaagataaacaaacaagaagacctggaatttgccgcgtctcagagctactctgagtttttctactcttattggacagggcttttgcgccctgacagtggcaaggcctggctgtggatggatggaacccctttcacttctgaactgttccatattataatagatgtcaccagcccaagaagcagagactgtgtggccatccttaatgggatgatcttctcaaaggactgcaaagaattgaagcgttgtgtctgtgagagaagggcaggaatggtgaagccagagagcctccatgtcccccctgaaacattaggcgaaggtgactgattcgccctctgcaactacaaatagcagagtgagccaggcggtgccaaagcaagggctagttgagacattgggaaatggaacataatcaggaaagactatctctctgactagtacaaaatgggttctcgtgtttcctgttcaggatcaccagcatttctgagcttgggtttatgcacgtatttaacagtcacaagaagtcttatttacatgccaccaaccaacctcagaaacccataatgtcatctgccttcttggcttaaagataacttttagctctctttcttctcaatgtctaatatcacctccctgttttcatgtcttccttacacttggtggaataagaaactttttgaagtagaggaaatacattgaggtaacatccttttctctgacagtcaagtagtccatcagaaattggcagtcacttcccagattgtaccagcaaatacacaaggaattctttttgtttgtttcagttcatactagtcccttcccaatccatcagtaaagaccccatctgccttgtccatgccgtttcccaacagggatgtcacttgatatgagaatctcaaatctcaatgccttataagcattccttcctgtgtccattaagactctgataattgtttcccccccctagggattttttcccgggaaagaaatatatccccatctccgtttcatatcagaaacaccggccccggtttttcccttcgaggggtttaaggcccgaaaaaaggggggctttttttttgcccccggaaaaggttccggtccttttttttttccttggccccttttttttcccttccgggggtggagggtttattataattaaagggaataccggggaaaaaaaaaaaaaaag

SEQ ID NO: 58477 - DNA, 1523 bp, Homo sapiens
  misc_feature (1)...(1523): n = a,t,c or g
tgacaaaccaatttccctcgatgatgtgcttctgagtgctctgctgaggaacaatgggaagtctgcccagcagaagaaaatctctgccaagcccaagcttgagttcctctgtccaaggccagggacctgtgaccatggaagcagagagaagcaaggccacagccgtggccctgggcagtttcccggcaggtggcccggccgagctgtcgctgagactcggggagccattgaccatcgtctctgaggatggagactggtggacggtgctgtctgaagtctcaggcagagagtataacatccccagcgtccacgtggccaaagtctcccatgggtggctgtatgagggcctgagcagggagaaagcagaggaactgctgttgttacctgggaaccctggaggggccttcctcatccgggagagccagaccaggagaggctcttactctctgtcagtccgcctcagccgccctgcatcctgggaccggatcagacactacaggatccactgccttgacaatggctggctgtacatctcaccgcgcctcaccttcccctcactccaggccctgggggaccattactctgagggctggcccgctccctggcaaggatatacccctacctgtgactgtgcagaggacaccactcaactggaaagagctggacagctccctcctgttttctgaagctgccacaggggaggagtctcttctcagtgagggtctccgggagtccctcagcttctacatcagcctgaatgacgaggctgtctctttggatgatgcctaggcccaaaggagaggccaaaagggaaaccaaggctgcacacctagaaccccaattcagcctcctgggcaccccagaggcaaggctgtgctctcagggagggagggtgggacacagaggtgcatctagggtcccacctgtaccctagctctttactctcttagcccttagaagtcacctacttccttccagtgccatgatcccacctgcgacctctagtgcgagtgcagagaaggtgggaccagggccagggttccaaaaagagaataagcctcctggggggtctgacctagttagttcttgagtttggggtttccagtaccatctggatgccctgcctgttgagccccattctacatccccaccattaaccaggccccacccacaaggtagaaacaacctcctagagttaaaccgagaaaagttcatttttccgaaaaaatcctacagagctcttcggttgaggaacccacccacccaattacccctttaaaaaaaaggggtaaaggggaaactttggtggggcccccttaaataaaaagggcgaaaaaaggggaaaaaagccccggagaagaatgtcttaacggtatcccccagaactctgggatgtgcacagggctttaatgtgaacctccgaagcttaggaaggaaaaactctcgcacaagtctaagttccttaaaatgtcccccccattggaggacaacaagcccccaacttnttttttctttttttttgg

SEQ ID NO: 58478 - DNA, 1529 bp, Homo sapiens
  misc_feature (1)...(1529): n = a,t,c or g
ggaccgactgacccatgttcaactgctgttcacatggaacccttctccacttcggccttcaaagttctcgtttgaatatttgctactaccaccaagatctgcacctgcggcggctccacccgggcccgcgccctaggcttcaaggctcacggaaaagtgaacaagcctccagggctattcagatttgtccctgagcagggagtaggcactgatgagaattgcctcattgaaatactagcttcaagaacaaatggagaaattttccagatgcgagaagcctactgcttgcaatacagcaataacctccaagaggacatttattcagagacctcaggacacttcagagatactctcatgaacttggtccaggggaccagagaggaaggatatacagaccctgcgatggctgctcaggatgcaatggtcctatgggaagcctgtcagcagaagacgggggagcacaaaaccatgctgcaaatgatcctgtgcaacaagagctaccagcagctgcggctggttttccaggaatttcaaaatatttctgggcaagatatggtagatgccattaatgaatgttatgatggatactttcaggagctgctggttgcaattgttctctgtgttcgagacaaaccagcctattttgcttatagattatatagtgcaattcatgactttggtttccataataaaactgtaatcaggattctcattgccagaagtgaaatagacctgctgaccataaggaaacgatacaaagagcgatatggaaaatccctatttcatgatatcagaaattttgcttcagggcattataagaaagcactgcttgccatctgtgctggtgatgctgaggactactaaaatgaagaggacttggagtactgtgcactcctctttctagacacttccaaatagagattttctcacaaatttgtactgttcatggcactattaacaaaactatacaatcatattttctcttctatctttgaaattattctaagccaaagaaaactatgaatgaaagtatatgatactgaatttgcctactatcctgaatttgcctactatctaatcagcaattaaataaattgtgcatgatggaataatagaaaaaaaaaaaaaaaaaaaaaaaaaaaaaatttttttttaagggggccgaagctttttccttttaagggggggtaattttaatttggccctggcccgcgttttaaaaacgggggaaggggaaaaaaannnnnnnnnnnnnnnnnnnnttttnnnnnnnnnnnnnnnnnnnnnnnnnnnnnnnnnnnnnnnnnttnnntntntnnnnnnnnnnnnnnnnnnnnnnnnnnnnnnnnnnnnnttttttttttttccccccccncnnntttttttttttttnnnnnnnnnnttcccccctcccccctttttttctcncccctttttcccccccccttttttttttttttctnnnnnnnnccccctctccccttttttttttncccccccccccccnnnnncccccttttttttttttt

SEQ ID NO: 58479 - DNA, 1843 bp, Homo sapiens
ctgggctgcagccatggaagaacagagggaggccctgaggaagatcatcaaaacactggctgtgaagaatgaagaaattcagagctttatctactccctgaaacagatgctgctgaacgtggaggcgaactcggcgaaggtgcaggaggacctcgaagcagagttccagtccctcttctccctcctggaggagctgaaagaaggcatgcttatgaagataaaacaggaccgtgccagccgcacctacgagctgcagaaccagctggctgcctgcacgcgggccctggagagctccgaggagcttctggagacagccaaccagactctgcaggccatggacagcgaggactttcctcaggctgccaagcaaatcaaagatggagtgaccatggcccctgccttccggctatcattgaaagcgaaggtcagtgacaacatgagtcacctcatggtggacttcgcgcaagagcggcagatgctacaggcactcaagttcctgcctgtgcccagcgcacccgtgatcgacctggctgagtccctggtggcagataactgtgtgaccctggtgtggcgcatgccggatgaggacagcaagattgaccactacgtgctggagtaccggcggaccaacttcgagggcccgccccgcctcaaggaggaccagccctggatggtcatcgagggcatccggcagacagagtacaccctgacaggtctcaagtttgacatgaaatacatgaacttccgtgtgaaggcctgtaacaaggcagttgcaggagagttctctgagccggtgactctggagacaccagcgttcatgttccgcctggatgcgtccacatcccaccagaacctgcgggtggatgatctctccgtggagtgggacgctatgggcgggaaggtgcaggatatcaaggctcgcgagaaagatggcaaggggcggacggcgtctcccatcaactccccagccagaggtactccatctcccaagaggatgccctcaggtcgtgggggacgggaccgcttcaccgctgagtcctacacagttctgggggacacgctgatcgacggcggggagcattactgggaggtgcgctacgagccggacagcaaggcgttcggcgtgggcgtggcctaccgcagcctgggccgcttcgagcaactgggcaagacggccgcctcctggtgcctgcacgtcaacaattggctgcaggtcagcttcacggccaagcacgccaacaaggtcaaggtgctggacgcccccgtgcccgactgcctgggtgtgcactgtgacttccaccaaggtgaccccaagccccagctgccgtctctggctgcccctgcctgagtcccctccgtctgcccccatcccacttctgaccggtcccactgtcactctgccccccgaccccaggcctcctgtccttctacaatgcccgcaccaaacaagtgctgcacactttcaagaccaggttcacacagccgctgctgcctgctttcacggtatggtgtggcagcttccaggtgacgacaggcctgcaggtccccagtgctgtgcgctgcctgcaaaagcgaggcagtgctaccagcagctccaacaccagcctcacctaggcccccaggcacccacccagctggggtgtttttgggggagtcgccgccaagcccaggctgctggagccaggcaccctcctctgtcacttgctgcttggagccttaactccagatgggggggtcaccaagagggagtgggcaccctggcgggccctctccccacctcacctcttaataaaggtcagacactggccaggcgagaaacccaactggacaaaaaaaagggggg

SEQ ID NO: 58480 - DNA, 121 bp, Homo sapiens
ggagtgaagcacttcgaaaggaagctgcctgggaagtcccagaagggaaggggcagggagggaaggggacagggtgagagcaggtctcactcatcccaatcccagccaggattgggtcagg

SEQ ID NO: 58481 - DNA, 2338 bp, Homo sapiens
  misc_feature (1)...(2338): n = a,t,c or g
tgggtcgacgatttcgtccgcgcgggcgaggacgccgtgtgggtgctggacagcggcagcgtgcgcggggccaccgccaacagctcggccgcgtggctcgtgcagttctactcgtcgtggtgtggccactgcatcggctacgcgcccacttggcgggccctggctggggatgtgcgagactgggccagtgccattcgcgtcgcagctctggactgcatggaagagaagaaccaggccgtgtgccatgactacgacatccacttctaccccaccttccggtattttaaagcatttacaaaggagtttacaactggagaaaattttaaaggacctgaccgagagctgcgaacagtcagacagacgatgattgacttcctgcagaaccacacggaaggaagccggccccctgcctgcccgcgcctagaccccattcagcccagtgatgttctttcccttcttgacaaccgtggcagctattacgtggctattgtctttgaaagcaacagctcctaccttggacgggaggtgatcttagacctgatcccgtatgaaagcatcgtggtgacccgagcactggacggggacaaagcatttctggagaaacttggtgtttcttcagtcccttcgtgttacctgatctacccaaatgggtcgcatggattgattaacgtcgcgaagcctctgcgggccttcttttcgtcttatttgaagtcattgccggatgtgaggaaaaaatcgcttcccttgcctgaaaagccacacaaagaagaaaattcagaaatcgtggtttggagagaatttgacaaatcgaagctgtacacggtggacctggagtcagggctacactacctcctgcgggtggagctggcagcccacaagtccctggccggagcagagctgaagacgctcaaggactttgtgactgtcttggccaagctgttccctggacggccgccagtcaagaagctgttggagatgctgcaggagtggctggccagccttcccctggacaggatcccctacaacgccgtgcttgacctggtcaacaacaagatgcggatttctggaatattccttactaatcacataaagtgggttggatgtcaaggaagccgatctgagttgaggggttacccgtgttctctctggaaactgttccacactttgactgttgaagcctcgacccacccagatgcactggttggcacaggctttgaagacgacccccaggctgtgctgcagacaatgaggaggtacgttcacaccttctttgggtgtaaggaatgtggtgagcactttgaggaaatggctaaagaatccatggactcggtgaaaaccccagaccaagccatcctctggctgtggaagaagcataatatggtgaacggccgcctggcaggtgagaagcccctgggcatggggggctcagcacgggcggagggaggccctggtcctgggacagcaaggacggcacggctgccgtggggcttgtccctgagctttgcggcctcgtgccacccactgtgctgacgggatcaggacttgggtggctgagagctgccagagctgcagcctttcccaggctgcttctgtccccggctttctagatgcttctctcactccgggggctcttcgaccccgtggaaatgggtgtggctctttcttcccccatcggtacccactggtagcccgttagactctgaagatgtttttgactctggaaagcttggaacgtaattaatttttgatgaggaattttagtagtatggaaatctgttgtccaaacgtaaaccaaacctctcaaagtgctttgttttgttaaaaaaaaaaaaaaaaaaaaatttttatttagggggccggaagcttattcccttttaggggggggttattttaacttgggcccggcccgccttttaacacgggggggcggggaaaaaacanncccccnntnccttctttttcctccaccccctgccaccaagagtgaaactccatcttcccaaaaaaggaaaaaaggaaaaaaaatttacctggcccttggtggcggggcccccagtattcccaccttacctaagaggctgtagccagaaaatcacccctgaccccaggaggcgaaaatttccctggaccccaaaattgggcccaatgcccctcccgcctggggaacaaaaaagaaaaatttctattttaaaannnaaaaaaaaaaancgaaaatttttttttttgggggcccgcaaccttttttcctcttttttggggggggggtttttattatttttgggcctttggccgcccgttttttaaaaagggggggggnnnnnnnnnaaaaaaaaaataa

SEQ ID NO: 58482 - DNA, 1137 bp, Homo sapiens
  misc_feature (1)...(1137): n = a,t,c or g
cggacgcgtgggtcgacccacgcgtccggccgctctcgatcttagaactaggaactggaacagcagtaatatttatctctttaacctctctgtctctgacttagcttttctgtgcaccctccccatgctgataaggagttatgccaatggaaactggatatatggagacgtgctctgcataagcaaccgatatgtgcttcatgccaacctctataccagcattctctttctcacttttatcagcatagatcgatacttgataattaagtatcctttccgagaacaccttctgcaaaagaaagagtttgctattttaatctccttggccatttgggttttagtaaccttagagttactacccatacttccccttataaatcctgttataactgacaatggcaccacctgtaatgattttgcaagttctggagaccccaactacaacctcatttacagcatgtgtctaacactgttggggttccttattcctctttttgtgatgtgtttcttttattacaagattgctctcttcctaaagcagaggaataggcaggttgctactgctctgccccttgaaaagcctctcaacttggtcatcatggcagtggtaatcttctctgtgctttttacaccctatcacgtcatgcggaatgtgaggatcgcttcacgcctggggagttggaagcagtatcagtgcactcaggtcgtcatcaactccttttacattgtgacacggcctttggcctttctgaacagtgtcatcaaccctgtcttctattttcttttgggagatcacttcagggacatgctgatgaatcaactgagacacaacttcaaatcccttacatcctttagcagatgggctcatgaactcctactttcattcagagaaaagtgaggggcttgtgaaacagattgttctacagatgaatctgtaagccagttacagtttgctttaactcatagacatcaatcagagagtgtcacagatttaaccttgatctaaagacaagttgtacccagagtatgtgaaaagaatgggatgacaagaatgtactgggnttttttcttcctctaagaaattgaaaanaggtgaacctgcccttatgtttggggcatggtaacttccaaaatact

SEQ ID NO: 58483 - DNA, 790 bp, Homo sapiens
gtatatcttctctaggcccaaccaaaattctccatcaagcctcccaaaaccatatttgtagttctcccacgtttcattgaagttttgtgatccatctattcgatgttgaattaatgtccatggactacctgatataacatcacagtagacatgaaaaacttgagagttgctgggtctgatggcatacatgagtgtggagaaaacaacctaaatggtaaatataacaaaccaagagctaaatctaagccagagaggagaagaggattatcttggaagtctcaaaatggaaggttatactctataaaatcaaccaaaatgttgatccatccaacagattcagaaagctttgaatgaactgaggcaaatttaaaaggcaataatttaaacattaacctcattccaagttaatgtggtctaataatctggtattaaatccttaagagaaagcttgagaaatagattttttttatcttaaagtcactgtctatttaagattaaacatacaatcacataaccttattaaaaaaaaaaaaaaaaaaaaaggggggggcctttttaaaggacccctgggggggcccaattttacggggggtgggaaggaattagttttttccttttggggggccgttttaaaaccgggatgggaatttttggaaagaaaccttattttgggggggggacaaattgggccaacctccctacaaaaattaaaggctttagggaaaaaaaaaaattttaaagggtaaagggggtaaaacaacctgaatatgctgggggttaaaaaatttgg

SEQ ID NO: 58484 - DNA, 3002 bp, Homo sapiens
  misc_feature (1)...(3002): n = a,t,c or g
tttcgtgctgcccgagttcctgacccaccagtacaagtacgaggcgggcgagatccgctggggcgccgagggccgcgacgtctgcgcagccaacggctcgggcggcgacgaggggcccgaccccgacctcatctgccgcaaccggacggctaccaacatgatgtacttgctgctcattggggcccaggtgctcctgggcatcggtgctacccctgtgcagcccctgggcgtctcctacatcgacgaccacgtgcggaggaaggactcctcgctctatataggaatcctgttcacgatgctggtatttggaccagcctgcgggtttatcctgggctctttctgtaccaaaatctacgtggatgcagtcttcattgacacaagtaacctggacatcactccggacgacccccgctggatcggagcctggtggggtggctttctgctctgcggtgccttactcctcttctcttccctcttgatgtttgggtttccacagtccctgcccccgcactcagaccccgccatggaaagcgagcaggccatgctctccgaaagagaatacgagagacccaagcccagcaacggggtcctgaggcaccccctggagccagacagcagtgcctcctgtttccagcagctgagagtgatcccgaaggtcaccaagcacctgctctcaaaccctgtgttcacctgcatcatcctggccgcctgcatggagattgcagtggtggctggcttcgctgcctttttggggaagtacctggagcagcagtttaacctcaccacctcttctgccaaccagctgcttgggatgactgcgatcccgtgtgcttgtctgggtatcttcctgggaggtcttttggtgaagaagctcagcctgtctgccctgggggccattcggatggccatgctcgtcaacctggtgtccactgcttgctacgtctccttcctcttcctgggctgcgacactggccctgtggctggggttactgttccctatggaaacagcacagcacctggctcagccctggacccctactcgccctgcaataataactgtgaatgccaaaccgattccttcactccagtgtgtggggcagatggcatcacctacctgtctgcctgctttgctggctgcaacagcacgaatctcacgggctgtgcgtgcctcaccaccgtccctgctgagaacgcaaccgtggttcctggaaaatgccccagtcctgggtgccaagaggccttcctcactttcctctgtgtgatgtgtatctgcagcctgatcggtgccatggcacagacaccctcagtcatcatcctcatcaggacagtcagccctgaactcaagtcttacgctttgggagttctttttctcctccttcgtttgttgggcttcatccctccacccctcatcttcggggctggcatcgactccacctgcctgttctggagcacgttctgtggggagcaaggcgcctgcgtcctctacgacaatgtggtctaccgatacctgtatgtcagcatcgccatcgcgctcaaatccttcgccttcatcctgtacaccaccacgtggcagtgcctgaggaaaaactataaacgctacatcaaaaaccacgagggcgggctgagcaccagcacagagtaccaagacattgagactgagaaaacctgccccgaatcacattcaccttcagaagactcctttgtgagaagctgagggcctggccctcttcctcttcctggagagaacagccctccaccacccacagacctcgcgggcctcacttagcgtgctcctccctgtccgagaacccgagggtccccatgtggattatccagccagtgtgtggtcctttgaggccccaagcgcaggcctgtgatgaggaccaaagaggtgacttatggtcaggagtactccaaacagctctcagagtaggcatctttcctgggtctctaaagagtcatgctgacctggtgtgcaaattcccttccacccatccctctacctcctctggggatggcttgccgacatgctttagaaactcccctcttgggaatgctcctctgactgagggctccaacagctttaatgaaatcagccgagagggtaaaaaccaacctgttgcattgaatggaggggggaaaaagcacatactcaatagatttttgagtgtggtactctgtatttttgcagcgtttattttccaaatgagcagtttagaaatatgtgatgtaaagtacatactgtacgtttgctgaaaattatattaaaagcactattttaattcttaaaaaaaaaaaaaaaaaaaaaaaaaaaaaagggggggccgttttaaaaaaacccttggggggcccaaattttacccgggcttgcaaggtaaaaattttttcctttaaagggggggttttaaaaaccaccttgggaatttttggaaaaaaaccttttttttggggggggaaaaaatgggaaaaaccccctacaaaaattaaaagctttaagggaaaaaaaaaatttttaaagggaaaagggggaaaaaaaaccgcaaaatcttggggtttaaaaaattttttttccgggttttattttaaaaaaatttttcccccgggggtttgtggttttnnnnnnnnnnnncnnnngggccgcccccctttcnnngggaaagctcccccccccggcaagttttttccaaaaaggcgtggggccccccccccnaagagggaaggggtgtnnnnnnnnnngncnnnncccccccccccccccccccctgttttttttttttttttttnnancncnnancaaannccccccnccnaataaggggggtggnngnngaaccccccnnaaaaccccccccccccgcccggggtgacccttttntnnggccccggggccccccccccccacaaaaaaaaaaaaaacngttggggtttaattataaaannnnggggccgccccctgggttttctacctaacggagaagaaccccccctctgtttgggggggc

SEQ ID NO: 58485 - DNA, 1538 bp, Homo sapiens
ctactgacttcccgggtcgacgatttcgtaagagagcggtctggacagcgcgtggccggcgccgctgtggggacagcatgagcggcggttggatggcgcaggttggagcgtggcgaacaggggctctgggcctggcgctgctgctgctgctcggcctcggactaggcctggaggccgccgcgagcccgctttccaccccgacctctgcccaggccgcaggccccagctcaggctcgtgcccacccaccaagttccagtgccgcaccagtggcttatgcgtgcccctcacctggcgctgcgacagggacttggactgcagcgatggcagcgatgaggaggagtgcaggattgagccatgtacccagaaagggcaatgcccaccgccccctggcctcccctgcccctgcaccggcgtcagtgactgctctgggggaactgacaagaaactgcgcaactgcagccgcctggcctgcctagcaggcgagctccgttgcacgctgagcgatgactgcattccactcacgtggcgctgcgacggccacccagactgtcccgactccagcgacgagctcggctgtggaaccaatgagatcctcccggaaggggatgccacaaccatggggccccctgtgaccctggagagtgtcacctctctcaggaatgccacaaccatggggccccctgtgaccctggagagtgtcccctctgtcgggaatgccacatcctcctctgccggagaccagtctggaagcccaactgcctatggggttattgcagctgctgcggtgctcagtgcaagcctggtcaccgccaccctcctccttttgtcctggctccgagcccaggagcgcctccgcccactggggttactggtggccatgaaggagtccctgctgctgtcagaacagaagacctcgctgccctgaggacaagcacttgccaccaccgtcactcagccctgggcgtagccggacaggaggagagcagtgatgcggatgggtacccgggcacaccagccctcagagacctgagctcttctggccacgtggaacctcgaacccgagctcctgcagaagtggccctggagattgagggtccctggacactccctatggagatccggggagctaggatggggaacctgccacagccagaactgaggggctggccccaggcagctcccagggggtagaacggccctgtgcttaagacactcctgctgccccgtctgagggtggcgattaaagttgcttcacatcctcaaaaaaaaaaaaaaaaaaaggggggccgttttaaagaatccctgggggggcccaagtttacgggggcaggcgaggcaatagcttttttccctaatgggagccgaattaaaacctacctttggggaatttttgaggagggacctttactttatggggggagacatattgggccaaaccttactttacgggaaatttaaaggcttttaaggaaaataataaaattttttttagggggttaaaggggtaaaaactaagctggcaaatggctgggcggcc

SEQ ID NO: 58486 - DNA, 1828 bp, Homo sapiens
acgaagtcgtcgaggaagatggcggcggtagcggaggtgtgagtggacgcgggactcagcggccggattttctcttcccttcttttcccttttccttccctatttgaaattggcatcgagggggctaagttcgggtggcagcgccgggcgcaacgcaggggtcacggcgacggcggcggcggctgacggctggaagggtaggcttccttcaccgctcgtcctccttcctcgctccgctcggtgtcaggcgcggcggcggcgcggcgggcggacttcgtccctcctcctgctcccccccacaccggagcgggcactcttcgcttcgccatcccccgacccttcaccccgaggactgggcgcctcctccggcgcagctgagggagcgggggccggtctcctgctcggttgtcgagcctccatgtcggataatcagagctggaactcgtcgggctcggaggaggatccagagacggagtctgggccgcctgtggagcgctgcggggtcctcagtaagtggacaaactacattcatgggtggcaggatcgttgggtagttttgaaaaataatgctctgagttactacaaatctgaagatgaaacagagtatggctgcagaggatccatctgtcttagcaaggctgtcatcacacctcacgattttgatgaatgtcgatttgatattagtgtaaatgatagtgtttggtatcttcgtgctcaggatccagatcatagacagcaatggatagatgccattgaacagcacaagactgaatctggatatggatctgaatccagcttgcgtcgacatggctcaatggtgtccctggtgtctggagcaagtggctactctgcaacatccacctcttcattcaagaaaggccacagtttacgtgagaagttggctgaaatggaaacatttagagacatcttatgtagacaagttgacacgctacagaagtactttgatgcctgtgctgatgctgtctctaaggatgaacttcaaagggataaagtggtagaagatgatgaagatgactttcctacaacgcgttctgatggtgacttcttgcatagtaccaacggcaataaagaaaagttatttccacatgtgacaccaaaaaaaaaaaaaaaaaaggttttatttagggggccgaaggtttatcccttttaggggggggtaattttaagtggggcgggggcgggttttaaaaaacggggggggggaaaaaaaaaggtggggtggggaaaaaaattgtggttttgggaaaacactctccgggggggggggggactctttttttgagaaaggggaaattttcaaaaaaaaaaatttttttcaaacacaggggaaacatttttcccttttgggacaaaccgggttttcaaaaaataaacacaaaaaattgtgggggtaaaaaggggaaaataattggggggctaataacggggcccggcccccccaaaaaaccccccaccttttttttttaccccaaaaaaaaaagggccctttttataaactcgggggggggggggggagggacctttataaaaaaaaagggaatctttgtagaaaaaaatcttgtgttttttttaaaaaggggggggccctcaaaaaattttttttttaaaaaaaccacaaagatttccggccacccataaagaagggtgggggcccttattttgtgagaaaccccgggggtgctaaacaagggggggccaaaacccccccgtgtgtgtgtttttttgcaaaccccccacaggaattggtggagaattttgtggttttggggggcccaaccccccttaataggggggggtgataaaaaac

SEQ ID NO: 58487 - DNA, 1155 bp, Homo sapiens
gcctttgcaaatgcatgcagagcatggaaatgccccagctgccctgctgttgaaacagaatcctatttggaaggcagacatgtggcccatctctgtagccatcactgagaaatctggattttcaagggcctttctctctgttgcccgggctggagtttagcgactcaatcatggctcactgactgcagcatcgacctccggggctcaagtgatcctttcatctcagcctcctcagtagctgagactacagatgatgttttgcgtattattaaagatgaagacttcaaaatactggagcaaagacaagtagtattatcggaaaaagaagcacaagcactgtgcaaggaatatgaaaatgaagactattttaataaacttatagaaaacatgaccagtggtccatctctagcccttgttttattgagagacaatggcttgcaatactggaaacaattactgggaccaagaactgttgaagaagccattgaatattttccagagagtttatgtgcacagtttgcgatggacagtttgccggtcaaccagttgtatggcagcgattcattagaaaccgctgaaagggaaatacagcatttctttcctcttcaaagcactttaggcttgattaaacctcatgcaacaagtgaacaaagaggggtccatctatggtcatgattctgaccaagtggaatgctgttgcagaatggagacgattgatgggcccaacagacccagaagaagcaaaattactttcccctgactccatccgagcccagtttggaataagtaaattgaaaaacattgtccatggagcatctaacgcctatgaagcaaaagaggttgttaatagactctttgaggatcctgaggaaaactaaagtatatactgtgaaaactttgagaagataatacatatgttcacgtcaatatacaaccatttggcacagcttcctgggaggaataataagaaaaacatgctttggaggaaaactcaagatacaaaaatgaatggctatgcataataacaataaaaatgtattccccaaaaaaaaaaaaaaggggcggccgttttaaaggatcccttgggggggccaaagtttacgcgggcttgcaacgtaatagttttttccttatagggagccgaattataagcta

SEQ ID NO: 58488 - DNA, 1274 bp, Homo sapiens
  misc_feature (1)...(1274): n = a,t,c or g
cctcgccaacaagcgcatcgggcagatcaagagcaagaagttccggtgctcagccaaagagcagtacttcattccaggcacggaggattaccagctgaacagcgagtgcaacagcgacgtggtctgtccccacaagtgccgctgtgaggccaacgtggtggagtgctccagcctgaagctcaccaagatccctgagcgcatcccccagtccacggcagaactgcgattgaataacaatgagatttccatcctggaggccactgggatgtttaaaaaacttacacatccgaagaaaatcaatctgagcaacaacaaggtgtcagaaattgaagatggggccttcgagggcgcagcctctgtgagcgagctgcacctaactgccaaccagctggagtccatccggagcggcatgttccggggtctggatggcttgaggaccctaatgctgcggaacaaccgcatcagctgcatccacaacgacagcttcacgggcctgcgcaacgtccggctcctctcgctctacgacaaccagatcaccaccgtatccccaggagccttcgacaccctccagtccctctccacactgaatctcctggccaaccctttcaactgcaactgccagctggcctggctaggaggctggctacggaagcgcaagatcgtgacggggaacccgcgatgccagaaccctgactttttgcggcagattcccctgcaggacgtggccttccctgacttcaggtgtgaggaaggccaggaggaggggggctgcctgccccgcccacagtgcccacaggagtgcgcctgcctggacaccgtggtccgatgcagcaacaagcacctgcgggccctgcccaagggcattcccaagaatgtcacagaactctatttggacgggaaccagttcacgctggttccgggacagctgtctaccttcaagtacctgcagctcgtggacctgagcaacaacaagatcagttccttaagcaattcctccttcaccaacatgagccagctgaccactctgatcctcagctacaatgccctgcagtgcatcccgcctttggccttccagggactccgctccctgcgcctgctgtctctccacggcaatgacatctccacccttcaagagggcatctttgcagacgtgacctncctgtctcaccttgccattgggtgcaaccccctatactgtgactgccacctncgctggctgtccaactgggtgaagacttgctacanggaaccggncattgctcgttgtgctgggc

SEQ ID NO: 58489 - DNA, 1051 bp, Homo sapiens
tttcgtctcaagcactggagcgctgtccgtggtgcggccgttggaccgcgaacaacgagctgagcacgtactgacagtggtggcctcagaccacggctccccgccgcgctcggccacgcaggtcctgaccgtcagtgtcgctgacgtcaacgacgaggcgcctactttccagcagcaggagtacagcgtcctcttgcgtgagaacaaccctcctggcacatctctgctcaccctgcgagcaaccgaccccgacgtgggggccaacgggcaagtgacttatggaggcgtctctagcgaaagcttttctctggatcctgacactggtgttctcacgactcttcgggccctggatcgagaggaacaggaggagatcaacctgacagtgtatgcccaggacaggggctcacctcctcagttaacgcatgtcactgttcgagtggctgtggaggatgagaatgaccatgcaccaacctttgggagtgcccatctctctctggaggtgcctgagggccaggacccccagacccttaccatgcttcgggcctctgatccagatgtgggagccaatgggcagttgcagtaccgcatcctagatggggacccatcaggagcctttgtcctagaccttgcttctggagagtttggcaccatgcggccactagacagagaagtggagccagctttccagctgaggatagaggcccgggatggaggccagccagctctcagtgccacgctgcttttgacagtgacagtgctggatgccaatgaccatgctccagcctttcctgtgcctgcctactcggtggaggtgccggaggatgtgcctgcagggaccctgctgctgcagctacaggctcatgaccctgatgctggagctaatggccatgtgacctactacctgggcgccggtacagcaggagccttcctgctggagcccagctctggagaactgcgcacagctgcagccctttgggggggacagaagaacagtgttcccagctacacctttttctgtgaagtgcaatggaatggtggcagcttgctgggc

SEQ ID NO: 58490 - DNA, 1264 bp, Homo sapiens
ccgcacgagggaaagaacattaggaatgccttttagtgccttgcttcctgaactagctcacagtagcccggcggcccagggcaatccgaccacatttcactctcaccgctgtaggaatccagatgcaggccaagtacagcagcacgagggacatgctggatgatgatggggacaccaccatgagcctgcattctcaagcctctgccacaactcggcatccagagccccggcgcacagagcacagggctccctcttcaacgtggcgaccagtggccctgaccctgctgactttgtgcttggtgctgctgatagggctggcagccctggggcttttgttttttcagtactaccagctctccaatactggtcaagacaccatttctcaaatggaagaaagattaggaaatacgtcccaagagttgcaatctcttcaagtccagaatataaagcttgcaggaagtctgcagcatgtggctgaaaaactctgtcgtgagctgtataacaaagctggagcacacaggtgcagcccttgtacagaacaatggaaatggcatggagacaattgctaccagttctataaagacagcaaaagttgggaggactgtaaatatttctgccttagtgaaaactctaccatgctgaagataaacaaacaagaagacctggaatttgccgcgtctcagagctactctgagtttttctactcttattggacagggcttttgcgccctgacagtggcaaggcctggctgtggatggatggaacccctttcacttctgaactgttccatattataatagatgtcaccagcccaagaagcagagactgtgtggccatccttaatgggatgatcttctcaaaggactgcaaagaattgaagcgttgtgtctgtgagagaagggcaggaatggtgaagccagagagcctccatgtcccccctgaaacattaggcgaaggtgactgattcgccctctgcaactacaaatagcagagtgagccaggcggtgccaaagcaagggctagttgagacattgggaaatggaacataatcaggaaagactatctctctgactagtacaaaatgggttctcgtgtttcctgttcaggatcaccagcatttctgagcttgggtttatgcacgtatttaacagtcacaagaagtcttatttacatgccaccaaccaacctcagaaacccataatggcatctgccttctttgcttagagataacttttaaataactttttttttcaagggcaaaat

SEQ ID NO: 58491 - DNA, 1831 bp, Homo sapiens
caaatgttttaacccccagcattttgaggttgtttttcccccttttccctttaaaatttttttttttccctaaagcctttaatttttgtagggaggttggcccaattttttccccccccaaaataaggtttctttcccaaaattcccaagttggttttaaaacggccccctttaaggaaaaaaatttttccttgccaccccccgtaaaatttgggccccccaagggttcttttaaaaggccccccccttttttttttttttttttttttttaaggttatgtgattgtatgtttaatcttaaatagacagtgactttaagataaaaaaaatctatttctcaagctttctcttaaggatttaataccagattattagcccacattaacttggaatgaggttaatgtttaaattattgccttttaaatttgcctcagttcattcaaagctttctgaatctgttggatggatcaacattttggttgattttatagagtataaccttccattttgagacttccaagataatcctcttctcctctctggcttagattttgctcttggtttgttatatttaccatttaggttgttttctccacactcatcatgccaccaccagcctcctgaataaccctctggacagttgaagtgtccttttgctttgtgatcccaagtagaaaacaccaaatctttgttttccgggattgcattggggacattgccagtaatcgcaactagatgtagcgtatagttggtttcgtgatttcccaagtaaaaagaatattcaatataatgtttgttgtctttccagtcttccaactcaattcgtaaaacataattagattgcttcactatggagtatatcttctctaggcccaaccaaaattctccatcaagcctcccaaaaccatatttgtagttctcccacgtttcattgaagttttgtgatccatctattcgatgttgaattaatgtccatggactacctgatataacatcacagtagacatgaaaaacttgagagttgctgggtctgatggcatacatgccacttgtatgttcacctctgttataaatggtggtacattcagcaggaatgccatcatgttttacatttcttatttcattcaactgaagaaagggagtagttcttggtgctcttggcttggaagatagagaaatttctgtgggttcttgaatactagtccttctgagctgattttctatttcttttatttgactatgctgttggtttaattgtttatattggtcttccacggtctggagaaggtctttgatgctattatcttgtttttctacaaaagttttaagtgaagttacttctgggtgttctggagtttcaggttgattttgaattaagttagttagttgctcttctaaatatttcactttttgttgaagtagaattttttcttctaggaggctttcaagttttgagttgagttcaagtgacatattctttacctcttcatttttgactagtagtttatatgtaaggccctatagccagataaggagtggtggcttagagcggagactcactgcagatgtgaaacacatgtttgtgctggtcctacggtcaccactgggtcactggaacgtggtgtaacaggaagtgacatttagtcatttctctttggcctcttcaaaagctgagtcaaacacagggtggtagtattgatcgattctcataactgaaatttgatttaaaagttataccctttcatatttttcctgagttttatcttgcaattgaacattaaattctgtgccttgttccataggatgcagaacgaaatcgtcgacccggaaa

SEQ ID NO: 58492 - DNA, 1294 bp, Homo sapiens
ttttttttttttttttttattttatttttgagatggagtcttgctctgtcgcccaggctggaatgcagtggcgtgatctcagcttactgcaacctctgcctcccaggttcgagcaattctcctgcttcagcctcccaagtaggtgggactacaggcatgccccatgacgcctaggtaatttttgaatttttagtagagaccgggtttcaccatgttggccaggctggtctcgaactcctggcctcccaaagtgctgggattacaggcatgagccaccatgcccggcctatcaaataacacaaatttcttataccaaaatgacaaggtagtcagtgagatgggagagacatagattttttaaataccctaaatccttttgtgtgcccaggatatggtggtggtggtgaaacactgtgttttctggtcagcgccactgcctgttcataagaaggtaatcctgcatcctccacagaaggcggcaatggagacaaggcagcctcctcaggtcttctgaaaatgatggagggagtgtgcctccccctttcatagacggctgaagagcatggatgttgtagcctattacacttagtgatacaaagatagtagccaagtaatccaaaaataaccaaaaatactccagcagcaattaatccagtcagaaggcccataacatctattttctctctgttgccatctgattttgtggttggtcctttagctgaatattcctgccaaaatgcaatcgttttatcttcatccacaaaaatctctctggcttcctcataattgcaaagttcttcattgcactctctttctaggttgccgggagtgaagagctccagatcaaatctattatacagaaggcgtctatgtatgaaaaagtttgcttcttcttttgatgtaaacacttcttctcccgcatgcttagaagcctttggacctcttgcgcaatgaggaaaccccagggtaactgtgggcagttggctgagtagaaccagaagcgtaaacatagtctggcaactgtcaaacaaactgtgtccccccgcacatgttccagcagcccccgggccagaggctcttcttggggcggttccttcggccgccaggccctcggtctccggcgccctcaaacctcggcgacgctccgggcctcgctctccgcagggtctggatggcccccgcgcgcaaacctgggaagggcctggggttcgcagaggggcgcccggggaacacgcgcggggtgaggtcctgcctcggtccggggaggcggccgacggaggacgggaggaggcgg

SEQ ID NO: 58493 - DNA, 2674 bp, Homo sapiens
caccacccctgggggggggcccccggcaagcctgaaaaggtgcccggtgtgggctggggagtaagggatcaccgttttcgaagcctcttcatgaagcagcaagtgatggtaccaaggacagtggcaccagtgactagggccacccctgtacccaccagcagaggcacaaatagggtgtccagggcatgcatgtaggggtagactgtaacaggccctgagcgggcactgcccgcctggtaccaccaatagaaagcacccttctcccacaaagtgggggcaatttcttcttttttttaaaaaaagcaaggggggggggcccctcccagggcaaaaaaaggccgggggggggggcaacaacaaaagggggggcccttaaaagggccctccggggttttccacggggttttaaggggccctttaaatcaaaggggcgggtttttttttttttttttttttttttttttataaaacaagtttattcacattttagaaaaactaattccaggacaggaaatggcctccctataggatccctaagagatcaagaacagaaggccagagggaggggcttgggagggaaggagtggggaaggggaggcacgtctcccattctgggtagtgggaggtcaaataaattaaaggaagagtggacagagggagagggtgtccaggcaaccagaggagggcttggagctgggccggaagacagtcgacacctgcaagacctggggagtaagggatcaccgttttcgaagcctcttcatgaagcagcaagtgatggtaccaaggacagtggcaccagtgactagggccacccctgtacccaccagcagaggcacaaatagggtgtccagggcatgcatgtaggggtagactgtaacaggccctgagcgggcactgcccgcctggtaccagctgtagtcggcatgctgcacccaggcgctgggggcacagtggtacacgccttcatcctcgggccccaagctgtgtagtctcagccgatggcttcggggccccaccagctctacgctgacagggcctcctccaggccggactcccagctctgccacaccatcctggcctacgccacccaccagctgggcagggacagagctgagctctccatcctctggtcgctccacccaccagctggcggccagccgcagtcctggggggccaccccgcacagagatgttgcacagcagggaggcagtctccccgcggtacactgtgcctcctgctagccatgccacagcctccagcaccacaccttcctcccgcacatgtacagggagaggccgggaacgggcactggctgcttcacgaagccgggtcccagaccctcgaacataggctttggcgaggcagcggtaggtgcccgcatcaccaggcctggcagcctctagccgtagccggtatgttctggatgccaccttctccatggcaatgtgtcggccctcatagccagggcccaggctgcccacaccctctgtgtccagctgggctaccaggcggccgggcccaggtgcccccgcaggtgccatctcccaacctacagagtatgcagcatgacggcctgctgggggaagtgcccctgacacattgcacagcagttccaagggctcccctgggccgatccgacgttcaccaggccccactgtcactgccagctggctggacagcgtctgcacatccacgtgggccaggacggcccttttctctgcaatctgggcccagctgccatcaggatcctgaatccactcagcggcagtgcagtggtaggtgcctgcgtcccctgcctgggcaccccctactaccatgcggtaccgatcggtcccttccttgcccagacgaagctcccctgcagccaatcgctcagcatagggagctccagcctccacggccaagtctgaccggattcccaccacttcctgcagagttgaccgcccaactggtgcctcgggcacagatcgcccaaaggacactgccaggtgtgtgtgcttctgtgtgcttgtcctcgccaggcagcccagtgccagctcctgcccctcatgcaccgtcatgcgtgggggtgaggttggggcctggcggcctcggggccctgggggggcagcagacacctggaggacatctggaagaactctcagctccaccttgccgctgtagctgcccaggtagcgggtatcagtggagggggtgtggcactcataaatgccggcatcctgggcctgcaggcgggcaatcttgagcaccacggcatcaccttgtaggcgctgcacctgcacctcacccgccaccactcgggacttgaagacagcataggagaactgggtatccttggtactgacaatgcccagtgcagtatctggggcctcgggcctatacaggaaccactcgaagttctgctgggcagggccctcatagccggtcacattgcaggagatggagacagctgtgccagccacgcggtacaagggcccctcggggaccagcacctcccgggcccagcatcccattcctagcattagcagcagcagcagcggcagcgaaggcggcagcagcgtgggcctgagggcgcccatcctgcgcggccagctctggggaggctccgggggatggcgcgggttctggggggccggaagggtggggggcgcatgcccaggttgagggcagg

SEQ ID NO: 58494 - DNA, 1086 bp, Homo sapiens
ccatgtcaaccacattgtcatggtggtaatcccgcatgatcacgacctcattgaaaagcagttctcgtctctgttgcttccggaggtccattttcttcactgcaacttgtttccctgtgtgtttctcggtggcgatgcatacgatgccggttgagccttccccgattttgataaagttggccaagtattccctggggtctcctgggctgaccaccagctgcagggccgcccgaaactgttcatgggacaccctggagggctgctggtcggaggaggagccccagctgggcggcgggtaggtgctggatgagaggctgagggagctcaggtaggaagccgtggagatgtactgcgaactgctctgcagggaggggtgatggtacaaggtggctttgtggtacccagacgggtactggtgactgcttgaggaatagcccgatttgctttgactttgaggtagtttggcagggcccctggggtaggtgtcagaccctgacagtggagggctgaggaccatctgtgctcgatcgtaatccacctttggaatgcacattgtgggctcggacaagcgagggtaggtgtaggagttgtaggagtgtccttggggatgggttttaaatgcacttgctccaaatgacatcatcggttcctggagtcccgagcctgacctggacctctgccgcatggtgggctgagggcttgtctgattcaggtacgaagactttggcctcctgtcatagtcatccaggctgggtccccattcactttcactgtacgccaggctctccttggagcacccgctggtccctgcagttctagaaggtgtgaattggaatgaataatccagaggggagctactcgaggctctctgatactcccacttgaggtcactgtattcacttggtttgctcagtgagtccaaatgtgagtgataatcggcagaaaatctggcaaaatcggatttcaaaggcttcacctcagaatagtaggcctccccgtgcttcattttcattacgtgcccattttgcttggctgcgtggctgcctctataatacggatccagatcatctccatagagactcttct

SEQ ID NO: 58495 - DNA, 3312 bp, Homo sapiens
  misc_feature (1)...(3312): n = a,t,c or g
acggcaactgacctatccggcaaccaggccagctgcattttccatatcaaggttattgatgcagaaccacctgtcatagactggtgcagatctccacctcccgtccaggtctcggagaaggtacatgccgcaagctgggatgagcctcagttctcagacaactcaggggctgaattggtcattaccagaagtcatacacaaggagaccttttccctcaaggggagactatagtacagtatacagccactgacccctcaggcaataacaggacatgtgatatccatattgtcataaaaggttctccctgtgaaattccattcacacctgtaaatggggattttatatgcactccagataatactggagtcaactgtacattaacttgcttggagggctatgatttcacagaagggtctactgacaagtattattgtgcttatgaagatggcgtctggaaaccaacatataccactgaatggccagactgtgccaaaaaacgttttgcaaaccacgggttcaagtcctttgagatgttctacaaagcagctcgttgtgatgacacagatctgatgaagaagttttctgaagcatttgagacgaccctgggaaaaatggtcccatcattttgtagtgatgcagaggacattgactgcagactggaggagaacctgaccaaaaaatattgcctagaatataattatgactatgaaaatggctttgcaattggaccaggtggctggggtgcagctaataggctggattactcttacgatgacttcctggacactgtgcaagaaacagccacaagcatcggcaatgcccaagtcctcacggattaaaagaagtgccccattatctgactataaaattaagttaatttttaacatcacagctagtgtgccattacccgatgaaagaaatgatacccttgaatgggaaaatcagcaacgactccttcagacattggaaactatcacaaataaactgaaaaggactctcaacaaagaccccatgtattcctttcagcttgcatcagaaatacttatagctgacagcaattcattagaaacaaaaaaggcttcccccttctgcagaccaggctcagtgctgagagggcgtatgtgtgtcaattgccctttgggaacctattataatctggaacatttcacctgtgaaagctgccggatcggatcctatcaagatgaagaagggcaacttgagtgcaagctttgcccctctgggatgtacacggaatatatccattcaagaaacatctctgattgtaaagctcagtgtaaacaaggcacctactcatacagtggacttgagacttgtgaatcgtgtccactgggcacttatcagccaaaatttggttcccggagctgcctctcgtgtccagaaaacacctcaactgtgaaaagaggagccgtgaacatttctgcatgtggagttccttgtccagaaggaaaattctcgcgttctgggttaatgccctgtcacccatgtcctcgtgactattaccaacctaatgcagggaaggccttctgcctggcctgtcccttttatggaactaccccattcgctggttccagatccatcacagaatgttcaagttttagttcaactttctcagcagcagaggaaagtgtggtgccccctgcctctcttggacatattaaaaagaggcatgaaatcagcagtcaggttttccatgaatgcttctttaacccttgccacaatagtggaacctgccagcaacttgggcgtggttatgtttgtctctgtccacttggatatacaggcttaaagtgtgaaacagacatcgatgagtgcagcccactgccttgcctcaacaatggagtttgtaaagacctagttggggaattcatttgtgagtgcccatcaggttacacaggtcagcggtgtgaagaaaatataaatgagtgtagctccagtccttgtttaaataaaggaatctgtgttgatggtgtggctggctatcgttgcacatgtgtgaaaggatttgtaggtaagatgtttccagtcttcctatgttgtcttaaaatcttgtaaaccaccacaaattagtacatttcttaacatatatattaatgtgaatttttggattttattactgtatggtgattatgtaagagaaagtcctcattttctgaggaaatacacactgaggggtttggggtaaaagggcatgcaggtctgcaatttactctcaaatggttcagcaaaaaataatttgtgtatgtggtgtgtgtgtgtaaaggcaaactttcaagaaggaactggagacaaatcatgtaatatgatattgcaaacagatgtacaataatatggtttaaaagtgtatgcttaatttctaaagagtaaatccaagaaagtgtccagtgaaggaaaaaggcaagatcaaagaaacaggcaagttttgaatggaatttactagctttatttcttaacattatctcaattagatgtctattaccaaacttaatttcaacaaaaagtaagatttaaaaaagcagattatcggctgggcatggtggttcacgcctgtaatcccagcattttgggaggccgaggcaggtggattacttgagctcaggatttcaagaccacctcggccaacatggtgaaaccctgtctctactaaaaaaaaaatacaaaaattanccaggtgtggtggtgggtgcctgtagtctcagctactcaggaggctgaggcaggagaatcgcttgaacctaggaggtgaaagttgcagtgagccgagatcgcgccactgtactccagactgggagagagagcaagactctgtctcaaaaaaaaaaaaaaaaaaaaaaaaaaaaaaaaaaaaaggtttttttttttggggggccggggtttttttttttttggggggggaaatttttttgggggggggggggggtttttaaaaccgggggggggggaaaaaacccncntnnnnnnncnctnnnnttncccnncnccggcctgggggnncncttttttccnnncnnncnnnncccccttnncncccttnnnntttgggcctgggcctttggggcccttttnnnnnncggtgggctccccttcccnccnggggggggggggggtttttttccccccccccccccccntnctttccttggtgtgggggccccttttccaaaaaaanaggggnnnnntnnctttccttggttnnaacccaccccccccccccttcgtggtttggggggaaaaaccaaaaaaccccttttccccccctttttttttccaaaaggaaaaaaaaggcnttttaa

SEQ ID NO: 58496 - DNA, 1212 bp, Homo sapiens
tttcgtacgaatcgtcagcgggctttagctggggcagagcttagcaagtgttggggtatcagcagttagtcactgtttgcctggaaccacaggatgtgaatcctagttcctggattccaaggaatcctgcatccaggtgtttattgtgctttgcagagtcaacatcaagctcaggagctggttgcagacatagatgagtgtgaagtttctggcctgtgcaggcatggagggcgatgcgtgaacactcatgggagctttgaatgctactgtatggatggatacttgccaaggaatggacctgaacctttccacccgaccaccgatgccacatcatgcacagaaatagactgtggtacccctcctgaggttccagatggctatatcataggaaattatacgtctagtctgggcagccaggttcgttatgcttgcagagaaggattcttcagtgttccagaagatacagtttcaagctgcacaggcctgggcacatgggagtccccaaaattacattgccaagagatcaactgtggcaaccctccagaaatgcggcacgccatcttggtaggaaatcacagctccaggctgggcggtgtggctcgctatgtctgtcaagagggctttgagagccctggaggaaagatcacttctgtttgcacagagaaaggcacctggagagaaagtactttaacatgcacagaaattctgacaaagattaatgatgtatcactgtttaatgatacctgtgtgagatggcaaataaactcaagaagaataaaccccaagatctcatatgtgatatccataaaaggacaacggttggaccctatggaatcagttcgtgaggagacagtcaacttgaccacagacagcaggaccccagaagtgtgcctagccctgtacccaggcaccaactacaccgtgaacatctccacagcacctcccaggcgctcgatgccagccgtcatcggtttccagacagctgaagttgatctcttagaagatgatggaagtttcaatatttcaatatttaatgaaacttgtttgaaaatgaacaagcgttctatgaaagttggatcagaacacatgtaccaatttacccgtctgggtcagaagtgggatctggctaacttttctcatgccacaatcgttaacttcacaacgaggggacaagtgcctgtaaggggttgggatctggaccctaccactgga

SEQ ID NO: 58497 - DNA, 2989 bp, Homo sapiens
  misc_feature (1)...(2989): n = a,t,c or g
ctagaattcagcggccgctgaattctaggcagaacagaacactttctcatgtccagggtcagattacaagagcactcaagactttactgacgaaaactcaggaaatcctctatcacaaagaggtttggcaactaaactaagacattaaaaggaaaataccagatgccactctgcaggctgcaataactactacttactggatacattcaaaccctccagaatcaacagttatcaggtaaccaacaagaaatgcaagccgtcgacaatctcacctctgcgcctgggaacaccagtctgtgcaccagagactacaaaatcacccaggtcctcttcccactgctctacactgtcctgttttttgttggacttatcacaaatggcctggcgatgaggattttctttcaaatccggagtaaatcaaactttattatttttcttaagaacacagtcatttctgatcttctcatgattctgacttttccattcaaaattcttagtgatgccaaactgggaacaggaccactgagaacttttgtgtgtcaagttacctccgtcatattttatttcacaatgtatatcagtatttcattcctgggactgataactatcgatcgctaccagaagaccaccaggccatttaaaacatccaaccccaaaaatctcttgggggctaagattctctctgttgtcatctgggcattcatgttcttactctctttgcctaacatgattctgaccaacaggcagccgagagacaagaatgtgaagaaatgctctttccttaaatcagagttcggtctagtctggcatgaaatagtaaattacatctgtcaagtcattttctggattaatttcttaattgttattgtatgttatacactcattacaaaagaactgtaccggtcatacgtaagaacgaggggtgtaggtaaagtccccaggaaaaaggtgaacgtcaaagttttcattatcattgctgtattctttatttgttttgttcctttccattttgcccgaattccttacaccctgagccaaacccgggatgtctttgactgcactgctgaaaatactctgttctatgtgaaagagagcactctgtggttaacttccttaaatgcatgcctggatccgttcatctattttttcctttgcaagtccttcagaaattccttgataagtatgctgaagtgccccaattctgcaacatctctgtcccaggacaataggaaaaaagaacaggatggtggtgacccaaatgaagagactccaatgtaaacaaattaactaaggaaatatttcaatctctttgtgttcagaactcgttaaagcaaagcgctaagtaaaaatattaactgacgaagaagcaactaagttaataataatgactctaaagaaacagaagattacaaaagcaattttcatttacctttccagtatgaaaagctatcttaaaatatagaaaactaatctaaactgtagctgtattagcagcaaaacaaacgacatccaattgtcatgctgcatgcaaaactacacagaattcatgttttgcagagttttgccaaaatgagtaatcatataatatttactgtaatttttaaaatacattatcgttcacaattttattttttcataatcaactaaggaagaacgatcaattggatataatcttcttaccaaaaatgatagttaaaatgtatatatatcctagtcccctaaccaaatcctgacctattgggatacttataaaaatttaagtaagtgggatacacaaagaataataactattaacttttcattattagcaaaaacctaagggatttaaactaattgaaactgtatttgtttggacttaattttttatgtttatttagaagataaagatttaaagaagacctttacaataaagagaagaaatatcgaagtcattaaaataaggagacttacttttatgacattctaatactaaaaaatatagaaatatttccttaattctagagaaactagttttactaattttttacaacttcaataataccatcactgacacttacctttattaattagcttctagaaaatagctgctaattaggttaatgaacattttaccttagtgaaaaaaattaattaaatatgattacaaagttgcacagcataactactgagaggaaagtgattgatctgtttgtaattacttgtttgtattggtgtgtataaaatacaaaatttacattaaactctaaatcattaaaaaaaaaaaaaaaaaaaaaaaaaaaaaaaggggggggccttttaaaaaaacccttggggggcccaaatttaacgggggagggaaaaaaaaaatttttttccttaaggggggggaaataaaaaccaggccctggccgggttttaaaaaacccggaaagggaaaaaatggtaactgggaaatttttgaaaaaaaacttaattttggggggggaaaaaatgggaaaaaccccccaaaaaaaattaaaggtttaagggaaaaaaaaaatttttaaggggaaaagggggaaaaaaaaccgaaaaaggctgggggttaaaaaattttgggnnnnnnnnnnnngggggctaagataaatctctgtgggcatcatgggcattcaaggccttgactctcatttgactaacaatgagtactgacccaaaaggcaacgcgggaaacaagaaatgtgaagaaaaggctcttttccttaaataaaaaaatgggcctaatccttggcaggaaggaccaaactaccccccttccaagacatgttctgggatgaaaaatcttaaaacggaatcgcgagcggaatacacctaattaacaaaagcaaactggacccgggccctatcccaaaaaccaaaacggggggggtttataggtccccccccgaaaaaggggagaacgcctcaccgtttttcaaacatccactggccggagagacctttaattagatcttgaaacacttgcacaactacg

SEQ ID NO: 58498 - DNA, 2502 bp, Homo sapiens
  misc_feature (1)...(2502): n = a,t,c or g
cggcacgagctgtatgatttgaatgatttgaaaggggtggggccgagcaaggtggagaccagccatgtgcagactcacatgggcggtccaggcgggagccgttgttggccacagcagtgatacagagatcatggcccaaggggaagcgtccacaatgcaggatggctggccaggggtagctgtagcaggccatgatgggctcgcagctggcctgcatggcctcgcacaggctgtaggaggggtagatgaccctttgggggaaagggtcgggggctgcaccgccacaggctgagcacccagatcagctggaacctctccatgttcctacccctgtctcgtggcctggaactctctggttgctgggcaacgacactggtcgcctagcaacagccccgtagcctggctttcccacttgccccacatctcagccctcagctctgcctcttcactcccgccctcccactcaggtgccttgccagctttccagtgcacctctccctccggctctgtggacatccattgtctgcaagaggtggcctgcaccttgggcctttactctccatcttaaagtgaggaaacagggccctccctcttgtcctgaaaggccttcggggcaccgcagccagggctggggttggcaaacagttcaagggcttgatcctgagttctgctgacatggccacccagaggctcttgggagaaaccattgttcacaggataggttaggctggggaagaggaaacagccttgggatctctggactctctgggagaaaaggccaccagaagggcctctgctccatctcttgccagggtctctttggacagacatagcttccacgcctcattggagaggaggttccagcccgcctgcccccaacccccagcctgaagcgacttgtccacctgccctatcttgacattcaagagcccttgaccaccattgatggtctcctgcctaagggcacctggttccctctgtctggaacactctaacaaaacgatccattttcctctctgtgcctgtcagcgcccagccctgataggtgctcaggtgctcagcaaggattactgaagacctgagccaccagagcagggccctgagggagccctccagggccctgcacctggaagcccctgtcctacccgtcaaggcatacaggggtaaatagcagaggaagaggcgggcatcggggtggcactcccaggcaagcaggagcagccagctgaccaactgctggatggcctcagctgctgtgatgtggtccagcaagttgggcagacgcatctgtgtagccaatgtcgtggcatagggccatggcttggggaatgggcatgcacctcatgcagccccagggagcccctgaccctgctgtcatcccacagcatcaccagtgtcaccagcagccacagcccctgctccatcactgccttctgtgccttggccttaatgaactgaggttgagggttttatagggctgttcctgcacccagggagccaacagaggagatcctgcaggggtttgcacagctccgaggtgcccggacccacctggtgaggccccaacatgctgactgggctgtttgtttttgattagcacacagcaggggactgtagaggctggaggcacctccactgggcttgcagattactggcacctaataaactgaagaaacctggaaaaaaaaaaaaaaaaaaaaaaaaaagttttttttttaaggggcccgaagttttttccttttaggggggggtaattttaatttggccctggcccgggttttaaaaaggggggaagggaaaaaaaaccnnnnnnnncccttcnnctncccnannnntnttccccnggctcttcnttccttctttcttttgcnaaaacccccttttttggttttttttccnnccccnncccccnttttttcccccntnnnnaaaaggcttttcttttaatctctcaaattaaaggtttaacctttaaaaataaaccaaatggttgatcccttccaccagaacaaaaaagttttggatgaacctgaggcaaattaaaaaggggataaatttaacactaaccctcatttcccaaggaaggggggctaaaaattcggggattaaaacccttaaaaaaaaagctggagaaaaaaaaattttttttattctaaaaggccctggctgatttaagaattaacctttcccttccccttacccttaaaagaaaaccgggtcacattttttaaaacaaaaaatcttataaaaccatattgggttaaaatttttggggagggggggaaataaattttaaaaggggtgaaaatttaaaaatataaataaattagggggaacttatataaaaaaaacttttcttaaaaaaaaaaaaatttataaaactttttaatttttaaaaaggggctcccatggagctaaattattcccaacttttttccaaagtttaaaaaaaaaaaataattctttgttaaaaacctttaaaaattgggcttaaaataccac

SEQ ID NO: 58499 - DNA, 2661 bp, Homo sapiens
cattttcaaaggtctcaagaatctgacacgtctggatttatcccttaataggctgaagcacatcccaaatgaagcattccttaatttgccagcgagtctcactgaactacatataaatgataatatgttaaagttttttaactggacattactccagcagtttcctcgtctcgagttgcttgacttacgtggaaacaaactactctttttaactgatagcctatctgactttacatcttcccttcggacactgctgctgagtcataacaggatttcccacctaccctctggctttctttctgaagtcagtagtctgaagcacctcgatttaagttccaatctgctaaaaacaataaacaaatccgcacttgaaactaagaccaccaccaaattatctatgttggaactacacggaaacccctttgaatgcacctgtgacattggagatttccgaagatggatggatgaacatctgaatgtcaaaattcccagactggtagatgtcatttgtgccagtcctggggatcaaagagggaagagtattgtgagtctggagctaacaacttgtgtttcagatgtcactgcagtgatattatttttcttcacgttctttatcaccaccatggttatgttggctgccctggctcaccatttgttttactgggatgtttggtttatatataatgtgtgtttagctaaggtaaaaggctacaggtctctttccacatcccaaactttctatgatgcttacatttcttatgacaccaaagatgcctctgttactgactgggtgataaatgagctgcgctaccaccttgaagagagccgagacaaaaacgttctcctttgtctagaggagagggattgggacccgggattggccatcatcgacaacctcatgcagagcatcaaccaaagcaagaaaacagtatttgttttaaccaaaaaatatgcaaaaagctggaactttaaaacagctttttacttggctttgcagaggctaatggatgagaacatggatgtgattatatttatcctgctggagccagtgttacagcattctcagtatttgaggctacggcagcggatctgtaagagctccatcctccagtggcctgacaacccgaaggcagaaggcttgttttggcaaactctgagaaatgtggtcttgactgaaaatgattcacggtataacaatatgtatgtcgattccattaagcaatactaactgacgttaagtcatgatttcgcgccataataaagatgcaaaggaatgacatttctgtattagttatctattgctatgtaacaaattatcccaaaacttagtggtttaaaacaacacatttgctggcccacagtttttgagggtcaggagtccaggcccagcataactgggtcctctgctcagggtgtctcagaggctgcaatgtaggtgttcaccagagacataggcatcactggggtcacactcatgtggttgttttctggattcaattcctcctgggctattggccaaaggctatactcatgtaagccatgcgagcctctcccacaaggcagcttgcttcatcagagctagcaaaaaagagaggttgctagcaagatgaagtcacaatcttttgtaatcgaatcaaaaaagtgatatctcatcactttggccatattctatttgttagaagtaaaccacaggtcccaccagctccatgggagtgaccacctcagtccagggaaaacagctgaagaccaagatggtgagctctgattgcttcagttggtcatcaactattttcccttgactgctgtcctgggatggcctgctatcttgatgatagattgtgaatatcaggaggcagggatcactgtggaccatcttagcagttgacctaacacatcttcttttcaatatctaagaacttttgccactgtgactaatggtcctaatattaagctgttgtttatatttatcatatatctatggctacatggttatattatgctgtggttgcgttcggttttatttacagttgcttttacaaatatttgctgtaacatttgacttctaaggtttagatgccatttaagaactgagatggatagcttttaaagcatcttttacttcttaccattttttaaaagtatgcagctaaattcgaagcttttggtctatattgttaattgccattgctgtaaatcttaaaatgaatgaataaaaatgtttcattttaaaaaaaaaaaaaaaaaaaaaaaggggggggccgttttaaaggatccttcggggggcccaagtttacccggccaggcaaagtaaaagttttttccttaaggggggcccattaaaagcctacttgggattttttggaaaggacctttctttttgggggggaacaaaatgggacaaccttcttccagaattttaaaccttttaggaaaataaaaattttttaggggaaaagggggaaaaactaactcaaaaaccttgtttgttgaaaatttttggaccccccccttcttctttctccgactccttcccctcacactcccacccccctttttcctctataccttaggacccgtccatccttctctcttctcatcaccatccccccctatttcactcccactcctttttcttttcctaacactataccatgtctcctc

SEQ ID NO: 58500 - DNA, 1046 bp, Homo sapiens
gaaaagcgctggaccacatggtctcaaggatgtcattgtccgagatacatgagtttatgacccttactaaaatatattttatgttcttcagcaagagtactaaatttcaggaaacaaacacaattatttagattttattttctaattttggggactgtaactaataatgttatcagtagaaatttgaagaaaataacacatctctattttttaggtgtccctggcaaccttgtgtgtctatttcttactggatgaaggaaacattttaacagccactaaagtgttcacatcgatgtctttgtttaatattttaaggattcctctgtttgagttaccaaccgtgatctcagctgtggtccagacaaagatatccctgggccgtttggaagactttctcaacactgaggagcttcttcctcaaagtattgaaacgaactatacaggagatcatgctattgggtttacagatgcttctttctcctgggataaaacaggaatgccagttctaaaagaggctctgtggcttatgtttctcagcaggcctggattcagaattgcattttgcaagaaaacattctctttggctccatcatgaagaaagagttttatgagcaagtattggaagcctgtgctctccttccagatttggagcagttgccaaagggagatcaaactgagattggagaaagagtaaggaaactgtaatttatcatgtaaagaaatataatcccattcagctgtgctaataaaatgtttatggcctttttcttgaagtctcgaagagctatacaactataattttaaaaaattattatgtaattcctatgtaagagatggcagtattaaagacaagtaattatttataattgactgtttggaaaacagattaaaaatcagtcggaaattctgtttgtagtatccacggggggggaataaaagcccattaattagatcatcatacttttggttttgggggctggcacaatgccagttcactttctaaagagtgactaataagttgtggctaattcctggaccctcggtcc

SEQ ID NO: 58501 - DNA, 1687 bp, Homo sapiens
  misc_feature (1)...(1687): n = a,t,c or g
agactgcaagtgcggtggaattcgatcatggaacttgcactgctgtgtgggctggtggtgatggctggtgtgattccaatccagggcgggatcctgaacctgaacaagatggtcaagcaagtgactgggaaaatgcccatcctctcctactggccctacggctgtcactgcggactaggtggcagaggccaacccaaagatgccacggactggtgctgccagacccatgactgctgctatgaccacctgaagacccaggggtgcggcatctacaaggactattacagatacaacttttcccaggggaacatccactgctctgacaagggaagctggtgtgagcagcagctgtgtgcctgtgacaaggaggtggccttctgcctgaagcgcaacctggacacctaccagaagcgactgcgtttctactggcggccccactgccgggggcagacccctgggtgctagaagcccacaccctctaccctgttcctcagcatggagctctggcatccccacctcagtatctaacctgaaccagcctggcttttcaaacactccggggggaggtagtcccagcctcccccggaaccctctaccaatgccttctgaccttctgaagctttccgaatcctcccagttgaggcagtagctgtgtcctctgagggtggatgggaatcttgggagaagcccaagcaagggagccctcagaggtggtgtttggaccaaagcatcggggtgggggaggggtctgccgctgtcccccacctgctggcccccttgtccttcctcaccccctccaatatagtctcggagctacaaccgcagcagccactataaagggcaatattgatctttctgtccatgtggctctatcttttaaaacctcaaggccctccactgtcctaagataaagcctctcataggcactggggaccctgcacagtctggccatgtgaccctctccccaggcaagctctgaagtccctgcaggtggaggccatgcctgtcttaaactcaggtgcatccctggtgcccaaagcaacaccagaaccaagaaggagcttcataaatccttcttgggtgaagcctacacaaagccgcctggtcttgtggctccaggcaccaaagccttgagtactttctcttgctttcaagcattgcctcagggtgaatcacacggtgctactgaatggctattactttcatcacgactgatccccacctcctcaggggcaaagggctactttttggaagtgtgcccaggctgactccttcttcctgactgcaaaggctcactccctcctacaatcttcaacaatgcttcatggctatgtcgcttacctagctagtcctaaagtggcagatgtaacttctctgaacttcttcaactagaatgtatcccccgagagatggacaccatgtctgtgccatctatgctatgactgacttcccacatactacgtgctcaattcatgcctgcgaatggcgagagcccataatggatacacatatgatgacacccatggtgtttggtacctcacccagatatcttacaaggccaaagcccctcttccttactgaggtcaagtgttggcaaccaaactgctccaatctgccttctttcccctaaatactgcccctggtctaatggggacntgcctttctccctggccccaactttttccaa

SEQ ID NO: 58502 - DNA, 2554 bp, Homo sapiens
ttcccgggtcgacgatttcgtacgaagcctccgcaaggcaaggacttttgcggcttctgcaaccaagcgggtcttacccccggtcctccgcgtctccagtcctcgcacctggaaccccaacgtccccgagagtccccgaatccccgctcccaggctacctaagaggatgagcggtgctccgacggccggggcagccctgatgctctgcgccgccaccgccgtgctactgagcgctcagggcggacccgtgcagtccaagtcgccgcgctttgcgtcctgggacgagatgaatgtcctggcgcacggactcctgcagctcggccaggggctgcgcgaacacgcggagcgcacccgcagtcagctgagcgcgctggagcggcgcctgagcgcgtgcgggtccgcctgtcagggaaccgaggggtccaccgacctcccgttagcccctgagagccgggtggaccctgaggtccttcacagcctgcagacacaactcaaggctcagaacagcaggatccagcaactcttccacaaggtggcccagcagcagcggcacctggagaagcagcacctgcgaattcagcatctgcaaagccagtttggcctcctggaccacaagcacctagaccatgaggtggccaagcctgcccgaagaaagaggctgcccgagatggcccagccagttgacccggctcacaatgtcagccgcctgcaccggctgcccagggattgccaggagctgttccaggttggggagaggcagagtggactatttgaaatccagcctcaggggtctccgccatttttggtgaactgcaagatgacctcagatggaggctggacagtaattcagaggcgccacgatggctcagtggacttcaaccggccctgggaagcctacaaggcggggtttggggatccccacggcgagttctggctgggtctggagaaggtgcatagcatcacgggggaccgcaacagccgcctggccgtgcagctgcgggactgggatggcaacgccgagttgctgcagttctccgtgcacctgggtggcgaggacacggcctatagcctgcagctcactgcacccgtggccggccagctgggcgccaccaccgtcccacccagcggcctctccgtacccttctccacttgggaccaggatcacgacctccgcagggacaagaactgcgccaagagcctctctggaggctggtggtttggcacctgcagccattccaacctcaacggccagtacttccgctccatcccacagcagcggcagaagcttaagaagggaatcttctggaagacctggcggggccgctactacccgctgcaggccaccaccatgttgatccagcccatggcagcagaggcagcctcctagcgtcctggctgggcctggtcccaggcccacgaaagacggtgactcttggctctgcccgaggatgtggccgttccctgcctgggcaggggctccaaggaggggccatctggaaacttgtggacagagaagaagaccacgactggagaagccccctttctgagtgcaggggggctgcatgcgttgcctcctgagatcgaggctgcaggatatgctcagactctagaggcgtggaccaaggggcatggagcttcactccttgctggccagggagttggggactcagagggaccacttggggccagccagactggcctcaatggcggactcagtcacattgactgacggggaccagggcttgtgtgggtcgagagcgccctcatggtgctggtgctgttgtgtgtaggtcccctggggacacaagcaggcgccaatggtatctgggcggagctcacagagttcttggaataaaagcaacctcagaacaaaaaaaaaaaaaaaaaaaaaaccgggccctttaattttaaagggcccctttaaaccccgttaaaaaccctaaaggggccttttaagtgcccaccctttttgtgttggcccttccccgggcctttttttaccctggaaggggcccctccccatggcttttttttaaaaaaaggagaaattggcttccttttgtttaaaagggggctttttttttttgggaagatgctatctgggttcagtcccatggagggcaccaatcagttacttctccagcaacccctggtgaagaaaggttgaaatttgggaacctgaacacactttaacaattttactttgggatgaagcctcatttaaagaaaaccactttcaaaacctttaccaactctttttaaccccaattcaagccccaaaaaattggtggcttttgggttcaaaacccaaaacttttgggaaaaaaccccaaggccaaaaaccccaaatttcaaaaaggggtgccctttaatgggaacctttaacccacctaccagatgaacagggcacaattccagtattctgatccctgtgaatgaagataggaaccttggaaacttaatttaatcctctgtgacattacttggaggtgggaacattttttctgtcgtttggaagcaaaactcatttcatcaaaataatttaaattctctg

SEQ ID NO: 58503 - DNA, 461 bp, Homo sapiens
  misc_feature (1)...(461): n = a,t,c or g
cccgcgcctcgccccnattggacaggatgagtatataactatctattcgatgatgaagataccccaccaaacccaaaaaaagagatctctcgaggatccgaattcgcggccgcgtcgactttaaaaaaatagaaagtcacagagctatggtggtcaaggaagaataaacgatgacctcgctcagctgccagggaacagggctctgacggatgggtgggatgcacatggggagggggaagaggggggagctttgaggaggaagggcagtttaagcttaaggcacgcacacatggaggaaaagggaaaaaggcacacaaagcacgccactttgactgaaacagggctcatggagaagagtggggagacatatggctgccaaactaggttagagagaaggctttcaacgtcgacgcggccgcgaattccagatctatgaatcgtagatactgagaaaccccgcg

SEQ ID NO: 58504 - DNA, 1034 bp, Homo sapiens
  misc_feature (1)...(1034): n = a,t,c or g
aggagagggcgcccgccgattgaatagcaatacggtggcgacacgcccgttcggttggaggtctatataagcagagctctctggctaactagagaacccactgcttactggcttatcgaaattaatacgactcactatagggagacccaagctggctagcgtttaaacttaagcttggtaccgagctcggatccactagtccagtgtggtggaattcggaattcacctgccgagctcagaacgctcagggctcccagcacatttccctgagcctctccctgcagaatgagggcacaggcacctcaagacctgtatcacaagtgacactggcagcagtcgggggagctggagccacagccctggccttcctgtccttctgcatcatcttcatcatagtgaggtcctgcgggaagaaatcggcaaggccagcagcgggcgtgggggatacaggcatggaagatgcaaaggccatcatgggctcggcctctcatggacccctgactgaattcttggaagatggcaacccccttgagaacgctccccaactctgtgccccttcgtaagggaacaggagagagtccatattgcaccctcagttncataaagtgaccctaggacccgcaggacaggaggcatgccagtgatactcgagatcagatcccagcgagaaactgaaaataggcttttgagaatacacccctcagcagaagtaaggtgatctacagacaaaaccttaaggnatgcttgatagtcacagctcttccttgtacaaaattgacatgtnctttccgtacagacatctgctatattatacactttcttgaccttggtgtatttatccaaaaaaggtgggcttctttggggtattacaaaattcttgtatttttttaggaaacactgatttttttaagttttttgcccgaggggatttttaacccctggaaattcttttaaagaagagggcccctttttaaaggttaggggtaatttttgttttggtgagcccctttaagaaaaaaaaagagggttggggt

SEQ ID NO: 58505 - DNA, 15 bp, Homo sapiens
  misc_feature (1)...(15): n = a,t,c or g
cctttttntttttgg

SEQ ID NO: 58506 - DNA, 15 bp, Homo sapiens
  misc_feature (1)...(15): n = a,t,c or g
ccaaaaanaaaaagg

SEQ ID NO: 58507 - DNA, 12 bp, Homo sapiens
aaaaaatttttt

SEQ ID NO: 58508 - DNA, 12 bp, Homo sapiens
aaaaatttttta

SEQ ID NO: 58509 - DNA, 11 bp, Homo sapiens
aaaaatttttt

SEQ ID NO: 58510 - DNA, 12 bp, Homo sapiens
aaaaattttttc

SEQ ID NO: 58511 - DNA, 12 bp, Homo sapiens
aaaaattttttg

SEQ ID NO: 58512 - DNA, 12 bp, Homo sapiens
taaaaatttttt

SEQ ID NO: 58513 - DNA, 12 bp, Homo sapiens
caaaaatttttt

SEQ ID NO: 58514 - DNA, 12 bp, Homo sapiens
gaaaaatttttt

SEQ ID NO: 58515 - DNA, 11 bp, Homo sapiens
aaaaaattttt

SEQ ID NO: 58516 - DNA, 1183 bp, Homo sapiens
tttcgtcccagcccctccccaggccgcgagcgcccctgccgcggtgcctggcctcccctcccagactgcagggacagcacccggtaactgcgagtggagcggaggacccgagcggctgaggagagaggaggcggcggcttagctgctacggggtccggccggcgccctcccgaggggggctcaggaggaggaaggaggacccgtgcgagaatgcctctgccctggagccttgcgctcccgctgctgctctcctgggtggcaggtggtttcgggaacgcggccagtgcaaggcatcacgggttgttagcatcggcacgtcagcctggggtctgtcactatggaactaaactggcctgctgctacggctggagaagaaacagcaagggagtctgtgaagctacatgcgaacctggatgtaagtttggtgagtgcgtgggaccaaacaaatgcagatgctttccaggatacaccgggaaaacctgcagtcaagatgtgaatgagtgtggaatgaaaccccggccatgccaacacagatgtgtgaatacacacggaagctacaagtgcttttgcctcagtggccacatgctcatgccagatgctacgtgtgtgaactctaggacatgtgccatgataaactgtcagtacagctgtgaagacacagaagaagggccacagtgcctgtgtccatcctcaggactccgcctggccccaaatggaagagactgtctagatattgatgaatgtgcctctggtaaagtcatctgtccctacaatcgaagatgtgtgaacacatttggaagctactactgcaaatgtcacattggtttcgaactgcaatatatcagtggacgatatgactgtatagatataaatgaatgtactatggatagccatacgtgcagccaccatgccaattgcttcaatacccaagggtccttcaagtgtaaatgcaagcagggatataaaggcaatggacttcggtgttctgctatccctgaaaattctgtgaaggaagtcctcagagcacctggtaccatcaaagacagaatcaagaagttgcttgctcacaaaaacagcatgaaaaagaaggcaaaaattaaaaatgttaccccagaacccaccaggactcctacccctaaggtgaacttgcagcccttcaactatgaagagatagtttccagag

SEQ ID NO: 58517 - DNA, 1361 bp, Homo sapiens
cccagcccctccccaggccgcgagcgcccctgccgcggtgcctggcctcccctcccagactgcagggacagcacccggtaactgcgagtggagcggaggacccgagcggctgaggagagaggaggcggcggcttagctgctacggggtccggccggcgccctcccgaggggggctcaggaggaggaaggaggacccgtgcgagaatgcctctgccctggagccttgcgctcccgctgctgctctcctgggtggcaggtggtttcgggaacgcggccagtgcaaggcatcacgggttgttagcatcggcacgtcagcctggggtctgtcactatggaactaaactggcctgctgctacggctggagaagaaacagcaagggagtctgtgaagctacatgcgaacctggatgtaagtttggtgagtgcgtgggaccaaacaaatgcagatgctttccaggatacaccgggaggtcacgggttgttagcatcggcacgtcagcctggggtctgtcactatggaactaaactggcctgctgctacggctggagaagaaacagcaagggagtctgtgaagctacatgcgaacctggatgtaagtttggtgagtgcgtgggaccaaacaaatgcagatgctttccaggatacaccgggaaaacctgcagtcaagatgtgaatgagtgtggaatgaaaccccggccatgccaacacagatgtgtgaatacacacggaagctacaagtgcttttgcctcagtggccacatgctcatgccagatgctacgtgtgtgaactctaggacatgtgccatgataaactgtcagtacagctgtgaagacacagaagaagggccacagtgcctgtgtccatcctcaggactccgcctggccccaaatggaagagactgtctagatattgatgaatgtgcctctggtaaagtcatctgtccctacaatcgaagatgtgtgaacacatttggaagctactactgcaaatgtcacattggtttcgaactgcaatatatcagtggacgatatgactgtatagatataaatgaatgtactatggatagccatacgtgcagccaccatgccaattgcttcaatacccaagggtccttcaagtgtaaatgcaagcagggatataaaggcaatggacttcggtgttctgctatccctgaaaattctgtgaaggaagtcctcagagcacctggtaccatcaaagacagaatcaagaagttgcttgctcacaaaaacagcatgaaaaagaaggcaaaaattaaaaatgttaccccagaacccaccaggactcctacccctaaggtgaacttgcagcccttcaactatgaagagatagtttccagag

SEQ ID NO: 58518 - DNA, 1831 bp, Homo sapiens
caaatgttttaacccccagcattttgaggttgtttttcccccttttccctttaaaatttttttttttccctaaagcctttaatttttgtagggaggttggcccaattttttccccccccaaaataaggtttctttcccaaaattcccaagttggttttaaaacggccccctttaaggaaaaaaatttttccttgccaccccccgtaaaatttgggccccccaagggttcttttaaaaggccccccccttttttttttttttttttttttttaaggttatgtgattgtatgtttaatcttaaatagacagtgactttaagataaaaaaaatctatttctcaagctttctcttaaggatttaataccagattattagaccacattaacttggaatgaggttaatgtttaaattattgccttttaaatttgcctcagttcattcaaagctttctgaatctgttggatggatcaacattttggttgattttatagagtataaccttccattttgagacttccaagataatcctcttctcctctctggcttagattttgctcttggtttgttatatttaccatttaggttgttttctccacactcatcatgccaccaccagcctcctgaataaccctctggacagttgaagtgtccttttgctttgtgatcccaagtagaaaacaccaaatctttgttttccgggattgcattggggacattgccagtaatcgcaactagatgtagcgtatagttggtttcgtgatttcccaagtaaaaagaatattcaatataatgtttgttgtctttccagtcttccaactcaattcgtaaaacataattagattgcttcactatggagtatatcttctctaggcccaaccaaaattctccatcaagcctcccaaaaccatatttgtagttctcccacgtttcattgaagttttgtgatccatctattcgatgttgaattaatgtccatggactacctgatataacatcacagtagacatgaaaaacttgagagttgctgggtctgatggcatacatgccacttgtatgttcacctctgttataaatggtggtacattcagcaggaatgccatcatgttttacatttcttatttcattcaactgaagaaagggagtagttcttggtgctcttggcttggaagatagagaaatttctgtgggttcttgaatactagtccttctgagctgattttctatttcttttatttgactatgctgttggtttaattgtttatattggtcttccacggtctggagaaggtctttgatgctattatcttgtttttctacaaaagttttaagtgaagttacttctgggtgttctggagtttcaggttgattttgaattaagttagttagttgctcttctaaatatttcactttttgttgaagtagaattttttcttctaggaggctttcaagttttgagttgagttcaagtgacatattctttacctcttcatttttgactagtagtttatatgtaaggccctatagccagataaggagtggtggcttagagcggagactcactgcagatgtgaaacacatgtttgtgctggtcctacggtcaccactgggtcactggaacgtggtgtaacaggaagtgacatttagtcatttctctttggcctcttcaaaagctgagtcaaacacagggtggtagtattgatcgattctcataactgaaatttgatttaaaagttataccctttcatatttttcctgagttttatcttgcaattgaacattaaattctgtgccttgttccataggatgcagaacgaaatcgtcgacccggaaa

SEQ ID NO: 58519 - DNA, 1859 bp, Homo sapiens
ctccagaacacccagaagtaacttcacttaaaacttttgtagaaaaacaagataatagcatcaaagaccttctccagaccgtggaagaccaatataaacaattaaaccaacagcatagtcaaataaaagaaatagaaaatcagctcagaaggactagtattcaagaacccacagaaatttctctatcttccaagccaagagcaccaagaactactccctttcttcagttgaatgaaataagaaatgtaaaacatgatggcattcctgctgaatgtaccaccatttataacagaggtgaacatacaagtggcatgtatgccatcagacccagcaactctcaagtttttcatgtctactgtgatgttatatcaggtagtccatggacattaattcaacatcgaatagatggatcacaaaacttcaatgaaacgtgggagaactacaaatatggttttgggaggcttgatggagaattttggttgggcctagagaagatatactccatagtgaagcaatctaattatgttttacgaattgagttggaagactggaaagacaacaaacattatattgaatattctttttacttgggaaatcacgaaaccaactatacgctacatctagttgcgattactggcaatgtccccaatgcaatcccggaaaacaaagatttggtgttttctacttgggatcacaaagcaaaaggacacttcaactgtccagagggttattcaggaggctggtggtggcatgatgagtgtggagaaaacaacctaaatggtaaatataacaaaccaagagcaaaatctaagccagagaggagaagaggattatcttggaagtctcaaaatggaaggttatactctataaaatcaaccaaaatgttgatccatccaacagattcagaaagctttgaatgaactgaggcaaatttaaaaggcaataatttaaacattaacctcattccaagttaatgtggtctaataatctggtattaaatccttaagagaaagcttgagaaatagattttttttatcttaaagtcactgtctatttaagattaaacatacaatcacataaccttaaaaaaaaaaaaaaaaaaaaaaaaaaggtctttaatttaaggggccgaacgtttattccttttggggggggaaaattttaatgggcttgggcccgggttttaaaaacgtggggaggggaaaaaaattgggagaaaccattgttcacaggataagttaggctggggaagaggaaacagccttgggatctctggactctctgggagaaaaggccaccagaagggcctgtgctacatctcttgccagggtctctttggacagacatagctgccacgcctcattgtagaggaggtttcagcccgcctgcccccaacccccagacagaagcggcgtgtccacctggcctatctttgacatttcaaggagacccttggaccaaccattggaagggtccttcctggcctaaaaggggcaccctgggggtcccccttctttgtccttgggaaaccaaccttcttaaaccaaaaaaacggaaattcccaattttttttccttttcttttttgggtgggcccccttgggttcaaaggccgggcccccccaaaagttccccccttttggaaataaaggggggtgggccctttccaaaaaggggctcaacaaggattactggaagacgtgaggccaccctaagcagggaccctggaaggagccccttccaggggcccctgcacctgggaagccccctgtccctaactgtcaaaggcataacaagggttaaataggcataagaaagaggccggcacttcgggggtgggacctactcaggggaaggcag

SEQ ID NO: 58520 - DNA, 813 bp, Homo sapiens
ttgggcctagagaagatatactctatagtgaagcaatctaattatgttttacgaattgagttggaagactggaaagacaacaaacattatattgaatattctttttacttgggaaatcacgaaaccaactatacgctacatctagttgcgattactggcaatgtccccaatgcaatcccggaaaacaaagatttggtgttttctacttgggatcacaaagcaaaaggacacttcaactgtccagagggttattcaggtatctttttctgataccaatactttattttcatatcttcaaagtatcttcccacattattagctattatctgcaatgacaacttttaaaaatccgaatcccaaataagcgttttctctctagacgaaaacctcttaactataatgaaagtgttcattctagttcaatcaggtattttacctctaatcttcctcagattttctattttttggtagtgtatagattatttatacagattatttaaaattgggacttatacagattatttaaaactgggatacatgcatctaaaacactgtaatatttataagaaaggaagataaacttacggggaaatacagtaacagtaactacatacgagtctgtacccattaaattgcatatctatctcctttaggaggctggtggtggcatgatgagtgtggagaaaacaacctaaatggtaaatataacaaaccaagagcaaaatctaagccagagaggagaagaggattatcttggaagtctcaaaatggaaggttatactctataaaatcaaccaaaatgttgatccatcc

SEQ ID NO: 58521 - DNA, 2554 bp, Homo sapiens; identical to SEQ ID NO: 58502

SEQ ID NO: 58522 - DNA, 2549 bp, Homo sapiens
tcccgggtcgcgatttcgtcacgactgtgatccgattctttccagcggcttctgcaaccaagcgggtcttacccccggtcctccgcgtctccagtcctcgcacctggaaccccaacgtccccgagagtccccgaatccccgctcccaggctacctaagaggatgagcggtgctccgacggccggggcagccctgatgctctgcgccgccaccgccgtgctactgagcgctcagggcggacccgtgcagtccaagtcgccgcgctttgcgtcctgggacgagatgaatgtcctggcgcacggactcctgcagctcggccaggggctgcgcgaacacgcggagcgcacccgcagtcagctgagcgcgctggagcggcgcctgagcgcgtgcgggtccgcctgtcagggaaccgaggggtccaccgacctcccgttagcccctgagagccgggtggaccctgaggtccttcacagcctgcagacacaactcaaggctcagaacagcaggatccagcaactcttccacaaggtggcccagcagcagcggcacctggagaagcagcacctgcgaattcagcatctgcaaagccagtttggcctcctggaccacaagcacctagaccatgaggtggccaagcctgcccgaagaaagaggctgcccgagatggcccagccagttgacccggctcacaatgtcagccgcctgcaccggctgcccagggattgccaggagctgttccaggttggggagaggcagagtggactatttgaaatccagcctcaggggtctccgccatttttggtgaactgcaagatgacctcagatggaggctggacagtaattcagaggcgccacgatggctcagtggacttcaaccggccctgggaagcctacaaggcggggtttggggatccccacggcgagttctggctgggtctggagaaggtgcatagcatcacgggggaccgcaacagccgcctggccgtgcagctgcgggactgggatggcaacgccgagttgctgcagttctccgtgcacctgggtggcgaggacacggcctatagcctgcagctcactgcacccgtggccggccagctgggcgccaccaccgtcccacccagcggcctctccgtacccttctccacttgggaccaggatcacgacctccgcagggacaagaactgcgccaagagcctctctggaggctggtggtttggcacctgcagccattccaacctcaacggccagtacttccgctccatcccacagcagcggcagaagcttaagaagggaatcttctggaagacctggcggggccgctactacccgctgcaggccaccaccatgttgatccagcccatggcagcagaggcagcctcctagcgtcctggctgggcctggtcccaggcccacgaaagacggtgactcttggctctgcccgaggatgtggccgttccctgcctgggcaggggctccaaggaggggccatctggaaacttgtggacagagaagaagaccacgactggagaagccccctttctgagtgcaggggggctgcatgcgttgcctcctgagatcgaggctgcaggatatgctcagactctagaggcgtggaccaaggggcatggagcttcactccttgctggccagggagttggggactcagagggaccacttggggccagccagactggcctcaatggcggactcagtcacattgactgacggggaccagggcttgtgtgggtcgagagcgccctcatggtgctggtgctgttgtgtgtaggtcccctggggacacaagcaggcgccaatggtatctgggcggagctcacagagttcttggaataaaagcaacctcagaacaaaaaaaaaaaaaaaaaaaaaaccgggccctttaattttaaagggcccctttaaaccccgttaaaaaccctaaaggggccttttaagtgcccaccctttttgtgttggcccttccccgggcctttttttaccctggaaggggcccctccccatggcttttttttaaaaaaaggagaaattggcttccttttgtttaaaagggggctttttttttttgggaagatgctatctgggttcagtcccatggagggcaccaatcagttacttctccagcaacccctggtgaagaaaggttgaaatttgggaacctgaacacactttaacaattttactttgggatgaagcctcatttaaagaaaaccactttcaaaacctttaccaactctttttaaccccaattcaagccccaaaaaattggtggcttttgggttcaaaacccaaaacttttgggaaaaaaccccaaggccaaaaaccccaaatttcaaaaaggggtgccctttaatgggaacctttaacccacctaccagatgaacagggcacaattccagtattctgatccctgtgaatgaagataggaaccttggaaacttaatttaatcctctgtgacattacttggaggtgggaacattttttctgtcgtttggaagcaaaactcatttcatcaaaataatttaaattctctg

SEQ ID NO: 58523 - DNA, 3248 bp, Homo sapiens
tgcagctgcaggcagctcccggatccctgtgtgcgctccgggcggaggatgagagtgtcttactgcttaggccagacagagagctgagcaaccgctctgtctatgggatgtttccattctggtatggtcactacccctatcaagtggctgagtatgatcagtgtccagtgtctggcccatgggactttcctcagcccctcattgacccaatgccccaagggcattcgagccagcgttccattatctggaggccctcgttctctgaaggcacggaccttttcagctttttccgggacgtgggcctgaaaatactgtccaatgccaaaatcaagaagccagtagattgcagtcacagatctccagaatacagcactgctatgggtgcaggcggtggtcatccagaggcttttgagtcatcaactcctttacatcaagcagaggattctcaggtccgccagtacttcccagagacctggctctgggatctgtttcctattggtaactcggggaaggaggcggtccacgtcacagttcctgacgccatcaccgagtggaaggcgatgagtttctgcacttcccagtcaagaggcttcgggctttcacccactgttggactaactgctttcaagccattctttgttgacctgactctcccttactcagtagtccgtggggaatcctttcgtcttactgccaccatcttcaattacctaaaggattgcatcagggttcagactgacctggctaaatcgcatgagtaccagctagaatcatgggcagattctcagacctccagttgtctctgtgctgatgaagcaaaaacccaccactggaacatcacagctgtcaaattgggtcacattaactttactattagtacaaagattctggacagcaatgaaccatgtgggggccagaaggggtttgttccccaaaagggccgaagtgacacgctcatcaagccagttctcgtcaaacctgagggagtcctggtggagaagacacacagctcattgctgtgcccaaaaggaaaggtggcatctgaatctgtctccctggagctcccagtggacattgttcctgactcgaccaaggcttatgttacggttctgggagacattatgggcacagctctgcagaacctggatggtctggtgcagatgcccagtggctgtggcgagcagaacatggtcttgtttgctcccatcatctatgtcttgcagtacctggagaaggcagggctgctgacggaggagatcaggtctcgggcagtgggtttcctggaaatagggtaccagaaggagctgatgtacaaacacagcaatggctcatacagtgcctttggggagcgagatggaaatggaaacacatggctgacagcgtttgtcacaaaatgctttggccaagctcagaaattcatcttcattgatcccaagaacatccaggatgctctcaagtggatggcaggaaaccagctccccagtggctgctatgccaacgtgggaaatctccttcacacagctatgaagggtggtgttgatgatgaggtctccttgactgcgtatgtcacagctgcattgctggagatgggaaaggatgtagatgacccaatggtgagtcagggtctatggtgtctcaagaattcggccacctccacgaccaacctctacacacaggccctgttggcttacattttctccctggctggggaaatggacatcagaaacattctccttaaacagttagatcaacaggctatcatctcaggagaatccatttactggagccagaaacctactccatcatcgaacgccagcccttggtctgagcctgcggctgtagatgtggaactcacagcatatgcattgttggcccagcttaccaagcccagcctgactcaaaaggagatagcgaaggccactagcatagtggcttggttggccaagcaacgcaatgcatatgggggcttctcttctactcaggatactgtagttgctctccaagctcttgccaaatatgccactaccgcctacgtgccatctgaggagatcaacctggttgtaaaatccactgagaatttccagcgcacattcaacatacagtcagttaacagattggtatttcagcaggataccctgcccaatgtccctggaatgtacacgttggaggcctcaggccagggctgtgtctatgtgcagacggtgttgagatacaatattctccctcccacaaatatgaagacctttagtcttagtgtggaaataggaaaagctagatgtgagcaaccgacttcacctcgatccttgactctcactattcacaccagttatgtggggagccgtagctcttccaatatggctattgtggaagtgaagatgctatctgggttcagtcccatggagggcaccaatcagttacttctccagcaacccctggtgaagaaggttgaatttggaactgacacacttaacatttacttggatgagctcattaagaacactcagacttacaccttcaccatcagccaaagtgtgctggtcaccaacttgaaaccagcaaccatcaaggtctatgactactacctaccagatgaacaggcaacaattcagtattctgatccctgtgaatgaggataggagctggaaactcaattagtcctctgtgacattactggagggtggaacattcttctgtcgcttgaagcagaactcattcaatcaaataatttaatttctctgactagtatatgggtaacaaatgaatatgtctgaacctcagctataatactttctactacctttgcaaggagatgggataggaacaatcactcagaggaggcgttgcatggacagggtcatagggggaagaaaggtggtttagctgttttatttagccattcagggggctctccagagaggagacggtggtagagggtgaactagagaagataagaatgtcttcctaggccggatgcggtggctcacgcctgtaatcccagcactttgggattgcgaggtgggcggatcacttgaggtcaggagttcaagaccagcctggccaacatggtaaaacccgtctctactaacaatacaaagattaacctggtgtggtggcacgggcctgtaatcgcagccccttggaaggccaaggcaggagaatcgcctcaacactggaggtggaggttgcagtgagctgagattgtgccactgcactccagcctgggcaatgaagcaagaccctgtctcaat

SEQ ID NO: 58524 - DNA, 1623 bp, Homo sapiens; identical to SEQ ID NO: 58463

SEQ ID NO: 58525 - DNA, 2661 bp, Homo sapiens; identical to SEQ ID NO: 58499

SEQ ID NO: 58526 - DNA, 1581 bp, Homo sapiens
tgaacatgaatccacagatcagaaatccgatggagcggatgtatcgagacacattctacgacaactttgaaaacgaacccatcctctatggtcggagctacacttggctgtgctatgaagtgaaaataaagaggggccgctcaaatctcctttgggacacaggggtctttcgaggccaggtgtatttcgagcctcagtaccacgcagaaatgtgcttcctctcttggttctgtggcaaccagctgcctgcttacaagtgtttccagatcacctggtttgtatcctggaccccctgcctggactgtgtggcgaagctggccgaattcctgtctgagcaccccaatgtcaccctgaccatctccgccgcccgcctctactactactgggaaagagattaccgaagggcgctctgcaggctgagtcaggcaggagcccgcgtgaagatcatggactatgaagaatttgcatactgctgggaaaactttgtgtacaatgaaggtcagcaattcatgccttggtacaaattcgatgaaaattatgcattcctgcaccgcacgctaaaggagattctcagatacctgatggatccagacacattcactttcaactttaataatgaccctttggtccttcgacggcgccagacctacttgtgctatgaggtggagcgcctggacaatggcacctgggtcctgatggaccagcacatgggctttctatgcaacgaggctaagaatcttcgctgcccgcatctatgattatgaccccctatataaggaggcgctgcaaatgctgcgggatgctggggcccaagtctccatcatgacctacgatgaatttgagtactgctgggacacctttgtgtaccgccagggatgtcccttccagccctgggatggactagaggagcacagccaagccctgagtgggaggctgcgggccattctccagaatcagggaaactgaaggatgggcctcagtctctaaggaaggcagagacctgggttgagcagcagaataaaagatcttcttccaagaaatgcaaacagaccgttcaccaccatctccagctgctcacagacaccagcaaagcaatgtgctcctgatcaagtagattttttaaaaatcagagttaattaattttaattgaaaatttctcttatgttccaagtgtacaagagtaagattatgctcaatattcccagaatagttttcaatgtattaatgaagtgattaattggctccatatttagactaataaaacattaagaatcttccataattgtttccaccacaaacactaaaaaaaaaaattttttttttagcggcccgaaggtttttccctttaagggggggtaattttaacttggccctggcccgtgttttaccaccacctgaatgggaaaaacattggtttaaaaggtgggaaggggaaaaaccgtgggggcccccaattaaatggggttggaaaaacattcccctttgccccaggtggccttagacctggaaccgcccgagtttggacggctcctggggtgttactgcgcctccgcctattaatgttctacgccccgcctggcg

SEQ ID NO: 58527 - DNA, 1305 bp, Homo sapiens
cccacgcgtccgggaaacagaccacggtacataagtaggctggtgaaaaccgagcaggcaggcacaatgtgagcgtaccgcggctgagaatgcctggccacggacattgcttacacaggtgaggaaggtgacatgtcagctgtggccagaagaaattgagggtgcaagccatgcgggaatctcagggaacagcattctaggctcagggaacagcatgtgcaaagacagagcatgagagggttcctgaatcgtgccaggactggtgccccagccttgcagctggtgagctgtggacccaaggttttgtgccacgtgtgtctggctctaaaacacagtgacagagcgtgggtccacacacttgcacacgtgcatgcatgttctaacagtggagcttcgggcaacaagatggtccacagggaggtgtttttcactcaggcagcgtcaaatcccaccacagaggagccatttacactttgcccttctctgaaatctgcaggttttaaaaatctgagctttcaaaggcagctgtgctgagtgggaagggcaagtgctttggacaaaagtcaggctgagggccctcgggtgccagctccaccacctactcagacaggcagcggcctgccctgactccgtttcccctttgctaacagtattcctgggagagtcattctcctgaagtcgtagggacctttgaagttcccaggcatccacctgctctgggttcctgagtggccatgacccgcgcccttcctcgaacctcccagttacacacatctctttgattgcttttggcagacagccagctgccaaaacatgtgagataggcaagggtcaaacttccgtgcagtctcactaccagatagtgaggaagtcagcgtgtggcctgcacgcacagagccgtttattaactgagtaggtgccacaggcagggaccacgtggttcccagctggcaagggaggtcaaggaagtcccagctccctgatcctccagggacttcctgcccatcttgggagtagagttcattggggccaagagcaagaggctacaggctcatctcctggaagcagacgttatgcaaacagaagcttccctgttaatgggagtttgtccagtgtattctcccaagagcaggggccaccggctggatttctgttctctgtccatgtccctgaagatggcacctctaaaatactatagctcaaaaacatcaagctggacacggtggctcttgcctgtcaacccagcattttgggaggccaaggtgggaggatagcttgagcccaggagtttgagaccagcctgga

SEQ ID NO: 58528 - DNA, 1030 bp, Homo sapiens
ctttcagaggcttccggaggactgagcagctagaggtgattttgcatttgcgtttcccgacgttgccacatctcaggtgaataagttctatgaagcgctcacactagtacgtggcccctcggtggtttgtcctcgaggtcgaaggtccagatgtccaggggctgccctggactccagagtggtgcggctgagcaggctgtggtcttgggtgcttgggcacctcccgtctctccctgctcagagttcttctctcctgggcagccagaaaggatcagaaccggtcacatgcagagcggcctcccgtatcccacagcagctccgttctctaatctgggtcttcagatgcggctgtgtctcccggcaccttgctggaatgtggtgcatccctcggagtccagcagcccttaggcagagctgggtgccgagcttgagtccaggagggcctcagacacctgcgatcttgcagcctgttgccctggacagtgggtgtgctgtgggtggaggatggcgccctgcctccacggaagcatccccagcttgcccctcagtcacacgaagcgtctgtccccagcctggggcatttctgagtggcctccacttggcctcttcctttttctggagcaagtatttgaactcctgcaggcgccagagatctccttacctgtttcccgctacccttctccagccaggtttctgccctcagccagattgtcctgcagtgacttgcttttggccatggagtagtggctgctcagtgcctgagattgttttagcagcagaagggaccgggtccccctgctgctggcaacacagacgcttgcttacagttctctggtcctggacacctgaggtctcggcctccccaggacggcccttccagattctcaggaccaccttgccctccctgccctgtctcctaggtgaccctggcaaagatgagagtgcacatttcgtcctgcctgaaggtccaggagcagatggccaactgccccaagttcgtccccgtggtgcccacatcacagcctatccc

SEQ ID NO: 58529 - DNA, 2192 bp, Homo sapiens
aggagtgatagatggatggaagaaggaattacggaaggagtggaagagagagaaagcaaggagcagtagtgaagggtacaatatacgaggactttattattatgaacaagtatattttagaaaacactcagttcgtttatgtggggagagatgtttttaaaacgactttttattagacgcccgagtcgcagaggtaaaaatattgcgaatgctctttcacaaggagacgaagttttggggccaacaattgaaaaaaaggattgtgctcttgtcaaaataagagcatataaaaaaaagttttttggcgcccgggggggagagaataagtgaatgtggacactaagaggtgggagacaggagaaaaacacccccgggaggaggagattatgatacggagaaaaaaaagaaaaaaattacacttttctcgaaaaagtaggaggtaaataaaggtaaaagaaacaaaaggggttaatcacgtttgggccgatcttttaacactaatggaatgggccccagcccggtggggtgaggggaaataaaaaaaaaagtgggggaggaaacggggagcaccgcgcataataccagattttgggagaggagcgaaagtggaaccatagaggcaaggattttaggccacctgggcacacatgggaaaacccccttttttataaaaacccaaaaaattagtgtgggggggggggggcccctgtagaaccaattatttgggagggtaaggcaaaaaatacgctttaacctggggggcaaagaatgccagaaaagccaaatggcccccttgcccgcgagccgtggtgacaaagtgaggttttttttgaaaaaaaaaaaaaaggagcaaaacagcaacaacaaactgccacacaatgaagtcttcaggcctgtggaagcaggtggggctgctcactcccatgccaactggccccagattgcttgctcccttagaatgggattcaccccttagcatgttttggtttcctccatcatcagattgctaactcccacccctaccgcttgcagagtgtctgagtccagtgtcatctctaggcttgttttacttgctgcacaaaacctctcctgagcagagaagctgggtaaccagtcttcctgacataaggagtgtgtacttgccagtcatcccatgggcagcctccctggtgacactgcccaagcagatgccatccctagccttggcccagaccactcaggagacatgctttgagtcacacactggagagctagaaagaacttaaaggtgcctggccactggggatttattttttaatctggggaacaagacacatacaaatgtatccacacaatgccataaatatcagatgatgctctccacagatccccaactcacgaggctctgagaggtaacttacaaatggacccaagtattcaggtggagaggaaaggtagggctcatggagttttcctgaaggttttattaggaaaggaaagtggacatctccagtgtatatatgtacatatacactgttgtttgacagcgcacaaattgctgggctttggtttcctggggataatcacggtctccatcccatagggttatggtcaggattaaatggaaaaaaatatagtgtctggcaagtagtcaataaatgttagctaatgctactattactactactgctactattattgtaattgttgttattataaactctgtgtttgttcagtccccctggcaggggaatagggacctcctcccttagtggctgtcaggtgagtaaggactatgaccataagctgtcatctgataggtgtcagggaactcttcctcccacctcagccttgcactccagacaggccagaaaccgatgtacatgaataaaacttctacggcagaaaccgaagtccctctactacctgtgactaaatgaggcctcaaatcaaagcaaagtctcagccagccaatgtggagtttagagggtgcttcatccatgaggaagaacgtggaaggaatggcagacagatacacacacacacacacacacgtgcacacaacacacatacacacgtgtgcacacacaagcacacacacgtgcacacatgcacacacatgcatacatgaaaggtggtgttctcattgtcttcaatttggtaaatgagtttctgggttatgtagtagaaggaccatttcaaaccacagtaaa

SEQ ID NO: 58530 - DNA, 299 bp, Homo sapiens
ttcaaaaaaatagaaagtcacagagctatggtggtcaaggaagaataaacgatgacctcgctcagctgccagggaacagggctctgacggatgggtgggatgcacatggggagggggaagaggggggagctttgaggaggaagggcagtttaagcttaaggcacgcacacatggaggaaaagggaaaaaggcacacaaagcaagtcactttgactgaaacagggctcatggagaagagtggtgagacatatggctgcaaaactaggttagagagaaggctttcaacgtcgacgcggccg

SEQ ID NO: 58531 - DNA, 943 bp, Homo sapiens
attttattagttaatgtctacaaattctgtttgtcacttaatttcaggagactttgatctgcttggttatgaagtagttgaagggaataatgtcacactggatattacagaacaaaccaaaggaaaacccaacttggagacattcacactgaattgggatgggatcgcttctaagccactcactctatggtcatcagaagctgaagtacggtgtaggaatgtttctaccacgcattttccctgcaccctctcacatcattcatgggccatttgtagacagatgggaaagagatgttacttcaaaaaaaatcactgcaaattatttatcacctgatcaactcaccacaatttatatactgtgatacttttatctgaaaggagactaagagtcaacctagtgcagccacctctttttccagacaaggcatatctcaaaggttccaaagccttgccctgcctatgtgtagaagctttgagtccctctatgcacactggagttgttcttcactcaacatccaatttgttatcctgtaaaatcagaaattccttgagagatgtagtgcaataaaagcttagctataaagtattggttagtttaaatatcctattattttattgatgtatttttatacatcagagagaaattttaaggcttcagcagagaccttaagaaatatggtacccaaatcctaactcagcaaattttaagactttacccaacaaaaagggtcaaaaagatcaatgagattccactagtggagcatcctttcaaagaggagagacgtttaaacagaacaccatttaaatgtcaaccttttataaagaacactttaaggaggagtaatacattcttccatttggcgtgataggttggagcctacccgtagtgaggagagaagggaggaaatattccaaagacaagagaaggaaagggaagatctta

SEQ ID NO: 58532 - DNA, 983 bp, Homo sapiens
tcaggtggaaattccctgaataaccttattgaactaaagacaatcaatattaacccttctgacaccacagtgccccttctgaatgactgcacagagtatcacaggtatattgaaattgctataaagcagtgcaggagctcaggaatcgattgtaaaatccatggtctcatcctgctgggacggatccgtgcagaagaggaagatttggctgcagttcctttcttagcttcggataatgaagaggaggaggatgagaaaggcaacagcggaagcctcattagaaagaaggctgctgggctggaatcagcagctacgataagaaccaaggtgtttgtgtggggcctgaatgacaaggaccagctgggcgggctgaaaggctccaagataaaggttccttcgttctctgagacactgtcagctttgaatgtggtacaggtggctggtggatctaaaagtttgtttgcagtgactgtggaagggaaggtgtatgcctgtggagaagccacgaatggccggctggggctgggcatttccagcgggacggctgcccatcccacggcagatcacagctctcagcagctacgtggtcaagaaggtggctgttcactcaggtggccggcacgcgacggctttaactgtcgatggaaaagtgttttcgtggggcgaaagtgacgatggaaaacttggacacttcagcagaatgaactgtgacaaaccaaggctgatcgaggccctgaaaaccaagcgtatccgggatatcgcctgtgggagctcgcacagcgcagccctcacatccagcggagaactgtacacctggggcctcggcgagtacggccggctgggacatggggataatacgacacagctaaagcccaaaatggtgaaagtccttctcggtcaccagagtaaatccagttgccttgtggggagtatagaccccccgaacccttggctctgaaccgaatgagggtttgggatttttc

SEQ ID NO: 58533 - DNA, 1868 bp, Homo sapiens
atgaggtggcgctggtgggcgaccgggcgcatcctcattgcagtgcggcggccctacctcggccctggcctgaccccggcggccctgcccgcccctccctccagcatcatggccagcccaagaaccaggaaggttcttaaagaagtcagggtgcaggatgagaacaacgtttgttttgagtgtggcgcgttcaatcctcagtgggtcagtgtgacctacggcatctggatctgcctggagtgctcggggagacaccgcgggcttggggttcacctcagctttgtgcgctctgttactatggacaagtggaaggacattgagcttgagaagatgaaagctggtgggaatgctaagttccgagagttcctggagtctcaggaggattacgatccttgctggtccttgcaggagaagtacaacagcagagccgcggccctctttagggataaggtggtcgctctggccgaaggcagagagtggtctctggagtcatcacctgcccagaactggaccccacctcagcccaggacgctgccgtccatggtgcaccgagtctctggccagccgcagagtgtgaccgcctcctcggacaaggcttttgaagactggctgaatgatgacctcggctcctatcaaggggcccaggggaatcgctacgtggggtttgggaacacgccaccgcctcagaagaaagaagatgacttcctcaacaacgccatgtcctccctgtactcgggctggagcagcttcaccactggagccagccggtttgcctcggcagccaaggagggcgctacaaagtttggatcccaagcgagtcagaaggcgtccgagctgggccacagcctgaacgagaacgtcctcaagcctgcgcaggagaaggtgaaggagggaaagatttttgatgatgtctccagtggggtctctcagttggcgtccaaggtccagggagtcggtagtaagggatggcgggacgtcaccacctttttttcggggaaagcagagggccccttggacagcccctcggagggccacagttatcaaaacagcggtctggaccacttccaaaacagcaacatagaccagagcttctgggagacctttggaagtgctgagcccaccaagacccgcaagtccccgagcagcgacagctggacgtgcgcggacacctccaccgagaggaggagctcggacagctgggaggtgtggggctcggcctccaccaacaggaacagcaacagcgacggcggggagggcggggagggcaccaagaaggcagtgccgccggccgtgcccactgatgatggctgggacaaccagaactggtagggcccactgcgcccccgtccccagcgcccccgggcgacttcgtgtttgcactctgccctcgtcgttcctcctccttccatttgacccaagaatcagcaactgcagtgtgaggacagcgtctcgggaggcaggaccctagggagacccgggtgtgcgccgcctgcgcgtggggagtcttcggtgcgtgggggcggcttgctgtccagcctgtgtgggggccgtcccgtcccacactcccctgggcattcttggactcaaggccggggctctgcgtggcttgctgggaggtgggctgcagcacagaggcctgtgactgcgttccagcggccagttcactacgcagtatctctggggcctgggaccagccacgtgccgagctgtcagcgacgtgaggtgtcccttctcgttgagatatttaactgtgggtttgctctagatctttctttttgaagagagtgactggagtgggaaagattggaaatgctggaaatgatactgggcgctacgctgtcatgcgaccaccctcggcttccgagtcc

SEQ ID NO: 58534 - DNA, 414 bp, Homo sapiens; identical to SEQ ID NO: 58415

SEQ ID NO: 58535 - DNA, 907 bp, Homo sapiens
agggaaacgtcatatatctggaagttcagaaaggccagttcctgcggctcctctgtgctgctgacagccagccccctgccacgctgagctgggtcctgcaggacagagtcctctcctcgtcccacccctggggccccagaaccctggggctggagctgcgtgggatcctccagagaacctgagagtgatggtttcccaagcaaacaggacagtcctggaaaacctcgggaacggcacatccctcccggtcctggagggccaaagcctgcgcctggtctgtgtcacccacagcagccccccagccaggctgagctggacccggtggggacagaccgtgggcccctcccagccctcagaccccggggtcctggagctgccacccattcaaatggagcacgaaggagagttcacctgccacgctcagcaccctctgggctcccagcacgtctctctcagcctctccgtgcactggaagctggagcatgggggaggacttggcctgggggctgccctgggagctggcgtcgctgccctgctcgctttctgttcctgccttgtcgtcttcagggtgaagatctgcaggaaggaagctcgcaagagggcagcagctgagcaggacgtgccctccaccctgggacccatctcccagggtcaccagcatgaatgctcggcaggcagctcccaagaccacccgcccccaggtgcagccacctacaccccggggaagggggaagagcaggagctccactatgcctccctcagcttccagggcctgaggctctgggagcctgcggaccaggaggcccccagcaccaccgagtactcggagatcaagatccacacaggacagcccctgaggggcccaggctttgggcttcaattggagagggagatgtcagggatggtt

SEQ ID NO: 58536 - DNA, 417 bp, Homo sapiens
ccatgttttcaggacgtgttttacttgatcttcccccgttatgaaatgaccggggagctccaagggacccaggggcacgtcctcaagcggatcctggcctaatcacccaagacttgtcgctgaaacctcgaacaattatgcgagaggaatggaggccttgccgcccggcagtactctggctgtccatagagaatgtcgtgcttgacaatgcctacctaaaccctccggaagaactgctatttatttctgtgacgaggcacataaagctctttgctgagaaagctacaaggggacatcatgttcatgtggaacacactgtgatcatagacttgcttgaggacattgatactctttgtgatggctatgacacagcccactatggaacagctgtctttggacagaacgaatacctactct

SEQ ID NO: 58537 - DNA, 821 bp, Homo sapiens
gctgaacagtgcatagagactggggaccagtttgagagcttaggctgccctaggccctgcccagcttctctaaggcaaaaagatttaatatatcagcatgattgtgacacattggaggcataccagttgggaaacactggtttgaactattttcatatctagctatttcctcttgtgaatggggcagatggggacaaaccaatagtaagtgacctgaaatcacttttaatggttttcagaaagcatctggtcacctgagatctatagagaagaaaccggaataaatttcaaaaaggatatagatacaacttagtatgccggactgttgtcttggtataatgaggtggagttctaaccacaagttgtcttattatcctggctatttttaaaataatttcaactttttttttttttttttttggaaaaaaagtttctttttgccccccatttgggagggggggggggccagggggccaatttgggttaacggaacccggacccccgggggcccaacaaattttggggcggggccccccccagaagtgggaacaacgggggcccgtaaacccgcccgaaaatcccaaatttagaaacggaaaacccggaaaacccccgagggtccctttaacgggggcatggggccccatcaaaatttttttatttaaaccacggtttggccttttttaaggaaacaaacccccccaaggttcaaatttgggccaggaacccttggattaaaaaaatttttaaagggacaaaaataagggcccatttttttttggacccaaaatttttcgggaaaatttttcccgggggctaaa

SEQ ID NO: 58538 - DNA, 1373 bp, Homo sapiens
ccgcaatacaggtgggctcaatttctcccatgttcttgtaactgaagacatggattttcatctgataatggtaaactctgaaaggcatgcctgcccgggtttttaggtacattttgctgttcctcttgttcctcattttcttggcattgtagccaatgctattacaacggttcttgcggcagctcagacagatcccctttttgaagcgattggagtcagtgcactggaaggcaaaactcggcttgtcctgattcaccagagagtcaacaaagaggtggacggctcgctcatgctcacattttaccacctctgtgattgttccatatgcaattgatcccaagacatcgttgagtccacagcctggctggaagtcacccccattggggtagatgtcaatgtggcccacaggcatctgaataccaatgctcaagccgaaggaacgcgtgtaggtgtggaggacatccacaaaatctgcatcgtccggagagagcctcttgtggatgtcggccccttcaaacatgggcccggcaggatccaaacctgtgattcggcccaccgttcctttcacgaagttgcctgcatacccggccacgtgcgctccgaggctgtagccgatcaagtggacattcccgagagaaaaatcgtccttctcctgcagccagtcgagcatcctggcaatgctgtgtcccaccaccctggtattattgaccgcatccgtgtaaagctggtgggccagggggagccagtcaaccacaactacattggcgtctttctctcttgggtgcagggctgacacgagtttgtgcagccagttttcaaagataccgctcatcgtccatccgtgaatgatgaaaaaggttttagctgtcatgttgaaactgcagtcttctaagggctggctgtggccgacggagaggtagcatccttcatgctctgggtccttggaggtgcggaggttaaacctcacagatggtttgacctcagtctgtgtagctttgggtttgtggagcttatcgcgtggacgccgcacgctcggccccgcttcctcccgggcccgctccgcaggcagctgcgactccagcagctccagctttctcccactgccctcctccggacacccagatcctcctctccccactgccatcccaagtggcggaggcggacatttccctgaaactctgcgtccgctggggaggcgatccctggagaaggagagcatcctctccaaggctcaaagccacactctctctgggagtggtctatccgctccctgggccgggagtccgtcgggggagagccacctggtcatcccctttgtcctcctcttctccctcccttcccgcctagcgagggccgcaacaggtgcagaaggc

SEQ ID NO: 58539 - DNA, 649 bp, Homo sapiens
caagtcctggaggatggagctccggtgcgcattgagctctgggacacagcgggacaggaggattttgaccgacttcgttccctttgctacccggataccgatgtcttcctggcgtgcttcagcgtggtgcagcccagctcctttcaaaacatcacagagaaatggctgcccgagatccgcacgcacaacccccaggcgcctgtgctgctggtgggcacccaggccgacctgagggacgatgtcaacgtactaattcagctggaccaggggggccgggagggccccgtgccccaaccccaggctcagggtctggccgagaagatccgagcctgctgctaccttgagtgctcagccttgacgcagaagaacttgaaggaagatttgactcggctattctcagtgccattgaacacaaagcccggctggataagaaactgaatgccaaaggtgtgcgcaccctcttccgctgccggtggaagaagctcttctgcttcgtttgagcagctatggctgcatagtaagtaattaggcaggaggccctaaagactttttgagaacctgggggcaccccggggccttttgcgggtagcttcttggcccggttcctgggccctccctcataaggaacttcatttcccctttatggaac

SEQ ID NO: 58540 - DNA, 1022 bp, Homo sapiens
atgagaaggcccaacagcaccttgctttctggtggggaagcctggcctctgggagtggccctgttttccaggatctggcattggagagatgggcaaagatgaagggacgtgccagatcctcagctggggtcccgtttaatggattctgacatggattatgaaaggccaaacgtagagaccatcaagtgcgttgtggtgggggacaacgccgtgggtaagaccaggctcatctgtgcccgcgcttgcaatgccaccctcacccagtaccagctgctggccacgcatgtgcccacagtatgggccatcgaccaatatcgtgtgtgccaggaggtgctggaacgctcccgagacgtggtagatgatgtcagcgtctctctgcgcctctgggacacctttggagaccaccacaaagaccgtcgctttgcttatgggagatctgatgtggtggttctgtgcttctccattgccaaccccaattccctccaccatgtcaagaccatgtggtacccagaaatcaagcacttctgcccccgagcacctgtcatcttggtgggctgccagttggacctgcgctacgctgacctggaggctgtcaacagggctaggcgacccttggctaggcccatcaaacctaatgaaatcctgcccccagagaagggtcgggaggtggccaaggagctgggcatcccctactatgagaccagcgtggtggcccagttcggcatcaaggacgtctttgacaacgccatccgagctgcactcatctcccgccgccacctgcagttctggaagtcccacctccgcaatgtgcagcggcctctgctgcaggcacccttcctaccccccaagccaccgcccccgatcatcgtggtgcccgaccctccctccagcagcgaggagtgccccgcccacctcctggaggacccgctctgcgcggacgtcatcctggtgctgcaggagcgggtgcgcatctttgcccacaagatctacctctccacctcctcctccaagttctatgacct

SEQ ID NO: 58541 - DNA, 1589 bp, Homo sapiens
ttttttttccccctccccccgttttaaaaaacgggccagggccaaattaaaattacccccccttaaaaggaaaaaacttcgggccccttaaaaaaaaaatttttttttttttttttttttttttttttttcacagaacccaaggtcaactttattagaatcttggcacactgattaactgaaccacatagcagccccaggatgcaggctggttctggcctatctgtttggtccaggatgagataagataactcctggcctcccaccatggttaccctgcaactgggttgacaacttttcccaggaagagtaagctctgggtggtgacctcccaaaggagcaagaggaaaggcctgttgaagtgggcatgtgggtctgacatggtgttcagagatgggggctgggagaggaggcctgaagcagccccggcctcggtccccttctcactcatgtccaccatcgccttgtgtgacaccttggagatggttttgttgagctgcccagtgactcctgagaagtcagcttctaagttgagtatgttggtgagaccaatttggggaagtatgtcttccaggttatatgttccagaaattgaaaaccttggcaagtgcaaatccaacagactgggcaggagcaattggccccattttctcagggtctgtggctgcagagcagcctccacctgcttcattttccccgggtcagggaggaccagcagcgccaaggcatttcctctgtattctatctggaggacggtgcaagccaaatcctggtcatagaggaatctgtgcatttccttttggtgcatcatggggacctggagagaagtcctctcatccacaaagaaactttcctgcttctgggtctggtagcgactgaaagggtgcttccacttggctttgaagaagatgtaattggcaagaaccatgaacgtgtcctggctgaactccgggaggcagtccacgacttgcccgtatgtttgccttctcaaatagtcattaatctgcctcccagttgtaacagaatctgtgaagttggcagaaaaagcaaaagctccgtaaagctccttgatgctgtccaaatagtgctgccgaggctttagtcgcttgtctaggaacagggagtttcctacttttagttcgagtttggggctgggcagggcaagggtgtggaggaggctccggaagccctggtggatgtcggcttcaggggtttctgtgaggttgaatcccaggccctccaggatcagagctgaggtgttagcttgggccccaagagagagcagggccagggtggtggagatgctcactggcgagaagaagatgtttccgggggcgtctgctgccagctctttatacaaacgcaaagcaaaattggtaatggtgggtgtgattctgtggtaggcgggggctggctctgagagctgatgcctggggggttgaggcccctgcagacttttatctccatgggcaagaaggggctgacagtggacagaggccaggatccctgttcccagtagccaaagccaagctggacccattctagagcaaaggcactgagcaggggcccaggtcttcagcactgcatcac

SEQ ID NO: 58542 - DNA, 934 bp, Homo sapiens
atgagaaggcccaacagcaccttgctttctggtggggaagcctggcctctgggagtggccctgttttccaggatctggcattggagagatgggcaaagatgaagggacgtgccagatcctcagctggggtcccgtttaatggattctgacatggattatgaaaggccaaacgtagagaccatcaagtgcgttgtggtgggggacaacgccgtgggtaagaccaggctcatctgtgcccgcgcttgcaatgccaccctcacccagtaccagctgctggccacgcatgtgcccacagtatgggccatcgaccaatatcgtgtgtgccaggaggtgctggaacgctcccgagacgtggtagatgatgtcagcgtctctctgcgcctctgggacacctttggagaccaccacaaagaccgtcgctttgcttatgggagatctgatgtggtggttctgtgcttctccattgccaaccccaattccctccaccatgtcaagaccatgtggtacccagaaatcaagcacttctgcccccgagcacctgtcatcttggtgggctgccagttggacctgcgctacgctgacctggaggctgtcaacagggctaggcgacccttggctaggcccatcaaacctaatgaaatcctgcccccagagaagggtcgggaggtggccaaggagctgggcatcccctactatgaggccagcgtggtggcccagttcggcatcaaggacgtctttgacaacgccatccgagctgcactcatctcccgccgccacctgcagttctggaagtcccacctccgcaatgtgcagcggcctctgctgcaggcacccttcctaccccccaagccaccgcccccgatcattgtggtgcccgaccctcccttcagcagcgaggagtgccccgcccccctcctggaggacccgctctggc

SEQ ID NO: 58543 - DNA, 1359 bp, Homo sapiens
agataatggcaagcatggctgccgtgctcacctgggctctggctcttctttcagcgttttcggccacccaggcacggaaaggcttctgggactacttcagccagaccagcggggacaaaggcagggtggagcagatccatcagcagaagatggctcgcgagcccgcgaccctgaaagacagccttgagcaagacctcaacaatatgaacaagttcctggaaaagctgaggcctctgagtgggagcgaggctcctcggctcccacaggacccggtgggcatgcggcggcagctgcaggaggagttggaggaggtgaaggctcgcctccagccctacatggcagaggcgcacgagctggtgggctggaatttggagggcttgcggcagcaactgaagccctacacgatggatctgatggagcaggtggccctgcgcgtgcaggagctgcaggagcagttgcgcgtggtgggggaagacaccaaggcccagttgctggggggcgtggacgaggcttgggctttgctgcagggactgcagagccgcgtggtgcaccacaccggccgcttcaaagagctcttccacccatacgccgagagcctggtgagcggcatcgggcgccacgtgcaggagctgcaccgcagtgtggctccgcacgcccccgccagccccgcgcgcctcagtcgctgcgtgcaggtgctctcccggaagctcacgctcaaggccaaggccctgcacgcacgcatccagcagaacctggaccagctgcgcgaagagctcagcagagcctttgcaggcactgggactgaggaaggggccggcccggacccccagatgctctccgaggaggtgcgccagcgacttcaggctttccgccaggacacctacctgcagatagctgccttcactcgcgccatcgaccaggagactgaggaggtccagcagcagctggcgccacctccaccaggccacagtgccttcgccccagagtttcaacaaacagacagtggcaaggttctgagcaagctgcaggcccgtctggatgacctgtgggaagacatcactcacagccttcatgaccagggccacagccatctgggggacccctgaggatctacctgcccaggcccattcccagctccttgtctggggagccttggctctgagcctctagcatggttcagtccttgaaagtggcctgttgggtggagggtggaaggtcctgtgcaggacagggaggccaccaaaggggctgctgtctcctgcacatccagcctcctgcgactccccaatctggatgcattacattcaccaggctttgcaaacccagcctcccagtgctcatttgggaatgctcatgagt

SEQ ID NO: 58544 - DNA, 1606 bp, Homo sapiens
gatgggcggagccccagccgctagtgctggtggccgccgctgctgccccagctggagcccgagccgccgcctctgcgtccgcgcgtcgctgcttcccagggcggcggtatgctggggaaaggagtagtcggcggtggcggcggcaccaaggcccccaagccctccttcgtgtcgtacgtacgccctgaggaaattcacacaaacgaaaaggaagtaacagagaaggaagtaactcttcacttgttgccaggtgaacagctgctttgtgaagccagcacagtactgaagtatgtccaggaagattcctgtcagcatggggtctatgggaggcttgtctgcacagacttcaagattgccttcttgggtgatgatgaatctgcattggataatgatgaaactcaatttaagaataaggttataggagaaaatgacattacactccactgtgttgatcagatttatggagtgtttgatgagaaaaagaaaactctctttggacaactgaagaaataccctgagaagctcatcatccactgcaaagaccttcgagtgttccagttttgtctgaggtacacaaaggaagaggaagtcaaaaggattgtcagtggcataattcatcatacccaggctcctaaactgcttaaacgattatttctgttttcctatgcgactgctgcacaaaacaatacagtcactgatcccaagaaccataccgtaatgtttgacacacttaaggactggtgttgggaactggaacggaccaaaggcaacatgaagtacaaagcagtgagtgtcaacgaaggctataaagtctgtgagagattgccagcatactttgttgtccccacccctcttcctgaagagaatgtgcagcgctttcagggtcatggcataccaatatggtgttggtcctgccacaatggaagtgcccttttgaaaatgtcagcactgcccaaagaacaggatgacggcattttacaaatccaaaagagcttcttagatggaatttacaagaccatccacaggccaccctatgaaattgttaaaacggaagacctgtcaagcaacttcctgtccctgcaggaaatccagactgcatactctaaatttaaacagctatttctgatagataacagtactgaattttgggacacagatataaaatggttttctctgttggaaagtagcagctggcttgacataatcagacgttgcctgaaaaaagcaatagagattacagaatgtatggaagcacaaaacatgaatgttcttcttttagaggagaatgcatccgacctctgctgtctcatttcctctctggtgcaactgatgatggacccccactgcagaaccagaattggtttccagagcctcatccaaaaggagtgggtcatgggtggccactgtttcttggatcgctgcaaccatctccgtcagaacgacaaagaggagcatcaacgacaactttctttgccacttacacaatctaagtcatctcccaaaagaggatttttcagggaagaaacagatcatttaattaaaaaccttctgggcaagagaattagcaaacttattaattcttctgatgagctccaagacgtgtatt

SEQ ID NO: 58545 - DNA, 698 bp, Homo sapiens
cgacattacaaacatttttatagggaacttaaataaaaattcatatagaaccagaatctatcttagtatttgaacaactcattggcagtaaactcagttccttctgtacaggattaatggtttccaagctgtaaattatgatttagagccttgtgcattaagattgactttgagccaggggaggcttggaagaggacaatgtatagtttgctttaggaggtcttggagcacatttgtgtggggaaaacagcagtgagttagagtgaagaacgagaaatgccagacgcaggggatggtatctggtagtctatgtgtcctgttgtgcagagtgctaggaaatccaaagcgacttcagaagtagaactgtggattcttagcggtgctaatagtgtgagttgagtgatgaggaggtggtcgtagttgaaataggataggataacagagcttgtgaccatgagaagtagacaaagagatgaattaaggaaatataaggaaggaaaaaatatattctggaaatgggctgaactgggggcaaagaacagtagggttgaagattttgctaaataaatcattggctgtgaactcttggctctcgtgagatgcatgaccattcccttgctcaggcatttccacctcctggaaagccttgtctttgcctgtcagaatattcaagccctaatttaacgtcgacgcggccg

SEQ ID NO: 58546 - DNA, 1005 bp, Homo sapiens
gaatgtaaatttatacattctagtcaagtcatcaaaaatagattaagcacttactgtgtgccaggtactctgtgtgagctataaaaatgagtaggtcatagtatttgcccttaggaagttcctgtgtgctaccaagaacatcaagcatatcaaagtaaaatatttgctaaatattggatattcttagggagccgtgagtgtatttatttcacaacatgccaatgacccagacatggtgaactccgtggtcaggcctgctggatgaaacacagcgtggtgggtattaggttcaaattgcagagggacagcactaccttggtaggtgtagacgttcagcatctatggggccctgttaggtggacttggctccagagcccactcttggaaacttggtccagtccttccacactgccatgagccagccagtgcctctgctgtctgaaccattggggtcatcattgtgttcaccgccattagtcacctggctgctgactcagattgatcttcttcaagggaatcttgacattttgaggaggagaggacccctttggcagtctggtgaagccaatggataccttatcagagtaatatatttattaatgtatcaaataaaacccacaggactacaagggcagtgaattgtattaaaattcaatcttctaaatattttttaaagccaagttgtaatatagtaatataaggccgggcgcggtggctcatgcctgtaatcccagcactttgggacgccaaggtgggcggatcacctgaggtcaggagttcaaaaccagcctgaccaacattgagaaaccccatctctactaaaaatacaaaattagccgggtatagtggtgcgtgcctgtaatcccagctagttgggaggctgaggcaggagaatcgcttgaatctggaaggcagaggttgcggtgagccgagattgtgccattgcactccagcctgggtaacaagagtgagactccatgtcaaaaaaaaaaaaaaaaaaatttt

SEQ ID NO: 58547 - DNA, 544 bp, Homo sapiens
ggggggggtgtgtttgatgtgttttagtgaaagtcttcctatcccacattattttgttcataacattttttaccatatagattgctctatgattccttgtttattttttgtagattttaattttttaaattgacaaatacaaattgtacatatttatgatgtacagtatgatattttgtgatgtatatatatatgtacacatactgtgcaataactaaatcaagctaattaacatacccattaacacatataattatcatttgttttgtggtgagagcatttaacatctactctcttagcaatgcttaagtgtataatacgttgttattaactataaccaccatattgtacagtagatatcttgaactcattcttcccatctaactgaaattttatgtcttttcaccagcatctctccaacccatcccccactatcctctagggaccaccatttttattctctgcttctatgagtttgacttttagattccacatacaagtgagatcatgcagtatttgcccttctgtgccgtcgacgcggccg

SEQ ID NO: 58548 - DNA, 958 bp, Homo sapiens
  misc_feature (1)...(958): n = a,t,c or g
ttcaaaagtcaaatactgagctcttattctctggactggaccccggcaaagaatttttacttactctaccaacagagtgatggaaattccctgccggggcccaaataagaaacctattgtnnnnnnnnnnnnnnnnnnnnnnnngctcctagagtcagatactgagctcttattctctggactgggatcaggagaagaagttttacctactctaccaacagagtcagtgaattttactgaagtggaacaaatcaataacacattatatccccacacttctcaagtggaaagtacctcaagtgacaaaattgaagactttaacagaatggaaaatgtggcaaaagaagttggaccactcgtatctcaaacagacatctttgaaggtagtgggtcagtaaccagcacaacattaatagaaattttaagtgacactggagcagaaggacccacggtggcacctctccctttctccacggacatcggacatcctcaaaatcagactgtcaggtgggcagaagaaatccagactagtagaccacaaaccataactgaacaagactctaacaagaattcttcaacagcagaaattaacgaaacaacaacctcatctactgattttctggctagagcttatggttttgaaatggccaaagaatttgttacatcagcaccaaaaccatctgacttgtattatgaaccttctggagaaggatctggagaagtggatagttgattcatttcacacttctgcaactactcaggcaaccagacaagaaagcagcaccacatttgtttctgatgggtccctggaaaaacatcctgaggtgccaagcgctaaagctgttactgctgatggattcccaacagtttcagtgatgctgcctcttcattcagagcagaacaaaagctcccctgatccaactagcacactgtcaaatacagtgtcatatgagaggta

SEQ ID NO: 58549 - DNA, 1791 bp, Homo sapiens
acgactgctccctgagcatcagagacgccaggaagagggataaggggtcatatttctttcggctagagagaggaagcatgaaatggagttacaaatcacagttgaattacaaaactaagcagctgtctgtgtttgtgacagccctgacccataggcctgacatcctcatcctagggaccctagagtctggccactccaggaacctgacctgctctgtgccctgggcctgtaagcaggggacaccccccatgatctcctggattggggcctccgtgtcctccccgggccccactactgcccgctcctcagtgctcacccttaccccaaagccccaggaccacggcaccagcctcacctgtcaggtgaccttgcctgggacaggtgtgaccacgaccagtaccgtccgcctcgatgtgtcctaccctccttggaacttgaccatgactgtcttccaaggagatgccacagcatccacagccctgggaaatggctcatctctttcagtccttgagggccagtctctgcgcctggtctgtgctgtcaacagcaatccccctgccaggctgagctggacccgggggagcctgaccctgtgcccctcacggtcctcaaaccctgggctgctggagctgcctcgagtgcacgtgagggatgaaggggaattcacctgccgagctcagaacgctcagggctcccagcacatttccctgagcctctccctgcagaatgagggcacaggcacctcaagacctgtatcacaagtgacactggcagcagtcgggggagctggagccacagccctggccttcctgtccttctgcatcatcttcatcatagtgaggtcctgcgggaagaaatcggcaaggccagcagcgggcgtgggggatacaggcatggaagatgcaaaggccatcaggggctcggcctctcagggacccctgactgaatcctggaaagatggcaaccccctgaagaagcctcccccagctgttgccccctcgtcaggggaggaaggagagctccattatgcaaccctcagcttccataaagtgaagcctcaggacccgcagggacaggaggccactgacagtgaatactcggagatcaagatccacaagcgagaaactgcagagactcaggcctgtttgaggaatcacaacccctccagcaaagaagtcagaggctgattctcacagaacaagaaccctctagagccccatgctatgcagtaggtcaccagggctccctcctcctgtctaaccaaaacttggaccaatgtctcccctttccccggctaccagggacccatccctgcctctagcttctactacccaccattctcctctcgacctctctgaggttgactattttagattccacatagagatgaggtcatgtggtacttgcctctctgtgtgtggctcattttacacaaaaaaatatcccctaggttcatccatgttctctcaaatgacagaatcaagcactgaatatttttttttctttgagagatggagtttcgctctgttgcccaggctggagtgcagtggttcaatctctgctcactgcaacctccacctcctgggttcaaacgattctcctgcctcagcttcccaagtagctggtactacaggcgtgtgtcaccacgcccagctaatttttgtattttttagtagagacggggtttcactataagtgggccaggctagtctcaaactcctgacctcaagtgatctgcctgccttggcctcccaaagtgctgggatttcaggcatgagccaccgcacccag

SEQ ID NO: 58550 - DNA, 1496 bp, Homo sapiens
aagcaaagaaatgtgcatacacattcctggtacctgaacaaagaataacagggccaatctgtgtcaacaccaaggggcaagatgcaagtaccattaaagacatgatcaccaggatggaccttgaaaacctgaaggatgtgctctccaggcagaagcgggagatagatgttctgcaactggtggtggatgtagatggaaacattgtgaatgaggtaaagctgctgagaaaggaaagccgtaacatgaactctcgtgttactcaactctatatgcaattattacatgagattatccgtaagagggataattcacttgaactttcccaactggaaaacaaaatcctcaatgtcaccacagaaatgttgaagatggcaacaagatacagggaactagaggtgaaatacgcttccttgactgatcttgtcaataaccaatctgtgatgatcactttgttggaagaacagtgcttgaggatattttcccgacaagacacccatgtgtctcccccacttgtccaggtggtgccacaacatattcctaacagccaacagtatactcctggtctgctgggaggtaacgagattcagagggatccaggttatcccagagatttaatgccaccacctgatctggcaacttctcccaccaaaagccctttcaagataccaccggtaactttcatcaatgaaggaccattcaaagactgtcagcaagcaaaagaagctgggcattcggtcagtgggatttatatgattaaacctgaaaacagcaatggaccaatgcagttatggtgtgaaaacagtttggaccctgggggttggactgttattcagaaaagaacagacggctctgtcaacttcttcagaaattgggaaaattataagaaagggtttggaaacattgacggagaatactggcttggactggaaaatatctatatgcttagcaatcaagataattacaagttattgattgaattagaagactggagtgataaaaaagtctatgcagaatacagcagctttcgtctggaacctgaaagtgaattctatagactgcgcctgggaacttaccagggaaatgcaggggattctatgatgtggcataatggtaaacaattcaccacactggacagagataaagatatgtatgcaggaaactgcgcccactttcataaaggaggctggtggtacaatgcctgtgcacattctaacctaaatggagtatggtacagaggaggccattacagaagcaagcaccaagatggaattttctgggctgaatacagaggcgggtcatactccttaagagcagttcagatgatgatcaagcctattgactgaagagagacactcgccaatttaaatgacacagaactttgtacttttcagctcttaaaaatgtaaatgttacatgtatattacttggcacaatttatttctacacataaagtttttaaaatgaattttaccgtaactataaaagggaacctataa

SEQ ID NO: 58551 - DNA, 904 bp, Homo sapiens
  misc_feature (1)...(904): n = a,t,c or g
ggctatggatgggagattctggatacgagtgcaggagtcagtgatggtgccggagggcctgtgcatctctgtgccctgctctttctcctacccccgacaagactggacagggtctaccccagcttatggctactggttcaaagcagtgactgagacaaccaagggtgctcctgtggccacaaaccaccagagtcgagaggtggaaatgagcacccggggccgattccagctcactggggatcccgccaaggggaactgctccttggtgatcagagacgcgcagatgcaggatgagtcacagtacttctttcgggtggagagaggaagctatgtgagatataatttcatgaacgatgggttctttctaaaagtaacagtgctcagcttcacgcccagaccccaggaccacaacaccgacctcacctgccatgtggacttctccagaaagggtgtgagcgtacagaggaccgtccgactccgtgtggcctatgcccccagagaccttgttatcagcatttcacgtgacaacacgccagccctggagccccagccccagggaaatgtcccatacctggaagcccaaaaaggccagttcctgcggctcctctgtgctgctgacagccagccccctgccacactgagctgggtcctgcagaacagagtcctctcctcgtcccatccctggggccctagacccctggggctggagctgcccggggtgaaggctggggattcagggcgctacacctgccgagcggagaacaggcttggctcccagcagcgagccctggacctctctgtgcagtatcctccagagaacctgagagtgatggtttcccaagcaaacaggacagtcctggaaaaccttgggaacgngcacgtctctcccagtactggagggccc

SEQ ID NO: 58552 - DNA, 687 bp, Homo sapiens
agccctggacctctctgtgcagtatcctccagataacctgagagtgatggtttcccaagcaaacaggacagtcctggaaaaccttgggaacggcacgtctctcccagtactggagggccaaagcctgtgcctggtctgtgtcacacacagcagccccccagccaggctgagctggacccagaggggacaggttctgagcccctcccagccctcagaccccggggtcctggagctgcctcgggttcaagtggagcacgaaggagagttcacctgccacgctcggcacccactgggctcccagcacgtctctctcagcctctccgtgcactgtgagtgggggaaaggggacacctgggtcccaggaaggggaccctgctgagtcctgtcctccctcccctcagactccccgaagctgctgggcccctcctgctcctgggaggctgagggtctgcactgcagctgctcctcccaggccagcccggccccctctctgcgctggtggcttggggaggagctgctggaggggaacagcagccaggactccttcgaggtcacccccagctcagccgggccctgggccaacagctccctgagcctccatggagggctcagctccggcctcaggctcagctgtgaggcctggaacgtccacggggcccagagtggatccatcctgcagctgccaag

SEQ ID NO: 58553 - DNA, 1052 bp, Homo sapiens
  misc_feature (1)...(1052): n = a,t,c or g
tctgaggccccctctcccaccccctcacaaccacacgctgtcccatcaccactcgtccgccaactccctcaacaggaactcactgaccaatcggcggagtcagatccacgccccggccccagcgcccaatgacctggccaccacaccagagtccgttcagcttcaggacagctgggtgctaaacagcaacgtgccactggagacccggcacttcctcttcaagacctcctcggggagcacacccttgttcagcagctcttccccgggataccctttgacctcaggaacggtttacacgcccccgccccgcctgctgcccaggaatactttctccaggaaggctttcaagctgaagaagccctccaaatactgcagctggaaatgtgctgccctctccgccattgccgcggccctcctcttggctattttgctggcgtatttcatagcaatgcatctgctcggactcaattggcaactccagcctgcagatgggcacacctttaacaatgggataaggaccggcttaccaggaaacgatgatgtggcaacaatgccatctggaggcaaagtgccctggtcgttgaaaaacagcagcatagacagtggtgaagcacaagttggtcggtgggtaacacaagaagtcccaccaggggtgttttggaggtcacaaattcacatcagtcagccccagttcttaaagttcaacatctccctcgggaaggacgctctctttggtgtttacataagaagaggacttccaccatctcatgcccaggtatgaccatgtttgatgtaatcaagcatttaaaaaaatatatacgtatatatgtgtgtgtgtatatatgccacttcacatccactacaatgcctatnattaaaagatggacaataaaaatgttggcgagaatttggagaaataagaacccttgtacattgctggtgggaatgtgaaatggtgcaactgttgttgaaaaaagacaagttttcacaaagttaaaatgtagacttaccatgtgattgagcaatttccacttttaagtatataccccaaa

SEQ ID NO: 58554 - DNA, 670 bp, Homo sapiens
ctgtgaagctccatgtggtggacatctgacagcgtccagcggagtcattttgcctcctggatggccaggatattataaggattctttacattgtgaatggataattgaagcaaaaccaggccactctatcaaaataacttttgacagatttcagacagaggtcaattatgacaccttggaggtcagagatgggccagccagttcgtccccactgatcggcgagtaccacggcacccaggcaccccagttcctcatcagcaccgggaacttcatgtacctgctattcaccactgacaacagccgctccagcatcggcttcctcatccactatgagagtgtgacgcttgagtcggattcctgcctggacccgggcatccctgtgaacggccatcgccacggtggagactttggcatcaggtccacagtgactttcagctgtgacccggggtacacactaagtgacgacgagcccctcgtctgtgagaggaaccaccagtggaaccacgccttgcccagctgcgacgctctatgtggaggctacatccaagggaagagtggaacagtcctttctcctgggtttccagatttttatccaaactctctaaactgcacgtggaccattgaagtgtctcatgggaaaggagttcaaatgatctttcacacctttcat

SEQ ID NO: 58555 - DNA, 738 bp, Homo sapiens
cgacccacgcgtgcggctcctgtggccacaaaccaccagagtcgagaggtggaaatgagcacccggggccgattccagctcactggggatcccgccaaggggaactgctccttggtgatcagagacgcgcagatgcaggatgagtcacagtacttctttcgggtggagagaggaagctatgtgagatataatttcatgaacgatgggttctttctaaaagtaacagccctgactcagaagcctgatgtctacatccccgagaccctggagcccgggcagccggtgacggtcatctgtgtgtttaactgggcctttgaggaatgtccacccccttctttctcctggacgggggctgccctctcctcccaaggaaccaaaccaacgacctcccacttctcagtgctcagcttcacgcccagaccccaggaccacaacaccgacctcacctgccatgtggacttctccagaaagggtgtgagcgcacagaggaccgtccgactccgtgtggcctatgcccccagagaccttgttatcagcatttcacgtgacaacacgccagatcctccagagaacctgagagtgatggtttcccaagcaaacaggacagtcctggaaaaccttgggaacggcacgtctctcccagtactggagggccaaagcctgtgcctggtctgtgtcacacacagcagccccccagccaggctgagctggacccagaggggacaggttctgagcccc

SEQ ID NO: 58556 - DNA, 3027 bp, Homo sapiens
  misc_feature (1)...(3027): n = a,t,c or g
cggcgatccgccccccgggcgacgatttcgtgctgcccgagttcctgacccaccagtacaagtacgaggcgggcgagatccgctggggcgccgagggccgcgacgtctgcgcagccaacggctcgggcggcgacgaggggcccgaccccgacctcatctgccgcaaccggacggctaccaacatgatgtacttgctgctcattggggcccaggtgctcctgggcatcggtgctacccctgtgcagcccctgggcgtctcctacatcgacgaccacgtgcggaggaaggactcctcgctctatataggaatcctgttcacgatgctggtatttggaccagcctgcgggtttatcctgggctctttctgtaccaaaatctacgtggatgcggtcttcattgacacaagtaacctggacatcactccggacgacccccgctggatcggagcctggtggggtggctttctgctctgcggtgccttactcctcttctcttccctcttgatgtttgggtttccacagtccctgcccccgcactcagaccccgccatggaaagcgagcaggccatgctctccgaaagagaatacgagagacccaagcccagcaacggggtcctgaggcaccccctggagccagacagcagtgcctcctgtttccagcagctgagagtgatcccgaaggtcaccaagcacctgctctcaaaccctgtgttcacctgcatcatcctggccgcctgcatggagattgcagtggtggctggcttcgctgcctttttggggaagtacctggagcagcagtttaacctcaccacctcttctgccaaccagctgcttgggatgactgcgatcccgtgtgcttgtctgggtatcttcctgggaggtcttttggtgaagaagctcagcctgtctgccctgggggccattcggatggccatgctcgtcaacctggtgtccactgcttgctacgtctccttcctcttcctgggctgcgacactggccctgtggctggggttactgttccctatggaaacagcacagcacctggctcagccctggacccctactcgccctgcaataataactgtgaatgccaaaccgattccttcactccagtgtgtggggcagatggcatcacctacctgtctgcctgctttgctggctgcaacagcacgaatctcacgggctgtgcgtgcctcaccaccgtccctgctgagaacgcaaccgtggttcctggaaaatgccccagtcctgggtgccaagaggccttcctcactttcctctgtgtgatgtgtatctgcagcctgatcggtgccatggcacagacaccctcagtcatcatcctcatcaggacagtcagccctgaactcaagtcttacgctttgggagttctttttctcctccttcgtttgttgggcttcatccctccacccctcatcttcggggctggcatcgactccacctgcctgttctggagcacgttctgtggggagcaaggcgcctgcgtcctctacgacaatgtggtctaccgatacctgtatgtcagcatcgccatcgcgctcaaatccttcgccttcatcctgtacaccaccacgtggcagtgcctgaggaaaaactataaacgctacatcaaaaaccacgagggcgggctgagcaccagcacagagtaccaagacattgagactgagaaaacctgccccgaatcacattcaccttcagaagactcctttgtgagaagctgagggcctggccctcttcctcttcctggagagaacagccctccaccacccacagacctcgcgggcctcacttagcgtgctcctccctgtccgagaacccgagggtccccatgtggattatccagccagtgtgtggtcctttgaggccccaagcgcaggcctgtgatgaggaccaaagaggtgacttatggtcaggagtactccaaacagctctcagagtaggcatctttcctgggtctctaaagagtcatgctgacctggtgtgcaaattcccttccacccatccctctacctcctctggggatggcttgccgacatgctttagaaactcccctcttgggaatgctcctctgactgagggctccaacagctttaatgaaatcagccgagagggtaaaaaccaacctgttgcattgaatggaggggggaaaaagcacatactcaatagatttttgagtgtggtactctgtatttttgcagcgtttattttccaaatgagcagtttagaaatatgtgatgtaaagtacatactgtacgtttgctgaaaattatattaaaagcactattttaattcttaaaaaaaaaaaaaaaaaaaaaaaaaaaaaagggggggccgttttaaaaaaacccttggggggcccaaattttacccgggcttgcaaggtaaaaattttttcctttaaagggggggttttaaaaaccaccttgggaatttttggaaaaaaaccttttttttggggggggaaaaaatgggaaaaaccccctacaaaaattaaaagctttaagggaaaaaaaaaatttttaaagggaaaagggggaaaaaaaaccgcaaaatcttggggtttaaaaaattttttttccgggttttattttaaaaaaatttttcccccgggggtttgtggttttnnnnnnnnnnnncnnnngggccgcccccctttcnnngggaaagctcccccccccggcaagttttttccaaaaaggcgtggggccccccccccnaagagggaaggggtgtnnnnnnnnnngncnnnncccccccccccccccccccctgttttttttttttttttttnnancncnnancaaannccccccnccnaataaggggggtggnngnngaaccccccnnaaaaccccccccccccgcccggggtgacccttttntnnggccccggggccccccccccccacaaaaaaaaaaaaaacngttggggtttaattataaaannnnggggccgccccctgggttttctacctaacggagaagaaccccccctctgtttgggggggc

SEQ ID NO: 58557 - DNA, 1392 bp, Homo sapiens
aagcgagcaggccatgctctccgaaagagaatacgagagacccaagcccagcaacggggtcctgaggcaccccctggagccagacagcagtgcctcctgtttccagcagctgagagtgatcccgaaggtcaccaagcacctgctctcaaaccctgtgttcacctgcatcatcctggccgcctgcatggagattgcagtggtggctggcttcgctgcctttttggggaagtacctggagcagcagtttaacctcaccacctcttctgccaaccagctgcttgggatgactgcgatcccgtgtgcttgtctgggtatcttcctgggaggtcttttggtgaagaagctcagcctgtctgccctgggggccattcggatggccatgctcgtcaacctggtgtccactgcttgctacgtctccttcctcttcctgggctgcgacactggccctgtggctggggttactgttccctatggaaacagcacagcacctggctcagccctggacccctactcgccctgcaataataactgtgaatgccaaaccgattccttcactccagtgtgtggggcagatggcatcacctacctgtctgcctgctttgctggctgcaacagcacgaatctcacgggctgtgcgtgcctcaccaccgtccctgctgagaacgcaaccgtggttcctggaaaatgccccagtcctgggtgccaagaggccttcctcactttcctctgtgtgatgtgtatctgcagcctgatcggtgccatggcacagacaccctcagtcatcatcctcatcaggacagtcagccctgaactcaagtcttacgctttgggagttctttttctcctccttcgtttgttgggcttcatccctccacccctcatcttcggggctggcatcgactccacctgcctgttctggagcacgttctgtggggagcaaggcgcctgcgtcctctacgacaatgtggtctaccgatacctgtatgtcagcatcgccatcgcgctcaaatccttcgccttcatcctgtacaccaccacgtggcagtgcctgaggaaaaactataaacgctacatcaaaaaccacgagggcgggctgagcaccagtgagttctttgcctctactctgaccctagacaacctggggagggaccctgtgcccgcaaaccagacacataggacaaagtttatctataacctggaagaccatgagtggtgtgaaaacatggagtccgttttatagtgactaaaggagggctgaactctgtattagtaatccaagggtcatttttttcttaaaaaaaaaaaaaaggttccaaaaaaaaccaaaactcagtacacacacacaggcacagatgcacacacacgcagacagacacaccgactttgtccttt

SEQ ID NO: 58558 - DNA, 726 bp, Homo sapiens
ctcctctgggggtcaagaggaccccgccagccagcagtgggcacgaccgcgcttcacacagccctccaagatgaggcgccgggtgatcgcacggcccgtgggtagctccgtgcggctcaagtgcgtggccagcgggcaccctcggcccgacatcacgtggatgaaggacgaccaggccttgacgcgcccagaggccgctgagcccaggaagaagaagtggacactgagcctgaagaacctgcggccggaggacagcggcaaatacacctgccgcgtgtcgaaccgcgcgggcgccatcaacgccacctacaaggtggatgtgatccagcggacccgttccaagcccgtgctcacaggcacgcaccccgtgaacacgacggtggacttcggggggaccacgtccttccagtgcaaggtgcgcagcgacgtgaagccggtgatccagtggctgaagcgcgtggagtacggcgccgagggccgccacaactccaccatcgatgtgggcggccagaagtttgtggtgctgcccacgggtgacgtgtggtcgcggcccgacggctcctacctcaataagctgctcatcacccgtgcccgccaggacgatgcgggcatgtacatctgccttggcgccaacaccatgggctacagcttccgcagcgccttcctcaccgtgctgccagacccaaaaccgccagggccacctgtggcctcctcgtcctcggccac

SEQ ID NO: 58559 - DNA, 1243 bp, Homo sapiens
cgaagatgaaggatcagaaatgtctcacaggatgggaatttagaacatggagcaacccaataatgtgcctgtgaagcgatttcagctttgtaaagaactgtctgaactggtcagcatctgcaaatcagttcagttcaaagaatttcaggtgtcgtttcaggttcagaagtactgggaagtctgttcctttaatgaagtgcttgccagcaagtacgccaatgaaaatccaggggactttgtaaattacaacaaacgttttcttgctagggtttttcccagtccaatgagaattgattccagtaacatgaatcctcaagatttttggaaatgtggttgccaaattgtagccatgaactttcagacaccaggactgatgatggacctgaatattggctggtttaggcagaacggaaactgtggctatgtcctccggccagccatcatgagggaggaggtctccttcttcagcgccaatacaaaagactctgtcccaggggtctcacctcaacttcttcacattaaaatcatcagtgggcagaactttcccaagcccaaaggatcaggtgccaaaggtgatgtggtagatccttatgtctatgttgaaatccatggaatccctgctgattgtgcagaacaaaggacaaaaacagtgcaccagaatggagacgctcccatttttgatgaaagctttgaatttcaaatcaacctgcctgaactggccatggtgcgctttgtagtgctggatgatgactacattggggatgaattcatcggccagtacacaattccctttgaatgtttacagacgggctaccgccatgtccccctgcagtccttaactggagaggtccttgcacatgcttctttatttgtccacgtggctattactaaccgaagaggaggagggaagcctcataaaaggggcctttctgtgagaaaagggaagaaatccagggaatatgcatctttgagaacactgtggattaaaaccgtggatgaggtattcaagaatgcccagccccctatacgggatgccacagatctgagagaaaacatgcagaatgcggtggtgtcattcaaggagctgtgtggcctctcctctgtggccaatctcatgcagtgcatgttggcggtgtctccccgctttctgtagcccgataacacacccctagtgggcctaaatctcagcgagcaggaccccacaatggagctgcagggaattgtgccggaggttctgaaaaaa

SEQ ID NO: 58560 - DNA, 1211 bp, Homo sapiens
  misc_feature (1)...(1211): n = a,t,c or g
cagtgcggtggaattcatttgaagaagtgttttcatctatccaagaaaaatatgatgtctccattccaagcctcactcttattcttaaatgtatgtatttttatttgtggagaagctgtacaaggtaactgtgtacatcattctacggactcttcagtagttaacattgtagaagatggatctaatgcaaaagatgaaagtaaaagtaatgatactgtttgtaaggaagactgtgaggaatcatgtgatgttaaaactaaaattacacgagaagaaaaacatttcatgtgtagaaatttgcaaaattctattgtttcctacacaagaagtaccaaaaaactactaaggaatatgatggatgagcaacaagcttccttggattatttatctaatcaggttaacgagctcatgaatagagttctccttttgactacagaagtttttagaaaacagctggatccttttcctcacagacctgttcagtcacatggtttagattgcactgatattaaggataccattggctctgtcaccaaaacaccgagtggtttatacataattcacccagaaggatctagctacccatttgaggtaatgtgtgacatggattacagaggaggtggatggactgtgatacagaaaagaattgatgggataattgatttccagaggttgtggtgtgattatctggatggatttggagatcttctaggagaattttggctaggactgaaaaagattttttatatagtaaatcagaaaaataccagttttatgctgtatgtggctttggaatctgaagatgacactcttgcttatgcatcatatgataatttttggctagaggatgaaacgagattttttaaaatgcacttaggacggtattcaggaaatgctggtgatgcattccggggtctcaaaaaagaagataatcaaaatgcaatgccttttagcacatcagatgttgataatgatgggtgtcgccctgcatgcctggtcaatggtcagtctgtgaagagctgcagtcacctccataacaagaccggctggtggtttaacgagtgtggtctagcaaatctaaatggcattcatcacttctctggaaaattgcttgcaactggaattcaatggggcacgtggaccaaaaacaactcacctgtcaagattaaatctgtttcaatganaaatagaagaatgtacaatccatattt

SEQ ID NO: 58561 - DNA, 417 bp, Homo sapiens
cgagaacgcgtccgctagttctggcttcatctgtgattttttcttgcagaacattcccaaagttcaccaccaacttgtcaatcaccaacttgtcactgggggtggaacatggttttaagatcctgtcttctgtgttcacagagtcatcagactccttcaggtttagcttatccttgaaatcatctccatgccatgtggctatactactttcagcagggttgggaacggtgggccaacacagatgagtcaatttgttgggttttttgagaccatatgccactgtcaggataatgagaataagaaggcctccaccaatcagagaagttatgaggataatctcaaagacactgaatgacaatgtcttgaaatttatgctggtcccgttggttcccccagcactggtgttggccatgacct

SEQ ID NO: 58562 - DNA, 1026 bp, Homo sapiens
gtgccccggctgcgctgttgcccgggcggccgacctccgtgcgtgagcgccggcaggcaccttgcgcgcgcggaacctgctgacatggccaagcatggagccgacgagccatcctccaggtcagggagtccggacagggaaggtagggcctctgaggacagatcgctgcttcatcagaggctggctgtccgggagctcatcgacactgaggtctcctacttgcacatgctccagctctgtgcctctgacatcaggagccgcctccagcagttgccgcagggagatctggatgtcctgttctcaaacattgatgatatcatcaaagtgaacagcagattcctccatgatctgcaggagacagcctccaaggaagaggaacaagtgcagctagttggtaacatatttttggaattccaagaggagttggagcaagtctataaggtctactgtgccagctacgaccaggccttgctactggtggacacgtaccggaaggagccggagctgcagcggcacatccagggcatcgttgaggcggtggtgccgcaagctggatcttcaggcctcagtttcttgctggtaattcctctgcagaggatcaccaggtacccactgctgctgcagaaaatcctggagaacacagtccctgatgccagtgcctatcctgtccttcagagggctgtctctgccctccaggacgtgaacaccaatatcaatgagtacaagatgcgcaaggaagtggcctccaagtacaccaaggtagagcagctgaccctccgggagcggctggcccgcatcaacacacacaccctctccaagaagaccacccggctgagccagctgctgaagcaggaggcggggctgatccccaggacagaagacaaggaatttgatgatttagaagagaggttccagtgggtgtctctgtgtgtgactgagctgaagaacaacgtggctgcttacctggacaatctgcaggctttcctctacttcaggccgcacgaatacaatctggacatccccgag

SEQ ID NO: 58563 - DNA, 472 bp, Homo sapiens
gtgattacaggcatgagccatcgcacctggccatgggggcttttagatgggtctggagcttggaggagaagtctgaactaaggataaactaaagagaggccaatgagacttgaaccctgagcctaagttgtcaccagcaggactgatgtgcacacagaaggaatgaagtatggatgtgaaagaacgcaggccttactgctccctgaccaagagcagacgagagaaggaacggcgctacacaaattcctccgcagacaatgaggagtgccgggtacccacacagaagtcctacagttccagcgagacattgaaagcttttgatcatgattcctcgcggctgctttacggcaacagagtgaaggatttggttcacagagaagcagacgagttcactagacaaggacagaattttaccctaaggcagttaggagtttgtgaaccagcaactcgaagaggactggcattttgtgcg

SEQ ID NO: 58564 - DNA, 451 bp, Homo sapiens
tctgaggccccctctcccaccccctcacaaccacacgctgtcccatcaccactcgtccgccaactccctcaacaggaactcactgaccaatcggcggagtcagatccacgccccggccccagcgcccaatgacctggccaccacaccagagtccgttcagcttcaggacagctgggtgctaaacagcaacgtgccactggagacccggcacttcctcttcaagacctcctcggggagcacacccttgttcagcagctcttccccgggataccctttgacctcaggaacggtttacacgcccccgccccgcctgctgcccaggaatactttctccaggaaggctttcaagctgaagaagccctccaaatactgcagctggaaatgtgctgccctctccgccattgccgcggccctcctcttggctattttgctggcgtatttcatagcaatg

SEQ ID NO: 58565 - DNA, 1500 bp, Homo sapiens
ggggcgcggcgcagccaacccacaccctacttcatcttccttcacaccggaggggtcgttttcctgaccacaaagcacttcgtttctccccacaaccgcgggggggggggcacaaaaaaaaaaaagtttttttccaagtccccccgtgttaaaaaccgggccggggccaaataaaaattaccccccccaaaagggaaaaaacttcggcccccttaaaaaaaaaacctttttttttttttttttttttttttttgtggctactttgtgttattataagatatgagctcaaaccgagatatgaatgaccttggggagccatctgaggccaagatattgacgggggggattcctgggtcccattttcagcgcccagggtcacagatccacagtgggaagttctgtgggacacattggcactgagccacaaagaaggtgtggccagaacaacttgggctcctgctgaccaatgtcctctagggcctaggggacagaggaacacagagtcacagcttcaggggccgaatgagcatggcggccttcctgagagaatatgccccaccacgaaactcagcccagtagacaccatcctggtagcggcttcggtagtggccgccgtggtgccacacaccgttgaggttggagtgggcacaggcatggtaccaccagcctccccgctggtacagggcacagttaccagaataggagtctcggtccctatccacggtgctgaagggcttgtcattgtgccaggaaagagagtctccagcatcaccatggtactggccaagccgcaggcggtagtggtcgctctcgggttccagggagaagccatcatagtgggcacgtgctccacggcccccccagtcctccaggagaaccagcagctcatggtccccacggctggtcagctgatacacgggttcaaggcccagccagtattctccgtctggccgcccaaagcccgccttatagtgctgccaggtagtgaagaagttgactgaaccatcttgcctccgctggatcacagtccagcctccaccctccagttgctgctcacaccatactgacactacgtgacggcccactcgcagttcatacactccactctgttcatggcctgcctggcgggcctctgcacaatcctgccacgggcccacaggcttggtggggaccgcagggtgacctgcaggcatgggagaagccatgggctcctgctgtctctgggtctggtctctctggggctctggggctgggtccagcatcctactggtgtcactggtgctacccacaagacggaccggaaccacaggcaccagtgggggtagcggcaggaccagaaggggcgagtaggaatccggttttcagggttttgcggatttcagaactgtggataagagatcgtggggttgcaaaacccccatttcacagacgatgctgctctccggggaggctgcgaggttacctgctgctgcccgcccgcgcctcccgggcacaggcgct

SEQ ID NO: 58566 - DNA, 430 bp, Homo sapiens
acgccaagcttggcacgagggtagtacatgtttttaattttaaaataaggcatatattttatggtttcatgctcatttttgactggggagctatgggaccaaaatcattttggaaggtactggcttggacggctgctgggtgagtcctttggagtgatgatgtcatgatgtgggaaacgggccttatggcttgtggaaacagatgccctgtgttctgaccaaacaaggggtctcctccaatacggacaggcatgaggtcacgctggcctgcttggttctttctaaattcattctgctgtgcagaccaccttttaaaagtgatcacaaaccatttgctgaatacttgtggaacttgaatcctcaccaatgtctccattttctggaatccatcccaacccccaccttggtcttttggaaaattgggctgttt

SEQ ID NO: 58567 - DNA, 438 bp, Homo sapiens
cacggaggaggaagccgccggtgcgtcgggacgggagcgcaggtgctcgggcacccgagctggagctccgcagccgccggtcatgtaccgctccaccaagggcgcctccaaggcgcgccgggaccagatcaacgccgagatccggaacctcaaggagctgctgccgctggccgaagcggacaaggtccggctgtcctacctgcacatcatgagcctcgcctgcatctacactcgcaagggcgtcttcttcgctggtggcactcctctggcgggccccacggggcttctctcagctcaagagcttgaggacatcgtagcggcactacccggctttctgcttgtgttcacagccgaggggaaattgctctacctgtctgagagtgtgagcgagcatctgggccactccatggtggacctggttgcccagggtgacagcat

SEQ ID NO: 58568 - DNA, 653 bp, Homo sapiens
cctgctcgtaccgcgctcggaattcccgggtcgactatttcgtggcttccccagcgaaaagagggtcaacgcggccttctacaggcccgtgtccgtctaaagggcggcgcccaccctggagagggccgggtagaagtcctgaaggccagcacatggggcacagtctgtgaccgcaagtgggacctgcatgcagccagcgtggtgtgtcgggagctgggcttcgggagtgctcgagaagctctgagtggcgctcgcatggggcagggcatgggtgctatccacctgagtgaagttcgctgctctggacaggagctctccctctggaagtgcccccacaagaacatcacagctgaggattgttcacatagccaggatgccggggtccggtgcaacctaccttacactggggcagagaccagggtcagtcatcctctctaccttggttgaggtctctttcatcctatccaggtctggtctccaatctacagtccaatggcccccagcccattgccccaggcccctgccctcctgcagctcccacctgacccatcacttgctagcccattatgtgcctgagtcacgcttcagccacatctgttagagactcccactacctcaccccaaagctttctccagcgctttcattctgtgtc

SEQ ID NO: 58569 - DNA, 412 bp, Homo sapiens
gcataatgtggtcaagagcagcagtcaaaaataattggtttcttttcccatgggatgagaaagtgcgttccttcccctatcacagtgtcctgaatgccatggaattggtcgaagatgacagacagctctctgtgcagcatcacattgtagaaggcagagttccccacacctcctgcagaagctaaggacagggcagacttggcagctgtgtttccatctgctggacccactcacgcctgcgtccactccaaccccccacatgaattccgtccctttatcattgatttctgatgcgaaaagtcactttgattagtgaagtgttgctttatgtagatttttaggcacacatctgttagataaaacgaggattgcctgtagagaaagcaaataaaagcaaagtccctcttgttgt

SEQ ID NO: 58570 - DNA, 408 bp, Homo sapiens
  misc_feature (1)...(408): n = a,t,c or g
gattgannnnnnnnnnnnnnnnnnnnnnnnnnnnnnnnnnnnnnnnnnnnnnnnncaacatcttcatgccccaggagcccaagtttggagatctttgtttcattctcaaaggacagctctacttatccttccaatgatcactgccaagttctctttagccatgggatacaggcgcagatttattatatgaatatattacgtagtggcaaagtccaggcttttaaggtgaagattatatctttttttttctctcacagacatgattgggaaggtgtttatttttcctaaagaatctaatagtgctcacgtgagcttgatcacacagctggagaaatctacagaacttcactgcgtgtcttcatgcttataccgacctctcccatggctatcgcctcttctcctacagca

SEQ ID NO: 58571 - DNA, 691 bp, Homo sapiens
aaagatggtcatgaggcccctgtggagtctgcttctctgggaagccctacttcccattacagttactggtgcccaagtgctgagcaaagtcgggggctcggtgctgctggtggcagcgcgtccccctggcttccaagtccgtgaggctatctggcgatctctctggccttcagaagagctcctggccacgtttttccgaggctccctggagactctgtaccattcccgcttcctgggccgagcccagctacacagcaacctcagcctggagctcgggccgctggagtctggagacagcggcaacttctccgtgttgatggtggacacaaggggccagccctggacccagaccctccagctcaaggtgtacgatgcagtgcccaggcccgtggtacaagtgttcattgctgtagaaagggatgctcagccctccaagacctgccaggttttcttgtcctgttgggcccccaacatcagcgaaataacctatagctggcgacgggagacaaccatggactttggtatggaaccacacagcctcttcacagacggacaggtgctgagcatttccctgggaccaggagacagagatgtggcctattcctgcattgtctccaaccctgtcagctgggacttggccacagtcacgccctgggatagctgtcatcatgaggcagcaccagggaaggcc

SEQ ID NO: 58572 - DNA, 1235 bp, Homo sapiens
ggggcgcggcgcagccaacccacaccctacttcatcttccttcacaccggaggggtcgttttcctgaccacaaagcacttcgtttctccccacaaccgcgggggggggggcacaaaaaaaaaaaagtttttttccaagtccccccgtgttaaaaaccgggccggggccaaataaaaattaccccccccaaaagggaaaaaacttcggcccccttaaaaaaaaaacctttttttttttttttttttttttttttgtggctactttgtgttattataagatatgagctcaaaccgagatatgaatgaccttggggagccatctgaggccaagatattgacgggggggattcctgggtcccattttcagcgcccagggtcacagatccacagtgggaagttctgtgggacacattggcactgagccacaaagaaggtgtggccagaacaacttgggctcctgctgaccaatgtcctctagggcctaggggacagaggaacacagagtcacagcttcaggggccgaatgagcatggcggccttcctgagagaatatgccccaccacgaaactcagcccagtagacaccatcctggtagcggcttcggtagtggccgccgtggtgccacacaccgttgaggttggagtgggcacaggcatggtaccaccagcctccccgctggtacagggcacagttaccagaataggagtctcggtccctatccacggtgctgaagggcttgtcattgtgccaggaaagagagtctccagcatcaccatggtactggccaagccgcaggcggtagtggtcgctctcgggttccagggagaagccatcatagtgggcacgtgctccacggccccccccagtcctccaggagaaccagcagctcatggtccccacggctggtcagctgatacacgggttcaaggcccagccagtattctccgtctggccgcccaaagcccgcccacaggcttggtggggaccgcagggtgacctgcaggcatgggagaagccatgggctcctgctgtctctgggtctggtctctctggggctctggggctgggtccagcatcctactggtgtcactggtgctacccacaagacggaccggaaccacaggcaccagtgggggtggcggcaggacctgctgctgcccgcccgcgcctcccgggcacaggcgctccaggcgggcgatgagactgctctgctgggacgaaacgtcgacccgggaa

SEQ ID NO: 58573 - DNA, 1402 bp, Homo sapiens
cccagcagagcagtctcatcgcccgcctggagcgcctgtgcccgggaggcgcgggcgggcagcagcaggtcctgccgccacccccactggtgcctgtggttccggtccgtcttgtgggtagcaccagtgacaccagtaggatgctggacccagccccagagccccagagagaccagacccagagacagcaggagcccatggcttctcccatgcctgcaggtcaccctgcggtccccaccaagcctgtgggcccgtggcaggattgtgcagaggcccgccaggcaggccatgaacagagtggagtgtatgaactgcgagtgggccgtcacgtagtgtcagtatggtgtgagcagcaactggagggtggaggctggactgtgatccagcggaggcaagatggttcagtcaacttcttcactacctggcagcactataaggcgggctttgggcggccagacggagaatactggctgggccttgaacccgtgtatcagctgaccagccgtggggaccatgagctgctggttctcctggaggactgggggggccgtggagcacgtgcccactatgatggcttctccctggaacccgagagcgaccactaccgcctgcggcttggccagtaccatggtgatgctggagactctctttcctggcacaatgacaagcccttcagcaccgtggatagggaccgagactcctattctggtaactgtgccctgtaccagcggggaggctggtggtaccatgcctgtgcccactccaacctcaacggtgtgtggcaccacggcggccactaccgaagccgctaccaggatggtgtctactgggctgagtttcgtggtggggcatattctctcaggaaggccgccatgctcattcggcccctgaagctgtgactctgtgttcctctgtcccctaggccctagaggacattggtcagcaggagcccaagttgttctggccacaccttctttgtggctcagtgccaatgtgtcccacagaacttcccactgtggatctgtgaccctgggcgctgaaaatgggacccaggaatcccccccgtcaatatcttggcctcagatggctccccaaggtcattcatatctcggtttgagctcatatcttataataacacaaagtagccacaaaaaaaaaaaaaaaaaaaaaaaaaaaggttttttttttaagggggccgaagttttttcccttttggggggggtaatttttatttggccccggcccggtttttaacacggggggacttggaaaaaaacttttttttttttgtgcccccccccccgcggttgtggggagaaacgaagtgctttgtggtcaggaaaacgacccctccggtgtgaaggaagatgaagtagggtgtgggttggctgcgccgcgcccc

SEQ ID NO: 58574 - DNA, 1049 bp, Homo sapiens
cttactgactgaccttccatctagtccgtgtggtggaattcggagggagcctgttctggcttcctgactttcctgccctgccaggcgggctttgggcggccagacggagaatactggctgggccttgaacccgtgtatcagctgaccagccgtggggaccatgagctgctggttctcctggaggactgggggggccgtggagcacgtgcccactatgatggcttctccctggaacccgagagcgaccactaccgcctgcggcttggccagtaccatggtgatgctggagactctctttcctggcacaatgacaagcccttcagcaccgtggatagggaccgagactcctattctggtaactgtgccctgtaccagcggggaggctggtggtaccatgcctgtgcccactccaacctcaacggtgtgtggcaccacggcggccactaccgaagccgctaccaggatggtgtctactgggctgagtttcgtggtggggcatattctctcaggaaggccgccatgctcattcggcccctgaagctgtgactctgtgttcctctgtcccctaggccctagaggacattggtcagcaggagcccaagttgttctggccacaccttctttgtggctcagtgccaatgtgtcccacagaacttcccactgtggatctgtgaccctgggcgctgaaaatgggacccaggaatcccccccgtcaatatcttggcctcagatggctccccaaggtcattcatatctcggtttgagctcatatcttataataacacaaagtagccacaaaaaaaaaaaaaaaaaaaaaaaaaaaggttttttttttaagggggccgaagttttttcccttttggggggggtaatttttatttggccccggcccggtttttaacacggggggacttggaaaaaaacttttttttttttgtgcccccccccccgcggttgtggggagaaacgaagtgctttgtggtcaggaaaacgacccctccggtgtgaaggaagatgaagtagggtgtgggttggctgcgccgcgcccc

SEQ ID NO: 58575 - DNA, 1163 bp, Homo sapiens
gacgatcaggataagcaagcttttattccgtcaagagaacaaaggtcaggacttttatcctggtggggggatggggagtccagattccttctctgatgaggcaaaaaaagaatcaagactcctgttcaagtaaagggcagagggtgagagctagtactcttattctagaaaggaagtagatacttttctttgataaaggaatgaacggtagactcctagtttgcagaaaaggtgggaaagatgtgacttgtactttggtaaggagatagggaaggaattaaggctattactctgaagaaagttggggggccagggctcctatttttttgctgaggagatggaagatcagggcttgtattcaataagaatgggaggggccaggggatgcctggcaaaagccttgcactgtgaggtgcaggtagaggcttttattctggtgagaggacatggactctctctctcccctcaggtaactgtgccctgtaccagcggggaggctggtggtaccatgcctgtgcccactccaacctcaacggtgtgtggcaccacggcggccactaccgaagccgctaccaggatggtgtctactgggctgagtttcgtggtggggcatattctctcaggaaggccgccatgctcattcggcccctgaagctgtgactctgtgttcctctgtcccctaggccctagaggacattggtcagcaggagcccaagttgttctggccacaccttctttgtggctcagtgccaatgtgtcccacagaacttcccactgtggatctgtgaccctgggcgctgaaaatgggacccaggaatcccccccgtcaatatcttggcctcagatggctccccaaggtcattcatatctcggtttgagctcatatcttataataacacaaagtagccacaaaaaaaaaaaaaaaaaaaaaaaaaaaggttttttttttaagggggccgaagttttttccctttagggggggttaatttttatttggccccggcccggtttttaacacggggggacttggaaaaaaacttttttttttttgtgcccccccccccgcggttgtggggagaaacgaagtgctttgtggtcaggaaaacgacccctccggtgtgaaggaagatgaagtagggtgtgggttggctgcgccgcgcccc

SEQ ID NO: 58576 - DNA, 1101 bp, Homo sapiens
  misc_feature (1)...(1101): n = a,t,c or g
tggcggccttcctgagagaatatgccccaccacgaaactcagcccagtagacaccatcctggtagcggcttcggtagtggccgccgtggtgccacacaccgttgaggttggagtgggcacaggcatggtaccaccagcctccccgctggtacagggcacagttacctgaggggagagagagagtccatgtcctctcaccagaataaaagcctctacctgcacctcacagtgcaaggcttttgccaggcatcccctggcccctcccattcttattgaatacaagccctgatcttccatctcctcagcaaaaaaataggagccctggccccccaactttcttcagagtaatagccttaattccttccctatctccttaccaaagtacaagtcacatctttcccaccttttctgcaaactaggagtctaccgttcattcctttatcaaagaaaagtatctacttcctttctagaataagagtactagctctcaccctctgccctttacttgaacaggagtcttgattctttttttgcctcatcagagaaggaatctggactccccatccccccaccaggataaaagtcctgacctttgttctcttgacggaataaaagcttgcttatccttatacttaccagaggggcgtcttacctaccctacctcctttcattccctcaccagaacaggagtcccgcctcccctatcctctcaccagaataggagttctccttaccagaataggagtctcggtccctatccacggtgctgaagggcttgtcattgtgccaggaaagagagtctccagcatcaccatggtactggccaagccgcaggcggtagtggtcgctctcgggttccagggagaagccatcatagtgggcacgtgctccacggcccccccagtcctccaggagaaccagcagctcatggtccccacggctggtcagctgatacacgggttcaaggcccagccagtattctccgtctggccgcccaaagcccgcctggcagggcaggaaagtcaggaagccagaacaggctccctccggntttctcgacatncacgtaagtatcgtaannnnnnaanccgcgnacctccc

SEQ ID NO: 58577 - DNA, 2338 bp, Homo sapiens
  misc_feature (1)...(2338): n = a,t,c or g
tgggtcgacgatttcgtccgcgcgggcgaggacgccgtgtgggtgctggacagcggcagcgtgcgcggggccaccgccaacagctcggccgcgtggctcgtgcagttctactcgtcgtggtgtggccactgcatcggctacgcgcccacttggcgggccctggctggggatgtgcgagactgggccagtgccattcgcgtcgcagctctggactgcatggaagagaagaaccaggccgtgtgccatgactacgacatccacttctaccccaccttccggtattttaaagcatttacaaaggagtttacaactggagaaaattttaaaggacctgaccgagagctgcgaacagtcagacagacgatgattgacttcctgcagaaccacacggaaggaagccggccccctgcctgcccgcgcctagaccccattcagcccagtgatgttctttcccttcttgacaaccgtggcagccattacgtggctattgtctttgaaagcaacagctcctaccttggacgggaggtgatcttagacctgatcccgtatgaaagcatcgtggtgacccgagcactggacggggacaaagcatttctggagaaacttggtgtttcttcagtcccttcgtgttacctgatctacccaaatgggtcgcatggattgattaacgtcgcgaagcctctgcgggccttcttttcgtcttatttgaagtcattgccggatgtgaggaaaaaatcgcttcccttgcctgaaaagccacacaaagaagaaaattcagaaatcgtggtttggagagaatttgacaaatcgaagctgtacacggtggacctggagtcagggctacactacctcctgcgggtggagctggcagcccacaagtccctggccggagcagagctgaagacgctcaaggactttgtgactgtcttggccaagctgttccctggacggccgccagtcaagaagctgttggagatgctgcaggagtggctggccagccttcccctggacaggatcccctacaacgccgtgcttgacctggtcaacaacaagatgcggatttctggaatattccttactaatcacataaagtgggttggatgtcaaggaagccgatctgagttgaggggttacccgtgttctctctggaaactgttccacactttgactgttgaagcctcgacccacccagatgcactggttggcacaggctttgaagacgacccccaggctgtgctgcagacaatgaggaggtacgttcacaccttctttgggtgtaaggaatgtggtgagcactttgaggaaatggctaaagaatccatggactcggtgaaaaccccagaccaagccatcctctggctgtggaagaagcataatatggtgaacggccgcctggcaggtgagaagcccctgggcatggggggctcagcacgggcggagggaggccctggtcctgggacagcaaggacggcacggctgccgtggggcttgtccctgagctttgcggcctcgtgccacccactgtgctgacgggatcaggacttgggtggctgagagctgccagagctgcagcctttcccaggctgcttctgtccccggctttctagatgcttctctcactccgggggctcttcgaccccgtggaaatgggtgtggctctttcttcccccatcggtacccactggtagcccgttagactctgaagatgtttttgactctggaaagcttggaacgtaattaatttttgatgaggaattttagtagtatggaaatctgttgtccaaacgtaaaccaaacctctcaaagtgctttgttttgttaaaaaaaaaaaaaaaaaaaaatttttatttagggggccggaagcttattcccttttaggggggggttattttaacttgggcccggcccgccttttaacacgggggggcggggaaaaaacanncccccnntnccttctttttcctccaccccctgccaccaagagtgaaactccatcttcccaaaaaaggaaaaaaggaaaaaaaatttacctggcccttggtggcggggcccccagtattcccaccttacctaagaggctgtagccagaaaatcacccctgaccccaggaggcgaaaatttccctggaccccaaaattgggcccaatgcccctcccgcctggggaacaaaaaagaaaaatttctattttaaaannnaaaaaaaaaaancgaaaatttttttttttgggggcccgcaaccttttttcctcttttttggggggggggtttttattatttttgggcctttggccgcccgttttttaaaaagggggggggnnnnnnnnnaaaaaaaaaataa

SEQ ID NO: 58578 - DNA, 567 bp, Homo sapiens
tgcaagtgacttcattcggagcctggaccactgttgatacctagctctggagggtgtgttctcccacaagtttgatttcgaactgcaggatgtgtccagcgtgaatgaggatgtcctgctgacaactgggctcctctgtaaatatacagctcaaaggttcaagccaaagtataaattctttcacaagtcattccaggagtacacagcaggacgaagactcagcagtttattgacgtctcatgagccagaggaggtgaccaaggggaatggttacttgcagaaaatggtttccatttcggacattacatccacttatagcagcctgctccggtacacctgtgggtcatctgtggaagccaccagggctgttatgaagcacctcgcagcagtgtatcaacacggctgccttctcggactttccatcgccaagaggcctctctggagacaggaatctttgcaaagtgtgaaaaacaccactgagcaagaaattctgaaagccataaacatcaattcctttgtagagtgtggcatccatttatatcaagagagtacatccacatcagccct

SEQ ID NO: 58579 - DNA, 453 bp, Homo sapiens
actaagcttgcctaatttgcttcagaattggaagagggaattgcagcaggaaaatatgtgaagagtttttaaacccacaaattcttcttactttagaattagttgttacattggcaggaaaaaataaatgcagatgttggaccatgttggaaaccttgtcaagacagtggattgtctcacacagaatggaaatgtggcttctgattctggtggcgtatatgttccagagaaatgtgaattcagtacatatgccaactaaagctgtggacccagaagcattcatgaatattagtgaaatcatccaacatcaaggctatccctgtgaggaatatgaagtcgcaactgaagatgggtatatcctttctgttaacaggattcctcgaggcctagtgcaacctaagaagacaggttccaggcctgtggtgttactgcagcatggcctagttggaggtg

SEQ ID NO: 58580 - DNA, 1250 bp, Homo sapiens
  misc_feature (1)...(1250): n = a,t,c or g
tcgccgagatcgctgtggcacaagtgatccttatgtgaaatttaagctgaatgggaagacgctgtacaaaagtaaagtcatatataagaacttgaacccagtatgggatgagatagttgtattgccaatccaaagccttgatcaaaagctacgtgtgaaggtatatgatcgagatttaaccacatctgatttcatgggttctgcatttgtcattctcagtgatcttgagcttaacagaacaactgaacatattttaaaactggaagatccaaacagtttagaagatgacatgggagtgatcgtcttaaatttgaacctagtggtaaaacagggtgatttcaagagacaccgttggtcaaatcggaagcgattaagtgccagcaagtcctctttgatacgcaacctacggctctctgagtccttgaaaaagaaccaactctggaacgggattataagtataactttgttggaagggaagaatgtctcaggaggaagcatgacagagatgtttgtccagttaaaactgggagatcagaggtataaaagtaagacactgtgtaagagtgcaaatccgcagtggcaggaacagtttgactttcactacttctctgacaggatgggcattttggacattgaagtgtggggaaaggacaacaaaaagcatgaggaacgtctgggcacgtgtaaagtggatatctcggcactccctctgaagcaagccaactgcctggagctgccactggacagctgtctgggggctctccttatgttggtcacacttacaccctgtgcgggggtctccgtctctgatctgtgtgtctgccccttagcagacctcagcgaaagaaagcagattacccagcgatattgcttacagaactccctgaaagatgtgaaagacgtcggcattctacaagtgaaggttttaaaggcagcagatctcttagcggcagatttctcagggaagagtgacccattttgcttgttggagttaggcaatgaccgacttcagacgcataccgtctacaaaaacctcaaccctgaatggaacanagtttttacatttcccattaaagatatccatgatngttttggaagtgacaagtgttgatgaagaatggagataaaaccccctctaccccctcttagagcccaaaanaannaanaaaaannnaaannnnnnaaaaaaaaaaaaaaaaaaaagggcggccttttaaaaaaaaacaatttttttggcgcggggtggggga

SEQ ID NO: 58581 - DNA, 658 bp, Homo sapiens
cacaaactgtcagaaaggcttgtcgggcctgctggtcttggcatccccgctggctgctttgcagatgacgctgttcgtgtgcttgcagcggcaaccagggcggcgcagacggtcgtagccacgctgggccagcttcacgcagccggtggcaggcaggtagcagagcaggcagggcagcaccacggagagagcacccatgaaggaccagcgggcgcagcagttggagcgggagcaggagcaggggtggtcagcgcaggagccctcatcgtcctcattcgtgcagtggtagaagatgccctgcaccaaacacatgcacgtgccatagttgaccagagtctgggctgagcacaggcactcctggttgcagacccagcaggaaggcaacgtccggggggatgcacactccttgcatttacacttcccacaggcctcgcacagcaagaagtgcttgtccagctcgggtgggaccgccgggcccttgaggtccagcggctggcagtggaccaccttgggctggatgcgcacagcccttggtgaggcctggtcagccacgggtggtggtgccatgtggtctaagagccgttggtcagaggatgtgctgctgctgctgctcacagagctggggcgcccgctgaaggagatccaatggtgggtgaca

SEQ ID NO: 58582 - DNA, 689 bp, Homo sapiens
ccggctacgacattccgggtttacccacccgtcccgctcctgtggccacaaaccaccagagtcgagaggtggaaatgagcacccggggccgattccagctcactggggatcccgccaaggggaactgctccttggtgatcagagacgcgcagatgcaggatgagtcacagtacttctttcgggtggagagaggaagctatgtgagatataatttcatgaacgatgggttctttctaaaagtaacagccctgactcagaagcctgatgtctacatccccgagaccctggagcccgggcagccggtgacggtcatctgtgtgtttaactgggcctttgaggaatgtccacccccttctttctcctggacgggggctgccctctcctcccaaggaaccaaaccaacgacctcccacttctcagtgctcagcttcacgcccagaccccaggaccacaacaccgacctcacctgccatgtggacttctccagaaagggtgtgagcgtacagaggaccgtccgactccgtgtggcctatgcccccagagaccttgttatcagcatttcacgtgacaacacgccagccctggagccccagccccagggaaatgtcccatacctggaagcccaaaaaggccagttcctgcggctcctctgtgctgctgacagccagccccctgccacactgagctgg

SEQ ID NO: 58583 - DNA, 508 bp, Homo sapiens
agtgcggtgaattccggagaatactggcttggactggaaaatatctatatgcttagcaatcaagataattacaagttattgattgaattacaagactggagtgataaaaaagtctatgcagaatacagcagctttcgtctggaacctgaaagtgaattctatagactgcgcctgggaacttaccacggaaatgcaggggattctatgatgtggcataatggtaaacaattcaccacactggacagagataaagatatgtatgcaggaaactgcgcccactttcataaaggaggctggtggtacaatgcctgtgcacattctaacctaaatggagtatgggacagaggaggccattacagaagcaagcaccaagatggaattttctgggctgaatacagaggcgggtcatactccttaagagcagttcagatgatgatcaagcctattgactgaagagagacactcgccaatttaaatgacacacaactttgtacttttcaactcttaa

SEQ ID NO: 58584 - DNA, 536 bp, Homo sapiens
accgggccggaaccgccgggacgacgatttcgtggcaggagaaggctgactggctggactcattgagctgaataatttccagtgacatttgtaaatgacgccgctcgagtccaggctccaagcggcccctgccgccgccgccgccgccgggccgaaggtgccgccgagcagtctccagcgcaggcttccttaccgggcgaccacaatgtccgagtttctcctcgccttactcactctctcgggattattgccgattgccagggtgctgaccgtgggagccgaccgagatcagcagttgtgtgatcctggtgaatttctttgccacgatcacgtgacttgtgtctcccagagctggctgtgtgatggggaccctgactgccctgatgattcagacgagtctttatatacctgtcccgaggaggtagaaatcaagtgccccttgaatcacattgcttgccttggcaccaacaaatgtgttcatttatcccagctgtgcaatggtgtcttggactgcccagatgggtatgacgaaggac

SEQ ID NO: 58585 - DNA, 1294 bp, Homo sapiens
ccgcctcctcccgtcctccgtcggccgcctccccggaccgaggcaggacctcaccccgcgcgtgttccccgggcgcccctctgcgaaccccaggcccttcccaggtttgcgcgcgggggccatccagaccctgcggagagcgaggcccggagcgtcgccgaggtttgagggcgccggagaccgagggcctggcggccgaaggaaccgccccaagaagagcctctggcccgggggctgctggaacatgtgcggggggacacagtttgtttgacagttgccagactatgtttacgcttctggttctactcagccaactgcccacagttaccctggggtttcctcattgcgcaagaggtccaaaggcttctaagcatgcgggagaagaagtgtttacatcaaaagaagaagcaaactttttcatacatagacgccttctgtataatagatttgatctggagctcttcactcccggcaacctagaaagagagtgcaatgaagaactttgcaattatgaggaagccagagagatttttgtggatgaagataaaacgattgcattttggcaggaatattcagctaaaggaccaaccacaaaatcagatggcaacagagagaaaatagatgttatgggccttctgactggattaattgctgctggagtatttttggttatttttggattacttggctactatctttgtatcactaagtgtaataggctacaacatccatgctcttcagccgtctatgaaagggggaggcacactccctccatcattttcagaagacctgaggaggctgccttgtctccattgccgccttctgtggaggatgcaggattaccttcttatgaacaggcagtggcgctgaccagaaaacacagtgtttcaccaccaccaccatatcctgggcacacaaaaggatttagggtatttaaaaaatctatgtctctcccatctcactgactaccttgtcattttggtataagaaatttgtgttatttgataggccgggcatggtggctcatgcctgtaatcccagcactttgggaggccaggagttcgagaccagcctggccaacatggtgaaacccggtctctactaaaaattcaaaaattacctaggcgtcatggggcatgcctgtagtcccacctacttgggaggctgaagcaggagaattgctcgaacctgggaggcagaggttgcagtaagctgagatcacgccactgcattccagcctgggcgacagagcaagactccatctcaaaaataaaataaaaaaaaaaaaaaaaaa

SEQ ID NO: 58586 - DNA, 562 bp, Homo sapiens
gcagcggcggcagcagcggggacgagctcagggaggacgatgagcccgtcaagaagcggggacgcaagggccggggccggggtcccccgtcctcctctgactccgagcccgaggccgagctggagagagaggccaagaaatcagcgaagaagccgcagtcctcaagcacagagcccgccaggaaacctggccagaaggagaagagagtgcggcccgaggagaagcaacaagccaagcccgtgaaggtggagcggacccggaagcggtccgagggcttctcgatggacaggaaggtagagaagaagaaagagccctccgtggaggagaagctgcagaagctgcacagtgagatcaagtttgccctaaaggtcgacagcccggacgtgaagaggtgcctgaatgccctagaggagctgggaaccctgcaggtgacctctcagatcctccagaagaacacagacgtggtggccaccttgaagaagattcgccgttacaaagcgaacaaggacgtaatggagaaggcagcagaagtctatacccggctcaagtcgcgggtcctcgg

SEQ ID NO: 58587 - DNA, 394 bp, Homo sapiens
ttgaggacaccttgactaacctccaagggcaactaaaggatcaagaaaggcccagcacagcagaagatcagctggatctagctcctgcaggagatgtgtacaaagacaatcccagtcctctggggatgtttcctcctgtggaatctctatgtctcatcctctcagaccatttaccctggaatcaaggcaaggattactcagagggcacttgactatggtgttcaagctggaatgaagatgattgagcaaatgctaaaagaaaagaaactcccagatttaagcggttctgagtctcttgaatttctaaaagttgattatgtaaactacaatttttcaaatataaaaatcagtgccttttcatttccaaatacctcattggcttttgtgcctggag

SEQ ID NO: 58588 - DNA, 622 bp, Homo sapiens
tgagtaccagcagaaggctgggagtctgtagtttgttcctgctgccaggctccactgaggggaacggggacctgtctgaagagaagatgcccctgctgacactctacctgctcctcttctggctctcaggctactccattgtcactcaaatcaccggtccaacaacagtgaatggcttggagcggggctccttgaccgtgcagtgtgtttacagatcaggctgggagacctacttgaagtggtggtgtcgaggagctatttggcgtgactgcaagatccttgttaaaaccagtgggtcagagcaggaggtgaagagggaccgggtgtccatcaaggacaatcagaaaaaccgcacgttcactgtgaccatggaggatctcatgaaaactgatgctgacacttactggtgtggaattgagaaaactggaaatgaccttggggtcacagttcaagtgaccattgacccagcgtcgactcctgcccccaccacgcctacctccactacgtttacagcaccagtcacccaagaagaaactagcagctccccaactctgaccggccaccacttggacaacaggcacaagctcctgaagctcagtgtcctcctgcccctcatcttcac

SEQ ID NO: 58589 - DNA, 974 bp, Homo sapiens
  misc_feature (1)...(974): n = a,t,c or g
ttatgggaagccagtaacactgtggcctactatctcttccgtggtgccatctacatttttgggactcgggaattatgaggtagaggtggaggcggagccggatgtcagaggtcctgaaatagtcaccatgggggaaaatgatccgcctgctgttgaagcccccttctcattccgatcgctttttggccttgatgatttgaaaataagtcctgttgcaccagatgcagatgctgttgctgcacagatcctgtcactgctgtcattgaagttttttccaatcatcgtcattgggatcattgcattgatattagcactggccattggtctgggcatccacttcgactgctcagggaagtacagatgtcgctcatcctttaagtgtatcgagctgatagctcgatgtgacggagtctcggattgcaaagacggggaggacgagtaccgctgtgtccgggtgggtggtcagaatgccgtgctccaggtgttcacagctgcttcgtggaagaccatgtgctccgatgactggaagggtcactacgcaaatgttgcctgtgcccaactgggtttcccaagctatgtgagttcagataacctcagagtgagctcgctggaggggcagttccgggaggagtttgtgtccatcgatcacctcttgccagatgacaaggtgactgcattacaccactcagtatatgtgagggagggatgtgcctctggccacgtggttaccttgcagtgcacagcctgtggtcatagaaggggctacagctcacgcatcgtgggtggaaacatgtccttgctctcgcagtggccctggcaggccagccttcagttccagggctaccacctgtgcgggggctctgtcatcacgcccctgtggatcatcactgctgcacactgtggttatgacttgtacctccccaagtcatggaccatccangtgggtctagtttccctgttggacaatccagccc

SEQ ID NO: 58590 - DNA, 1198 bp, Homo sapiens
ggggatttttttcaaattttctacaatatatatgctttattcttagaatttaaaaaaattgaaaattcctcaaaaagttcctgctagggtaggaatttcctcaggaaccaccagcgccttcaaacctgtttccaccccagcttttacttgttatgaccacagctgtggtcttctcttgggccaagggccatgttgtggatggttcaggacacattccccagtgtgctgtccctgactctgctagacactgctatttggaagagcccagctttttccagagagtgggcctctgacagggatggaagtaccctgccttgaggttctctccacttggcccagggctctgggaaccatcccacctatctgcacaccagcagggcctctgccagggtatggtcctggccatggccctcttcccccatagcctcctgtgatgaacaggggcagctgttaatggaacttgtcctctctccactctctccccacgctcctcctaatgggataagccagtctctagctttattctcagacatttaaaaattcacccatagcaataactgtatcacatgattcagattcctgtgggcacctcggtccccttttaaaaattacttttcagccgggcatggtggctcatgcctgtaattccagcactttgggaggctgaggtgggaggatcacctgaggtcgggagattgagatcagcctgaccaacatgaagaaaccccgtctctactaaaaatacaaaaattagccgggcgtggtggcacatgcctgtaatccagctactcgggaggctgaggcaggagaatcacttgaacctgggaggcggaggttgtggtgagcccagatagcatcattgcactccagcctgggcaacaagagtgaaactccatctccaaaaaaaagaaaaaagaaaaaaaaattagctggccatggtggcgggcaccagtaatcccagctaactcaggaggctgaggcaggagaatcacctgaacccaggaggcgaagttgcagtgagccaagattgcaccaatgcactccagcctgggcaacaagagcaacactccatctcaaaaaaaaaaaaaaaaaaaaggttttttatttagggggcccgaaggttatttcccttttagggggggtaaatttaacttggcccctgcccgcgttttaaaaacgcgggaatgggaaaaaaaca

SEQ ID NO: 58591 - DNA, 789 bp, Homo sapiens
  misc_feature (1)...(789): n = a,t,c or g
cggccgcgtcgacctgaagcaaagcacaggcttgaagaaagacaaagagcacaagcccgagaaaggaaggagaaggaaattcagtgggagacaaggttatttcatgaaaatggagaatgctgggtttatgatgaaccattactgaaacgtcttggtgctgccaagcattaggttggaagatgcaaagtttatacctgatgatcagggcagtaggcataattcagcaacaaacaatcttcctttgggagaaacctgttcattccaatcttctaattacagtggttcctatctcagggatactggactttctgacgcagatgaacaattaaggggaaaagcttcccttttccctctgtggcagttacgattttgacttcagtcctgagaaaaacttcaggttttgaaaatcagatgatgtcttctccttttccaaacaccacacgttgaaagcatttataaatccaagtctgaaactctgcgctctagtactgctgttaagatacacaacttgtttcttagttcatataatctcgggatacacacacacacacacatatatatacacacacatacgtatacacacacatacatatatataaatatacctgatgccagatttttttcataaatattctgcctactgtaaatatgggttcctctgagttgttttagaaaattagcgcaatgtattaaaatcaagtgttaggaaatttcatggtcttacctacaataacttttattttggaattgagctagtattaaaagcgaactgtcaatcaannntgatcc

SEQ ID NO: 58592 - DNA, 1828 bp, Homo sapiens; identical to SEQ ID NO: 58486

SEQ ID NO: 58593 - DNA, 2954 bp, Homo sapiens
gcaacgcctctgcccgacctcgctggggaaggctggcgctgctgcccggccggagccaggggcaggctgcgcaaaggcgacttagggagaccttgcgggccgccctgggtcgcgcctcccggatcggctcgcctcggctcgactggaggggaggaggaggagcaggccgagcgcattcgcgctggagcttgcgaggagcgcagggtggagcgcgccagccggggtcctcggatctggcccaggtgaggaattttaaattggaacaagagcaagaaaaaaacaaaatcttgtcagaagcactggagacgctggccactgaacatcatgaattagagcagtctctggtgaaaggctctccacccgccagcatccttagcgaggacgagttctatgatgcgctgtcagattccgagtccgaaaggtccctgagtagattggaagcagtgacagcacgctcctttgaagaggaaggagagcatttgggcagtagaaaacacagaatgtccgaagaaaaagactgtggtggcggagatgctctctccaatggcatcaagaaacacagaacaagtttgccttctcctatgttttccagaaatgacttcagtatctggagcatcctcagaaaatgtattggaatggaactatccaagatcacgatgccagttatatttaatgagcctctgagcttcctacagcgcctaactgaatacatggagcatacttacctcatccacaaggccagttcactctctgatcctgtggaaaggatgcagtgtgtagctgcgtttgctgtatctgctgttgcttctcagtgggaacggactggaaaacctttcaacccactgctgggagagacttatgaattagtgcgagatgaccttggatttagactcatctccgaacaggtcagccatcacccaccaatcagtgcatttcatgctgaaggattaaacaatgacttcatctttcatggctctatctatcccaaactgaaattctgggggaagagtgtagaagcagaacccaaaggaaccatcaccttggagctccttgaacacaatgaggcatatacatggacaaatcccacctgctgtgtgcataatatcattgtgggtaaactgtggatcgaacagtatggcaatgtggaaattataaaccacaagactggggacaaatgtgtgttgaattttaagccatgtggcctttttggtaaggaattacacaaagttgaaggctacattcaagataaaagcaaaaagaagctctgtgccctctatgggaagtggactgaatgtttatacagtgttgaccctgccacgtttgacgcttacaaaaaaaatgataagaaaaatacagaagagaagaagaacagcaaacagatgagcacctctgaggagttggatgaaatgccagtgccggattctgaaagtgtattcattatccctggaagcgttcttctatggcgaatagccccacggcctccaaattctgcccagatgtataattttactagttttgcaatggttttgaatgaagtagacaaagacatggagagtgtgattcccaagacagactgcaggttacggcctgacatcagagccatggaaaatggagagatagatcaagctagtgaagaaaaaaaacgacttgaggaaaaacaaagagcagcccgcaaaaacaggtccaagtcagaagaggactggaagacgaggtggttccatcaaggtcctaatccctacaatggagcacaggactggatttactctggcagctactgggacagaaattacttcaatttgcctgacatttattaaaatgcatacaagtcagggtgtttggctaatctacaaataagtcttaaacctatgtttttaaatttttttcccttggtttctacttatcttttaaaaaaaaaatgaaaaaacactcatgagataactgcatttcacccaacaaaagcagggtataaggcgatattggtgatgaaagtcttaggaaaaatgcataattttgctataaaatgtacttatttggaatactattttatatagaggtaagagaacactgctggggaatatgctttttatggttgctgttgccatatttactgaaggtttatacctaaatgtaactttagctttatggaactatatagtaatcccaaatcaagttattttgaatatttttatgctgtcatgcttgaatgttttagatgtaacctttgacatatttagaactctcctcctatacaatgtttattctcagatatagaggttatgtcattttataaagacttcattgataagatggcttttattcatactaatcctcccaatgttaccccttccatcttccaagaagaaaaaaaatgcctgaatattcagaatagatatttctgatttgaaaattctaaagaattaaactggaaaagtatttcatttacttagtgctctgaatttacttttacagttttctgcagtcagtatcattaaaatggttaagtttacatttgaactgaaaatatgtataaaatctagcaattcacaaaaatgccctagaaatatagattttaatcaccattacataatgacaaaccttgttaaatgcttccacttccagtggcaaatgccactagggaaagtaagttgcactcatgtaagtatcaaactatataaaaggaggccttgtgcatttcaagtttgcaaagtacctgtgtacttaaaatatgtgtggagacctactgtacagtagttttgcccctttaattggggcacattcatcttaaatcttatagtatttatccacccaaaccccagactgagatactgctcccaggggcctaggtagctgccagtccgtgattttaattgctgtcttgaagttaacaagtgttataatgaaataatctacctgatgctaaataaaggctttagaatgttaaaaaaaaaaaaaag

SEQ ID NO: 58594 - DNA, 2514 bp, Homo sapiens
  misc_feature (1)...(2514): n = a,t,c or g
gcatcaaccacacgtttcctattgggcctgttaagtgatgagggggagagagagatggagaacatctttcactgccggctgtctcaggggaggaacctgatgcagtgggtcccgtccctgcagctgctgctgcagccacactctctggagtccctccactgcttgtacgagactcggaacaaaacgttcctgacacaagtgatggcccatttcgaagaaatgggcatgtgtgtaaaaacagacatggagctcttagtgtgcactttctgcattaaattcagccgccacgtgaagaagcttcagctgattgagggcaggcagcacagatcaacatggagccccaccatggtagtcctgttcaggtgggtcccagtcacagatgcctattggcagattctcttctccgtcctcaaggtcaccagaaacctgaaggagctggacctaagtggaaactcgctgagccactctgcagtgaagagtctttgtaagaccctgagacgccctcgctgcctcctggagaccctgcggttggctggctgtggcctcacagctgaggactgtaaggaccttgcctttgggctgagagccaaccagaccctgaccgagctggacctgagcttcaatgtgctcatggatgctggagccaaacacctttgccagagactgagacagccgagctgcaagctacagcgactgcagctggtcagctgtggcctcacgtctgactgctgccaggacctggcctctgtgcttagtgccagccccagcctgaaggagctagacctgcagcagaacaacctggatgacgttggcgtgcgactgctctgtgaggggctcaggcatcctgcctgcaaactcatacgcctggggctggaccagacaactctgagtgatgagatgaggcaggaactgagggccctggagcaggagaaacctcagctgctcatcttcagcagacggaaaccaagtgtgatgacccctactgagggcctggatacgggagagatgagtaatagcacatcctcactcaagcggcagagactcggatcagagagggcggcttcccatgttgctcaggctaatctcaaactcctggacgtgagcaagatcttcccaattgctgagattgcagaggaaagctccccagaggtagtaccggtggaactcttgtgcgtgccttctcctgcctctcaaggggacctgcatacgaagcctttggggactgacgatgacttctggggccccacggggcctgtggctactgaggtagttgacaaagaaaagaacttgtaccgagttcacttccctgtagctggctcctaccgctggcccaacacgggtctctgctttgtgatgagagaagcggtgaccgttgagattgaattctgtgtgtgggaccagttcctgggtgagatcaacccacagcacagctggatggtggcagggcctctgctggacatcaaggctgagcctggagctgtggaagctgtgcacctccctcactttgtggctctccaagggggccatgtggacacatccctgttccaagtggcccactttaaagaggaggggatgctcctggagaagccagccagggtggagctgcatcacatagttctggaaaaccccagcttctcccccttgggagtcctcctgaaaatgatccataatgccctgcgcttcattcccgtcacctctgtggtgttgctttaccaccgcgtccatcctgaggaagtcaccttccacctctacctgcacgacaacacataanaaaaaaaaaaaaaaaaaaaaaaaaaaaaaaaaaaaaaaaaaaaaaataaaaaaaacacccccaaaaccttttttctttaaaaggggggatatatttttttttttataggggggtaataaaaaaaatagccatggcgaaaaaatatacaaaccccggccgggaaaaaactcccccctcgccccactcctgacccactcaataaacacttctcgccgcgcacacaatacaatcatggccacggtaccctacacacccatcaaagaacaattactctatcctgtccatcgaccaaaaatgccaccgcatctcaaacaccgcacattattcaccccgttcagtcgctaccaaattcaaaacagtgataacacgccggcccacaaagatcaataataatactcaatgacctcccgggtactagcattatcaacccaccctctctaccaagctactgcaaacaaatatcatactactacttaccaccacgccgagggtcacccagaacacactagaactaactctcccacggtcgtacccattcaatgacaaccacagacatacgtanctgtgcgatcnctcgtctataactcatacgtactcctacaaacaacattgagacacctccaatccgactcagctacgcgtgcccangataatatataacctgcattccgctgcagtaaacgcgggcgcaccacaattcttcaacgcctacatttgctctgcgagatcgtgggagaagagcc

SEQ ID NO: 58595 - DNA, 2989 bp, Homo sapiens; identical to SEQ ID NO: 58497
  misc_feature (1)...(2989): n = a,t,c or g

SEQ ID NO: 58596 - DNA, 1446 bp, Homo sapiens
tcccgggtcgacgatatcgtacgaatcgtcagcgggctttagctggggcagagcttagcaagtgttggggtatcagcagttagtcactgtttgcctggaaccacaggatgtgaatcctagttcctggattccaaggaatcctgcatccaggtgtttattgtgctttgcagagtcaacatcaagctcaggagctggttgcagacatagatgagtgtgaagtttctggcctgtgcaggcatggagggcgatgcgtgaacactcatgggagctttgaatgctactgtatggatggatacttgccaaggaatggacctgaacctttccacccgaccaccgatgccacatcatgcacagaaatagactgtggtacccctcctgaggttccagatggctatatcataggaaattatacgtctagtctgggcagccaggttcgttatgcttgcagagaaggattcttcagtgttccagaagatacagtttcaagctgcacaggcctgggcacatgggagtccccaaaattacattgccaagagatcaactgtggcaaccctccagaaatgcggcacgccatcttggtaggaaatcacagctccaggctgggcggtgtggctcgctatgtctgtcaagagggctttgagagccctggaggaaagatcacttctgtttgcacagagaaaggcacctggagagaaagtactttaacatgcacagaaattctgacaaagattaatgatgtatcactgtttaatgatacctgtgtgagatggcaaataaactcaagaagaataaaccccaagatctcatatgtgatatccataaaaggacaacggttggaccctatggaatcagttcgtgaggagacagtcaacttgaccacagacagcaggaccccagaagtgtgcctagccctgtacccaggcaccaactacaccgtgaacatctccacagcacctcccaggcgctcgatgccagccgtcatcggtttccagacagctgaagttgatctcttagaagatgatggaagtttcaatatttcaatatttaatgaaacttgtttgaaattgaacaggcgttctaggaaagttggatcagaacacatgtaccaatttaccgttctgggtcagaggtggtatctggctaacttttctcatgcaacatcggttaacttcacaacgagggaacaagtgcctgtagtgtgtttggatctgtaccctacgactgattatacggtgaatgtgaccctgctgagatctcctaagcggcactcagtgcaaataacaatagcaactcccccagcagtaaaacagaccatcagtaacattgcaggatttaatgaaacctgcttgagatggagaagcatcaagacagctgatatggaggagatgtatttattccacatttggcgccagagatggtatcagaaggaatttgcccaggaaatga

SEQ ID NO: 58597 - DNA, 638 bp, Homo sapiens
acggcttccgaggggtaccacagactaagctggagccttagactaggcatgaagcaatgcatgagtccatgaccactaacctgatcttgtgctgcctccttgctcctacactggagtgatgtacgaggcggataccacctccatgacctactcaccgctgtcagcggacctaagctcataccgtgccaaagacaggctcgcttacaaggccatgacatactccattctggaggatcaactgtggattctgggcctactgacgacttctctacacctcccaggaaggcctggcgtccacatttggaaaaccagcctcctccttaggacaagtccaacagcagggtaggcacagaccagcgacccagggggccactgtggggttggagagagaggccagagcaggatagagcacccccatctcccaagagggcctgcagactcactggtctatctcttcattaaagatggagaaactgaaggagccacaaacagcccagaaccagctcagagttgctgggagagcctacggcagacaaggtcagcaggtagggctcaggcctcttagctcagaacccagtgcagcttagagccctgtagttcaaccctggtggcttcttagactgtggtacccctcctga

SEQ ID NO: 58598 - DNA, 2106 bp, Homo sapiens
ggctccctcttcaacgtggcgacaggtgtccctgaccctgctgactttgtgcttggtgctgctgatagggctgccagccctggggcttttgttttttcagtactaccagctctccaatactggtcaagacaccatttctcaaatggaagaaagattaggaaatacgtcccaagagttgcaatctcttcaagtccagaatataaagcttgcaggaagtctgcagcatgtggctgaaaaactctgtcgtgagctgtataacaaagctggaggctatacaagaaacatggtgccagcatctgcttcttctgagagcctcaggcagcttccacacatgggggaaagtgcagcagcacacaggtgcagcccttgtacagaacaatggaaatggcatggagacaattgctaccagttctataaagacagcaaaagttgggaggactgtaaatatttctgccttagtgaaaactctaccatgctgaagataaacaaacaagaagacctggaatttgccgcgtctcagagctactctgagtttttctactcttattggacagggcttttgcgccctgacagtggcaaggcctggctgtggatggatggaacccctttcacttctgaactgttccatattataatagatgtcaccagcccaagaagcagagactgtgtggccatccttaatgggatgatcttctcaaaggactgcaaagaattgaagcgttgtgtctgtgagagaagggcaggaatggtgaagccagagagcctccatgtcccccctgaaacattaggcgaaggtgactgattcgccctctgcaactacaaatagcagagtgagccaggcggtgccaaagcaagggctagttgagacattgggaaatggaacataatcaggaaagactatctctctgactagtacaaaatgggttctcgtgtttcctgttcaggatcaccagcatttctgagcttgggtttatgcacgtatttaacagtcacaagaagtcttatttacatgccaccaaccaacctcagaaacccataatgtcatctgccttcttggcttagagataacttttagctctctttcttctcaatgtctaatatcacctccctgttttcatgtcttccttacacttggtggaataagaaactttttgaagtagaggaaatacattgaggtaacatccttttctctgacagtcaagtagtccatcagaaattggcagtcacttcccagattgtaccagcaaatacacaaggaattctttttgtttgtttcagttcatactagtcccttcccaatccatcagtaaagaccccatctgccttgtccatgccgtttcccaacagggatgtcacttgatatgagaatctcaaatctcaatgccttataagcattccttcctgtgtccattaagactctgataattgtctcccctccataggaatttctcccaggaaagaaatatatccccatctccgtttcatatcagaactaccgtccccgatattcccttcagagagattaaagaccagaaaaaagtgagcctcttcatctgcacctgtaatagtttcagttcctattttcttccattgacccatatttatacctttcaggtactgaagatttaataataataaatgtaaatactgtgaagtgtgtgtgattttacaatggacttatggttggtgggaaaattcagcatggaaatgcttttcaaaatatgatagcggtcattattttgattgtgccttactgaaagtttttggggaatttacaagagtactgattacatgattatctggagaaaataagatgtctttgaaatacatgttggcttcaagaaaacagttttaacgttttcctaaaatgaaatcttttgaggtgagcttatggcatcaacacatggttgatgaggaagctgagttgcattagtgcacatgatttccagtcaggtcatgggaaatgaacagagacagtgacatctttgtagctggttccttttgtgagggacttcttttcttggagatgactccatgcacaaatataacagggatcattgggaatgacaccatcacagccaccaagtttattgggttactgataat

SEQ ID NO: 58599 - DNA, 2263 bp, Homo sapiens
tactgacggttagaacattaggaatgccttttagtgccttgcttcctgaactagctcacagtagcccggcggcccagggcaatccgaccacatttcactctcaccgctgtaggaatccagatgcaggccaagtacagcagcacgagggacatgctggatgatgatggggacaccaccatgagcctgcattctcaaggctctgccacaactcggcatccagagccccggcgcacagagcacagggctccctcttcaacgtggcgaccagtggccctgaccctgctgactttgtgcttggtgctgctgatagggctggcagccctggggcttttgttttttcagtactaccagctctccaatactggtcaagacaccatttctcaaatggaagaaagattaggaaatacgtcccaagagttgcaatctcttcaagtccagaatataaagcttgcaggaagtctgcagcatgtggctgaaaaactctgtcgtgagctgtataacaaagctggagcacacaggtgcagcccttgtacagaacaatggaaatggcatggagacaattgctaccagttctataaagacagcaaaagttgggaggactgtaaatatttctgccttagtgaaaactctaccatgctgaagataaacaaacaagaagacctggaatttgccgcgtctcagagctactctgagtttttctactcttattggacagggcttttgcgccctgacagtggcaaggcctggctgtggatggatggaacccctttcacttctgaactgttccatattataatagatgtcaccagcccaagaagcagagactgtgtggccatccttaatgggatgatcttctcaaaggactgcaaagaattgaagcgttgtgtctgtgagagaagggcaggaatggtgaagccagagagcctccatgtcccccctgaaacattaggcgaaggtgactgattcgccctctgcaactacaaatagcagagtgagccaggcggtgccaaagcaagggctagttgagacattgggaaatggaacataatcaggaaagactatctctctgactagtacaaaatgggttctcgtgtttcctgttcaggatcaccagcatttctgagcttgggtttatgcacgtatttaacagtcacaagaagtcttatttacatgccaccaaccaacctcagaaacccataatgtcatctgccttcttggcttagagataacttttagctctctttcttctcaatgtctaatatcacctccctgttttcatgtcttccttacacttggtggaataagaaactttttgaagtagaggaaatacattgaggtaacatccttttctctgacagtcaagtagtccatcagaaattggcagtcacttcccagattgtaccagcaaatacacaaggaattctttttgtttgtttcagttcatactagtcccttcccaatccatcagtaaagaccccatctgccttgtccatgccgtttcccaacagggatgtcacttgatatgagaatctcaaatctcaatgccttataagcattccttcctgtgtccattaagactctgataattgtctcccctccataggaatttctcccaggaaagaaatatatccccatctccgtttcatatcagaactaccgtccccgatattcccttcagagagattaaagaccagaaaaaagtgagcctcttcatctgcacctgtaatagtttcagttcctattttcttccattgacccatatttatacctttcaggtactgaagatttaataataataaatgtaaatactgtgaagtgtgtgtgattttacaatggacttatggttggtgggaaaattcagcatggaaatgcttttcaaaatatgatagcggtcattattttgattgtgccttactgaaagtttttggggaatttacaagagtactgattacatgattatctggagaaaataagatgtctttgaaatacatgttggcttcaagaaaacagttttaacgttttcctaaaatgaaatcttttgaggtgagcttatggcatcaacacatggttgatgaggaagctgagttgcattagtgcacatgatttccagtcaggtcatgggaaatgaacagagacagtgacatctttgtagctgctcctttgtgaggcacttctttcttgagatgactccatgcacaaatataacagggatcattgggaatgacaccatcacagccaccaagtttattgggttactgataat

SEQ ID NO: 58600 - DNA, 2343 bp, Homo sapiens
tactgacggttagaacattaggaatgccttttagtgccttgcttcctgaactagctcacagtagcccggcggcccagggcaatccgaccacatttcactctcaccgctgtaggaatccagatgcaggccaagtacagcagcacgagggacatgctggatgatgatggggacaccaccatgagcctgcattctcaaggctctgccacaactcggcatccagagccccggcgcacagagcacagggctccctcttcaacgtggcgaccagtggccctgaccctgctgactttgtgcttggtgctgctgatagggctggcagccctggggcttttgttttttcagtactaccagctctccaatactggtcaagacaccatttctcaaatggaagaaagattaggaaatacgtcccaagagttgcaatctcttcaagtccagaatataaagcttgcaggaagtctgcagcatgtggctgaaaaactctgtcgtgagctgtataacaaagctggaggctatacaagaaacatggtgccagcatctgcttcttctgagagcctcaggcagcttccacacatgggggaaagtgcagcagcacacaggtgcagcccttgtacagaacaatggaaatggcatggagacaattgctaccagttctataaagacagcaaaagttgggaggactgtaaatatttctgccttagtgaaaactctaccatgctgaagataaacaaacaagaagacctggaatttgccgcgtctcagagctactctgagtttttctactcttattggacagggcttttgcgccctgacagtggcaaggcctggctgtggatggatggaacccctttcacttctgaactgttccatattataatagatgtcaccagcccaagaagcagagactgtgtggccatccttaatgggatgatcttctcaaaggactgcaaagaattgaagcgttgtgtctgtgagagaagggcaggaatggtgaagccagagagcctccatgtcccccctgaaacattaggcgaaggtgactgattcgccctctgcaactacaaatagcagagtgagccaggcggtgccaaagcaagggctagttgagacattgggaaatggaacataatcaggaaagactatctctctgactagtacaaaatgggttctcgtgtttcctgttcaggatcaccagcatttctgagcttgggtttatgcacgtatttaacagtcacaagaagtcttatttacatgccaccaaccaacctcagaaacccataatgtcatctgccttcttggcttagagataacttttagctctctttcttctcaatgtctaatatcacctccctgttttcatgtcttccttacacttggtggaataagaaactttttgaagtagaggaaatacattgaggtaacatccttttctctgacagtcaagtagtccatcagaaattggcagtcacttcccagattgtaccagcaaatacacaaggaattctttttgtttgtttcagttcatactagtcccttcccaatccatcagtaaagaccccatctgccttgtccatgccgtttcccaacagggatgtcacttgatatgagaatctcaaatctcaatgccttataagcattccttcctgtgtccattaagactctgataattgtctcccctcctaggaatttctcccaggaaagaaatatatccccatctccgtttcatatcagaactaccgtccccgatattcccttcagagagattaaagaccagaaaaaagtgagcctcttcatctgcacctgtaatagtttcagttcctattttcttccattgacccatatttatacctttcaggtactgaagatttaataataataaatgtaaatactgtgaagtgtgtgtgattttacaatggacttatggttggtgggaaaattcagcatggaaatgcttttcaaaatatgatagcggtcattattttgattgtgccttactgaaagtttttggggaatttacaagagtactgattacatgattatctggagaaaataagatgtctttgaaatacatgttggcttcaagaaaacagttttaacgttttcctaaaatgaaatcttttgaggtgagcttatggcatcaacacatggttgatgaggaagctgagttgcattagtgcacatgatttccagtcaggtcatgggaaatgaacagagacagtgacatctttgtagctgctcctttgtgaggcacttctttcttgagatgactccatgcacaaatataacagggatcattgggaatgacaccatcacagccaccaagtttattgggttactgataat

SEQ ID NO: 58601 - DNA, 1626 bp, Homo sapiens
  misc_feature (1)...(1626): n = a,t,c or g
aagagagcggtctggacagcgcgtggccggcgccgctgtggggacagcatgagcggcggttggatggcgcaggttggagcgtggcgaacaggggctctgggcctggcgctgctgctgctgctcggcctcggactaggcctggaggccgccgcgagcccgctttccaccccgacctctgcccaggccgcaggccccagctcaggctcgtgcccacccaccaagttccagtgccgcaccagtggcttatgcgtgcccctcacctggcgctgcgacagggacttggactgcagcgatggcagcgatgaggaggagtgcaggattgagccatgtacccagaaagggcaatgcccaccgccccctggcctcccctgcccctgcaccggcgtcagtgactgctctgggggaactgacaagaaactgcgcaactgcagccgcctggcctgcctagcaggcgagctccgttgcacgctgagcgatgactgcattccactcacgtggcgctgcgacggccacccagactgtcccgactccagcgacgagctcggctgtggaaccaatgagatcctcccggaaggggatgccacaaccatggggccccctgtgaccctggagagtgtcacctctctcaggaatgccacaaccatggggccccctgtgaccctggagagtgtcccctctgtcgggaatgccacatcctcctctgccggagaccagtctggaagcccaactgcctatggggttattgcagctgctgcggtgctcagtgcaagcctggtcaccgccaccctcctccttttgtcctggctccgagcccaggagcgcctccgcccactggggttactggtggccatgaaggagtccctgctgctgtcagaacagaagacctcgctgccctgaggacaagcacttgccaccaccgtcactcagccctgggcgtagccggacaggaggagagcagtgatgcggatgggtacccgggcacaccagccctcagagacctgagctcttctggccacgtggaacctcgaacccgagctcctgcagaagtggccctggagattgagggtccctggacactccctatggagatccggggagctaggatggggaacctgccacagccagaactgaggggctggccccaggcagctcccagggggtagaacggccctgtgcttaagacactcctgctgccccgtctgagggtggcgattaaagttgcttcacatcctcaaaaaaaaaaaaaaaaaaaaaaaaaaaaaaaaaaaaaaaaaaagggttttttttttgggggggggggggttttttttttttgggggggggtattttttaggggggggggggcgggttttaaaaaggggggggggggaaaaaaaaaantnncnntcccaaanaaaattttcnctaatattaaaaatttaaaaccccttttttgaacctttaaaaaaaaatccccaccttctattcaaaattcaacccctttaactccgcctttcaattttttnaattcccntgttttgaaaatctgactctcaaaaanggccaggggggaataaaaatatgtggggaatccggggggggggttgaggggttaagaaaaaactggtttatttgggggggggaacc

SEQ ID NO: 58602 - DNA, 2661 bp, Homo sapiens
gggggggggggggggggccctaaggggcggccccgacgggggggcgggccaccccccccccggcgggggggggttttttttttgagagagtgtggggacgggaggggggttccccccccccccacccgaaggtgtcggttttttttcctccccccccaaaaaaaaatttattttctccccccgccagaagaatttttttggggggggggtgcgccaaaatccccccccccaaaaaaaaaaagttttttctaaaaaaacgcgggggtggtttttttcccccccccacaaaaaaaaaaaaaattcctccccccccccccgggtggtcgcccccccccacatttttttaaaagaaccccccccctttttttttttttttttttttttttttttttttttttttttttttttttttttttttttttttttttttttttttttttttttttttttttttttttttttttttttttttttttttttataaaacaagtttattcacattttagaaaaactaattccaggacaggaaatggcctccctataggatccctaagagatcaagaacagaaggccagagggaggggcttgggagggaaggagtggggaaggggaggcacgtctcccattctgggtagtgggaggtcaaataaattaaaggaagagtggacagagggagagggtgtccaggcaaccagaggagggcttggagctgggccggaagacagtcgacacctgcaagacctggggagtaagggatcaccgttttcgaagcctcttcatgaagcagcaagtgatggtaccaaggacagtggcaccagtgactagggccacccctgtacccaccagcagaggcacaaatagggtgtccagggcatgcatgtaggggtagactgtaacaggccctgagcgggcactgcccgcctggtaccagctgtagtcggcatgctgcacccaggcgctgggggcacagtggtacacgccttcatcctcgggccccaagctgtgtagtctcagccgatggcttcggggccccaccagctctacgctgacagggcctcctccaggccggactcccagctctgccacaccatcctggcctacgccacccaccagctgggcagggacagagctgagctctccatcctctggtcgctccacccaccagctggcggccagccgcagtcctggggggccaccccgcacagagatgttgcacagcagggaggcagtctccccgcggtacactgtgcctcctgctagccatgccacagcctccagcaccacaccttcctcccgcacatgtacagggagaggccgggaacgggcactggctgcttcacgaagccgggtcccagaccctcgaacataggctttggcgaggcagcggtaggtgcccgcatcaccaggcctggcagcctctagccgtagccggtatgttctggatgccaccttctccatggcaatgtgtcggccctcatagccagggcccaggctgcccacaccctctgtgtccagctgggctaccaggcggccgggcccaggtgcccccgcaggtgccatctcccaacctacagagtatgcagcatgacggcctgctgggggaagtgcccctgacacattgcacagcagttccaagggctcccctgggccgatccgacgttcaccaggccccactgtcactgccagctggctggacagcgtctgcacatccacgtgggccaggacggcccttttctctgcaatctgggcccagctgccatcaggatcctgaatccactcagcggcagtgcagtggtaggtgcctgcgtcccctgcctgggcaccccctactaccatgcggtaccgatcggtcccttccttgcccagacgaagctcccctgcagccaatcgctcagcatagggagctccagcctccacggccaagtctgaccggattcccaccacttcctgcagagttgaccgcccaactggtgcctcgggcacagatcgcccaaaggacactgccaggtgtgtgtgcttctgtgtgcttgtcctcgccaggcagcccagtgccagctcctgcccctcatgcaccgtcatgcgtgggggtgaggttggggcctggcggcctcggggccctgggggggcagcagacacctggaggacatctggaagaactctcagctccaccttgccgctgtagctgcccaggtagcgggtatcagtggagggggtgtggcactcataaatgccggcatcctgggcctgcaggcgggcaatcttgagcaccacggcatcaccttgtaggcgctgcacctgcacctcacccgccaccactcgggacttgaagacagcataggagaactgggtatccttggtactgacaatgcccagtgcagtatctggggcctcgggcctatacaggaaccactcgaagttctgctgggcagggccctcatagccggtcacattgcaggagatggagacagctgtgccagccacgcggtacaagggcccctcggggaccagcacctcccgggcccagcatcccattcctagcattagcagcagcagcagcggcagcgaaggcggcagcagcgtgggcctgagggcgcccatcctgcgcggccagctctggggaggctccgggggatggcgcgggttctttgagtcgcatcgagt

SEQ ID NO: 58603 - DNA, 2047 bp, Homo sapiens
  misc_feature (1)...(2047): n = a,t,c or g
ctggcagtgtcctttgggcgatctgtgcccgaggcaccagttgggcggtcaactctgcaggaagtggtgggaatccggtcagacttggccgtggaggctggagctccctatgctgagcgattggctgcaggggagcttcgtctgggcaaggaagggaccgatcggtaccgcatggtagtagggggtgcccaggcaggggacgcaggcacctaccactgcactgccgctgagtggattcaggatcctgatggcagctgggcccagattgcagagaaaagggccgtcctggcccacgtggatgtgcagacgctgtccagccagctggcagtgacagtggggcctggtgaacgtcggatcggcccaggggagcccttggaactgctgtgcaatgtgtcaggggcacttcccccagcaggccgtcatgctgcatactctgtaggttgggagatggcacctgcgggggcacctgggcccggccgcctggtagcccagctggacacagagggtgtgggcagcctgggccctggctatgagggccgacacattgccatggagaaggtggcatccagaacataccggctacggctagaggctgccaggcctggtgatgcgggcacctaccgctgcctcgccaaagcctatgttcgagggtctgggacccggcttcgtgaagcagccagtgcccgttcccggcctctccctgtacatgtgcgggaggaaggtgtggtgctggaggctgtggcatggctagcaggaggcacagtgtaccgcggggagactgcctccctgctgtgcaacatctctgtgcggggtggccccccaggactgcggctggccgccagctggtgggtggagcgaccagaggacggagagctcagctctgtccctgcccagctggtgggtggcgtaggccaggatggtgtggcagagctgggagtccggcctggaggaggccctgtcagcgtagagctggtggggccccgaagccatcggctgagactacacagcttggggcccgaggatgaaggcgtgtaccactgtgcccccagcgcctgggtgcagcatgccgactacagctggtaccaggcgggcagtgcccgctcagggcctgttacagtctacccctacatgcatgccctggacaccctatttgtgcctctgctggtgggtacaggggtggccctagtcactggtgccactgtccttggtaccatcacttgctgcttcatgaagaggcttcgaaaacggtgatcccttactccccaggtcttgcaggtgtcgactgtcttccggcccagctccaagccctcctctggttgcctggacaccctctccctctgtccactcttcctttaatttatttgacctcccactacccagaatgggagacgtgcctccccttccccactccttccctcccaagcccctccctctggccttctgttcttgatctcttagggatcctatagggaggccatttcctgtcctggaattagtttttctaaaatgtgaataaacttgttttataaaaaaaaaaaaaaaaaaaaaaaaaaaaacccgcccctttgatttaaagggccccttaaaaccccgtggaaaaccccggagggcccttttaagggcccccccttttgttgttgcccccccccccggcctttttttgccctgggaggggccccccccccttgctttttttaaaaaaaagaagaaattgcccccactttgtgggagaagggtgctttctattggtggtaccaggcgggcagtgcccgctcagggcctgttacagtctacccctacatgcatgccctggacaccctatttgtgcctctgctggtgggtacaggggtggccctagtcactggtgccactgtccttggtaccatcacttgctgcttcatgaagaggcttcgaaaacggtgatcccttactccccagcccacaccgggcaaccttttcaggcttgccgggggcccccccccgggtggtgnggtttctgggggcccccncttgctccccccttggtcggggggtgctctggtccccc

SEQ ID NO: 58604 - DNA, 1878 bp, Homo sapiens; identical to SEQ ID NO: 58464

SEQ ID NO: 58605 - DNA, 1205 bp, Homo sapiens
cccacccaccatgagggccccataggcctgagcctgtgaccatgctctgtgctctggcaggatcaccaatgtgttttatgagcagtacctgaccatcctccctgaggggctcttcatgctcagcctctgccttgtgcccaccttcgctgtctcctgcctcctgctgggcctggacctgcgctccggcctcctcaacctgctctccattgtcatgatcctcgtggacactgtcggcttcatggccctgtggggcatcagttacaatgctgtgtccctcatcaacctggtctcggcggggggcatgtctgtggagtttgtgtcccacattacccgctcctttgccatcagcaccaagcccacctggctggagagggccaaagaggccaccatctctatgggaagtgcggtgtttgcaggtgtggccatgaccaacctgcctggcatccttgtcctgggcctcgccaaggcccagctcattcagatcttcttcttccgcctcaacctcctgatcactctgctgggcctgctgcatggcttggtcttcctgcccgtcatcctcagctacgtggggcctgacgttaacccggctctggcactggagcaaaagcgggctgaggaggcggtggcagcagtcatggtggcctcttgcccaaatcacccctcccgagtctccacagctgacaacatctatgtcaaccacagctttgaaggttctatcaaaggtgctggtgccatcagcaacttcttgcccaacaatgggcggcagttctgatacagccagaggccctgtctaggctctatggccctgaaccaaagggttatggggatcttccttgtgactgccccttgacacacgccctcctcaaatcctaggggaggccattcccatgagactgcctgtcactggaggatggcctgctcttgaggtatccaggcagcaccactgatggctcctctgctcccatagtgggtccccagtttccaagtcacctaggccttgggcagtgcctcctcctgggcctgggtctggaagttggcaggaacagacacactccatgtttgtcccacactcactcactttcctaggagcccacttctcatccaacttttcccttctcagttcctctctcgaaagtcttaattctgtgtcagtaagtctttaacacgtagcagtgtccctgagaacacagacaatgaccactacc

SEQ ID NO: 58606 - DNA, 1603 bp, Homo sapiens
cggccgcgtcgacggtaaagtggttgcctcttggcatctgttgaatgattgtgtaggatagttgaccattaatgtctgcatcagggtcatgtgcagtcactgaaatgacagatgtaccaatgggaatgttctcaacaatagacttgaaaatatctccaggaggaaagctaggaggattgtcattaaagtccctcacgtgaataaccactgacattgtagatgaacgaggaggtcttccttggtcttttgctgttatatttaatttatacaaagactgtgtttcaaagtccagttttttggcaagaaaaatactcccagtgtttgggctaatgctaaaagttccgtggttgttagtcccagtaatactgtaatataaatcagcattgtcacctgaatcggaatcagttgcagtaacagaggacacgagttcaccaattctcatgttttccaaaacatcaacaaagagtgttgatttagggaaagaaggggtattgtcattttcatctaaaatatcaatatttaaagtacacgttgaattgagggggattgtccctgaatccactgcttgaattacaagggaataggcaggtgttgcttcatagtctaatttgccaattagtgttacctgaccagaggtactgtctatagcaaactgtctttcttcatttccttttattatagaatagtgaataagtccattattaccttcatcaacatctgaggcagatactcttaacacttgtgtcagattggctgctgattctgatattgtagcttggtaaaagtcttttaaaaatttgggagcattatcatttatatccttcatgtaaacatgtacagtggcctgatccttgagaggctgagggatcccctgatctgttgctatgactgtaaagctaaacacagcagtccctctccgcctcataagagactccctgtcaaactgatgagtatttgtaatttccccactgatggcatgcaactcaaaatctggctgcaccatttcaaaagaataccttacttctccatttggcccaaagtctttatctacagcacttacttcgcccacaaacgacccagccctctgctcttcttcgaagtaaaatgtgtaattggtactgttaaaaagaggtctgttatcatttacatcttctaaaattacagtaacattcacagtagcactaaggggttccactgctctgtcagaagcaacaaccattaaaacatatctgtcttgaagttcacggtccagttcactttttatatacaattgaccatctgggaatatgccaaaagcatcccctgtatttccttcagcaatggtgtatgcaatttcaccatttgctcctgaatccttatcagaagcttgtactttaaagaatcgagaattcacaggttctgactcagaaagggtgacttcataagagagttggtcaaacactggtgaattgtcatttacatcatggacataaactgttaagatgacactagaggagagctgtgggacacccatgtcagatgccaagatctctatttggtaggagccagcatgaacatccaggggcccaagcagactaatagtgccattcttttcattgatagc

SEQ ID NO: 58607 - DNA, 1509 bp, Homo sapiens; identical to SEQ ID NO: 58440

SEQ ID NO: 58608 - DNA, 1620 bp, Homo sapiens
cggccgcgtcgacttggggacagcttgtaccagtggcagaatctcagagggaggtccagcccggatgaggcgcccggcctccatcagcagcaccgcgtcagccctctccaggtactcagtgcggtgggtgcagagcagccgtgtggtgtagctcagcatgcccaggatgcacctgtgcagcaggtggttggccacatctgcatccacagcggccagagggtcatcgaggagatagagctccttttcctggtagacagcacgagcaagggcaatccgggcacgctgtcctccgctaagggtgacacccttctcccccacctctgtctggtctccagcaggcaggatactgaggtcatcattgagggcgcaggcttctagcacctccttgtacagctgtgcatcaaatgtcttcccaaagaggatgttgtctcggatggtggcaaactggatccagggttcctgggtggccaggccaaagcccttggacagcccccgcactgccacatgcccacgcagcatctgttcaggagctcagtggagagtatggccaccacattgtacttgttcccatctgtggagctctccagcgatggcagccagcagggagctcttcccacagccgaccttccccacgatgcccaccagcataccctttttcacttcgagatgactgatgaaggtctccaggctggttccaactgggtcccaggagaacaaggctccatgcagctccaatactgtagatggctctgcagggggatctgggctgtagtaggcctgggggttgtggtttggaaggtcgaggaaaagctggatccggtccaaggacactttggcctccaggagaccattgatcacccaagggaagttgttgagaggaagaatgagcattcgcaccagtgccagggccgtgaacaccttggtggcagtgagctggtgccccatgaggacataggtgatgaagataacgatggagatgacaaccggtagggcagcccacaggtatacacaggccgcatccaggtatttgatgacccggagtcgccccagctctcgagcccggcaggcctctactcgggctcccagtgcctgctcccacccgcagaacttgatgacccgaatgccactcagcagctctgtcacaagcttaacccgcgcatccttgtgctgtagcatttcctggttgctggccatgatgcgggtggcaatcactttgttgacgggtaccagcagcagtgccaagatgagaccacccacgaaggccacgcctacctgctggtacagcaggtagagggtgatggccagttgcaggggcaggccccaggcttcatggaagctcccagcaaagttaagcagccgttcagagtcagtgcctagtaggttcagggcctccccagtaggagggcggctgggccccagctgtaaagccttgcagtacaggatgttcagcacagccccccgtgcctgaagtgttaccttatatacctcatacccatactgattctgcagcacagcacccagcacagccctaccggctagccccagagcatagagcaggccgtggcttagtggctcctgcccctcttccaggaagcccaccagtagggagagcaacagggg

SEQ ID NO: 58609 - DNA, 1165 bp, Homo sapiens
cgggcacggtgttttttcccatcccggcggtgttaaaacacgggccaggcccaaattaaaattaccccccctaaaagggaaaaacctgcgggcgccttaattaaaccttttttttttttttttttgagacggaatctcactctagcccaggctggagtgcagtggcatggtctcactgcaagctccctctcccgggttcatgccattctcctgcctcagcctcctgagtagctgggactataggtgcgtgccaacacacccagctaattttttaatttttttttggtagagacggggattcaccgtgttagccaggatggtcttgaagtcctgagctcgtgatccacctgccttggcctctcaaagttgctgggattgcaggcatgagccactgcacccggccatggttttatattaaaaataataaaaatacggtgaatttctggttgaaatggggaaaggcctgtgatctccgttttcccagtgcttagcgctgactcagagaccctgagtgggacacacgactgcatggagtacagttgggaaacaactgggctagtctgggcctcctgagtctcagaggggagcagggggaagagctctgggcaagtcactgggctgaaccctggccagcccagtgtatgaccctgggtatttcaggtcatggggtgtgagtcctacctcgtgcctcttatcctcctaggtgtggatgtggaggcagccaagcgggcagaagaggaattgctccttcatgacacgaggtgctggctgaatgggggcgccatgccagaggcccggcacccccgcacaggcgcctctgccctgcacgtggctgctgccaagggctacattgaggtgatgaggttgctccttcaggctggctacgacccagagctccgggacggggacggctggactcccctgcacgcagcggcacactggggcgtggaggatgcctgccgcctgctggccgagcatggcgggggcatggactcactgacccatgcggggcagcgtccctgtgacctggccgatgaggaagtactgagcctgttggaggaactggcccggaaacaggaggacctggccgagtcggacgccatggaggggctgctgaaggcggagatcgcccgccgaggtgtggatgtggaggcagccaagcggg

SEQ ID NO: 58610 - DNA, 928 bp, Homo sapiens
gtctaaaagccctgatgaatacgcagtatggcttggaaagaattatgagtgaggagaggagcctttccttattggccaaagccgtggatcccagacaccccaatatgatgacagatgtggttaaacttctctctgcggtatgcattgtaggggaagaaagcatccttgaagaagttttagaagctttaacttcagctggtgaagaaaaaaaaattgacagatttttttgtattgtggaaggcctccggcacaattcagttcaactgcaagtagcttgtatgcagctcatcaatgccctggttacatctcctgatgatttggatttcaggcttcacatcagaaatgaatttatgcgttgtggattgaaagagatattgccaaatttaaaatgcattaagaatgatggcctggatatccaacttaaagtctttgatgagcataaagaagaagatttgtttgagttatcccatcgccttgaagatattagagctgaacttgatgaagcatatgatgtttacaacatggtgtggagcacagttaaagaaactagagcagagggatattttatttctattcttcagcatcttttgctgattcgaaatgattattttataaggcaacaatacttcaaattaattgatgagtgtgtatcccagattgtattgcatagagatggaatggatccagacttcacatatcgaaaaagactagatttagatttaacccagtttgtagacatttgcatagatcaagcaaaactagaagagtttgaagagaaagcatcagaactttacaagaaatttgaaaaagagtttaccgaccaccaagaaactcaggctgaattgcagaaaaaagaggcaaagattaatgagcttcaagcagagctacaagcttttaagtctcagtttggtgccttgccagctgattg

SEQ ID NO: 58611 - DNA, 2437 bp, Homo sapiens
ccaacatggatttgatcaacctgctcacgctttccctggacctctatcacactgaagatgatatttacaaactgtcactggtgctggagcctagaaattctaaatcgcagcctacctcccctacgacgcccaacaagcctgtggtacccctggagtgggcattaggggtgatgccaaagccagaccccacggtcatcaacaagcacataaggaaattagtggagtctgtatttagaaactatgatcacgaccatgatgggtacatttcccaagaggactttgaaagtatagctgccaattttcccttcttggattccttctgtgttctggacaaagatcaggatggcctaattagtaaagatgaaatgatggcttacttcctgagagctaaatcccaactacactgtaaaatgggaccaggatttatccacaattttcaggagatgacctatctcaagccaaccttctgcgaacactgtgcgggatttctctggggcataatcaagcaaggatacaaatgcaaagactgtggagccaattgtcacaaacagtgcaaagacctcctggttctggcctgcaggagatttgcccgggcgccctccttgagcagtggtcatgggtcactgcctggaagcccctcgctgcccccagcgcaggatgaggtgtttgagttccctggagtcactgctggacacagggatttagacagcagagccatcacactggttacaggctcttctcgcaagatctctgtgaggctacagagggccaccaccagccaggccacccagactgaacctgtctggtcagaggctggctggggggactcggggtcccacaccttccctaaaatgaaatccaagttccatgacaaagcagcaaaggacaaaggctttgccaaatgggaaaatgagaagcccagggtgcatgctggtgtggatgttgtagaccggggcacggagtttgaacttgaccaggatgaaggagaagagaccagacaggatggtgaggatggctgacttcaggctgcggaaactgaaggcaataatgttggcttttggaaggggcaagacgagaaactctgaagaaagctctgactctcaggaagttatctggaaagatacctggatgtttactgccttgggacactgtgggatctccatgtttggactatgggacagagaattgaccctaactaactatgaactatttatttcctcctcccctacccctagttaagtgccacaaagactgtgttatgtagtcagtacttttctcatgtatctttctctagaccatttatatacgggtgaaatgaaagcttttttgcatgtacttgatactcagtctgtaaactcagacttcgctttttttgtgagactatcctttcaatatttttataaacttttgtgtgtgctgtggcagggaacagttaacaaggagtttatttagaggggtttttttcattttttgtttttcttgttttgttttgttttgttcttcttggtgtgctttttggatgggaccagaacttaacattttcctgaggactaggaagctcatcagacactggaatgcagtgattcttctaatgatggtcaactgcaaggagaaactgtttacatccttcccactacacagttgctatgatatgtaacaagtcacacatgtatatatcacacaagtcttaccaattctgcgtcactaggaagctatagcatggtcgtgaaagctctcctaatacttacttaaatagccatggaagaaaattatgcttgtcccttctgactgggttaagccatctttcttaagattcctgaagtagaaatagcaattaagaaattaattcaagttttgacggttaacatttagcagaaaaacaaaccattgaataagctactaggtgaaatgcaaaacaaccatcaatttttttaaactcaataattttgtgaaaaaaaaaaaaaaaaaaaaaatttttattaaaggggcggaaggctaattcctttaagggggggtaaatttaacttggacatgggccgttgtttaacaacggcggaatgggaaaaaatattgtataaggcaacaatacttcaaattaattgatgagtgtgtatcccagattgttttgtatagagaaggaatggattcagacttcacatatccaaaaatattttatttatatttatcccagtttgcaaacatttgcatagaataagccaatctataacagtttgtggagaaagcatcagaactttacacgacatttgtgttagagtttaacgaacacctacaaactcaggctgaattgcagaataaaaaggccaatattaaagagcttcaagcggagctccttgcttttaaatttcaccttggagccctgcccgctgaaagaaacattacttttccctgctcaataaaaagtgggactgacaactca

SEQ ID NO: 58612 - DNA, 1433 bp, Homo sapiens
ttcccgggtcgcgatttcgttgagcggctgcggctcctgcacctccccggggagccgccccgtcgatgccactaaggccaaggacatatagacggtctgccctcccccactcaaaccgggatcatgacggtccccaaggagatgcccgaaaagtgggcccgggcccaggcgcctccctcttggagccgaaagaagccctcttgggggacagaagaagaaaggagggcgcgggctaatgaccgagaatacaatgagaaattccagtatgcgagtaactgcatcaagacctccaagtacaatattctcaccttcctgcctgtcaacctctttgagcagttccaggaagttgccaacacttacttcctgttcctcctcattctgcagttgatcccccagatctcttccctgtcctggttcaccaccattgtgcctttggttcttgtcctcaccatcacagctgttaaagatgccactgatgactatttccgccacaagagcgataaccaggtgaataaccgccagtcttaggtgctgatcaatggaatcctccagcaggagcagtggatgaatgtctgtgttggtgatattatcaagctagaaaataaccagtttgtggcggcggatctcctcctcctttccagcagtgagccccatgggctgtgttacatagagacagcagaacttgatggcgagaccaacatgaaagtacgtcaggcgattccagtcacctcagaattgggagacatcagtaagcttgccaagtttgacggtgaagtgatctgtgaacctcccaacaacaaactggacaaattcagcggaaccctctactggaaggaaaataagttccctctgagcaaccagaacatgctgctgcggggctgtgtgctgcgaaacaccgagtggtgcttcgggctggtcatctttgcaggtcccgacactaagctgatgcaaaacagcggcagaacaaagttcaaaagaacgagtatcgatcgcctaatgaataccctggtgctctggatttttggattcctggtttgcatgggggtgatcctggccattggcaatgccatctgggagcacgaggtggggatgcgtttccaggtctacctgccgtgggatgaggcagtggacagtgccttcttctctggcttcctctccttctggtcctacatcatcatcctcaacaccgttgtgcccatttcactctatgtcaggtatgtgccttctctgacctggggtctctccagggagtcaggcggtcccatagaacttttcttttctatgaagatgaagtccttgagaagtaacgagaagtcctcttcttcctgtactgtaaacatttgatgttatctgtttatctttgtgggcagagcaaactttttaccacagtttcctggtacttgggactgtattagagaaaaaaaaaaaaaagg

SEQ ID NO: 58613 - DNA, 2189 bp, Homo sapiens
  misc_feature (1)...(2189): n = a,t,c or g
tgacaaaccaatttccctcgatgatgtgcttctgagtgctctgctgaggaacaatgggaagtctgcccagcagaagaaaatctctgccaagcccaagcttgagttcctctgtccaaggccagggacctgtgaccatggaagcagagagaagcaaggccacagccgtggccctgggcagtttcccggcaggtggcccggccgagctgtcgctgagactcggggagccattgaccatcgtctctgaggatggagactggtggacggtgctgtctgaagtctcaggcagagagtataacatccccagcgtccacgtggccaaagtctcccatgggtggctgtatgagggcctgagcagggagaaagcagaggaactgctgttgttacctgggaaccctggaggggccttcctcatccgggagagccagaccaggagaggctcttactctctgtcagtccgcctcagccgccctgcatcctgggaccggatcagacactacaggatccactgccttgacaatggctggctgtacatctcaccgcgcctcaccttcccctcactccaggccctgggggaccattactctgagggctggcccgctccctggcaaggatatacccctacctgtgactgtgcagaggacaccactcaactggaaagagctggacagctccctcctgttttctgaagctgccacaggggaggagtctcttctcagtgagggtctccgggagtccctcagcttctacatcagcctgaatgacgaggctgtctctttggatgatgcctaggcccaaaggagaggccaaaagggaaaccaaggctgcacacctagaaccccaattcagcctcctgggcaccccagaggcaaggctgtgcactcagggagggagggtgggacacagaggtgcatctagggtcccacctgtacccttgctctttcctctcttagcccttagaagtcacctacttccttccagtgccatgatcccacctgcgacctctagtgcgagtgcagagaaggtgggaccagggccagggttccaaaaagagaataagcctcctggggggtctgacctagttagttcttgagtttggggtttccagtaccatctggatgccctgcctgttgagccccattctacatccccaccattaaccaggccccacccacaaggtagaaacaacccctagagtcaacgagaaagtcattttcagaaaatctacaagtctcgtttgagaccacccacccaataccccttcaaaaaagggtaaagggaacttggtggggccctttaanaaaggggggaaaaaaagggaaaagggccttggaaatgatgtcttaaccgaagccccagatcttggatggttccaagctctatgtgaccctccaaagcaaagaagaaagacttcggacagtctaagtccctcaaaatgtcccccattgaggacaacagccccagttcttttttcttttttttaagacggagtcttgccctgttgcccatgtgggagtgcaatggcacgatttcagctcactgcaccctccatctccgggattcaaacatttctcctgcctcagcctccagaatagctgggattacaggcgtacaccaccatgcctggctaatttttttgtatttttagtagacatggggtttcaccacattggccaggctggtgtcgaactcctgacctcaggtgatccacccaccttggcctcccaaagtgctgggattacaggtgtgagccacggcacccagcctagctctcagatctctatttcattttgtggcttaccattccctagcacactggccttgccatcttgtggccgaataaaaaataacacctcttaagtctagcacactgcagtgaggccaggcacctcagtgctgggcaggggcatcagaaggtgctaagccctctctccacaatgccaagacggagaccacagcctacaccaaatccagcccttgatttccctgctgcctccataaacagaaagaggtctgctggatccgctaagggatcagggagaggaagaaagagggatggggtgggaggcaccccctccagtgctcctactggttcccaagctacaggtggggtgggaaaggctttatcaggtatcatcaacaggttctcnattcaaanggtntntctatggttgttcaattggngacaccct

SEQ ID NO: 58614 - DNA, 1086 bp, Homo sapiens; identical to SEQ ID NO: 58494

SEQ ID NO: 58615 - DNA, 2618 bp, Homo sapiens
  misc_feature (1)...(2618): n = a,t,c or g
gaccactctgctcccccgcctaagccatgcacctctgtgggagcaatgggctgctgacccagacagaccccaaggagcaacaaaggcagctgaagaagcagaagaaccgggcagccgcccagcgaagccggcagaagcacacagacaaggcagacgccctgcaccagcagcacgagtctctggaaaaagacaacctcgccctgcggaaggagatccagtccctgcaggccgagctggcgtggtggagccggaccctgcacgtgcatgagcgcctgtgccccatggattgtgcctcctgctcagctccagggctcctgggctgctgggaccaggctgaggggctcctgggccctggcccacagggacaacatggctgccgggagcagctggagctgttccagaccccgggttcctgttacccagctcagccgctctctccaggtccacagcctcatgattctcccagcctcctccagtgccccctgccctcactgtcccttggccccgctgtggttgctgaacctcctgtccagctgtcccccagccctctcctgtttgcctcgcacactggttccagcctgcaggggtcttcctctaagctcagtgccctccagcccagcctcacggcccaaactgcccctccacagcccctcgagctggagcatcccaccagagggaagctggggtcctctcccgacaacccttcctctgccctggggcttgcacgtctgcagagcagggagcacaaacctgctctctcagcagccacttggcaagggctggttgtggatcccagccctcaccctctcctggcctttcctctgctctcctctgctcaagtccacttctaacctggtcttcggagctgggttggccccttctttgggctcaggaagcagccttagcacacgggcctctcctccctcactactgggtgctgccctgcgtggctgaccagctggcccaggatttcacagtcgaaaaggaagccaccactgatgcctcccactgtgacaggccctgtcaccaccaatatcttatttcaacctcacagttgacctgagaaatcgagattatcactccactttttcagacaaggaaactgaggctcagggaagccaagtgacaagtccaaggtcacgaagactttcttggagcccgaaacaccaccctctgctcctccttctcctgtcctggcccaggcatcctaggggctgaaatcctggaaaccgtgggctggtgtgagaaggtttgcatgctcagagcagagaagggctctccccactgcttcgtgattccagggccagagccatgcagtcccagaaaccccaacctagctggggcaggtccagagtccaagccctggtgggtagaggccaagcagaagccctgaagtggactcttgcttcccctagtagtgttttcagtgccaagaagctgaaactgtgagctggagttggggagaggtctggaagaggaccatctgggatttctacagcctgggtacccatagccacaccaaggcttctgggagattctgcagggtcagctttccaggctgttcccaaatagctccctgcctccccactgcccctaaagccacagcagaagagccattcatctcataaacaaaaaggaagaggaaagaatgaggaaggaccctgtgcaaggttatttgcaggcagggatgggcttgtacctgacagcacccacccctgtgtggcccccaggccctcatcaccctcagacccctcctaagcagttccctcattgctctttggactaggctgacagcaggaagagcagggcccatgaccgggtggaagttcagttttggtgtctgcttcaagagggggttttacactctgattccaggacaagcactctgaggcgggtgggggagagaaaccctggctcttcacccaggtttcacacacatgtaaatgaaacactatgttagtatctaacacactcctggatacagaacacaagtcttggcacatatgtgatggaaataaagtgttttgcaatctttaaaaaaaaaaaaaaaaaaaaagatttttttttaaagggcccgaagtttaatccctttaagggggggtaaatttaacttggccctggcccgccttttaaaaacgcgggaatgggaaaaaaaacnnnnnnnnnnnanaatttcntnnccnnnccnnttttatttcatttcacanncaaattttaaaaaaaaaaaaaaacccccccccttttaaaaaacccttctaattcccaaatttttaccaaacctccaaacctttaaccttcctcccttttatnaaaacaaaaattaaacccctcctcctctttctttttaaaaaaaacttttttttcttatatcttacctttatattaaacaaatttttttaaacaaaatcttttaaactccttaacttatttttctaaaaattttttaaaatatttaataatntcataaacataatttcccaattatctcccctctttctaaaaatttttatttgcccccacaaaaaaaaaaaaaaacaacaccaaaccnacacaccccccccaccacacanccaccaccccaaaaaacaacacaacaacacccnaacaacacncctccc

SEQ ID NO: 58616 - DNA, 2421 bp, Homo sapiens
gcgggacttccgtgttggcgggattctgaacgctgccatggctcagaccgtgcagaatgttacattgtcgctcactctgcccatcacgtgccacatttgcttggggaaggtacgtcagcctgtcatatgcatcaacaaccatgtattttgttcgatttgtattgatttgtggttgaagaataatagccagtgtccagcttgcagagtccccatcactcctgaaaatccttgcaaagaaattataggaggaacaagtgaaagtgaacctatgctaagccatacggtcaggaagcatcttcggaaaactagacttgaattactacacaaagaatatgaggacgaaatagattgtttacagaaagaagtagaagagcttaagagtaaaaatctcagcttggagtcacagatcaaaactattctggatcctttaaccttggtgcagggcaaccaaaatgaagacaaacatctagtcacagataatccaagtaaaattaacccagaaactgtagcagagtggaagaaaaaactcagaacagctaatgaaatctatgaaaaagtgaaagatgatgtggataagctaaaggaggcaaataaaaaattgaaattggaaaatggtggtctggtgagggagaatttacgactgaaggctgaagttgataacagatcacctcaaaagtttggaaggtttgcagttgctgctcttcagtccaaagtagaacagtatgagcgtgaaaccaatcgcctcaagaaagccctggaacgaagtgataagtatatagaggaactagaatctcaagttgcacagctaaaaaattcaagtgaagagaaagaagctatgaattccatttgccagacagcactttctgcagatggcaaagggagcaaaggcagtgaggaggatgtggtgtcaaagaatcaaggcgatagtgccagaaagcagcctggctcatccacctccagttcttctcacctagcgaagccttccagcagcagactgtgtgacaccagttctgcaaggcaggaaagtaccagcaaagcagaccttaactgttctaagaacaaagacctatatcaagaacaggtagaagtaatgttagatgtgacagatacaagtatggatacttatttggaaagagaatgggggaataaaccaagtgactgtgtaccctacaaagatgaagaactttatgatcttccagctccttgtactcctttgtcccttagttgccttcagctcagtactccagaaaatagagagagctctgtggtccaagcaggaggttccaaaaagcactcaaaccatctcagaaaattggtgtttgatgatttttgtgattcttcaaatgtttctaataaagattcttcagaagatgatataagtagaagtgaaaatgaaaagaaatcagaatgtttttcttccccaaagacaggattttgggactgttgttccacaagctatgcccaaaacttagattttgaaagttcagaggggaacacgatagcaaattctgttggagaaatatcttcaaaattgagtgagaaatcaggcttatgtttatccaaaaggttgaattctattcgctcttttgaaatgaaccggacaagaacatccagtgaagcatcgatggatgctgcttaccttgacaaaatctctgagttggattcaatgatgtcagagtcagacaacagcaagagcccttgtaataacggttttaagtcactggatttggatgggttatcaaagtcatctcaaggcagtgaatttcttgaggaacctgataagttggaagaaaaaactgagctaaacctttccaaaggttctctaactaatgatcagttagaaaatggaagtgaatggaaacccacttctttttttctcctctctccatctgaccaagaaatgaatgaagatttttcactccattccagttcttgtccagtaactaatgaaatcaaacccccaagctgcttgtttcagacagagttttcccagggcattttgttaagcagttcacatcgactatttgaagatcaaagatttgggtcatctttgtttaagatgtcctcagagatgcacagtcttcataaccaccttcagtctccttggtctacttcctttgtgcctgaaaagaggaataaaaatgtgaatcaatcaacaaaaaaaaaaaaaaaaggggggcccgttttaaaggacccttggggggccccaactttaacccgggctggcaacgtaatatttttttccttatgggggggcgaattaaaaacctacttgggaattttgggaaggaacccttattttgggggggggacaaattggcccaacctccttccagaatttaaaggctttagggaaaataaaaatttttaaggggaaaagggggtaaaacaacctgaatagcctggttgttgaaaaatgta

SEQ ID NO: 58617 - DNA, 2341 bp, Homo sapiens
gctcttgtggcctctggcgggcctccagccagttagaccatttgaccagaacgtgtgcagctcagccagccacagaactggaatttttcaggagcagggggagcatggagtttggactttgctgagcaactgaagtggagcgcagagcttgctcgcttaggagagagcatcatggatggcaaacaagggggcatggatgggagcaagcccgcggggccaagggactttcctggcatcaggcttctttcaaacccattgatgggcgatgctgtgtctgattggtctcctatgcatgaagctgcaatccacggacatcagctgtctctgaggaacctcatcagccaggggtgggctgtgaacatcatcacggcagatcatgtttccccactccatgaagcctgtcttggaggtcatctctcttgtgtgaagattttattaaagcatggagctcaggtgaatggtgtgacagcagactggcacactccactgtttaatgcttgtgtcagcggcagctgggattgtgtgaatttgcttctgcagcacggagccagcgttcaacctgagagtgatctggcatcccccatccatgaagctgctaggagaggccacgtggagtgtgtcaactctcttatagcttatgggggcaacattgaccataagatcagccacctgggcactccactctatttggcttgtgaaaaccaacagagagcctgtgtcaagaagcttctggagtcaggagcggacgtgaaccaagggaaaggtcaggattccccacttcatgcagtggccaggacagccagtgaagagctggcctgcctgctcatggattttggagcggacacccaggccaagaatgctgaaggcaaacgtcctgtggagctggtgcctccagagagccccttggcccagctcttcttggagagagaagggcccccttctttgatgcagttatgccgccttagaattcggaagtgttttggaatccagcagcatcataagataaccaaactcgtcctcccagaggatctgaaacagtttctcctacatctttaaatgcatctagggaatggattcacaaacgatgtgaaaacattattgagtgttgtagccactagaattttaaaatcaagttggatttatagagtttgactagttttttcgattagatttgtatttgttataaacttgtttatggagtttgactaattttttctattcaatttgtatttgttaaactcaagccagggtggaaagacactgcatacgtttgtattattagttagaaggcatgaagacttttttccctgcttggagagtgtcataagttattgttttgcatatctactgcatgccaagcactttttgcatcatctaatttagccctcacagccactgggtcaagatgtccaattttccagagtaaggatagaggagtcaaattcaaatacaggttttctgacattaacttatgtgatgacttgatcgaggcaggcttttccagcatcactgtcctggttccatctctgctatatgggaatgaaaataaagaaacatatttcttggcttgtctaaaaaaaaaaaaaaaaaaaaggttttttatttaaccgcccccagcctttttccttttagggggggtaaatttaacttggcccctgcccgccgtttaacaccgtcgggacgggaaaaacaacctttctttgcccctgaaggggccccccccccctgccttttcttaaaaaaaggagaaatttccttccctttgccggagaaggggcattttttttctggcgcccccccacaacaaccccccaccacacccaaagatggccagcatgcccaacaccaccccatcctccgcgcgccacaacccttatccccccccccctctataaccccaccttcaccctcgggcctccccctccccctcctcgccccttccccccccccttctgccccagccactatctacccccccccccccctccccatcgcttttttctccccccccctcccccttgccccccccccccccccaccccgcatcctttacctccccccccccgcctccaattattaaaccgctccggggggcgaccccccaatacctcgagtcccgcgcctcccccctcctaccctaatagctcttgccccgcccgccccaactcctaacccatattgcgattgtctcccccgcgccccccgccctccacacaccctcatttctcgctggcgcggccggctacacccccccccacttcttttcttgcctcgccgccccctccgcgcaagatgaaacctacctcaccctcctctcctccctcccactgtccccgcgccg

SEQ ID NO: 58618 - DNA, 1529 bp, Homo sapiens
  misc_feature (1)...(1529): n = a,t,c or g
ggaccgactgacccatgttcaactgctgttcacatggaacccttctccacttcggccttcaaagttctcgtttgaatatttgctactaccaccaagatctgcacctgcggcggctccacccgggcccgcgccctaggcttcaaggctcacggaaaagtgaacaagcctccagggctattcagatttgtccctgagcagggagtaggcactgatgagaattgcctcattgaaatactagcttcaagaacaaatggagaaattttccagatgcgagaagcctactgcttgcaatacagcaataacctccaagaggacatttattcagagacctcaggacacttcagagatactctcatgaacttggtccaggggaccagagaggaaggatatacagaccctgcgatggctgctcaggatgcaatggtcctatgggaagcctgtcagcagaagacgggggagcacaaaaccatgctgcaaatgatcctgtgcaacaagagctaccagcagctgcggctggttttccaggaatttcaaaatatttctgggcaagatatggtagatgccattaatgaatgttatgatggatactttcaggagctgctggttgcaattgttctctgtgttcgagacaaaccagcctattttgcttatagattatatagtgcaattcatgactttggtttccataataaaactgtaatcaggattctcattgccagaagtgaaatagacctgctgaccataaggaaacgatacaaagagcgatatggaaaatccctatttcatgatatcagaaattttgcttcagggcattataagaaagcactgcttgccatctgtgctggtgatgctgaggactactaaaatgaagaggacttggagtactgtgcactcctctttctagacacttccaaatagagattttctcacaaatttgtactgttcatggcactattaacaaaactatacaatcatattttctcttctatctttgaaattattctaagccaaagaaaactatgaatgaaagtatatgatactgaatttgcctactatcctgaatttgcctactatctaatcagcaattaaataaattgtgcatgatggaataatagaaaaaaaaaaaaaaaaaaaaaaaaaaaaaatttttttttaagggggccgaagctttttccttttaagggggggtaattttaatttggccctggcccgcgttttaaaaacgggggaaggggaaaaaaatnnnnnnnnnnnnnnnnnnnttttnnnnnnnnnnnnnnnnnnnnnnnnnnnnnnnnnnnnnnnnnttnnntntntnnnnnnnnnnnnnnnnnnnnnnnnnnnnnnnnnnnnnttttttttttttccccccccncnnntttttttttttttnnnnnnnnnnttcccccctcccccctttttttctcncccctttttcccccccccttttttttttttttctnnnnnnnnccccctctcccctttttttttttcccccccccccccnnnnncccccttttttttttttt

SEQ ID NO: 58619 - DNA, 1587 bp, Homo sapiens
cggacgcgtgggtcgacccacgcgtccggccgctctcgatcttagaactaggaactggaacagcagtaatatttatctctttaacctctctgtctctgacttagcttttctgtgcaccctccccatgctgataaggagttatgccaatggaaactggatatatggagacgtgctctgcataagcaaccgatatgtgcttcatgccaacctctataccagcattctctttctcacttttatcagcatagatcgatacttgataattaagtatcctttccgagaacaccttctgcaaaagaaagagtttgctattttaatctccttggccatttgggttttagtaaccttagagttactacccatacttccccttataaatcctgttataactgacaatggcaccacctgtaatgattttgcaagttctggagaccccaactacaacctcatttacagcatgtgtctaacactgttggggttccttattcctctttttgtgatgtgtttcttttattacaagattgctctcttcctaaagcagaggaataggcaggttgctactgctctgccccttgaaaagcctctcaacttggtcatcatggcagtggtaatcttctctgtgctttttacaccctatcacgtcatgcggaatgtgaggatcgcttcacgcctggggagttggaagcagtatcagtgcactcaggtcgtcatcaactccttttacattgtgacacggcctttggcctttctgaacagtgtcatcaaccctgtcttctattttcttttgggagatcacttcagggacatgctgatgaatcaactgagacacaacttcaaatcccttacatcctttagcagatgggctcatgaactcctactttcattcagagaaaagtgaggggcttgtgaaacagattgttctacagatgaatctgtaagccagttacagtttgctttaactcatagacatcaatcagagagtgtcacagatttaaccttgatctaaagacaagttgtacccagagtatgtgaaaagaatgggatgacaagaatgtactggtttcttcctctaagaattgaaaggagttgaactgccttatgtttgggcatgtaactccaaaatactaggtagtataaggctttctcaatcagtgcaaaaatggaagatatataaagcaacaagttgtctgcatttgatcactggtcagattgtaaaaaaaaaaaaaagggcgggccgttttaaaggatcccttgagggccccaagttaaccggggcatgcgacgtataacttttttccctaaaaggagtggtattaaaccctacctgggaacttttgggagggacccttatttctgggggggcaaaaaatgggacaaattccctagaaaaattaaaggcttcagggaaaaaataaaaattttaaggggtaaaaggggcaaaacaaactgcaaaggcttcgctcctcgaaagtttcgacaccatcaaaggagatcgacactgatccccctggcatccggagactaatgcgctatctacaccgcgacgccagtcgtagcgttagagtgacgtagccttagcgggaaaac

SEQ ID NO: 58620 - DNA, 1671 bp, Homo sapiens; identical to SEQ ID NO: 58471
  misc_feature (1)...(1671): n = a,t,c or g

SEQ ID NO: 58621 - DNA, 2418 bp, Homo sapiens
aacttaaggtatattaagcagtccccacagacatgctgcctgcactccacctgctgagctggctctgaggctcaggagacgtggccctctgtggtcccattgtctccacgtctgtggtaacccggtgcctttctagagcaggcaggctcccggcatgggtggaaacagagcagggggccagcttcccccaatcaccggtgctgctgtggaggaagagcttggtggcgctaggacgtccttgtgaatgtgacttggaagagcagtttgggatttttttcattgcctggggatgagagggagagacaacgtgtgtcttacacatctcccaacagccgacttagatgtgatccgttctcccagagggagcaggtttctttgaacttttcctttttatgtacagcatagtgctgagcagatcactgcactgtgcaggagttttaacgacagtcaggccaacggcatggaaggaccgcgggagaatcaggatcctcctccgaggcctctggcccgccacctgtctgatgcagaccgcctccgcaaagtcatccaggagcttgtggacacagagaagtcctacgtgaaggatttgagctgcctctttgaattatacttggagccacttcagaatgagacctttcttacccaagatgagatggagtcactttttggaagtttgccagagatgcttgagtttcagaaggtgtttctggagaccctggaggatgggatttcagcatcatctgactttaacaccctagaaaccccctcacagtttagaaaattactgttttcccttggaggctctttcctttattacgcggaccactttaaactgtacagtggattctgtgctaaccatatcaaagtacagaaggttctggagcgagctaaaactgacaaagccttcaaggcttttctggacgcccggaaccccaccaagcagcattcctccacgctggagtcctacctcatcaagccggttcagagagtgctcaagtacccgctgctgctcaaggagctggtgtccctgacggaccaggagagcgaggagcactaccacctgacggaagcactaaaggcaatggagaaagtagcgagccacatcaatgagatgcagaagatctatgaggattatgggaccgtgtttgaccagctagtagctgagcagagcggaacagagaaggaggtaacagaactttcgatgggagagcttctgatgcactctacggtttcctggttgaatccatttctgtctctaggaaaagctagaaaggaccttgagctcacagtatttgtttttaagagagccgtcatactggtttataaagaaaactgcaaactgaaaaagaaattgccctcgaattcccggcctgcacacaactctactgacttggacccatttaaattccgctggttgatccccatctccgcgcttcaagtcagactggggaatccagcagggacagaaaataattccatatgggaactgatccatacgaagtcagaaatagaaggacggccagaaaccatctttcagttgtgttgcagtgacagtgaaagcaaaaccaacattgttaaggtgattcgttctattctgagggagaacttcaggcgtcacataaagtgtgaattaccactggagaaaacgtgtaaggatcgcctggtacctcttaagaaccgagttcctgtttcggccaaattagcttcatccaggtctttaaaagtcctgaagaattcctccagcaacgagtggaccggtgagactggcaagggaaccttgctggactctgacgagggcagcttgagcagcggcacccagagcagcggctgccccacggctgagggcaggcaggactccaagagcacttctcccgggaaatacccacaccccggcttggcagattttgctgacaatctcatcaaagagagtgacatcctgagcgatgaagatgatgaccaccgtcagactgtgaagcagggcagccctactaaagacatcgaaattcagttccagagactgaggatttccgaggacccagacgttcaccccgaggctgagcagcagcctggcccggagtcgggtgagggtcagaaaggaggagagcagcccaaactggtccgggggcacttctgccccattaaacgaaaagccaacagcaccaagagggacagaggaactttgctcaaggcgcagatccgtcaccagtcccttgacagtcagtctgaaaatgccaccatcgacctaaattctgttctagagcgagaattcagtgtccagagtttaacatctgttgtcagtgaggagtgtttttatgaaacagagagccacggaaaatcatagtatgattcaatcccagatatgggttaaaattcctcattttacttttaaacttgtggtaaaagtggaaattgcaaaaa

SEQ ID NO: 58622 - DNA, 557 bp, Homo sapiens
gcggaattcccaacttcgcagacagggtaccagcctcctggtgtgtatcataggatttgttcacatagtgttatgcatgatcttcgtaaggttaagaagccgtggtggtgcaccatgacatccaacccgtatatataaagataaatatatatatatatgtatgtaaattatagcactgagggccctgctgccctgctggaccaagcaaaactaagccttttggtttgggtattatgtttcgttttgttatttgtttgtttttgtggcttgtcttatgtcgtgatagcacaagtgccagtcggattgctctgtattacagaatagtgtttttaattcatcaatgttctagttaatgtctacctcagcacctcctcttagcctaattttaggagggtgcccaattttgtttcttcaattttactgggtacttttttgtacaaatcaatctctttctctctctcctccccacctctcacccttgccctctccatctccctctcccgccctcccctcctccctctggctccccttctcatttctgtccactccattctctt

SEQ ID NO: 58623 - DNA, 1218 bp, Homo sapiens; identical to SEQ ID NO: 58453

SEQ ID NO: 58624 - DNA, 569 bp, Homo sapiens
cctctggccgccacctccttccagctcacttcctttagtgcggccagtaccgcccctgcctaggcatgtcgacctgcagggacccttttctggctcttcgaggcctctgcccaccatcccctctttgttctccatagtcccttccccctgttctctctcgtttcatcttactggtctggcaaagtccccggccttgggcgagcccagacctcctcagtgcctgcacacagctgcccacagccagagaaatccatttaagcagactgcctgcatccttcttaacagtgcaaggcaggcactccctgccacaagagaccctgttccctagtagggcagcttttctcctccccagaacctcctgtctatccccacccaatgtctcctcacaggcatattggggaaacaggtcaggctctcccaccgtatctgcaagtgtactggcatccatctgtcttcttcctacccctacagtagaaacagtgtctgtccccagctgtgctctgatcccggctcctttcacctcaaagcttggaaaattgagctcgccccactctctcctgcgcccattt

SEQ ID NO: 58625 - DNA, 1843 bp, Homo sapiens; identical to SEQ ID NO: 58479

SEQ ID NO: 58626 - DNA, 3312 bp, Homo sapiens; identical to SEQ ID NO: 58495
  misc_feature (1)...(3312): n = a,t,c or g

SEQ ID NO: 58627 - DNA, 1745 bp, Homo sapiens
  misc_feature (1)...(1745): n = a,t,c or g
tgtggtggaattcgaacattcaagctactcagggaggccagactgcgctgatgctgggagtcagccacgacagggaggacatggttcaagcgctgcttagctgccaggcagatgtcaatctgcaggaccacgatggatcctcggccctcatgctggcctgtcaccatggcaacgtggacctggtgcggctgctcctggcacacccagcctgcgacagcagcctgactgacaaggctggccgcacagctttgtccatcgctctgaagtcacccacccatatggaaattgctgggcttctgagagcccacgcggagcagggcaggtccctggggctgtaggggctgcagaagaactggccgtggggaacaaaagccttcttctctggactcctccctcgcccttgaagagggcagaggtcacaggccagagagccacccttctagagaagaaactatgtcaaatatgcacatacattcctgttgtataattctgctcattaggatgctttgtagtttttgccttaggccaagcctgaaaactacacgggcttcagagcagggttcaaggtgcaaggtgaggggtacgtcggtgtcatccaaacatccaaaacatcttcagccttgaattcctcatgactctaccctctgtaacattgtgtagcaagcaggcaggcaggagcacattagcacattagaaaagcaatactttttacatggaattttacagtgcactatctttctgttttttaagcaagtgtatacaaatatgtcccattgatatgcatgtctatagatgggaggggatttaagccaaccccctggcaagcattctgtaggggaccctagaagaatcaccgtgcagactggtgaaactgaacaagcaccatttgggagctttgtttcgatggggttgacagagaaatcttaaaatctgacagggtagaagaagcactttggcatcaatgccatatgtacagtcttgactatttctgagtcatctagtggctccaatttgctccagggaaattggaattaattaagaaatttattatctagtaagttgctatgtaataaagaaaaaaaagaaattcaatccaatgacacacaccacatgtatttgggcagagtcagattctctcagctattttgagtctgtggaagaaacaaaaaaaagcttcctcctgaggatgggttattgtcatcaagaagccacctgcatagccgtatccattacctcatggtaattcccggtgctttcccctcatatcccctagaagcaaatatctgttctgaggttttttgggacttctggctgcaataggagcaagggacccaggcagggcagagcaataccttccgaagcttccatattccctggggccagcacatgcaaggtttatatggtcagtagctcacgtgaagtcatctgaatctttcttaaatctgctctcttaaaatctcttatgcaaaaaaaaaaaaaaaaaagggcccgttcaatttaaagggcccctttaaaccccgttaacaaccctcaaggggcctttttattggccacccttttgtggttggcccttccccggggctttctttgaccttgaagggggcccccccaacggccttttcttaaaaaaaggagaaaatggcttccatttgtttgagaaggggcaattttcttttttggggnnnnnannanaccnncnaaaaaaaaacacncaaccccncnncacacccnacnnccacaccccc

SEQ ID NO: 58628 - DNA, 2433 bp, Homo sapiens
  misc_feature (1)...(2433): n = a,t,c or g
ccttgaaattggaattaacccctgcccaatctatgtcagggacaatctgtaagtatcaaacaaacaaacaaataataaaaaggaatgcaagtgaacctgtaagactccactgtgctaatgcctatattgtttctctgatttcagtgcttccctcattcaccaagacccccatggatctcaccatccgagctggggccatggcacgcttggagtgtgctgctgtggggcacccagccccccagatagcctggcagaaggatgggggcacagacttcccagctgcacgggagagacgcatgcatgtgatgcccgaggatgacgtgttctttatcgtggatgtgaagatagaggacattggggtatacagctgcacagctcagaacagtgcaggaagtatttcagcaaatgcaactctgactgtcctagaaacaccatcatttttgcggccactgttggaccgaactgtaaccaagggagaaacagccgtcctacagtgcattgctggaggaagccctccccctaaactgaactggaccaaagatgatagcccattggtggtaaccgagaggcacttttttgcagcaggcaatcagcttctgattattgtggactcagatgtcagtgatgctgggaaatacacatgtgagatgtctaacacccttggcactgagagaggaaacgtgcgcctcagtgtgatccccactccaacctgcgactcccctcagatgacagccccatcgttagacgatgacggatgggccactgtgggtgtcgtgatcatagccgtggtttgctgtgtggtgggcacgtcactcatgtgggtggtcatcatataccacacaaggcggaggaatgaagattgcagcattaccaacacagatgagaccaacttgccagcagatattcctagttatttgtcatctcagggaacgttagctgacaggcaggatgggtacgtgtcttcagaaagtggaagccaccaccagtttgtcacatcttcaggtgctggatttttcttaccacaacatgacagtagtgggacctgccatattgacaatagcagtgaagctgatgtggaagctgccacagatctgttcctttgtccgtttttgggatccacaggccctatgtatttgaagggaaatgtgtatggctcagatccttttgaaacatatcatacaggttgcagtcctgacccaagaacagttttaatggaccactatgagcccagttacataaagaaaaaggagtgctacccatgttctcatccttcagaagaatcctgcgaacggagcttcagtaatatatcgtggccttcacatgtgaggaagctacttaacactagttactctcacaatgaaggacctggaatgaaaaatctgtgtctaaacaagtcctctttagattttagtgcaaatccagagccagcgtcggttgcctcgagtaattctttcatgggtacctttggaaaagctctcaggagacctcacctagatgcctattcaagctttggacagccatcagattgtcagccaagagccttttatttgaaagctcattcttccccagacttggactctgggtcagaggaagatgggaaagaaaggacagattttcaggaagaaaatcacatttgtacctttaaacagactttagaaaactacaggactccaaattttcagtcttatgacttggacacatagactgaatgagaccaaaggaaaagcttaacatactacctcaagtgaacttttatttaaaagagagagaatcttatgttttttaaatggagttatgaattttaaaaggataaaaatgctttatttatacagatgaaccaaaattacaaaaagttatgaaaatttttatactgggaatgatgctcatataagaatacctttttaaactattttttaactttgttttatgcaaaaaagtatcttacgtaaattaatgatataaatcatgattattttatgtatttttataatgccagatttctttttatggaaaatgagttactaaagcattttaaataatacctgccttgtaccattttttaaatagaagttacttcattatattttgcacattatatttaataaaatgtgtcaatttgaaaaaaaaaaaaaaaaaaaaaaaaaaaaaaaaaaaaaaaaaaaaaaaaaaaaaannnaaaaaannannnnnnnnnnnnnnnnnnnnnnnnnnnnnnnnnnnnnnnnnnnnnnnnnnnnnnnnnnannnnnnaaaaaaaaaaaaaannnaaaaaaaaaaaannnaaaaaaaaaanaaanggggnnnnatttttanaaaanaaaaaaaaaaannnnaaaacccccccccccccccctttttttttttttaaaaaaaaaaaaacccccccccccccccccctttttttttttaaaaaaaaaaaaaaaaaaaacacca

SEQ ID NO: 58629 - DNA, 1509 bp, Homo sapiens
gaaaagcgctggaccacatggtctcaaggatgtcattgtccgagatacatgagtttatgacccttactaaaatatattttatgttcttcagcaagagtactaaatttcaggaaacaaacacaattatttagattttattttctaattttggggactgtaactaataatgttatcagtagaaatttgaagaaaataacacatctctattttttaggtgtccctggcaaccttgtgtgtctatttcttactggatgaaggaaacattttaacagccactaaagtgttcacatcgatgtctttgtttaatattttaaggattcctctgtttgagttaccaaccgtgatctcagctgtggtccagacaaagatatccctgggccgtttggaagactttctcaacactgaggagcttcttcctcaaagtattgaaacgaactatacaggagatcatgctattgggtttacagatgcttctttctcctgggataaaacaggaatgccagttctaaaagaggctctgtggcttatgtttctcagcaggcctggattcagaattgcattttgcaagaaaacattctctttggctccatcatgaagaaagagttttatgagcaagtattggaagcctgtgctctccttccagatttggagcagttgccaaagggagatcaaactgagattggagaaagagtaaggaaactgtaatttatcatgtaaagaaatataatcccattcagctgtgctaataaaatgtttatggcctttttcttgaagtctcgaagagctatacaactataattttaaaaaattattatgtaattcctatgtaagagatggcagtattaaggacaagtaattatttataattgactgtttggaaaacagattaaaaatcagtcggaaattctgttgttagtatccacgtgggggaataaaagcccattaattagatcatcatacttttgttttggtggctggcacaatgcagttcactttctaaagagtgactaatagttttgtttattcctgtatctctggttcgcaaagtcagggctaaaacaggagcgaaagagcatcagtctccagcagtggcacccgagtccagattctaaagaagctctgataacaacactgttatgaacgtgccttctccacgtttgctcattcctgcttaagtggaacttgtttcccagtcgtctctctttgttctatttcattttcattgtgttagtaaatagtcattactctgctcagtgttttggatttaaaaaatatatatatcacgagccgaagtatgaaccacgagagattatctccaccccctgactaaaatctccattaattaaacatgaatgcaaaagtagcctctgcctacaattcatgtgtgccataaagatgaataaataatccttactgagtgctttgaatctctgaaaagagagcgagcatacaattgttagacatctttacacctgccctcatgttatctaataagcgtcgacgcggccg

SEQ ID NO: 58630 - DNA, 1735 bp, Homo sapiens
cctcgccaacaagcgcatcgggcagatcaagagcaagaagttccggtgctcagccaaagagcagtacttcattccaggcacggaggattaccagctgaacagcgagtgcaacagcgacgtggtctgtccccacaagtgccgctgtgaggccaacgtggtggagtgctccagcctgaagctcaccaagatccctgagcgcatcccccagtccacggcagaactgcgattgaataacaatgagatttccatcctggaggccactgggatgtttaaaaaacttacacatccgaagaaaatcaatctgagcaacaacaaggtgtcagaaattgaagatggggccttcgagggcgcagcctctgtgagcgagctgcacctaactgccaaccagctggagtccatccggagcggcatgttccggggtctggatggcttgaggaccctaatgctgcggaacaaccgcatcagctgcatccacaacgacagcttcacgggcctgcgcaacgtccggctcctctcgctctacgacaaccagatcaccaccgtatccccaggagccttcgacaccctccagtccctctccacactgaatctcctggccaaccctttcaactgcaactgccagctggcctggctaggaggctggctacggaagcgcaagatcgtgacggggaacccgcgatgccagaaccctgactttttgcggcagattcccctgcaggacgtggccttccctgacttcaggtgtgaggaaggccaggaggaggggggctgcctgccccgcccacagtgcccacaggagtgcgcctgcctggacaccgtggtccgatgcagcaacaagcacctgcgggccctgcccaagggcattcccaagaatgtcacagaactctatttggacgggaaccagttcacgctggttccgggacagctgtctaccttcaagtacctgcagctcgtggacctgagcaacaacaagatcagttccttaagcaattcctccttcaccaacatgagccagctgaccactctgatcctcagctacaatgccctgcagtgcatcccgcctttggccttccagggactccgctccctgcgcctgctgtctctccacggcaatgacatctccaccctccaagagggcatctttgcagacgtgacctccctgtctcacctggccattggtgccaaccccctatactgtgactgccacctccgctggctgtccagctgggtgaagactggctacaaggaaccgggcattgctcgttgtgctgggccccaggacatggagggcaagctgctcctcaccacgcctgccaagaagtttgaatgccaaggtcctccaacgctggctgtccaggccaagtgtgatctctgcttgtccagtccgtgccagaaccagggcacctgccacaacgacccccttgaggtgtacaggtgcgcctgccccagcggctataagggtcgagactgtgaggtgtccctggacagctgttccagtggcccctgtgaaaatgggggcacctgccatgcacaggagggcgaggatgccccgttcacgtgctcctgtcccaccggctttgaaggaccaacctgtggggtgaacacagatgactgtgtggatcatgcctgtgccaatgggggcgtctgtgtggatggtgtgggcaactacacctgccagtgccccctgcagtatgagggaaaggcctgtgagcagctggtggacttgtgctctccg

SEQ ID NO: 58631 - DNA, 1505 bp, Homo sapiens
  misc_feature (1)...(1505): n = a,t,c or g
ctcaagcactggagcgctgtccgtggtgcggccgttggaccgcgaacaacgagctgagcacgtactgacagtggtggcctcagaccacggctccccgccgcgctcggccacgcaggtcctgaccgtcagtgtcgctgacgtcaacgacgaggcgcctactttccagcagcaggagtacagcgtcctcttgcgtgagaacaaccctcctggcacatctctgctcaccctgcgagcaaccgaccccgacgtgggggccaacgggcaagtgacttatggaggcgtctctagcgaaagcttttctctggatcctgacactggtgttctcacgactcttcgggccctggatcgagaggaacaggaggagatcaacctgacagtgtatgcccaggacaggggctcacctcctcagttaacgcatgtcactgttcgagtggctgtggaggatgagaatgaccatgcaccaacctttgggagtgcccatctctctctggaggtgcctgagggccaggacccccagacccttaccatgcttcgggcctctgatccagatgtgggagccaatgggcagttgcagtaccgcatcctagatggggacccatcaggagcctttgtcctagaccttgcttctggagagtttggcaccatgcggccactagacagagaagtggagccagctttccagctgaggatagaggcccgggatggaggccagccagctctcagtgccacgctgcttttgacagtgacagtgctggatgccaatgaccatgctccagcctttcctgtgcctgcctactcggtggaggtgccggaggatgtgcctgcagggaccctgctgctgcagctacaggctcatgaccctgatgctggagctaatggccatgtgacctactacctgggcgccggtacagcaggagccttcctgctggagcccagctctggagaactgcgcacagctgcagccttggacagagaacagtgtcccagctacaccttttctgtgagtgcagtggatggtgcagctgctgggcccctaagcaccacagtgtctgtcaccatcacggtgcgcgatgtcaatgaccatgcacccaccttccccacccctctacgtttccccaataaagccttttaaaaacctgaaaaaaaaaaaaaaaaaaaaaaaaaaaaaaaaaaaaaaaaannnnnnnannnaaaaannnaannnnnnaaaaaaaaaaaaaatatttttcttaggaanaaaaaaaaanatttgtcccntttttataaaaaaanttaagttgagaaacttttnnnnnaatttataaaaattacaagaatttnaaattttttagttttatgaatttgggaannattagactggaatggagaataaaagggaaaaagggttaaaattactaacctcaagtggaacttttttattttaaaaagaagagaagaaaatcttaagggttttttttaaaggggaggttatggaatttttacaagaggataataaaatgcttttc

SEQ ID NO: 58632 - DNA, 469 bp, Homo sapiens
gtccagtgtggtggaattccagccacttggagagaggcctggtcacctccaaaaccatgctgcccaaggaaaaggtgacctgggacaaagtgacagtgaataggtccatctgaaaccgctctaagcagctgtctgaagcctgctctgtgtcgggctttggctggtggaaaatctcaatggcaagtgagccctcagtggggaggtccacagggctggacagctgcagccggagctcagcccatgccagatcctcttgttggctcaggaaggagaagtcaaaagcaaacgtccagttctgcccatccactgccacatctgggtaggagaaaaccaagaaggaaggagggtgagtgagggcctcccccagcctcagtcagtgtcacaaccaccatagctcttgctggaggccttaccttatatagaattaccttcgaattctcaccccaactctatgagttggtaagatttt

SEQ ID NO: 58633 - DNA, 1612 bp, Homo sapiens
cccggctactgcgggtcctgggtcttcacctgcggagccttacggcagctgagcggtgggagggacctgagccgcggcgctaggatgggaaacagtgcgctccgcgctcatgtggaaacggcgcagaaaactggtgtctttcagcttaaggaccgagggctgaccgagttccccgcagacttgcagaagctgacgagcaatctcaggaccatcgacttgtccaacaacaagatcgaaagcctaccgcctttgctgataggaaagttcactctgctgaagagcctctccctgaacaacaacaaactgactgttctgcctgatgagatatgcaatctgaaaaaactagagacgctaagcctaaacaacaatcaccttagagagctgccgtctacctttgggcaactctctgccctcaagaccctgagcctctctgggaaccaactgggagcattacctccccaactttgtagcctacggcacctggatgtgatggatctctctaagaaccagattcgaagtatacctgactcagtgggagagctgcaagtcatcgaactcaacctcaaccagaatcagatatctcagatctcagtgaagatatcttgctgtccacgccttaaaattcttcgcctggaagagaattgtcttgagctcagcatgcttccccagagcatcctcagtgattcccagatctgtctgcttgctgtggaaggcaatctttttgaaataaagaaacttcgagaactggaaggctatgataagtacatggagaggttcacagccaccaagaagaagtttgcgtgaagttctccaggactatggaaaccttacaggatactgacttagaacctctgttggaatgtggctgagtcaaagcctcctgttgttgttaggggtatctacagtaaggagatgatacttcaggagattatatttcactcaatgatcttttctcatttcagggctcttctcaaataagctaaaagaaaaaggatcaggagacaggaaaagtcttccgttttgagtcatgagtagggcaatagacaaggttctcttcaaaaccatcattagtttggctttaagaaaccagtagctagctgctatttatatggtgagggggtgctgcctggtaacagaatagctccacaccacagcttgagattttgtttagtttcactgtgtgagctttcataaagtctgttgccattccatctctgtgttaacacttcatatttttatgaaattcagataatttgtgagaggctggcatggatctaaggatttattatttttattctagtccatcagttcagtcgcagtttttatactaggactttaggatgtacataaatgtgtgactgtttgtcttgattaaaagtgcactttggcctgggcatggtggctcatgcctataatcccagcactttgggaggccaaggcgggtggctcacttgaggctaggagttcaagactagcgtggccaacatgaggaaaccctgtctctactaaaaatacaaaaattagctgggtgtgttggtgcatgcttataatcccagctacttgggaggctgaggcaggagaatcgcttgaacccatgaggtggaggttgcat

SEQ ID NO: 58634 - DNA, 159 bp, Homo sapiens
tgtttacatcacacaaatatccaggaatcacaaaactgagtggatgagatacttgaacattcaaggaaactactgagcaacagcacagggtacacataatcactgcaccatagagacgcttttagcaagtggtttctgtccaacctgcttcctggcagg

SEQ ID NO: 58635 - DNA, 2065 bp, Homo sapiens
  misc_feature (1)...(2065): n = a,t,c or g
cgtagcgcccgagtgtcggggggcttacccttttcgggccatgatgccgggaaccgcgctgaaggcggtgctgctggccgtgctgctggtggggctgcagaccgcgacgggtcgtctgctgagtgggcagccagtctgccggggagggacacagaggccttgttataaagtcatttacttccatgatacttctcgaagactgaactttgaggaagccaaagaagcctgcaggagggatggaggccagctagtcagcatcgagtctgaagatgaacagaaactgatagaaaagttcattgaaaacctcttgccatctgatggtgacttctggattgggctcaggaggcgtgaggagaaacaaagcaatagcacagcctgccaggacctttatgcttggactgatggcagcatatcacaatttaggaactggtatgtggatgagccgtcctgcggcagcgaggtctgcgtggtcatgtaccatcagccatcggcacccgctggcatcggaggcccctacatgttccagtggaatgatgaccggtgcaacatgaagaacaatttcatttgcaaatattctgatgagaaaccagcagttccttctagagaagctgaaggtgaggaaacagagctgacaacacctgtacttccagaagaaacacaggaagaagatgccaaaaaaacatttaaagaaagtagagaagctgccttgaatctggcctacatcctaatccccagcattccccttctcctcctccttgtggtcaccacagttgtatgttgggtttggatctgtagaaaaagaaaacgggagcagccagaccctagcacaaagaagcaacacaccatctggccctctcctcaccagggaaacagcccggacctagaggtctacaatgtcataagaaaacaaagcgaagctgacttagctgagacccggccagacctgaagaatatttcattccgagtgtgttcgggagaagccactcccgatgacatgtcttgtgactatgacaacatggctgtgaacccatcagaaagtgggtttgtgactctggtgagcgtggagagtggatttgtgaccaatgacatttatgagttctccccagaccaaatggggaggagtaaggagtctggatgggtggaaaatgaaatatatggttattaggacatataaaaaactgaaactgacaacaatggaaaagaaatgataagcaaaatcctcttattttctataaggaaaatacacagaaggtctatgaacaagcttagatcaggtcctgtggatgagcatgtggtccccacgacctcctgttggacccccacgttttggctgtatcctttatcccagccagtcatccagctcgaccttatgagaaggtaccttgcccaggtctggcacatagtagagtctcaataaatgtcacttggttggttgtatctaacttttaagggacagagctttacctggcagtgataaagatgggctgtggagcttggaaaaccacctctgttttccttgctctatacagcagcacatattatcatacagacagaaaatccagaatcttttcaaagcccacatatggtagcacaggctggcctgtgcatcggcaattctcatatctgtttttttcaaagaataaaatcaaataaagagcaggaaaaaaaaaaaaaaaaaaaaaaaaaaaaaaaaaagggcgccccttcaatttaaagggccccttaaaaccccgttaaaaaccccgagggggccttttaagtccccccccttttttgtttgccccccccccgggcttttttttgccctggggggggcccccccccttggttttttttaaaaaaaaggaaaaaatggcccccttttggggagagggggtttttttttttggggcccannactatccactaatcctggtcgcctcaaagggttctcgacaagggcctccctgagtaaaggatttgcgccaacaaaggtcatagtacaacacagccggcggacacgggttgaaactattttctcgtgcaagcctggcaggcagggcactcgcagcggatatgctctccg

SEQ ID NO: 58636 - DNA, 827 bp, Homo sapiens
ggattgacccacgcgtccgtatctattcagcatgtcactaaattcctggtttggaagtaaaagacaatgctggcaactgggctctaatctcctaaagataaacagctcaaatgaattgggatttatagaaaaacaagtgtcttcccaacctgataattcattttggataggcctttctcggccccagactgaggtaccatggctctgggaggatggatcaacattctcttctaacttatttcagatcagaaccacagctacccaagaaaacccatctccaaattgtgtatggattcacgtgtcagtcatttatgaccaactgtgtagtgtgccctcatatagtatttgtgagaagaagttttcaatgtaaggggaagggtggagaaggagagagaaatatgtgaggtagtaaggaggacagaaaacagaacagaaaagagtaacagctgaggtcaagataaatgcagaaaatgtttagagagcttggccaactgtaatcttaaccaagaaattgaagggagaggctgtgatttctgtatttgtcgacctacaggtaggctagtattatttttctagttagtagatccctagacatggaatcagggcagccaagcttgagtttttattttttatttatttatttttttgagatagggtctcactttgttacccaggctggagtgcagtggcacaatctcgactcactgcagctatctctcgcctcagcccctcaagtagctgggactacaggtgcatgccaccatgccaggctaatttttggtgttttttgtagagactgggttttgccatgttgaccaagctggtct

SEQ ID NO: 58637 - DNA, 937 bp, Homo sapiens
cgctgcggagcgcggcgggtccatgtgcgcagtgagtggcgctattcctggcccagtagcacccgagccccgggtttgaccgagtccgcgctgcgatggaccccaacaccattatcgaggccctgcggggcaccatggacccagccctgcgtgaggccgcggagcgccagctcaatgaagcacacaagtctctgaattttgtctcaacactgctccagattactatgtcggaacagctggatttacctgtgagacaggcaggtgttatctatctgaaaaatatgataacacagtattggcctgatcgagaaacagcaccaggggatatatccccttatactattccagaagaagatcgccattgtattcgagaaaatattgtagaagccattatccattctcctgagctcatcagggtacagcttactacatgcattcatcacatcatcaaacatgattatccaagccgctggactgccattgtggacaaaattggcttttatcttcagtccgataacagtgcttgttggctaggaattcttctttgcctttatcagcttgtgaaaaattatgagtataaaaaaccagaggagcggagtccattggtagcagcaatgcagcattttctgccagttctaaaggatcgttttatccagcttctttctgaccagtctgatcagtctgtcctcatccagaaacagatattcaagatcttctatgctcttgttcaggtaatatctgtgaagcagtttttatgcataaaaagttagtctgtcatttaccgtgttaaaaattaacaaagaatttcagcatttgaataatagttaacttgaaaatctacattaagtggatgattttctagcaaaatagaaattgcaaaaattataagtctaaacaagcatacttcctccccaaatacataaacaacccttgtatt

SEQ ID NO: 58638 - DNA, 791 bp, Homo sapiens
ggaaaatcggtggaattcatctgccttgatcctagatgaagtggccattctgcctgcccctcagaacctctctgtactctcaaccaacatgaagcatctcttgatgtggagcccagtgatcgcgcctggagaaacagtgtactattctgtcgaataccagggggagtacgagagcctgtacacgagccacatctggatccccagcagctggtgctcactcactgaaggtcctgagtgtgatgtcactgatgacatcacggccactgtgccatacaaccttcgtgtcagggccacattgggctcacagacctcagcctggagcatcctgaagcatccctttaatagaaactcaaccatccttacccgacctgggatggagatcaccaaagatggcttccacctggttattgagctggaggacctggggccccagtttgagttccttgtggcctactggaggagggagcctggtgccgaggaacatgtcaaaatggtgaggagtgggggtattccagtgcacctagaaaccatggagccaggggctgcatactgtgtgaaggcccagacattcgtgaaggccattgggaggtacagcgccttcagccagacagaatgtgtggaggtgcaaggagaggccattcccctggtactggccctgtttgcctttgttggcttcatgctgatccttgtggtcgtgccactgttcgtctggaaaatgggccggctgctccagtactcctgttgccccgtggtgggtcctcccagacaccttggaaaataacccaattcac

SEQ ID NO: 58639 - DNA, 1778 bp, Homo sapiens
  misc_feature (1)...(1778): n = a,t,c or g
cgtcgacccacgcgtccgatcttaacagacgagttgtttaaaagaactatccaactgcctcacttgaaaactctcattttgaatggcaataaactggagacactttctttagtaagttgctttgctaacaacacacccttggaacacttggatctgagtcaaaatctattacaacataaaaatgatgaaaattgctcatggccagaaactgtggtcaatatgaatctgtcatacaataaattgtctgattctgtcttcaggtgcttgcccaaaagtattcaaatacttgacctaaataataaccaaatccaaactgtacctaaagagactattcatctgatggccttacgagaactaaatattgcatttaattttctaactgatctccctggatgcagtcatttcagtagactttcagttctgaacattgaaatgaacttcattctcagcccatctctggattttgttcagagctgccaggaagttaaaactctaaatgcgggaagaaatccattccggtgtacctgtgaattaaaaaatttcattcagcttgaaacatattcagaggtcatgatggttggatggtcagattcatacacctgtgaataccctttaaacctaaggggaactaggttaaaagacgttcatctccacgaattatcttgcaacacagctctgttgattgtcaccattgtggttattatgctagttctggggttggctgtggccttctgctgtctccactttgatctgccctggtatctcaggatgctaggtcaatgcacacaaacatggcacagggttaggaaaacaacccaagaacaactcaagagaaatgtccgattccacgcatttatttcatacagtgaacatgattctctgtgggtgaagaatgaattgatccccaatctagagaaggaagatggttctatcttgatttgcctttatgaaagctactttgaccctggcaaaagcattagtgaaaatattgtaagcttcattgagaaaagctataagtccatctttgttttgtctcccaactttgtccagaatgagtggtgccattatgaattctactttgcccaccacaatctcttccatgaaaattctgatcatataattcttatcttactggaacccattccattctattgcattcccaccaggtatcataaactgaaagctctcctggaaaaaaaagcatacttggaatggcccaaggataggcgtaaatgtgggcttttctgggcaaaccttcgagctgctattaatgttaatgtattagccaccagagaaatgtatgaactgcagacattcacagagttaaatgaagagtctcgaggttctacaatctctctgatgagaacagattgtctataaaatcccacagtccttgggaagttggggaccacatacactgttgggatgtacattgatacaacctttatgatggcaatttgacaatatttattaaaataaaaaatggttattcccttcatatcagtttctagaaggatttctaagaatgtatcctatagaaacaccttcacaagtttataagggcttatggaaaaggtgttcatcccaggattgtttataatcatgaaaaatgtggccaggtgcagtggctcactcttgtaatcccagcactatgggaggccaaggtgggtgaacccacgggtcaagagatggagaccatcctggccaacatggtgaaaccctgtctctactaaaaatacaaaaattagcttggcgngatggtgcacgcctgtagtccc

SEQ ID NO: 58640 - DNA, 2019 bp, Homo sapiens
agactgcaagtgcggtggaattcgatcatggaacttgcactgctgtgtgggctggtggtgatggctggtgtgattccaatccagggcgggatcctgaacctgaacaagatggtcaagcaagtgactgggaaaatgcccatcctctcctactggccctacggctgtcactgcggactaggtggcagaggccaacccaaagatgccacggactggtgctgccagacccatgactgctgctatgaccacctgaagacccaggggtgcggcatctacaaggactattacagatacaacttttcccaggggaacatccactgctctgacaagggaagctggtgtgagcagcagctgtgtgcctgtgacaaggaggtggccttctgcctgaagcgcaacctggacacctaccagaagcgactgcgtttctactggcggccccactgccgggggcagacccctgggtgctagaagcccacaccctctaccctgttcctcagcatggagctctggcatccccacctcagtatctaacctgaaccagcctggcttttcaaacactccggggggaggtagtcccagcctcccccggaaccctctaccaatgccttctgaccttctgaagctttccgaatcctcccagttgaggcagtagctgtgtcctctgagggtggatgggaatcttgggagaagcccaagcaagggagccctcagaggtggtgtttggaccaaagcatcggggtgggggaggggtctgccgctgtcccccacctgctggcccccttgtccttcctcaccccctccaatatagtctcggagctacaaccgcagcagccactataaagggcaatattgatctttctgtccatgtggctctatcttttaaaacctcaaggccctccactgtcctaagataaagcctctcataggcactggggaccctgcacagtctggccatgtgaccctctccccaggcaagctctgaagtccctgcaggtggaggccatgcctgtcttaaactcagttgcatccctggtgcccaaagcaacaccagaaccaagaaggagctccataaatccttcttgggtgaagcctagacaaagccgccaggtcttgtggctccaggcaccagagccttgagtactttctcctgcctccaggcattggctcagggtgaattacaaggggctactgaatggctattactttcatcacgactgatccccacctcctcagggtcaaagggctactttctggaagtctccccaggctgactccttctccctgactgcaagggctcactccctcctccaagctcccacaatgcttcatggctctgccgcttacctagcttggcctagagtggcaaatggaacttctctgatctcccccaactagactggagcccccgaaggatggagaccatgtctgtgccatctctgtttcccctgttttcccacatactaggtgctcaattcatgcctgtgaatggcgtgagcccataatggatacacagaggttgcagcagatggtgtgggtacctcacccagatatcttccaggcccaaggcccctctccctgagtgaggccaggtgttggcagccaactgctccaatctgcctccttcccctaaatactgccctggtctagtgggagctgccttccccctgccccacctctcccaccaagaggccacctgtcactcatggccaggagagtgacaccatggagggtacaattgccagctcccccgtgtctgtgcagcattgtctgggttgaatgacactctcaaattgttcctgggatcgggctgaggccaggcctctcctggaaccacctctctgcttggtctgaccccttggcctatccagttttcctggttccctcacaggtttctccagaaagtactccctcagtaaagcatttgcacaacgaaaacataccctatccaatagacctgaaataggcgcccggcccaccatcaaaagaggccccttaaaaccccctaaacctacccccaggcgc

SEQ ID NO: 58641 - DNA, 2112 bp, Homo sapiens
tcgcggacgcgtccgcccacgcgtccgcgagtgtaaggtcggctgcttcttccccttggctgacgatgtgacgccgacgaaacacgctatcgtgcacaccctggtgcatctcaagttccccacaaaggtgggcaaggcctgctgtgtgcccaccaaactgagccccatctccgtcctctacaaggatgacatgggggtgcccaccctcaagtaccattacgagggcatgagcgtggcagagtgtgggtgcaggtagtatctgcctgcggggctggggaggcaggccaaaggggctccacatgagaggtcctgcatgcccctgggcacaacaaggactgattcaatctgcatgccagcctggaggaggaaagggagcctgctctccctccccacaccccacccaaagcatacaccgctgagctcaactgccagggaaggctaaggaaatggggatttgagcacaacaggaaagcctgggagggttgttgggatgcaaggaggtgatgaaaaggagacagggggaaaaataatccatagtcagcagaaaacaacagcagtgagccagaggagcacaggcgggcaggtcactgcagagactgatggaagttagagaggtggaggaggccagctcgctccaaaacccttggggagtagagggaaggagcaggccgcgtgtcacacccatcattgtatgttatttcccacaacccagttggaggggcatggcttccaatttagagacataaaacacaggcagatcaagtagcattgatcaatggcatgattccaactcagatttgtgggacaccaaagcccaggatcttcccaagtgccctgctgcagtttagcaggtcctctccagctaaagagcagtgagacattgggagcccaggagtgttgaggccaggccaggctgaggcccatcagtcacaggtgtgactgggctgcttgtcacacacagggcgtggtctggccactgttgccagtgctcactcagcggccaaatgctttttaatatgacccctgaggcactgaaaaataaccccaggccaactgcaggatagagagagaggtcaggacagcagccctgtgggctgcatgatacactgtggctggagttattgtgaccccctggtgcagtgctcccacggccagtggtgcacacagggccattcactgtccatagactgaaaccatgtgaccatttgagagggccgggcacactttcccctgagggatggggcagcctgtggccagcacctctgcagttactctgcatagccagctcaccagcatgccatgcccagggtgccccccagtgacaacctcatgggagacgggcctggatttgaatttgttggaattaaatgtgctctggctttggtctttgaaacatatctatttttattccttggtgacatgtccttaagtgacaagactccagccttcctgggcgaggcctctccagcctcggaagagctgcagtccttatcggcgatcactggctctgcctgcatttgccggctctcttgagtcacgtgcatcccagcaccccgcctgggctcggactgtgggaccagactcagcctccccgaacacaagggaagataaggcttccatttgctctgtgtttcaccctctcctctgtctctccaggccacacatggaacggggcggtatgaggaagagtctgaaagtggtgaagagtgcacctatggccctctgacctccagccagagcagggcctaggggaggcttagagaggccagggcctctccccgtggttgaagctcccatttatttaagaaaaagtggggggtggggaaaacgttatgttaaatgtttacatggaaccaatgaacaactttaacacacaaatacaacgaaacattcttgtttaattactggcgttatagaaaatatgaattcctgctacatgccgggcagtgtagtgttacaatgctattccaagttgggtgttgagcatcttctttcagtcctgggggggtgcttctgtgcctgcttgaaaatttcactcggaaataaaggcaaatgtctaatttggcaaaaaaaaaaaaaggggcgcgccccttttaaagggaacccctgggg

SEQ ID NO: 58642 - DNA, 358 bp, Homo sapiens; identical to SEQ ID NO: 58433

SEQ ID NO: 58643 - DNA, 950 bp, Homo sapiens
tcgccgagatcgctgtggcacaagtgatccttatgtgaaatttaagctgaatgggaagacgctgtacaaaagtaaagtcatatataagaacttgaacccagtatgggatgagatagttgtattgccaatccaaagccttgatcaaaagctacgtgtgaaggtatatgatcgagatttaaccacatctgatttcatgggttctgcatttgtcattctcagtgatcttgagcttaacagaacaactgaacatattttaaaactggaagatccaaacagtttagaagatgacatgggagtgatcgtcttaaatttgaacctagtggtaaaacagggtgatttcaagagacaccgttggtcaaatcggaagcgattaagtgccagcaagtcctctttgatacgcaacctacggctctctgagtccttgaaaaagaaccaactctggaacgggattataagtataactttgttggaagggaagaatgtctcaggaggaagcatgacagagatgtttgtccagttaaaactgggagatcagaggtataaaagtaagacactgtgtaagagtgcaaatccgcagtggcaggaacagtttgactttcactacttctctgacaggatgggcattttggacattgaagtgtggggaaaggacaacaaaaagcatgaggaacgtctgggcacgtgtaaagtggatatctcggcactccctctgaagcaagccaactgcctggagctgccactggacagctgtctgggggctctccttatgttggtcacacttacaccctgtgcgggggtctccgtctctgatctgtgtgtctgccccttagcagacctcagcgaaagaaagcagattacccagcgatattgcttacagaactccctgaaagatgtgaaagacgtcggcattctacaagtgaaggttttaaaggcagcagatctcttagcgg

SEQ ID NO: 58644 - DNA, 1833 bp, Homo sapiens
tttttttttttcagggtacaaaatgtctttatatcttcaatctcattatacagcaaaagagggaggaggaaaaaactaggagacatagatagatacactgatggatgtttcaaaaattattttttattgttacattccaaagaggacataggaagaaaaaaagccagttaacccaataaatggttaagacctttcagaagaggcacccacaaccccagccctagttcaaagctgcacacattggagctcaaacagctgcctctcaccacgaccggaaatgctgacaaatgtgtatatattatcaatccagggaggcttgggtttaaaataaaatttctttattgcaagtgtccaagtccttaggatttgtccttaaaggtactagaagatgagtaagaccacacacaccaagactatgtttagtctttagagtaaactagcaaatggccagtttgttctaggatgcattgcatcagacatcacagtacatgaagaaaatctgctttttgtgaaaagccaccaggcattttagatcccgtttaccatgaagtgcagacacagcagatacccagataatacagtcagtgcaaaagtcaaatgagtaagtcagctctttgatgaggctggctacactgcaaaatataaatgaaactcgaaaatagaaggtaaggtctatttacaaaagtttgtttagtaaagtgacttgaaaaaagttgttaaccacttcccaggcatccctcccctctcccaccaaaacaaacaaacaaaaaacaacaacaacaaaaaccctgaaaattatcttgaaagtcaagttaaaactatgtggtgaaaaagagagtgcttgttccaggtaaaggacttcaagataatttacaggcagatttatttttattagtaaaagtcacaaataggaaaagacttattggctgactttgagctgtgtgcttttaaaaatgtctctattattacgttaacaagaaaaaaaaatcaagcaagtttttgcttccagttttgaatcttccagcaacagttggtgaaatcaacaaggtattaaaatgaaacccagcaaaacccagtcagttctttccagttgtctgcctgtttctttctagtcaccttgaattcaattcccaattagctgaggacaacatgccggtcaaagacagactttcgctgctcttggacttgaagcttccagcgctgctgtgcatattctaccttgttcagcacgttggctcgactgcgggagcgggctagcacatcgtgtgcatttgcaaaaggctggtgatccccaatatcatcatcactctgtatcaactgtgcatgtccaaagaggcgcctcttcagtatgggctcaaccagagtaagatataccatgtacagaagtagaaggcccaaaatggagagataaattataatggtaaccttgattgtgacagagcttctttcttcatatttgcattcacagcgtagacagtatgcttctacatcaggcccccgcacaggcatgggctccacaacatgaaggcaatcacaatctttctgagatatgttcttattataaatatgcccagaattttctttatagggagggcagatacatttacatctgacatcctcgaaattcttggcggcgtctgacagctgcgccagcagcagcacggaaagcgccaggcacgacaggctgagcaaggagccaagccgaagaaggcctccccacagggtcgccatcgctgggggcccagcggtcccacagcccggagcccccgcgaccggctcccggctcgggctcaggctcaggctcaggctcaggcacaggcttgggacccggct

SEQ ID NO: 58645 - DNA, 1509 bp, Homo sapiens
cggccgcgaccactaccaccactgagcaccgcttcttccgccggagcgtcatctgcgactccaatgccactgcactggagcttcccggccttcctctttccctgccccagcccagcatccccgcggctgtcccgcagagtgctccaccggagccccaccgggaagagaccgtgaccgccaccgccacttcccaggtagcccagcagcctccagccgctgccgcccctggggaacaggccgtcgcgggccctgccccctcgactgtccccagcagtaccagcaaagaccgcccagtgtcccagcctagccttgtggggagcaaagaggagccgccgccggcgagaagtggcagcggcggcggcagcgccaaggagccacaggaggaacggagccagcagcaggatgatatcgaagagctggagaccaaggccgtgggaatgtctaacgatggccgctttctcaagtttgacatcgaaatcggcagaggctcctttaagacggtctacaaaggtctggacactgaaaccaccgtggaagtcgcctggtgtgaactgcaggatcgaaaattaacaaagtctgagaggcagagatttaaagaagaagctgaaatgttaaaaggtcttcagcatcccaatattgttagattttatgattcctgggaatccacagtaaaaggaaagaagtgcattgttttggtgactgaacttatgacgtctggaacacttaaaacgtatctgaaaaggtttaaagtgatgaagatcaaagttctaagaagctggtgccgtcagatccttaaaggtcttcagtttcttcatactcgaactccacctatcattcaccgcgatcttaaatgtgacaacatctttatcaccggccctactggctcagtcaagattggagacctcggtctggcaaccctgaagcgggcttcttttgccaagagtgtgataggtaccccagagttcatggcccctgagatgtatgaggagaaatatgatgaatccgttgacgtttatgcttttgggatgtgcatgcttgagatggctacatctgaatatccttactcggagtgccaaaatgctgcacagatctaccgtcgagtgaccagtggagtgaagccagccagttttgacaaagtagcaattcctgaagtaaaagaaattattgaaggatgtatccgacaaaacaaagatgaaagatattccatcaaagaccttttgaaccatgcctttttccaggaggaaacaggggtacgggtagaattagcagaagaagatgatggagaaaagatagctattaaattatggctgcgtattgaagatattaagaaattaaagggaaaatacaaagacaatgaagctattgagttttcctttgacttggagagggatgtaccagaagatgttgctcaagaaatggttgagtctggttatgtctgtgaaggtgatcacaagaccatggctaaagctatcaaagatagggtgtccttaattaagagaaaacgagagc

SEQ ID NO: 58646 - DNA, 1406 bp, Homo sapiens
tttcaggtgacataacatctgattccaagattgaaactatttctaggagctggcagggcgagaattcaaaggacacaaggttctagtcctggaagactacaactcttactgtttgagatgtttatttctagtttttagtgttaaaccccagctccatatttattccttaagtgtttcccctcaccctgggaagaagcttgttgctcgtttttgattgtcctctgccagcagatctgcacgagatgtgtttcttcagtctttcccacttgtgagacaaatctccattaaagtctcaacaaatgcaactgtcccttgtagagtaagcaagcctaagagtgctgcttctctgccctggccctggctggtcagagtactaggagttcttggatttccgctcttttctggccctggaggccatgaggctgaagaagagcccaggagccagagttcgaagataaacagccaaggaaggcagtaagtcagccaggatcacatctttcttcttcttccccacagcagcaagaacatcctgggccacctccacagggcttcggccctgggctgtggtggtgtccataactccatacctagatccatccgcggtgatggcatttacagagaggttggtgtggatgtagccggggctgatgacggtcacctcaatttcatactgttccatctcggcacgcagacagtcaaagaaagcctgggttgcgtgcttggaggctgcatatgctgatcgaaaaggaatgctcatcttgccctggatgctgctgatggcgacaatgtggccttgcctcctcttgatcatggagggcaggagtgctttcgttagagcaactgggccaaagtagtttgtctccatgaccctcttgtccacatccactgtggtgtccatgatggtaccacggtagctgatcccagcattgttgacaagtatgtcgacatagccaaagcactgcaggatctcagctgctgctgcaactatggccccagagtctgtgaggtcgaaggtcaccaagtaaggcttgtgtgtctgcaccttggtggcatgagaagcggtgagttctctgatgagctcttctagggccccaccattccggccacagagcaccagtttagcacccgcagcatagaagacttttgcacattctttgcccagccctgaggtggcgcctgtgatcaccaccacagcattccgcaggtaggccttcccgcgcacccactgcagcagccggaagaggccgaagacgcccaggcagccgaacagcaggggcaggatggctgtggaggtgatgaagtccatggccttcaccttcggcagactcttcctggtagccggagagaccatagtcaatcaacttcatcctcccgcctcgcggacgcgtgggcgacccacgcgtccg

SEQ ID NO: 58647 - DNA, 2575 bp, Homo sapiens
acatttcatataagtgaactcatacagtatgtgattctttgtgtctggcttctttcacttagcataagtttccaaggctcatccacattgtagcatgtgtcagaattttattccttttttattgctgagagtttgtatttttccaataaaattattttatcttttccttttttttccttcttcagaatcccaaaattcttctcctagatgaagcaaccaggtgaggatatcttaataatatatgccattgtgtgtattaaaccaaattcttccttcaccaaaacacttttaattctgtacctcaaagtgatacaactgaaaatcctttttcccccctttactctaaagtgaaggaagctgaattaataatgacagttgaaaaccagtgggcagactgagtcctagttgagagttctaggtccacttcagacatggttgccatcaatcctaatcactctgtaagctgtaactgtgcagaatgcttttctccttacatcacagtatagttttatggagatcagaaagtcctaaacagttgaaattttgatcatggtaaaaattcattgctcaggaagggctgctgtgtgtatcaggaagcacatgggtgtcactgacgtctttgctttcttgtgtgtgtgctcctgtgtcagtgcgctggatgccgaaaatgagtaccttgttcaagaagctctagatcgactgatggatggaagaacggtgttagttattgcccatcgtctgtccaccattaagaatgctaatatggttgctgttcttgaccaaggaaaaattactgaatatggaaaacatgaagagctgctttcaaaaccaaatgggatatacagaaaactaatgaacaaacaaagttttatttcagcataaggaagcaattactggtaaacaatatgagactttaatgcaaaacagtgttgcagaaaaaaaactcagagactatgaaatacataaaccatatatcaagttatttgaaaaatacctatttttttccaaagtgtgtaaaagattgttttgaaacgtacctgttctcaagatctttttattcagagttttaataattgtaactttttaaatgtctatagcactgaagttattttcaggttttgtattttcttttcttgtggaatattttaattaatatagcatggcacctcattttcttttgcctgctgttaaagattgaagctattgtcaaatgacaactttaaaaaggcaattataaataaaaagcctgattattttaggccagtttaccaatcactgggtaattcttctggtagtattctacctacttttaagtctaattttacagatagaataatggaaattgaaaatttaaccctttattccgataatctcatgaagcaaacctaactatttaacatcagctggaaagaagggaacatttatattgcccatctcctgtgtcttcaaaggtgtgagagctgaggaatatgtgttcctatgggaactatgtttgaatatgtgcagttttcaacattttggcacatgaaagcctgacaagtttttaaaagggcagaagctttattttttgaacaggaaaacatgttttttaaattcacatgtttgtatgagtacttttgcgaagcaaggcatgaactgctaggtattattaagaatgaatgatttttgcatttaagttgtttgaaggcatgtattttgaaaaatatctgttacaaatttataatttcaagacaaattgaatcttattttataatacttttggaatttcattaataaggctaaaatttgaggaatataactaattttcagccttaagacatttaagtttggaagtccttgctattcaacagaataacaagaaaacttcagaatgtatcactctcctgaaaagaagatattaataagcccttttatttatggttatagttttatttatagtctcaaaattcctaaagcaatgctacaaccattgaatttgccatattttgtatcagtgctgttaatttgctgttgcctcaagaaaaagtgctttttctccatggatgaggcctagaccctaagaagtaattaagtcaatgtaaatcaaatgggaagttttcccatgaactaagcatttattagttccctgattagactggaagaagaaaccactatttcatgaaaagcatggaatattatattttattgttcataattaatgaataaaattgatatgaatgaatatagtgttctttgaattagtaaacagtacatctgtgacaatcatttttaacaagctctacttgtgttctttataaagtgtgattttcagaaagcaaacaacacaattacaaggttgaatctgaggaaaataatccttgtgccatagaagtatttacgaaattgcatttcattgttatgttttattttctgatacatgatgttcaattttatctttaggtaatattttatatcatagattaaaatttatagtgaactttcaaaaaaaaaaaaaagaggacggggccgaaatttccaaatttttaaatggaaaatccggaaaaccccggaaggtccatttaaattgggattggcg

SEQ ID NO: 58648 - DNA, 2646 bp, Homo sapiens
gtgtggcgcggggctggtagcggccggagccgtgctagttctctaccctgcttcgcgagcgggcgagagaacgcgagtcccaggatccccggcacccagttctcttccactgcattcccccggcgcgtgtgggaccgaggtggacatggatccgcagaggtcccccctattggaagtaaaggggaacatagaactgaagagacctctgattaaggccccttcccagctgcctctctcaggaagcagactcaagaggaggcctgaccagatggaagatggcctggagcctgagaagaaacggacaagaggcctgggtgcaacgaccaaaattaccacatcccacccaagagttccatccctcactacagtgccacagacacaaggccagaccacagctcaaaaagtttccaagaagacaggaccccggtgttccacagctattgccacagggttgaagaaccagaagccagttcctgctgttcctgtccagaagtctggcacatcaggtgttcctcccatggcaggagggaagaaacccagcaaacgtccagcctgggacttaaagggtcagttatgtgacctaaatgcagaactaaaacggtgccgtgagaggactcaaacgttggaccaagagaaccagcagcttcaggaccagctcagagatgcccagcagcaggtcaaggccctggggacagagcgcacaacactggaggggcatttagccaaggtacaggcccaggctgagcagggccaacaggagctgaagaacttgcgtgcttgtgtcctggagctggaagagcggctgagcacgcaggagggcttggtgcaagagcttcagaaaaaacaggtggaattgcaggaagaacggaggggactgatgtcccaactagaggagaaggagaggaggctgcagacatcagaagcagccctgtcaagcagccaagcagaggtggcatctctgcggcaggagactgtggcccaggcagccttactgactgagcgggaagaacgtcttcatgggctagaaatggagcgccggcgactgcacaaccagctgcaggaactcaagggcaacatccgtgtattctgccgggtccgccctgtcctgccgggggagcccactccaccccctggcctcctcctgtttccctctggccctggtgggccctctgatcctccaacccgccttagcctctcccggtctgacgagcggcgtgggaccctgagtggggcaccagctcccccaactcgccatgatttttcctttgaccgggtattcccaccaggaagtggacaggatgaagtgtttgaagagattgccatgcttgtccagtcagccctggatggctatccagtatgcatctttgcctatggccagacaggcagtggcaagaccttcacaatggagggtgggcctgggggagacccccagttggaggggctgatccctcgggccctgcggcacctcttctctgtggctcaggagctgagtggtcagggctggacctacagctttgtagcaagctacgtagagatctacaatgagactgtccgggacctgctggccactggaacccggaagggtcaagggggcgagtgtgagattcgccgtgcagggccagggagtgaggagctcactgtcaccaatgctcgatatgtccctgtctcctgtgagaaagaagtggacgccctgcttcatctggcccgccagaatcgggctgtggcccgcacagcccagaatgaacggtcatcacgcagccacagtgtattccagctacagatttctggggagcactccagccgaggcctgcagtgtggggcccccctcagtcttgtggacctggccgggagtgagcgacttgaccccggcttagccctcggccccggggagcgggaacgccttcgggaaacacaggccattaacagcagcctgtccacgctggggctggttatcatggccctgagcaacaaggagtcccacgtgccttaccggaacagcaaactgacctacctgctgcagaactctctgggtggtagtgctaagatgctcatgtttgtgaacatttctccactggaagagaacgtctccgagtccctcaactctctacgctttgcctccaaggttgaacccagtgtgttattcggtactgctcagtccaacaggaagtggaagacggatccagatctctgtgtgtgtgtgtgtgtgtgtgtgtgtgtgtgtgtgtgtgtgtgtgtgtgtgtccctatgtctatgtatcgggtgaggggtgggagggttgctggagggtgctttattgggtggagggcaccatgtcccagggctatcaaataaagaatagtttggttttttttttaaataaaggttttattagcatttgcccaagaaggcagatactttcatatctgtaaaagtgggagctgtgatctgtaccctctgccaaacgtttacgtgggaggcgggagcgggggctgagggcttcgtcttttctcccctctgctatcaccggttctggaccttggcctggatcatcttcccctctgctaataccccctaccccgtccgtcacatcagggaggtgtgccctctagctatccacgccccctccttggtcactagttataggtaactttcacccttccgccggc

SEQ ID NO: 58649 - DNA, 1857 bp, Homo sapiens
gagaaggcttcaatggattctcttgtggtccttgtgctctgtctctcatgtttgcttctcctttcactctggagacagagctctgggagaggaaaactccctcctggccccactcctctcccagtgattggaaatatcctacagataggtattaaggacatcagcaaatccttaaccaatctctcaaaggtctatggccctgtgttcactctgtattttggcctgaaacccatagtggtgctgcatggatatgaagcagtgaaggaagccctgattgatcttggagaggagttttctggaagaggcattttcccactggctgaaagagctaacagaggatttggaattgttttcagcaatggaaagaaatggaaggagatccggcgtttctccctcatgacgctgcggaattttgggatggggaagaggagcattgaggaccgtgttcaagaggaagcccgctgccttgtggaggagttgagaaaaaccaaggcctcaccctgtgatcccactttcatcctgggctgtgctccctgcaatgtgatctgctccattattttccataaacgttttgattataaagatcagcaatttcttaacttaatggaaaagttgaatgaaaacatcaagattttgagcagcccctggatccagatctgcaataatttttctcctatcattgattacttcccgggaactcacaacaaattacttaaaaacgttgcttttatgaaaagttatattttggaaaaagtaaaagaacaccaagaatcaatggacatgaacaaccctcaggactttattgattgcttcctgatgaaaatggagaaggaaaagcacaaccaaccatctgaatttactattgaaagcttggaaaacactgcagttgacttgtttggagctgggacagagacgacaagcacaaccctgagatatgctctccttctcctgctgaagcacccagaggtcacagctaaagtccaggaagagattgaacgtgtgattggcagaaaccggagcccctgcatgcaagacaggagccacatgccctacacagatgctgtggtgcacgaggtccagagatacattgaccttctccccaccagcctgccccatgcagtgacctgtgacattaaattcagaaactatctcattcccaagggcacaaccatattaatttccctgacttctgtgctacatgacaacaaagaatttcccaacccagagatgtttgaccctcatcactttctggatgaaggtggcaattttaagaaaagtaaatacttcatgcctttctcagcaggaaaacggatttgtgtgggagaagccctggccggcatggagctgtttttattcctgacctccattttacagaactttaacctgaaatctctggttgacccaaagaaccttgacaccactccagttgtcaatggatttgcctctgtgccgcccttctaccagctgtgcttcattcctgtctgaagaagagcagatggcctggctgctgctgtgcagtccctgcagctctctttcctctggggcattatccatctttcactatctgtaatgccttttctcacctgtcatctcacattttcccttccctgaagatctagtgaacattcgacctccattacggagagtttcctatgtttcactgtgcaaatatatctgctattctccatactctgtaacagttgcattgactgtcacataatgctcatacttatctaatgttgagttattaatatgttattattaaatagagaaatatgatttgtgtattataattcaaaggcatttcttttctgcatgttctaaataaaaagcattattatttgctgaaaaaaaaaa

SEQ ID NO: 58650 - DNA, 1218 bp, Homo sapiens
gcacgaggggctgtgggaataagatggcggggaagaagaatgttctgtcgtctctcgcagtttacgcggaagattcagagcccgagtctgatggcgaggctggaatcgaggcggtgggcagcgcggctgaggagaaaggcggattggtatctgatgcctatggggaggatgacttttctcgtctagggggtgatgaagatggttatgaagaagaagaagatgagaacagtagacagtcggaagatgacgattcagagactgaaaaacctgaggctgatgacccaaaggataatacagaagcagaaaagcgagacccccaggaactcgtggcctccttttctgaaagagttcggaacatgtcgcctgatgaaatcaagatcccgccagaaccccctggcagatgttcaaatcacttgcaagacaagatccagaagctttatgaacgaaagataaaggagggaatggatatgaactacattatccaaaggaagaaagaatttcggaaccctagcatctacgagaagctgatccagttctgtgccattgacgagcttggcaccaactacccaaaggatatgtttgatccccatggctggtctgaggactcctactatgaggcattagccaaggcccagaaaattgagatggacaaattggaaaaggccaaaaaggagcgaacaaaaattgagtttgtgacgggcaccaaaaaaggcaccacgaccaacgccacgtccaccaccactaccactgccagcacagctgttgcagatgctcagaagagaaagagcaagtgggattcggctatcccagtgacaacgatagcccagcccaccatcctcaccaccacagccaccctgccagctgttgtcacggtcaccaccagcgccagcggctccaagaccaccgtcatctctgctgtgggcaccattgtgaagaaggccaagcagtgacctgaggggccacccctagggatttgaaaggaccgtgcagcccagtgacccactgcccagtgggaggcgccactttgtatatttcaggactgggacctactccccaagatgccacctgagaggagcttctgtttggcattccagatggaaggacaggcagcacgggagccaggcgctgtggacagggtctgtccacgcaccacctggggtctgccgcctattaaaagtgccgtattcttacctcttggcatctcagatgcaaaaaaaa

SEQ ID NO: 58651 - DNA, 782 bp, Homo sapiens
cgtcactgcaaggcgccgggggacacgttggctgcgttttcggcgggcttcccgggtacaaaaatggctgtggctagcgatttctacctgcgctactacgtagggcacaagggcaagtttgggcacgagtttctggagttcgaatttcggccggacggaaagcttagatatgccaacaacagcaattacaaaaatgatgtcatgatcagaaaagaggcttatgtgcacaagagtgtaatggaagaactgaagagaattattgatgacagtgaaattacaaaagaagatgatgctttgtggcctccccctgatagggttggccgacaggagcttgaaattgtaattggagatgagcacatatcttttaccacatcaaaaataggttctcttattgatgtaaatcagtcaaaggatcctgaaggccttcgagtattttactatttggtacaagacttgaaatgtttagttttcagtcttattggattacacttcaagattaaaccaatttaaattgtatgttttcaggctgtttgtatatttaattaagggatgggaggggttatttgtcatttacagtattggggtttttatgaatgtgaagcaaacaaaaaaaatttgtatgtaaactgaaaataagaaaatacattagcaagcttaatggttatccttacttgagtccacatgggttggacagtccccacacacattaaattctgtaaatgaaagccaccttttgttaaaaatttgctctaataaaacataccaaatcctgaaaaaaaaaa

SEQ ID NO: 58652 - DNA, 2034 bp, Homo sapiens
cgacgatttcgtcgagaggcgccgctggacccggacgacctgtctagtccgttcgccgccccacgtcccggtctgtggccacgcctgcagctggaatggaggctctctggaccctttaaaaggcacccctgccctcctgaggtcagctgagcggttaatgcggaaggttaagaaactgcgcctggacaaggagaacaccggaagttggagaagcttctcgctgaattccgagggggctgagaggatggccaccaccgggaccccaacggccgaccgaggcgacgcagccgccacagatgacccggccgcccgcttccaggtgcagaagcactcgtgggacgggctccggagcatcatccacggcagccgcaagtactcgggcctcattgtcaacaaggcgccccacgacttccagtttgtgcagaagacggatgagtctgggccccactcccaccgcctctactacctgggtatgccatatggcagccgagagaactccctcctctactctgagattcccaagaaggtccggaaagaggctctgctgctcctgtcctggaagcagatgctggatcatttccaggccacgccccaccatggggtctactctcgggaggaggagctgctgagggagcggaaacgcctgggggtcttcggcatcacctcctacgacttccacagcgagagtggcctcttcctcttccaggccagcaacagcctcttccactgccgcgacggcggcaagaacggcttcatggtgagccctggccctggctgtgtgtcccctatgaaaccgctggaaatcaagacccagtgctcagggccccggatggaccccaaaatctgccctgccgaccctgccttcttctccttcatcaataacagcgacctgtgggtggccaacatcgagacaggcgaggagcggcggctgaccttctgccaccaaggtttatccaatgtcctggatgaccccaagtctgcgggtgtggccaccttcgtcatacaggaagagttcgaccgcttcactgggtactggtggtgccccacagcctcctgggaaggttcagagggcctcaagacgctgcgaatcctgtatgaggaagtcgatgagtccgaggtggaggtcattcacgtcccctctcctgcgctagaagaaaggaagacggactcgtatcggtaccccaggacaggcagcaagaatcccaagattgccttgaaactggctgagttccagactgacagccagggcaagatcgtctcgacccaggagaaggagctggtgcagcccttcagctcgctgttcccgaaggtggagtacatcgccagggccgggtggacccgggatggcaaatacgcctgggccatgttcctggaccggccccagcagtggctccagctcgtcctcctccccccggccctgttcatcccgagcacagagaatgaggagcaggcggctagcctctgccagagctgtccccaggaatgtccagccgtatgtggtgtacgaggaggtcaccaacgtctggatcaatgttcatgacatcttctatcccttcccccaatcagagggagaggacgagctctgctttctccgcgccaatgaatgcaagaccggcttctgccatttgtacaaagtcaccgccgttttaaaatcccagggctacgattggagtgagcccttcagccccggggaaggtgagcagagcctgacgaatgctgtcgactcatcgcgttagtcacgtgtggttcaatatgctgtttgttcattggtcggcccccccactcagccagcacaccctgcgggagaaggaacagggatcggcaggaagccagccttccccagtgactgcatgatctggcagggcttagagcacccaactgttggcttattcaggcagcagatttactgagcacctcccctgtgccaggcccttagcacaaccaggggttggccacctacggcccacaggtcaaatccggcccaccacctgtgttcataaataaagttttattggcactgagccccaaaaaaaa

SEQ ID NO: 58653 - DNA, 6641 bp, Homo sapiens
cacacgtatatatagagaaacactcaaaaataaatatttatccagacaaaaggaaatagcgggccgccccccgtttttcccagggaaattggataaaaaacagcccagggggggggcccgagaaacaaaaaaaagaatttgtgtatcgggccgcgggggggaagtaaatttgatatccttaaacccgccactcttttttttttttttctttttattattctttattggtcctaccaatgtgactctttacccaggcccactgttcctatgcgcactggctttgtaggcattcacatcatatgtctgtgtcctgaaaatctcaattaatttctccttcctattccttttccatgctctgcctcattttctcagaaattgaaggcatttgattattatttttttgtttggggtctgtgtaaagggttccttgggcaggaggaacatggcatatggactttaaaataaagaccaaacatttctggacacttaaggttaatgccaccagaaaaaaataccagttactccagaccatccattggcaaattaaatacccccatacagatgaagttatctcaaatgtaacaatatttcttatgaatcaacactgtaacggaaggtaaaaataggagtccctacaactaggaataagaaatgcttattccaggaaacagaattcttttatttttgtcatttatattattataatttttccttttttggagaaggaaggacagtttttcttcctccaagagtaccaatttgaccactcccactaacctcactcagcaaacaaaacaggatgtagacctggtttgctaaggagttttaatgagttctgtttcctgaaattaacagtgattagttacaccaagcaagagaagatataatgtctcgctttcacatttgcaaagaatactatggctaaccctcatcccctactgcgcatgccaacacagcgtcggccctcctgataccctcagctcttcacaaacgtggcgttcatacagcttgctcagcttgtcccagaaggtccatttggttcccaaagcacactcaaggttttgtgtttgctttcattttctaagcccctgaatttgcaagtaaagaatcactgactaacagaattttgcacaatgactgttttctttccctcaatgaagatgcccaggtctgggtgtgaggagcacctgcctcacctgctgtccacgctggccttcagcatgcccactagctcttccctgctcgcttttgagaatgatctgtgctgggacacctcccttaactgatgaaggcactactggcaatgattactaacaaaaaggtgttgaaagagaacaccctaaaaatcgacgactgtagaattttctaagtgtaccacaatttggcacaacaaccagagtaacaaaacaattccaatttggaattttattggtacagttgtataaaattctgttaatcagtcatgcttcacaacgtcctaaaacccagaaaattctggaatttgtaggtaatactactcattcaataatttatctttttttttcaagtgcctattactgttttaaccagagcaaaggtcaagttttcttcttgttacattgaactattcctaagaataataataatacaatatgaaaaaccccagaatctgaataccctggatttcttaatgaacatggcatttaaaatctgtaatttcaaacatgaaccacaatgccgtatgatctaaaggctgctgaaccacagcgtggatacacttagctgagctcctcgctgggtcaaagcactcatctccgagtctaaagctacacgctatggagcacacagctctgcctcgtgctgacaccagacaaacacggtgggagctgaggcggacagctacaggaccacgagcatagaccacggcacctgagaccgtctctacgcgaggaattaaggaagcaaatataatatcaaaatatcaaaagtgcacaggttgatcggataaaaaaagaacatgtgtaacaaggagcccccgtggtgggcgtttccagtgggctcctggcgagcctggcagccagggaagaagggtcttcggcccatacagaggcctttccacgcagcagctcgcagcatgctcaacattaaagctttttttcctcccattaaaaacctggggaatgctattttgaaaagaattgcagtggcatatccaaaaagtttctaagtgggcttttaggttgcccttccttcctccttgtgggccacgagagggaaggggaaggggctgcagtgtgacagggccgggtggccaagtcctcctggcagctactctacagctgaaaacgggagaaaagagagcgttagaaagcggtcatctgtcgcttcctgtttatctgacaattgaagctctccacgtgctgggagggcgcgagcacgttagttggcagaagagaagacctgcatgtgttagcaggggtcccagtggcttgggtgtctgcaaagtcccttaggagtatggagagaagctatatgccaggcttgcaaggagagggcaaagcgcatgcagggtgggcatgccagcagccatcccactgcgagtcttgctggggcagggggatctgggcccaggatgaacacgcaggggacatacatgggcgtgtcctggagtctggaggggaccgaaacatactcggcaccaaagggaagaacgcgcagggcagagagctgtgggagggggcaacacggtctctcaccaggtaactcgaatgcctcttccgcatgagagacaaggcaagcagcctgcaggagagaagactgcagcctcaggtccagctggtcccacagggtgatcgggaaaaaagtactgagaaaagttctgctcagaatgtgggaaggcaggtgtggatggagcctctggaaatgggagaaccctacagctacctttcctctttctctgttgccatcccccagattgcactaaataaagagacctaaacatctcctacctgtgaatcctgacaagtggccctggccctatgcaaagctttcccagcaccgggctgggctctggatacacctgtgggtgtccaacccaagccaagccctttggtggcttcagactttcaggctagggtttttcaaaagcccccatgtcttttgggactgaaccccctatggaaggccggataattggctgctggggtcaccccaagtacaaaaggacgggctctgcactaaggaccaaggtctggccaggcacttggaaagcttttctcatgaaaaatgaaaacctggggccttgggccctgccaatctgtcacctcacaggccactatacaagcatcctgatctcagaaatgagaaaccgagctctggattcctgggttatggtcagctgtgtctgtgccatgtgtgtctggccagcagaatacaggggctcagggctgctcttctctgggcttggggaagaaattctgcacttctttcctgaatatgatttgcagtcagatactgcataaactacaacgtactcctttccatgaaactatgccaagtgcaaagccatcctctgaggtcgtacctatgctgcaggctggaacctcctaaaactgctttctagtgctgacattagacacatgcgaggaacatgcaagtctcaactcaggttctgccccttttgggtgctgagggagcaggaccaggactcctcccttgggtttccccacgggtgcgcagggcttagaagatgctttcatcacacatctgctgcaagaatgtgcagctctatccccccctctgacccccacctaagagagcagctgaggactgggtgctcctgagggggctttgaggagtgagaagcgacacaaagctctcacaagtgtcctgctgatgcaacgccccatggcgcctcggctagactcctaccctctgtgcattagtcacgttaagattgacctagcaccgccgtcccgctgctgctgggttagttgaggtgaagcagatgttagctgcagcgtgcggcgccccacagcccctaatcacagtaaatgctgtgcttctcgctgcagaacacctggttggccagcccggtgccctcggccctgtcgctggcacaggcacaggtgtgacttacgctcggtgtggctggcttggtcttcggggcggctttggcacggccacgccgggtctgctcatggtccagctcgagcagctccagccgctgggtcagcgccagcttctgctggatggccatgcgcagcagcgagttcagcgtcttcttctcgtcctcagcagccgccagctgccgctgcatctcatccagctgtgtaatgtactcgtcacacctggtggcaaacatagcacgcagcgaggagaaggtggctgcgtcctccttgagggccttgagctcattgcgcagcttcatcatggtctcggtaaccatggccttctcattctcatacttgctcttcaggttggcaagggccacctcggccgtctgcttgttggccttgagcacagtgcgcagcgtggtgatctgctcccgcttggtgctgagcagcgacttcagcttgaggatctcctccataagcgcttccttgtccttgtccacggcggggcccagctcctgagaggcaatgcgctggcgtgacagctccgtggtgcggtccacggctgcctgcaggtgcttgatctggtcacggatgatagcgatcaggttgtagatgttcatgggctcccggcgtgggtcactcaggggtgatggcagtgaggagccaggcgaggggctgctgtcccccgtcccaccatctgctcggcccgcctcaggagccagcagccccttgggtaggaggatgggtgagcgccggccacgcgcctcggggctggtgcggcccccgggactggtgcggccggccccgccctggccctcgcggtagtagtccagcatgacacggttgggtgtctcattgttgcacatgcacacgtggtggtagagattggccagctcctcactgaaggtcaccagctcatcctgggccacactcaggctgccctgtgtctcgccggcgacgtcgctcaccttctttagctccttctccagccgggccagcagctcgcggtcctggcggctggccttctctagcagggagaccttctccgtgagtgcctggccctcagcctcatagcggcccttctcctcggcgtgctgggcctcacgagcctcgtgcgtgctgcgcagtgccttgagctgctcgcggagctcgccagcctcagccacagccacatggtacttgcaggccaagatctcaggcccgttgatgtccacctcgtagtagtccccatcctcatggctgtcacggtccttctcgttgtccagggctgtctgccgctccttgctggcctgcaggcgccgcagggcactcagattctctgtgaggcgggtcaccttctcctgctgttctgacagggagccccgcgtgtgctccagctgcttctgtgtgtcctgcagcgttgccagcaggcccgccttttcccgctccatctgcatcagctgctgcttcagcttctggatctcagagatgttgagctcactgagtaggtcggagacgaggctgggggagggcggtgcgaggccctccttcttgggcgtggaggtcttgttgtccagtggcagcttggccaggccgccgtgctcaaagccattgaccagggcctcggcatcgttgttgggctcggcagcatcgtcactgaacttgaggccatccagcgagacatgcaggtggctggtgtagaaggagtcattgatgctcatgtagtgtgacagctccttgcgcaggctgttcttctgttcgcgctccgtcttcagggtctccagcgcctcctccagctgccgctctgagatctccttgaggcggatggcatcctccagctggctgttgaggtactcggtctcctcctccagacgcttgatctcatgcttgaggccctcaaactccacctggttctgtctgagcacagacacttgcttctgcaggctgatgttctcctcctccagttccgagtagtcctgcagcagacgagcttcccggaatttgtactccttgatgtcatcccgcaggcggccacgctggatctccacattctggttgatctccttcagctcctgggccacagaggccaggcgctcattctccgactgcgtgttggtgaggacattgcgcaactgcttcagctccgtctgcagctctagcaccttccgcacgtagtactgctccttggaggccgactcctggatcaggctctcctcccggctctctccgtcagcagccaccttcttgtggtttgtgtgtgcttgtccaaaggcctccttgagctgctccatctcgctgcggatagcctcatagtccacctcgagctcctcgaactgcagcttgagctggtgcttctcctcgagcaccgccagcccgtactcggccgcctggatcttctcacgcgtggtctcggccagctcgtgggacagccgcttcacctcggcgcgcagccactccggctgcgcctccatcaccagccgcgcgtactcctcctcctccgacggcgccgacatggtggccgagggctgagccggctcccactgaggctctcgcaggccgggcacgaaa

SEQ ID NO: 58654 - DNA, 1952 bp, Homo sapiens
caagagttcggcgcgaggggctgggtccctctagccggcgccgctcctcctcctggcaggccggccgcggagtcagctgacgccggcgctccagcctcgcctccccgcgccgcgctctgcgctccgcgaaagtggctgcaagccggccgcccactgtcagggttggggggacagagaaagtgatgtgcgccttctaaagcctcgcccagcgccgccgaagcagcttcacctctccaactttctcccaccgactgcttgtcttgaccctgccctccaccctccccagagccacttcgggtgcgcgctcttgggtaaagggggggtcaccggctgtctgggatggcttccaattttaatgacatagtgaagcaagggtacgtgaggatccggagcagacgcctcgggatttatcagcgatgctggttagtattcaagaaagcttcaagcaaaggtccaaaaagactggagaaattttctgatgaacgtgctgcatatttcaggtgttatcataaggttacagaactcaataatgtgaagaacgtagctcgattgccaaaaagcaccaagaaacatgccatagggatttatttcaatgacgatacctccaagacttttgcttgcgaatcagatcttgaggctgatgagtggtgcaaagtactccagatggagtgtgtaggaacacggatcaatgacatcagccttggagagcctgacttactggccactggggttgagagagaacagagtgagagattcaatgtgtatttgatgccatctcctaacttaggatgttacatgggcgaatgtgccttgcagattacatatgagtatatctgtctttgggacgtccagaatcccagagtcaaactcatctcttggccgctaagcgccctgcggcggtatggacgtgatactacgtggttcacttttgaggcagggaggatgtgtgagactggtgaagggctgtttatctttcagacccgagacggggaggccatctatcagaaagtccactctgctgccttggccatagccgagcagcacgagcgcttgctacagagtgtgaaaaactcgatgctccagatgaagatgagtgagcgggccgcctcgctgagcaccatggtgcccctgcctcgcagcgcctactggcagcacatcacacggcagcacagcacgggacagctctaccgcttgcaagatgtttccagccctctgaagcttcatcgaacagagacttttccagcctacagatctgagcactgacagtaactgccaagaattgttaacacacttgtgatgtgtcagccacagattcacccaggaggtcacagaatgacagcaagggaaatgacgaccaagagaagaagcttaaagtcctggctaattgtgtggtcattggaaaactctgcaatacaataattttctttattttctttttcttttttaaattcttagtgtaattgaaacgtgctctatagatattgactctgtgttccctcttttacagctggacagaaagaagtcaatgtcacgaaatgattttctattgtagatactttgtcccttgcacttctctgaatctgtccttttgtggattcttgtgattttccttccaagtgtttcagttgtatgacagtcagtattgacaataaaatggcttttaattatttgttatttgtttacaccctattcctcagttattattactgtggttctgattaactactggaaattatatttgattatatcaccaattagttaaatcagggcttcgactcactcttatctgttctgttcaaaactatttgttcaaagaacccgttagttgtttacagagttacagtttctctcacatgctttcctcacccccttaccccgctttttgaaagcctttattttgttcggagtctcttcataaaacatttgaaaataaaagatcattcttcacccat

SEQ ID NO: 58655 - DNA, 1216 bp, Homo sapiens
ccgggctgccctcagcgctgcctgattgcatttgcggcctcgctgccgcatcccaggctaagcgctgcgcgcaaagccgtgcggagattggaggccgcgcgggtccctggtctgggccatgtctggctgtgatgctcgggagggagactgttgttcccggagatgcggcgcgcaggacaaggagcatccaagatacctgatcccagaactttgcaaacagttttaccatttaggctgggtcactgggactggaggaggaattagcttgaagcatggcgatgaaatctacattgctccttcaggagtgcaaaaggaacgaattcagcctgaagacatgtttgtttgtgatataaatgaaaaggacataagtggaccttcgccatcgaagaagctaaaaaaaagccagtgtactcctcttttcatgaatgcttacacaatgagaggagcaggtgcagtgattcatacccactctaaagctgctgtgatggccacacttctctttccaggacgggagtttaaaattacacatcaagagatgataaaaggaataaagaaatgtacttccggagggtattatagatatgatgatatgttagtggtacccattattgagaatacacctgaggagaaagacctcaaagatagaatggctcatgcaatgaatgaatacccagactcctgtgcagtactggtcagacgtcatggagtatatgtgtggggggaaacatgggagaaggccaaaaccatgtgtgagtgttatgactatttatttgatattgccgtatcaatgaagaaagtaggacttgatccttcacagctcccagttggagaaaatggaattgtctaagccaaaagaaagtctaattatatacagagataaagctaaacgtaattattatttaaatgaaagctatttttttaaatgaattgaaatttttcatgatgctactaatttgccactaaatactgcaaatggtcaccctgaatctcttctgacattggatgttatttgcttatattcttataattttaaatgagggcacagtgaaatgaaaattttatactctatgtttctgtttatttttaaatccttaacagcaaaatatttgcctttaatttcttttttatatatactctcagagaattcctcttaatttttaaagatgctggtgataataaaattcattagaaaatttcctcattgtgaaaaaaaaaa

SEQ ID NO: 58656 - DNA, 2752 bp, Homo sapiens
tttcgtctctggtgaatagacggctgtggggcagagaagtgtgaaggcctggctgccgggcaggtgaactctccacggggtctagggcccgcgaaagggttcggaaccgagtcagcgcgccttgcgggcaggattcacgccgctgtgacccggaggtcctcagggggcgaagccccggcctaggcctcgcggagatgcccagctgcggtgcttgtacttgcggcgcggcggccgtccggctcatcacctcctcactcgcctccgcgcagagaggtatttctggtggtcgcattcatatgtcagttttaggaaggcttgggacatttgaaactcagattctgcaaagagctcctcttagatcctttacagaaacaccagcatactttgcctcaaaagatgggataagtaaagatggttctggagatggaaataagaaatcagcaagtgagggaagtagtaagaaatcaggctctgggaattctgggaaaggtggaaaccagctgcgctgtcctaaatgtggcgacttgtgcacacatgtagagacctttgtatcatccacccgttttgtcaagtgtgaaaagtgtcatcatttttttgttgtgctatctgaagcagactcaaagaaaagcataattaaagaacccgaatcagcagcagaagctgtaaaattggcattccaacagaaaccaccacctccccctaagaagatttataactacctcgacaagtatgttgttggccagtcatttgctaagaaggtgctttcagttgctgtgtacaatcattataagagaatatataataatatcccagctaatctgagacagcaagcagaggttgagaagcagacatcattaacaccaagagagttagaaataagaagacgggaggatgagtacagatttacaaaattgcttcagattgctggaattagcccacatggtaatgctttaggagcatcaatgcagcaacaggtaaatcaacaaatacctcaggaaaaacgaggaggtgaagtattggattcttctcatgatgacataaaacttgaaaaaagtaatattttgctgcttggaccaactgggtcaggtaaaactctgctggcacaaaccctagctaaatgccttgatgtcccttttgctatctgtgactgtacaactttgactcaggctggatatgtaggcgaagatattgaatctgtgattgcaaaactactccaagatgccaattataatgtggaaaaagcacaacaaggaattgtctttctggatgaagtagataagattggcagtgtgccaggcattcatcaattacgggatgtaggtggagaaggcgttcagcaaggcttattaaaactactagaaggcacaatagtcaatgttccagaaaagaattcccgaaagctccgtggagaaacagttcaagttgatacaacaaacatcctgtttgtggcatctggtgctttcaatggtttagacagaatcatcagcaggaggaaaaatgaaaagtatcttggatttggaacaccatctaatctgggaaaaggcagaagggctgcagctgctgcagaccttgctaatcgaagtggggaatcgaatactcaccaagacattgaagaaaaagatcggttattgcgtcatgtggaagccagagatctgattgagtttggcatgattcctgagtttgtgggacggttgcctgtggtggttccattgcatagcctagatgagaaaacacttgtacaaatattaactgagccacgaaatgctgttattcctcagtaccaggccttattcagcatggataagtgtgaactgaatgttactgaggatgctttgaaagctatagccagattggcactagaacgaaaaacaggtgcacgaggccttcggtccataatggaaaagctgttactagaaccaatgtttgaagtccctaattctgatatcgtatgtgtggaggttgacaaagaagtagtagaaggaaaaaaggaaccaggatacatccgggctccaacaaaagaatcctctgaagaggagtatgactctggagttgaagaagaaggatggccccgccaagcagatgctgcaaacagctaaactgtcatattgctgtcttgtatatacagcttttccttcttttgtttaggatcataattgtctctacagtctgatattaaaggcattggatctatcttggatatcatacatggtcagagaagcctttaggagaagaatcagatcatgtatataattgtaacatcacattgattttacggaagatgttatatggactttaatgacacaatgtttagagataaaatgtacattattttggttcagtttttttaaaaaaatatgctttaacaaaattcttaggaattcttttaagcaatgcaggtattgcgataactgtagattttacaataatgttactctacaaatgggaaaataaattctttaaaattgaatattgagataccattctttagtgttaccttttttacccacatgtgtttctgaaaatattggaattttattcatcttaaaaattggaccaggtaggccgggcgtggtggctcgcgcctgtaatcccagcactttggggggccgaggcgggtggatcacgaggtcaggagttcaagaccagcctggccaagatggtgaaaccccatctctactaaaaatatgaaaaattagctgggtgccgtggcgggtgcctgtaatcccagctgcttgggaggctgaggcaggag

SEQ ID NO: 58657 - DNA, 1493 bp, Homo sapiens
ttttttttttttgaatgaaaaccatgaatttaatgtgacattgggggagcctcatccttccctttttaccacccacccatccagcctgttgtgagttgggtgagggctgcccccagtctccgtcctgcggctctgggtgccatcctgttcctttgagctcagtcagcctcctgggctcgtctctctgtgaatctccttcttgcgtattcatatagtgcttgcttgcgctcctgcaggctctcctgccgggcccaggaagacttggcaaatgttagggctgttggctgaggggtcaccgggccagagctgggaaacttggaggcagaggctgtgggtagggactgagttcccttggtgatgtcttcaggcatgaaagctacggccccctcaagcagattagtgatagtcaagtctacacagccagtcttggccaggtctctctggatgacacccaatggcacatggggcaaaacttccttgactctctgagccagagttgccagttgcacatcaggagaaggaccaggggagggagggaaagaagactgggctgactgggggcgcaatctggggtgtctttgtcgcttcatgtgctctgctttgtcagctggagtgagccgtgtccctgtctggcccaattccttggccaccagctgttgtacacggagtgcaaactcctcattcgcttcccctagttggcgatgaacaggacgaagccaccttacttgatacaccgtgaaagggacgaaaagtgaccacagcagttctgagacccaggaggcatctgacaccgtcacagagaccaggggtctctgaacttgcagggtaagaggttgtaccacatcttggatagaaaatggccaggaactgaagcgcaggagcccctcccggccattggtggcctcttcctcagggaatagcagcagaggagtggggggaagcctcgtggaagcacagaatctcttgagtgactccaccaactccccccgcccattcatctccatgaagccccgagaccagcacacaaagctggggggactattgagtagaggggtgctacaggtggtaagcaaattgactatgttgtggtcgaaaggtgtcacatggttggaaatgaggaccctgacactgtgatcccggagtccggagtcctcctgccgggccacgagccctagcaccgcacacatggtccgcactacgaatctgcgaaggacgctgtctggcagcgcgcagctgaccaggaagacgtggatcccgagaaagaggcgcaggacgaggaggcagaacccgactggcgcgtagagcagcagcacgagcagtaggaagcagtcacccggaagccggtgcgagtcaaagagccgctccggccccggccctgagggaagctccataactgctgcttcaggagcgcccggccgtcgccgccgccgccattttcgcgcccggccgcaggggctcttcggggggggggggggattaatttaattaaggat

SEQ ID NO: 58658 - DNA, 4923 bp, Homo sapiens
ctcacgacgggccgagcctgccactgctaactatatgtcagaaagcatcagcttttctcgatggacccattcatctaatgaaatatgcctgtactattttaaaaagctttgtatttcgtcatagaaaagttcatccccccagaatgaaaatgaggacatttgagaaggtgatttaaggtgtggacatttgagaaggtgtcctatcaaattagtaaaccaaaggaaaagtactgaatagattaatccaaaacacttacttttttttaaacgaagaggatttcaccttgacagaaaaacaacttttattcaatatgtatttcctgaaattaaagagacaagtacagactgaaaggaaaatagattcgtaaataagctacgtcaactctatcctgctgaggatagctcagtgatgttaaatcctttacaaatccctggttgtcttcctacagacaagactgctttttgatgggactgatattaagagaaataggacctttggggcattcaactccttgataaaacttaaaagtatcggcatgagtggcttaacagaggaaataaagaagttttcaactaaatccaaaagtgcggtcattttctttactgctgttattttaaaaacctcttcataaccattgaaaaagaatcgacaactattttaaaagattaaagaaaggcagatgtctgcaaataattcccctccatcagcccagaagtctgtattacccacagctattcctgctgtgcttccagctgcttctccgtgttcaagtcctaagacgggactctctgcccgactctctaatggaagcttcagtgcaccatcactcaccaactccagaggctcagtgcatacagtttcatttctactgcaaattggcctcacacgggagagtgttaccattgaagcccaggaactgtctttatctgctgtcaaggatcttgtgtgctccatagtttatcaaaagtttccagagtgtggattctttggcatgtatgacaaaattcttctctttcgccatgacatgaactcagaaaacattttgcagctgattacctcagcagatgaaatacatgaaggagacctagtggaagtggttctttcagctttagccacagtagaagacttccagattcgtccacatactctctatgtacattcttacaaagctcctactttctgtgattactgtggtgagatgctgtggggattggtacgtcaaggactgaaatgtgaaggctgtggattaaattaccataaacgatgtgccttcaagattccaaataactgtagtggagtaagaaagagacgtctgtcaaatgtatctttaccaggacccggcctctcagttccaagacccctacagcctgaatatgtagcccttcccagtgaagagtcacatgtccaccaggaaccaagtaagagaattccttcttggagtggtcgcccaatctggatggaaaagatggtaatgtgcagagtgaaagttccacacacatttgctgttcactcttacacccgtcccacgatatgtcagtactgcaagcggttactgaaaggcctctttcgccaaggaatgcagtgtaaagattgcaaattcaactgccataaacgctgtgcatcaaaagtaccaagagactgccttggagaggttactttcaatggagaaccttccagtctgggaacagatacagatataccaatggatattgacaataatgacataaatagtgatagtagtcggggtttggatgacacagaagagccatcacccccagaagataagatgttcttcttggatccatctgatctcgatgtggaaagagatgaagaagccgttaaaacaatcagtccatcaacaagcaataatattccgctaatgagggttgtacaatccatcaagcacacaaagaggaagagcagcacaatggtgaaggaagggtggatggtccattacaccagcagggataacctgagaaagaggcattattggagacttgacagcaaatgtctaacattatttcagaatgaatctggatcaaagtattataaggaaattccactttcagaaattctccgcatatcttcaccacgagatttcacaaacatttcacaaggcagcaatccacactgttttgaaatcattactgatactatggtatacttcgttggtgagaacaatggggacagctctcataatcctgttcttgctgacactggagttggacttgatgtagcacaaagctgggaaaaagcaattcgccaagccctcatgcctgttactcctcaagcaagtgtttgcacttctccagggcaagggaaagatcacaaagatttgtctacaagtatctctgtatctaattgtcagattcaggagaatgtggatatcagtactgtttaccagatctttgcagatgaggtgcttggttcaggccagtttggcatcgtttatggaggaaaacatagaaagactgggagggatgtggctattaaagtaattgataagatgagattccccacaaaacaagaaagtcaactccgtaatgaagtggctattttacagaatttgcaccatcctgggattgtaaacctggaatgtatgtttgaaaccccagaacgagtctttgtagtaatggaaaagctgcatggagatatgttggaaatgattctatccagtgagaaaagtcggcttccagaacgaattactaaattcatggtcacacagatacttgttgctttgaggaatctgcattttaagaatattgtgcactgtgatttaaagccagaaaatgtgctgcttgcatcagcagagccatttcctcaggtgaagctgtgtgactttggatttgcacgcatcattggtgaaaagtcattcaggagatctgtggtaggaactccagcatacttagcccctgaagttctccggagcaaaggttacaaccgttccctagatatgtggtcagtgggagttatcatctatgtgagcctcagtggcacatttccttttaatgaggatgaagatataaatgaccaaatccaaaatgctgcatttatgtacccaccaaatccatggagagaaatttctggtgaagcaattgatctgataaacaatctgcttcaagtgaagatgagaaaacgttacagtgttgacaaatctcttagtcatccctggctacaggactatcagacttggcttgaccttagagaatttgaaactcgcattggagaacgttacattacacatgaaagtgatgatgctcgctgggaaatacatgcatacacacataaccttgtatacccaaagcacttcattatggctcctaatccagatgatatggaagaagatccttaatcactgagctaacctaaataaggaaggatttcattttatggactgatattttgctgtgtaacttgttcttcgtaaattgtcatctgcagtgctgcaaagatatgaagaaatatgataacgaataagtgacaccagtactgtagttcataatgagtaggtacaggcgggaaactgaataataagaagtcataatggaatcaaggtgaagctttttataaacttttttagcctaagcaataactggttttgtattttttcttaatccttcactttaatacaataggctcacttaatttgtcttcccatttctctttatatatatatatatatataaaaaaatataaatatatgtttgtttgtttgtttttttaaggaaaaacaagtcaagctagcatccagttactatatagcttggctaaattatacaagacttacaagattgattactcgacaggcttgtatttaagagataactgtgaggttaccattatgtgatgttactataaggacttttaacattggtttaacaaaccatagaggcattgaagggtttttcttagatgcctagaaaaagcacactgggctgttttacctttcttttttaggtcaatcaagactccaaaatagtgattcctaacctttttggagttgctctgctactctgaatatgttctatacagcataaggattgtcaccttctgtgtgttgcaacagcttctaagataattagggacaaatgatgttacaaaaggaagagtactgctggtctaagtgctgagttgtatgtctttgcatagctccactctgctgctaaatatgcatgttctgactgacaccatcttgatgccagtactggattccagcattcagcaggtgcagatctcggctttacacaatttatctttacctagggttcagtcagtaatttctgctttttagcagggccagtgcagggtcagttaatgctacagttactgtatagcaaacagtatccttttttctccttcccctagcctattgggctttgcagatatctggagtgttttaaagtcaattattttaagcagtttgaggggatgtgtaggagtggagcatgaaacagtttataaggctggggctgtattatcagcacagcaaattaaagaatgaaagaagtacttctttttacatttcagctccagcagccagctatttaaaaaatatttttaaatatcttccccaaagtttaagatgtgggaccatctacttgtaagaaacagtggcttatttcttcatttctcagtaatcattgtaaacctttttttttttcttctccactctaacaaaagtaaaagaacaaaacttttgctgaggtcttggactccactacttgttagttatgttggcctggacagatggcaggtctgtcggcagttcctcagtctgtaaaatgaagattatcattcttgcctctccctttgtcacagtgttgtcgtgaagatcagatatgtatgaatgcagtcaaataaactaaaaactaggaaagtgttaactatcgttgcccaccgaatttgaggtagcaaaaaaaaaa

SEQ ID NO: 58659 - DNA, 340 bp, Homo sapiens
cggaaattagaaaagattgtttaacaataatctggaaatggccttgaattattttttcctcattatttttctcgattaacattctacagaatggtaaggaatcgagacattgctaaaaatcttaaatgactgaaggtatcatagcatcttctgtaaaaaagaaaaaaacttcatattaatttcgattcaaaattttggtcataaaacaaaaagttgctcttgctttatactttcagggtgaacctggtctcagaggtgaaattggtaaccctggcatagatggtgctcgtgtgagtataattttgttagtatgtttcttcgtacttggatttttttttag

SEQ ID NO: 58660 - DNA, 2054 bp, Homo sapiens
tccgtgaattgtcagcgcgctgtgggcgactgtgtggccgcggcggccgccaggcttgccgcactccccctgaggtgcccgccggaaccaatgtgccctggtccactgggccgtgagcagccaccgactgggggcaacttggcacttagaaccgcagcagggacgtcggtttgctatcgggactcggcgaggacgatggaaatcctgtatgaatgtggaagccattagcagagtaattgctgtctgttaccatgacaaccagccgctgcagtcacctgcccgaagtcctgccagactgcaccagctcagctgcacccgtggtgaagacggtggaggattgtggcagcctagtgaatgggcagccgcagtatgtcatgcaagtttcagccaaggacgggcagctgctgtcaacagtagtgcggactcttgccacccagagccccttcaatgaccggccgatgtgcaggatctgccacgagggcagcagccaagaggacttgctctctccatgtgaatgtacagggaccttggggacaattcatcggagctgcctggagcactggctgtcatcctcaaacaccagctactgtgaactctgccacttcaggtttgcagtcgagcgcaaacccaggccgttagtggagtggctgagaaaccctggcccccagcatgagaagcggactctgtttggcgacatggtgtgcttcttgtttataactcccctggccaccatctcgggctggctgtgcctgcggggcgccgtggaccacctgcactttagtagtcggctggaagccgtcggactgattgcactcactgtcgcactcttcactatttacctcttttggacactagtgtcatttaggtaccactgtcgattgtacaacgagtggcgtcggaccaatcagagggtgattctcctcattccaaagtctgtcaatgtaccttctaaccagccgtccttgctgggcctccattcggtcaagaggaactcaaaggagacagttgtttgatgtttgtatggttggttggttgtttgattcattgtttggggtttggaagtgtctgcactggggtcatgcactgagcgacccccaagcccttccttaagcctgtgggtctaagaacatccagagcatattagcacatcactccaagcaacaacctccgccagaagaaagcaaatgctgttttacttcaaatgatggatgctgcaatcatatgatatttgctaagctgccaaacatgtttatttagcagatactgtatggaattttctgaacacctctttaacgtatgaggaaggttgtactgctacggatgcaattcaattcttccttttttattactatttcaaacacacacacatatatatatatattaaacttagatgataatcaaaatcaaaaagtcaacgtaaaaactggtttcttggtttggttgggtcttatttgagttagtttgtttctcagtttctcgtatggattctttggggtactttggtagcctgagtggtctttttcatctctttcgcgtccattactcaaggagacagcataacagatgcagaacaagtcatatttgaagaatgttttgtactaaacttcatttaattattcagtttttaaagggaaaaagggcgtgagctcacacagtgagctgtttatttaaatatcattaaggagaaaaaaaaatatggtgagaagctcgctccatttcaacttgtttggtactgacagctgatagaagctattttctaataataaacactccaagtgtgtgaaagacaaaaccccctgattgcaatactctttttttaatgataaaacctgtgaagtttcccaaagcaggttttaaaaggaaaaaaaggaaaagcaaaaaggttgctgttctcactcccatctcatttagtgcatgtcttaattcgggattagtaatgaattggaggatcattagacatttctaggaaccctagacctgttttgcatgtcaattagcattcccattgctctattgaatttctagcttgacaggtagatgtggcaaaaaaaaaa

SEQ ID NO: 58661 - DNA, 1539 bp, Homo sapiens
cgagagggagaggaggaaaactcagagggaagtggcgtggcttcaacagactttcttttgcctgtctttgtcccagagcctcttccctggccctgctgagaccactgctctaagaagagaccaccagactgagagaggactcccagctgccctcagagcggaggccgagtgctgcacagccacagctgctctgaagcccttccatgaatccccggaagaaggtggacctgaaactcattatcgtcggagccattggtgtgggaaagacctccctccttcaccaatatgtgcacaagacgttttatgaggaataccagaccacactgggggccagcatcctctccaagattatcatattgggtgacacaactttgaagttacagatctgggacacgggcggtcaggagcgggtccgctccatggtgtccacgttctacaagggctccgatggctgcatcctagcttttgatgtcaccgacctggagtcttttgaagccctggatatctggcggggtgatgtcctggccaagattgtccccatggagcagtcctaccccatggtgttgttggggaacaagatcgatctggcagaccggaagtaccagagcatcttagaaaatcacctcacagaatccatcaagctctcgccagaccagtcaaggagcagatgctgctgacctccagacgcctgctctggaagcccagaaacagagcctgccccgagcctggtcaccccaggcttgagaacaggtgaccatccccctccagccccactgcctgcccaagcacagtgcagggggcctaagctctgcggcagagcccttgaccctggtgctgggcccagagtcagagggcagcccctggctcaggctgagtatagtgagagcgtctggatgaagcccggaatgtcagagccaaaccctggtcctgcagaagtcacagtttccgcagtggctccagctttccccacccatccacccctcaaacactcccgctccagaacacacatctccgcagaccggccactgattggagtctggttacatcctcctgtggacagaccttcctcacccgctcccacctcacacccctcagccacaagcaaagctttggacaatggcacagctcagcctccttcaacgagcagactaaggagtaaaggtctggaccccacatgctgggcccgcctcagctcctggcagaagctgtcgtgcctgagaccccctctgctccctccagggtagaagactgagggagcacaggagaagccacaagggaccatggctcattcctccttgctgggtgctcaggcaactcacataaatctctgagtctcaatttgtttatctgtcctgtgggggtgagatgtgccttgccccctgtatcacagtgtggttttgaggaccagaagctgtgcttaaatccagtagctgttgtcaatatgcatttatttacttctttgacaagtttatttttgcgtatctactatgtacgatgcattgaagtccagtgacaaacaaaacacagggactctgccct

SEQ ID NO: 58662 - DNA, 353 bp, Homo sapiens
tcggcgtgggtttagaagggcctggcctggagcctaacagagaaatagaaggagcagaaactagaggtggaggaaaatttgctggcagatcctacagggaggaaagagaaaagggaaggatttcagtcctttccataattttgtgactggatgactgaaagaatgcttttaaacatttattaatccatccgtccatgcatctatgcatccatgcatgcatgcatgcatccatccatccatccatccatccatccatccatccatccatccatccatccatccaacattcattgctgctaccgcatggggattctcaatcttataaaaaagagcaactctccctttccctaatg

SEQ ID NO: 58663 - DNA, 733 bp, Homo sapiens
ctggaagagaagatttgaaaagagactggagagaagggtgggagacggacagagccagctgtgccagccgagggaccagagtgggcagtggggacggagcacagaccaccgcccacaagggtctctcctgtgacttctggcttcccgagggcagaggctgggatgggcatgtggcggctggcacccaggaggctccgccaggtccacgccaagccagcctggctcagctctggcttcctgctcacacgctggatgcctgtccccaggcctcctgacagggctctgcagcattggagaggcttgtggtggggccctcgctgtagaacaggcactgccagtgctcactgactcctcattgcagccagggcaggggcgctcccaccacctcggtttcagtcaggaagctggggggtgctgggatctgccagcagctctgtgtgctccccaggtgggctgcccggggccctggctctctggcttctacaccagtgcccctgcgaagcctcagcgcccaaggtctttgcaagccctgttcctgcatctctggagagggctgctccaggtgtgggcctggccagggcttccagaccagtccaggcactgcacctgcacattgacccccttctccactctctctcatccttcagtagccacaaagctggcagcagggtactcgcagatttgtgaggagagccgagcccttgctgactgtcctcccgtgcacggcagagtg

SEQ ID NO: 58664 - DNA, 2518 bp, Homo sapiens
caaaaggggacccacgagaattcatcagagtccatcgtgaggctttggagtgtgattacgtgagtgcccatctacatgagtggattgacttaatcttcggttataaacagcaaggccctgctgcagtagaagctgtaaatgtcttccatcatcttttttatgagggtcaagtggatatctacaacatcaatgacccactaaaggagacagccacaattgggttcattaataacttcggtcagatccctaaacagttatttaaaaaacctcatccaccaaagcgagtgagaagtcgactcaatggagacaatgcaggaatctctgtcctaccaggatctacaagtgacaagatcttttttcatcatctagacaacttgaggccttctctaacacctgtaaaagaactcaaagaacctgtaggacaaatcgtatgtacagataaaggtattcttgcggtggaacagaataaggttcttatcccaccaacctggaataaaacttttgcttggggctatgcagacctcagttgcagactgggaacctatgagtcagacaaggccatgactgtttatgaatgcttgtctgagtggggccagattctctgtgcaatctgccccaaccccaagctggtcatcacgggtggaacaagcacggttgtgtgtgtgtgggagatgggcacctccaaagaaaaggccaagaccgtcaccctcaaacaggccttactgggccacactgataccgtcacctgcgccacagcatcattagcctatcacataattgtcagtgggtcccgtgatcgaacctgtatcatttgggatttgaacaaactgtcatttctaacccagcttcgagggcatcgagctccagtttctgctctttgtatcaatgaattaacaggggacattgtgtcctgcgctggcacatatatccatgtgtggagcatcaatgggaaccctatcgtgagtgtcaacacgttcacaggtaggagccagcagatcatctgctgctgcatgtcggagatgaacgaatgggacacgcagaacgtcatagtgacaggacactcagatggagtggttcggttttggagaatggaatttttgcaagttcctgaaacaccagctcctgagcctgctgaagtcctagaaatgcaggaagactgtccagaagcacaaatagggcaggaagcccaagacgaggacagcagtgattcagaagcagatgagcagagcatcagccaggaccctaaggacactccaagccaacccagcagcaccagccacaggccccgggcagcctcctgccgcgcaacagccgcctggtgtactgacagtggctctgacgactccagacgctggtccgaccagctcagtctagatgagaaagacggcttcatatttgtgaactattcagagggccagaccagagcccatctgcagggcccccttagccacccccaccccaatcccattgaggtgcggaattacagcagattgaaacctgggtaccgatgggaacggcagctggtgttcaggagtaagctgactatgcacacagcctttgatcgaaaggacaatgcacacccagctgaggtcactgccttgggcatctccaaggatcacagtaggatcctcgttggtgacagtcgaggccgagttttcagctggtctgtgagtgaccagccaggccgttctgctgctgatcactgggtgaaggatgaaggtggtgacagctgctcaggctgctcggtgaggttttcactcacagaaagacgacaccattgcaggaactgtggtcagctcttctgccagaagtgcagtcgctttcaatctgaaatcaaacgcttgaaaatctcatccccggtgcgtgtttgtcagaactgttattataacttacagcatgagagaggttcagaagatgggcctcgaaattgttgaagattcaacaagctgagtggagaccatggtctgtagaccccttcccgattctcctgtcccagcttggaaggcattgaaaacagtctccgtttacacatctcttcataccacgtgtttgaagtgttaaaattcaaagggatcattgaataaaacgggtgtagagtacaggaatggggcagacgcgattcaggtgaacagcacaagaagaatatgaggtggttcctaggagcaacactttcgaccctccagttctcccgtgatgacagtagctgtctccaagagaaaaatcctcacttattaactctcttttcttgcatctcatttttaaaggagctactcatccttatttggaaaaaccaacaacaaaaaaggcttttagaaaatggttgtaaatctgacttctttgcaagtaactatgtatattgtaaataggatataaaaaggcctttttttctaaataaggacttaactgcctgtaacatgaaacttcaaactaaaccactaactcaatgaactacttatggtttgtctgacatccctcaacttaccaattaattataaatatgtttttttaaatccccaaa

SEQ ID NO: 58665 - DNA, 2553 bp, Homo sapiens
cccacgcgtccggacccacgcgtccggtttcttggagcttccacaaacttaaaaccatgaaacatctattattgctactattgtgtgtttttctagttaagtcccaaggtgtcaacgacaatgaggagggtttcttcagtgcccgtggtcatcgaccccttgacaagaagagagaagaggctcccagcctgaggcctgccccaccgcccatcagtggaggtggctatcgggctcgtccagccaaagcagctgccactcaaaagaaagtagaaagaaaagcccctgatgctggaggctgtcttcacgctgacccagacctgggggtgttgtgtcctacaggatgtcagttgcaagaggctttgctacaacaggaaaggccaatcagaaatagtgttgatgagttaaataacaatgtggaagctgtttcccagacctcctcttcttcctttcagtacatgtatttgctgaaagacctgtggcaaaagaggcagaagcaagtaaaagataatgaaaatgtagtcaatgagtactcctcagaactggaaaagcaccaattatatatagatgagactgtgaatagtaatatcccaactaaccttcgtgtgcttcgttcaatcctggaaaacctgagaagcaaaatacaaaagttagaatctgatgtctcagctcaaatggaatattgtcgcaccccatgcactgtcagttgcaatattcctgtggtgtctggcaaagaatgtgaggaaattatcaggaaaggaggtgaaacatctgaaatgtatctcattcaacctgacagttctgtcaaaccgtatagagtatactgtgacatgaatacagaaaatggaggatggacagtgattcagaaccgtcaagacggtagtgttgactttggcaggaaatgggatccatataaacagggatttggaaatgttgcaaccaacacagatgggaagaattactgtggcctaccaggtgaatattggcttggaaatgataaaattagccagcttaccaggatgggacccacagaacttttgatagaaatggaggactggaaaggagacaaagtaaaggctcactatggaggattcactgtacagaatgaagccaacaaataccagatctcagtgaacaaatacagaggaacagccggtaatgccctcatggatggagcatctcagctgatgggagaaaacaggaccatgaccattcacaacggcatgttcttcagcacgtatgacagagacaatgacggctggttaacatcagatcccagaaaacagtgttctaaagaagacggtggtggatggtggtataatagatgtcatgcagccaatccaaacggcagatactactggggtggacagtacacctgggacatggcaaagcatggcacagatgatggtgtagtatggatgaattggaaggggtcatggtactcaatgaagaagatgagtatgaagatcaggcccttcttcccacagcaatagtccccaatacgtagatttttgctcttctgtatgtgacaacatttttgtacattatgttattggaattttctttcatacattatattcctctaaaactctcaagcagacgtgagtgtgactttttgaaaaaagtataggataaattacattaaaatagcacatgattttcttttgttttcttcatttctcttgctcaccaagaagtaacaaaagtatagttttgacagagttggtgttcataatttcagttctagttgattgcgagaattttcaaataaggaagaggggtcttttatccttgtcgtaggaaaaccatgacggaaaggaaaaactgatgtttaaaagtccacttttaaaactatatttatttatgtaggatctgtcaaagaaaacttccaaaaagatttattaattaaaccagactctgttgcaataaaaaaatatagttttaaaagtggacttttaaacatcagtttttcctttccgtcatggttttcctacgacaaggataaaagacccctcttccttatttgaaaattctcgcaatcaactagaactgaaattatgaacaccaactctgtcaaaactatacttttgttacttcttggtgagcaagagaaatgaagaaaacaaaagaaaatcatgtgctattttaatgtaatttatcctatacttttttcaaaaagtcacactcacgtctgcttgagagttttagaggaatataatgtatgaaagaaaattccaataacataatgtacaaaaatgttgtcacatacagaagagcaaaaatctacgtattggggactattgctgtgggaagaagggcctgatcttcatactcatcttcctcattgagtaccatgaccccttccaattcatccatactacaccatcatctgtgccatgctttgccatgtcccaggtgtactgtccaccccagtagtatctgccgtttggattggctgcatgacatctattataccaccatccaccaccgtcttctttagaacactgttttctgggatctgatgttaaccagcccacgcgtccgcggacgcgtggg

SEQ ID NO: 58666 - DNA, 538 bp, Homo sapiens
cgctctcctttcgttgcctgatcgccgccatcatgggtcgcatgcatgctcccgggaagggcctgtcccagtcggctttaccctatcgacgcagcgtccccacttggttgaagttgacatctgacgacgtgaaggagcagatttacaaactggccaagaagggccttactccttcacagatcggtgtaatcctgagagattcacatggtgttgcacaagtacgttttgtgacaggcaataaaattttaagaattcttaagtctaagggacttgctcctgatcttcctgaagatctctaccatttaattaagaaagcagttgctgttcgaaagcatcttgagaggaacagaaaggataaggatgctaaattccgtctgattctaatagagagccggattcaccgtttggctcgatattataagaccaagcgagtcctccctcccaattggaaatatgaatcatctacagcctctgccctggtcgcataaatttgtctgtgtactcaagcaataaaatgattgtttaactaaaaaaaaaa

SEQ ID NO: 58667 - DNA, 1987 bp, Homo sapiens
ccttttttttttttttaacatcaaatttggtttatttcaagtttgtaacaaaatatattctaggcaacttttcagacattgttttatagcatcataaaccccataccactgctgtcattccaaaagctgccaggacactggaagttatcaagtggtccagcccaggaatacaggtagaattcacatgataggtgataagaaagcaatgtctgtgggccactctgatccctctttttaccttggtaggtaaggtatgatcttaagactatatgtactgagtcctattagtcagtgaaaaagattaaagtgacaagttatgtgctttgttcctatagctttgaagttcatccacctcaccagcaattggaaggtctcaggtcttgcaggctctacccatgtgtaatcctggggcaggtgtgaatcttgatttttttaagagattactcaagggagagaacaacagaaacggaagccatgagtactgccccaattctagattaggttagaggttagaataaattaactaatggggagtggtagtgggtagcagtcagacccaggagacagatttgtgtggtttcctgatctcagcaaggtctaaggaaaaaagcctccccgcccccccaccttaaatagtggcatcaagtcatgaaggccagtgaaacgtggttagtctcgtaaaatgacttccagttcttccaggtccttctggatagccaaatcctccttcgtgacatctggcagctccagggccaacttcatccaccatctagcttcagagtttttccctagttctctgtagcacttggaaatatatacccttcctgctttggaaaatcctggctgtagttcttcagcctttaggaagctctggagggcatcttccacagtggcactgagagggctttcaagcaaggctgtagcagtttttttttctagccagctcaggtgagagacctgatagcaccacctgccaagaagaaagtgagccatggggttttctggctggagagcaatggctttgtccacatgctccttgaagctaaagccactctggatgcgcctctggatgctctcatgctcagccagctgaccacaaagcaccgcataccacaggtgacagtcagcactctcatcccccttctccagagcagcctctgcttcttcttttccatctagggcatatgacttcttctcgctcacctcctcagtgagctcacacatgtcactgtaggctcgggccaggcgccagagaaagtcctgccggcttccatacaccagcttgttgttgagcagcagctggaagccctcccgcttgccttgctcatcacccctgtgcagctcgtcggcctgctgcaggaggggcagcacatcctccaagcctgaggaacctccagcctccagggcactggaggcacctgaagctgcctcttcctccaagtcaagagaatcctttctccccatcttcacagtctcacagctcacttcatcttccccgtcctcactttctttgtcagagtcccgctcattgtcagactccgcattggctgttgtgtaacccccttcactctcagcatctgtgaacgtggctcccgaggaggccgtgaagtagacagagctggagccagtggagtcactcctctcccggacaaacggaaaccttcgccgccgagccactctctggttctcttccatgtggcatctggaaagcaggccccatcccgaagggtaccattaggtcccatccagcttgtctttctgctcaccatggggtgcctcttactactgctcctcattaaagggctaaaagcagagaaaatcctaagtctctaaccctcaggagggcaagcagggcagcttcctgggcccagcccgcacagacagactaggttaggcaaacagagcgcttcagctgctacaacagatcaaccatgagagtccagaagcagcaaggagcatgtgcaaggcgaggtaccaaatgtacagc

SEQ ID NO: 58668 - DNA, 1789 bp, Homo sapiens
gtcggaaagggaaaacaactacggctgcggtgtggttggtggtgagatgacgaccttagtgctggataatggagcttacaacgccaaaatcggttacagccatgaaaatgtgtcggttattcctaattgtcagttccggtcaaaaacagcacgtcttaaaacttttactgccaaccagatagatgaaataaaagacccttctggactcttttacatcctcccttttcaaaagggctacttggtgaattgggatgttcagagacaagtttgggattacctttttggaaaagaaatgtatcaggttgattttttagatactaatattattatcactgaaccatactttaacttcacttcaattcaagaatcaatgaatgaaattctatttgaagaataccagtttcaagcagtattaagagtaaatgctggggctctcagtgcacataggtatttccgagataatccttccgaattatgctgtatcattgttgatagtggatattcctttacacatatagttccttattgtagaagtaaaaagaaaaaagaagcaattattcggataaatgtgggaggaaaactcttaaccaatcatctaaaggagatcatatcttacaggcagctacatgttatggatgaaacacatgtgattaatcaagtgaaagaagatgtatgctatgtgtctcaggatttttatagagacatggatattgcaaagttgaaaggagaagaaaatacagtaatgatagactatgtcttgcctgacttcagtacaattaaaaagggcttttgtaagccaagggaagagatggtgttgagtggaaaatacaaatctggggaacaaattcttcgtttggccaatgagagatttgctgttccggaaatactctttaatccttctgatataggcattcaagaaatgggaattccagaagctattgtctattcaattcaaaatctacctgaagaaatgcagccgcatttttttaagaacattgtcttgacaggaggaaattcccttttcccaggatttagggatcgggtttactcagaagttcgatgtcttactccaacagattatgatgtttctgttgtgctgcctgaaaaccctattacttatgcctgggaaggtggaaaattgatatcagagaatgatgattttgaagatatggtggtaacaagagaagattacgaagaaaatggacatagcgtctgtgaagagaaatttgatatttaaggcaacatttttggaatgaaagttgtgaccataaggtttaatttcaaagttccttttaaaagaggttaagggaactgtgttaccttttgtcctaaggaaaaagggcttgaatttatgttaaatactttgatccgattgctaattttcaaaggcttcttaggtaggttactacagtaaactgtaactcagtccacattttcatttaggagctagactaccataacaatgcttatgctgtttccaagggtaggttatttttcattaaaagaagaactgaatgccttttaaagtttaaattcttcatagcctgaaagccacaaactttaacggctctcacctggacacgtttctccttagaaggctagttcttgtgtgactgtgactaaactattttctattttaaaactgtcattctctattatatacattcctaaagtctggaaacgactgtattcttatcatgtgtatcaatgttatattttgtacctagagtacatttaaaagggtggagcactaagctaataaagtttttttggcccctaaaaaaaaaaa

SEQ ID NO: 58669 - DNA, 1646 bp, Homo sapiens
ggcacgagccgcggcgcattgtgggatctgtcggcttgtcaggtggtggaggaaaaggcgctccgtcatggggatccagacgagccccgtcctgctggcctccctgggggtggggctggtcactctgctcggcctggctgtgggctcctacttggttcggaggtcccgccggcctcaggtcactctcctggaccccaatgaaaagtacctgctacgactgctagacaagacgactgtgagccacaacaccaagaggttccgctttgccctgcccaccgcccaccacactctggggctgcctgtgggcaaacatatctacctctccacccgaattgatggcagcctggtcatcaggccatacactcctgtcaccagtgatgaggatcaaggctatgtggatcttgtcatcaaggtctacctgaagggtgtgcaccccaaatttcctgagggagggaagatgtctcagtacctggatagcctgaaggttggggatgtggtggagtttcgggggccaagcgggttgctcacttacactggaaaagggcattttaacattcagcccaacaagaaatctccaccagaaccccgagtggcgaagaaactgggaatgattgccggcgggacaggaatcaccccaatgctacagctgatccgggccatcctgaaagtccctgaagatccaacccagtgctttctgctttttgccaaccagacagaaaaggatatcatcttgcgggaggacttagaggaactgcaggcccgctatcccaatcgctttaagctctggttcactctggatcatcccccaaaagattgggcctacagcaagggctttgtgactgccgacatgatccgggaacacctgcccgctccaggggatgatgtgctggtactgctttgtgggccacccccaatggtgcagctggcctgccatcccaacttggacaaactgggctactcacaaaagatgcgattcacctactgagcatcctccagcttccctggtgctgttcgctgcagttgttccccatcagtactcaagcactataagccttagattcctttcctcagagtttcaggttttttcagttacatctagagctgaaatctggatagtacctgcaggaacaatattcctgtagccatggaagagggccaaggctcagtcactccttggatggcctcctaaatctccccgtggcaacaggtccaggagaggcccatggagcagtctcttccatggagtaagaaggaagggagcatgtacgcttggtccaagattggctagttccttgatagcatcttactctcaccttctttgtgtctgtgatgaaaggaacagtctgtgcaatgggttttacttaaacttcactgttcaacctatgagcaaatctgtatgtgtgagtataagttgagcatagcatacttccagaggtggtcttatggagatggcaagaaaggaggaaatgatttcttcagatctcaaaggagtctgaaatatcatatttctgtgtgtgtctctctcagcccctgcccaggctagagggaaacagctactgataatcgaaaactgctgtttgtggcaggaacccctggctgtgcaaataaatggggctgaggcccctgtgtgattttgaaaaaaaaaa

SEQ ID NO: 58670 - DNA, 2154 bp, Homo sapiens
tcaagatgccttctcacctgtgtgaatgttcttatggcgattaagctgggtgggaagactaaaaacctttccacattccttacattcaaagggtttctcaccagtatgcaatttctgatgtcgaataagttgcatatgaagtcgaaaggctttcccacactccttacattcaaagggtttctcaccagtatgcaatttctgatgtcgaataaggtgcatatgaagtcgaaaggctttcccacattccttacattcaaagggtttctttccagtatgaatacttcgatgttgattaagatttgaaccacgacgaaagaatttcccacattccttacattcaaatggtttttcacctgtgtgagttttctgatgttgggaaagttgtaggtaaagtctaaaagccttcccacactccttacattcatagggcttctcaccagtgtgaatactctgatgttgaacaaggcttgagccacgattgaaggccttcccacagtcttgacattcaaatggcttgtcaccagtatgaattcgagaatgttcaataagttggcaatgatatctaaaggccatctcacattccctacatacaaaaggtttctcattggaatgaattttctgatgctgaataaggtgtgcaccacgattaaagcctttcccacactccttacattcatatggttttataccagcatgaatactctgatgttgaacaaggtttgagctacgattaaaggacttcccacattccttacattcaaacggtttttcacctgtgtgaatgttcttatggcgattaagctggttgagaagactaaaggccttcccacattccctgcattcaaagggtttctcaccagtatgaatcttctgatgtcgaacaagctttgtcagaagagtaaacgcctttccacattctttacattcaaagggtttctcaccagtatgaatttggcaatgttcaataagttggtaatgatatcgaaaggccatcccacattccttacatacaaagggtttctcattggaatgaattttttgatgctgaataagatttgaaccacgattaaaggctttcccacactccttacattgatatggttttacaccagcatgaatactttgatgctgagtaaggtttgagctacgattaaaagacttcccacattccttacattcaaacagtttcttaactgtgtgaatgttcttatggcgattaagctgggtgggaagattaaaggcttttccacattccttacattcaaaagttttctcaccagtatgaaatttctgatgtcgagtaagttgtatgtgaagttgaaaggctttcccacattctttgcatttatagggtttctctccagtatgaatactctgatgctgaataagatttgaaccacaactaaagtatttcccacattccttacattcatacggtttatgtgtattgcaaataagagaagcatgaggagtatgagtaggcagtttttcatagctgatcatcttttgattgatatttccttcttgatatccctgtagtccctcaaattgtctatattctgagtcatttctaaaataaaaggcctcaatgccaagagttgtacttatttgctttataacctgtttgggtaaatttacttcagaggtatcattttctggagatactttctcaggtccatattttaactccaaatctggataccgtctgcttgtttctttccttacaaccatccagggctctttctcttgctctagtaacgtaattacatctggtttagaaatggaacttcctgccagtgagatcaggtggctgtagttctccaacatcacatccctgtacaaggtcctctgatcaggctgcaggcactcccactcctcctgagagaagtcaatggccacatccctgaatgtcactgatccatggaccatgttgctagaattacaaaactggtcaatcttcctcgggcttctcccccttgactttaggtgtgcagcagtaacgctctcatcctcctccaggtccttcttttggataaaaatacgagcctggggatccggcagatcccgtctgcacccccgggttcctactctgagcgcctccccctaggccacccgcactgtcgggtcagtcagctggagccccaatccgcagag

SEQ ID NO: 58671 - DNA, 1913 bp, Homo sapiens
ttttttttttttggagaaaattataaactttattgaaagatatttcaaaggcctaagtaaatgaagagctgtaccatattcatgtattggaagacaacattgtaaagatgacatggtttaccagattaatctataaattcaatacaaatccaatcaaaatttcaatgctcttgggtttgtttgatttataaattgttggtctaattctagaagtaatatggaggaacagttggctaagaatagccaagacactccaaggaagaacaattttgtggtgatactggagacagaggtgaaattggttacaattatgacaaaatgtggaggcatcttggtttttatcagaccttttcctaaagttgcagtaatcaggactgtactgtactgctacaagattagacaaattgatgtcagtcagaatagaaaccatcaaaagacccacacacatacacaaaaatttaatttatgaaagaggcagtgttacaaatcactggggaaaggatgaacttttcagtaaatagtgcagagacaaccacttcgaatatgaaaaatgttaagttgaatttctaactcataattttcacaaaaatcagttcaggacagactaaagacaaatgtgaaaggcaaaactataaaatttccacaaggcagtaaagaatatatttatgactttgggtaggaaaggatctccccccaaaccaatttgtattcagctttatatgatactttttaaaaacatttactttcagcaggaaataggcaacaatctataacattttacaatttccaaactcccctcctccaaaagtcaccgtaaaagttaacaagatatgtcgttgctgttttgaacaagaaagattttcagagagggtggacacttcacatgaggcatgtatgagcttttctcaggcccactttgacatggagggactaaagtaaaaccagcaggatgaatccacaaactgaaaacaggaatcttggctcttttaagtgacaccatctcgatgtcatcaacagaaagcctgagttttgttacctaacacagctgattttagggttgccaaggccacatcaaaactctcggtttaaggaagtcaagtctatgctgatggcatcggggaaagaggagacacgaagttttggttccccacactgtaaggcttccgtgccaaagtggctgacacgtgaatgtcagagaatctctcctgggaatcaagggaatcaagaacaatcttcaaaaaccaggacagaaaatcctattttcccttatttcaattcagtttctgagatacaccctattagtggtacttgccctttccacaaaagacaacaaggaagtgtcctgtgtgctaacaacataacttaaaaaagccaaaattctacacttttataaaacttgatttaaaaaaatagtatttcaaacagtagagtcactataagtacagagctctcaaaaatgtacatttcacttggcatccccagtgccttccgctttctgggactggagtgtagaggcatctcggttttttgcagggttgttcccatcctttccagcatctgctttcccctttctccctttgggaagcttctctcccttctttgcagaggcctttttaggcctgggctctggttttggaggagctggtttagcagacaaccgagctgatctcctctgtggctcatccttcacctttgctttatcacctttagcatctccttttgcctttctcttgggcatggtagcagcagtgttcgcaggtggcttgagcagtcctgttgggtgcttctgtcctcctcacgctgttcctggaaagatgtccgagtctcgtggccgtccgaggggcgcgggaatcccagctgaggcccgtgacgcgccggagccctaggcgtgggcagggccagcaccagcccta

SEQ ID NO: 58672 - DNA, 1682 bp, Homo sapiens
ggcccgctccaacatcagaatggtaacagctttcaggagcctaccagccggcagctccggagctgcccgcgccatgtccgcgcacaatcggggcaccgagctcgaccttagctggatctccaaaatacaagtgaatcacccggcagttctgaggcgtgcggaacaaatccaggctcgcagaaccgtgaaaaaggagtggcaggctgcttggctcctgaaagctgttacctttatagatcttactacactttcaggtgatgatacatcttccaacattcaaaggctctgttataaagccaaatacccaatccgggaagatctcttaaaagctttaaatatgcatgataaaggcattactacagccgccgtttgtgtttatcccgcccgggtgtgtgatgctgtaaaagcactcaaggctgcaggctgtaatatccctgtggcatcagtggccgctggatttccagctggacagactcatttgaagacacgattagaagagatcagattggctgtggaagatggagctacagaaatcgacgtggtaattaacagaagcttggtgctgacaggccagtgggaagccctgtatgatgagattcgtcagtttcgcaaggcctgtggggaggctcatcttaaaactatattagcgacaggagaacttggaactcttactaatgtctataaagccagtatgatagcaatgatggcaggatcagattttattaagacctctactggaaaagaaacagtaaatgccaccttcccggtagctatagtaatgctgcgggccattagagatttcttctggaaaactggaaacaagatagggtttaaaccagcaggaggcatccgcagtgcaaaggattcccttgcttggctctctcttgtaaaggaggagcttggagatgagtggctgaagccagaactctttcgaataggtgccagtactctgctctcggacattgagaggcagatttaccatcatgtgactggaagatatgcagcttatcatgatcttccaatgtcttaaatcagtcaccagttccagaaaagttctttacgacaatgtttaaaaattatttttctacgtaattgctaaaattatttaattaaaaaattgggcagtaggtaactggcattcctctctttaaaatttctaccgaacttaatggaatggaaaaagcaaactcatccacatgtggtactcatttcaggcacatctgaaatgatcttaattactagaagatctgcactattaactttgtgaagagtttctcctaaaaactttaagtaaaatgttaatggtagctttgataacatcaaattctaagggagaaaaaaacaatattaaaccgccccaagcagtgtgccctagcagagggaaaatgcaacatctcgcaagcgctgctgtaacggacttcagggagtcactgattcaggcactaatttccctgctgtggaaaactcatcttttcatttttggcccgtgggatagggcgcttttattaattgttggtccctaatgaaatttctggacattgtcatatacaacgatgaatatcattaaaatttttaaaataataaagttcctatagtttatttttttaaaaaaacttaaaaattgttacaatacataatgaaaaaataatccattaaacataaaaagaggtttgatcaaaaaa

SEQ ID NO: 58673 - DNA, 699 bp, Homo sapiens
ttttttttttttaaagttttcatctttaatgaaatgactttggaaataacgtacattcccatgacaccaatactacagttttcggagtcacagtaagatacacagaattacatccgtaattaatatgaatgccaacatgtcaagcagtaatttgttacatggcaaacaaaatcaagaaagcaaccatcaaacaaaagagacccatagcttcagacaaggcaaatcccaggatagcatatgagaacagctgctgcttcagcgaagggtttctggcataaccaatgataaggctgccaaagactgttccaataccagcaccagaaccagccactcctactgttgcagcacctgcaccaataaatttggcagcagtatcaatgtctctgctgattgcactggtctgaaactccctttggattagctgagacacaccattctgggccccattaaataccgtagagccctctccagtcctactagcctctggtcgagataacactgatgcagaaattggtctgtatgcaactctggatccagctcggatcagagagggggtgcaggcgagcttggcgcaggcgaacatcttacactcttcgggactgcgcggctggagatattgggtgacaggcgacgtgggctcctctcccgcttcctctcttcccaggaggcggcggcggcacgggctgcagcagaggtcga

SEQ ID NO: 58674 - DNA, 736 bp, Homo sapiens
ttttttttttttaactgaaagagttgacaattttattttcacatttcccaatacaaaggaaaactgcatcttttttgtcccacttctcccctccaaaactattctctttcataggacaggggagcaagtcttccttatgctgtttagaaaactcagtatcacagcagcatgatctcctggtgaagcagaacaggtaatataaaaccgatacaataaggcctcccctctatccttatctgtctggtcgagtcattccgggccgagtgggcaccatcatgggacgggcaggaggtctcatcattgggggcccaggcatcattggcatatggcctcccatgggcggcctcattccaggagcaggtcccactggcatcatcccaggaggaggagggcccatcattggcatcatgggagggccccccatatggggtgctggcatcataccagggcgaggaggacccggaaggctggggggaggtggtatcatcgcccctgcaggaggaggagcagagaatggagtaggaggtatctttccttgttgaaatgcagccgttgttttgtcaatcaggctctgagcctgctcttccatccatttctgataatagtctttcacattctctttgtgtttccttccactgcagtgtgtctttctcacagatggagagtcatgggtgaggtatgtatcgcagtagtcacaataaaacttgggcatgttgctctgcaggccgttggccac

SEQ ID NO: 58675 - DNA, 1535 bp, Homo sapiens
ttttttttttttatgttttcaggttttttaatgactgacaaaatattcctaaatcaaccttttataaaaaaaaaaaaataaatatgtttcatctgaattcacaaagacaaaccctgctgcaaatactaagtacaaattattctggactgggacatggcaaatctgatttagtacaaattcagtttttaaaaggaccctctttccaaatagtgttcttatgtaacatttaatttttatgcctattatttcaatgacacacctagtttttgcttttctaagcactgttccctacatttttaaagcatattttatttcagagtgcaacagaaactagcttgtggcctattaagctactaggaagagcatcgtttatgccactgtatgccttcttaggccatttatcatttctctacacttgattgctcactggctattcaaaattggaatgtgatacagcagttctgtctgaacgtgtaccaacctgaaactcacatggctaaacaattatggctaaactatttttgttaccaattttaaatattgttaaagaattctcaaaggagtaaggttaatgagcaagattaaaatggcagcagcagatccaattgcgttttctttttcataagcctaaaagcatcgcggtgtgtttcagagctgcttcctctacaaattctgcatccacattgtcatgtccttcaaaaggatacagggcttgattggaggactctatatctgtcagaatttcaatgaagtagttcagaggcagaaattctacactgaacgatgacttgttaatcatagaattccgaggctgtttcttatagttctgaagcagtcgcgtcacgtggttccgcgaaatgatgttagaactcataggatgatcccaaagtctacaaatcttctgcccaataagcggaggaagccgcacaatgatactgaatttcagtttttcatttttctctgtattatccagatctttcatgagccttatgacagctgtttcagtgagaagcaacactccactgtcaatgcaatgcagcaggttatgcaaagggagacactggaccccgaggatggtgtgcagagtatgaaaaccaggaggcagaggtaaaaacaaactgtttgtagcttccagaatcctggtcatgatgtgaaaaactgcaaattcagcagcactgccacgactattgaagtggagaacccaggaatgaagattatgtttcctccaattggtttctacgatgtggcaaatgagatccagcagttttgaaatgtagtccagaaccatctgttcaattttcttcttttctacaccctgtaggtgtctcaaaaaatggtcttttagctcagacaccatcagccccatgagcagccgctggtggctgtcttcctcctgcaggaggggtgttaatcttggccccaaatttcttgcttctaggttagaaatcacctgttctgcattatcaagaatattcctcacgtaagccgcagaccttctttttcctgttttctaggagtgagcggacgcgtgcgtc

SEQ ID NO: 58676 - DNA, 984 bp, Homo sapiens
  misc_feature (1)...(984): n = a,t,c or g
gtcgtgaggcgggccttcgggctgngctcgccgtcggctgccggggggttggcctgggtgtcattggctctgggaagcggcagcagaggcagggaccactcggggtctggtgtcggcacagccatggcgggcgcgttggtgcggaaagcggcggactatgtccgaagcaaggatttccgggactacctcatgagtacgcacttctggggcccagtagccaactggggtcttcccattgctgccatcaatgatatgaaaaagtctccagagattatcagtgggcggatgacatttgccctctgttgctattctttgacattcatgagatttgcctacaaggtacagcctcggaactggcttctgtttgcatgccacgcaacaaatgaagtagcccagctcatccagggagggcggcttatcaaacacgagatgactaaaacggcatctgcataacaatggaaaaggaagaacaaggtcttgaagggacagcattgccagctgctgctgagtcacagatttcattataaatagcctccctaaggaaaatacactgaatgctatttttactaaccattctatttttatagaaatagctgagagtttctaaaccaactctctgctgccttacaagtattaaatattttacttctttccataaagagtagctcaaaatatgcaattaatttaatactttctgatgatggttttatctgcagtaatatgtatatcatctattagaatttacttaatgaaaaactgaagagaacaaaatttgtaaccactagcacttaagtactcctgattcttaacattgtctttaatgaccacaagacaaccaacagctggccacgtacttaaaattttgtccccactgtttaaaaatgttacctgtgtatttccatgcagtgtatatattgagatgctgtaacttaatggcaataaatgatttaaatatttgttaaatgagtatgattaaaaaaaaaa

SEQ ID NO: 58677 - DNA, 3612 bp, Homo sapiens
ggcgaatggagcaggggcgcgcagataattaaagatttacacacagctggaagaaatcatagagaagccgggcgtggtggctcatgcctataatcccagcacttttggaggctgaggcgggcagatcacttgagatcaggagttcgagaccagcctggtgccttggcatctcccaatggggtggctttgctctgggctcctgttccctgtgagctgcctggtcctgctgcaggtggcaagctctgggaacatgaaggtcttgcaggagcccacctgcgtctccgactacatgagcatctctacttgcgagtggaagatgaatggtcccaccaattgcagcaccgagctccgcctgttgtaccagctggtttttctgctctccgaagcccacacgtgtgtccctgagaacaacggaggcgcggggtgcgtgtgccacctgctcatggatgacgtggtcagtgcggataactatacactggacctgtgggctgggcagcagctgctgtggaagggctccttcaagcccagcgagcatgtgaaacccagggccccaggaaacctgacagttcacaccaatgtctccgacactctgctgctgacctggagcaacccgtatccccctgacaattacctgtataatcatctcacctatgcagtcaacatttggagtgaaaacgacccggcagatttcagaatctataacgtgacctacctagaaccctccctccgcatcgcagccagcaccctgaagtctgggatttcctacagggcacgggtgagggcctgggctcagtgctataacaccacctggagtgagtggagccccagcaccaagtggcacaactcctacagggagcccttcgagcagcacctcctgctgggcgtcagcgtttcctgcattgtcatcctggccgtctgcctgttgtgctatgtcagcatcaccaagattaagaaagaatggtgggatcagattcccaacccagcccgcagccgcctcgtggctataataatccaggatgctcaggggtcacagtgggagaagcggtcccgaggccaggaaccagccaagtgcccacactggaagaattgtcttaccaagctcttgccctgttttctggagcacaacatgaaaagggatgaagatcctcacaaggctgccaaagagatgcctttccagggctctggaaaatcagcatggtgcccagtggagatcagcaagacagtcctctggccagagagcatcagcgtggtgcgatgtgtggagttgtttgaggccccggtggagtgtgaggaggaggaggaggtagaggaagaaaaagggagcttctgtgcatcgcctgagagcagcagggatgacttccaggagggaagggagggcattgtggcccggctaacagagagcctgttcctggacctgctcggagaggagaatgggggcttttgccagcaggacatgggggagtcatgccttcttccaccttcgggaagtacgagtgctcacatgccctgggatgagttcccaagtgcagggcccaaggaggcacctccctggggcaaggagcagcctctccacctggagccaagtcctcctgccagcccgacccagagtccagacaacctgacttgcacagagacgcccctcgtcatcgcaggcaaccctgcttaccgcagcttcagcaactccctgagccagtcaccgtgtcccagagagctgggtccagacccactgctggccagacacctggaggaagtagaacccgagatgccctgtgtcccccagctctctgagccaaccactgtgccccaacctgagccagaaacctgggagcagatcctccgccgaaatgtcctccagcatggggcagctgcagcccccgtctcggcccccaccagtggctatcaggagtttgtacatgcggtggagcagggtggcacccaggccagtgcggtggtgggcttgggtcccccaggagaggctggttacaaggccttctcaagcctgcttgccagcagtgctgtgtccccagagaaatgtgggtttggggctagcagtggggaagaggggtataagcctttccaagacctcattcctggctgccctggggaccctgccccagtccctgtccccttgttcacctttggactggacagggagccacctcgcagtccgcagagctcacatctcccaagcagctccccagagcacctgggtctggagccgggggaaaaggtagaggacatgccaaagcccccacttccccaggagcaggccacagacccccttgtggacagcctgggcagtggcattgtctactcagcccttacctgccacctgtgcggccacctgaaacagtgtcatggccaggaggatggtggccagacccctgtcatggccagtccttgctgtggctgctgctgtggagacagggcctcgccccctacaacccccctgagggccccagacccctctccagggggggttccactggaggccagtctgtgtccggcctccctggcaccctcgggcatctcagagaagagtaaatcctcatcatccttccatcctgcccctggcaatgctcagagctcaagccagacccccaaaatcgtgaactttgtctccgtgggacccacatacatgagggtctcttaggtgcatgtcctcttgttgctgagtctgcagatgaggactagggcttatccatgcctgggaaatgccacctcctggaaggcagccaggctggcagatttccaaaagacttgaagaaccatggtatgaaggtgattggccccactgacgttggcctaacactgggctgcagagactggaccccgcccagcattgggctgggctcgccacatcccatgagagtagagggcactgggtcgccgtgccccacggcaggcccctgcaggaaaactgaggcccttgggcacctcgacttgtgaacgagttgttggctgctccctccacagcttctgcagcagactgtccctgttgtaactgcccaaggcatgttttgcccaccagatcatggcccacatggaggcccacctgcctctgtctcactgaactagaagccgagcctagaaactaacacagccatcaagggaatgacttgggcggccttgggaaatcgatgagaaattgaacttcagggagggtggtcattgcctagaggtgctcattcatttaacagagcttccttaggttgatgctggaggcagaatcccggctgtcaaggggtgttcagttaaggggagcaacagaggacatgaaaaattgctgtgactaaagcagggacaatttgctgccaaacacccatgcccagctgtatggctgggggctcctcgtatgcatggaacccccagaataaatatgctcagccaccctgtgggccgggcaatccagacagcaggcataaggcaccagttaccctgcatgttggcccagacctcaggtgctagggaaggcgggaaccttgggttgagtaatgctcgtctgtgtgttttagtttcatcacctgttatctgtgtttgctgaggagagtggaacagaaggggtggagttttgtataaataaagtttctttgtctctttaaaaaaaaaaaa

SEQ ID NO: 58678 - DNA, 907 bp, Homo sapiens
gggcagacccggagggaacggaggaagcggtcatgtctcgctacacgaggccccccaacacctccctgttcatcaggaacgtcgcggacgccaccaggcctgaggacttgcgccgtgagtttggtcgatatggccctatagtagacgtttacattccacttgacttctacactcgccgcccaagaggatttgcttatgttcaatttgaagatgttcgagatgctgaagatgctctttataacctcaatagaaagtgggtatgtggccgtcagattgaaatacagtttgcacaaggtgatcgcaaaacaccaggccaaatgaaatcaaaagaacgtcatccttgttctccaagtgatcacaggagatcaagaagccccagccaaagaagaactcgaagtagaagttcttcatggggaagaaataggaggcggtcagacagccttaaagagtctcgacacaggcgattttcttatagccagtctaaatctcgttccaaatcattaccaaggcggtctacctcagcaaggcagtcaagaactccaagaaggaattttggctctagaggacggtcaaggtccaagtccttacaaaagaggtccaagtcaataggaaaatcacagtcaagttcacctcaaaagcagactagctcaggaacaaaatcaagatcacatggaagacattctgactcaatagcaagatccccgtgtaaatctcccaaagggtataccaattttgaaactaaagtacaaacagcaaagcattctcattttcggtcacattccagatctcgaagttatcgtcataaaaacagttggtgaacagcaacagaaagagccccaccccgtctttaatataagttattaaactctcattatgttaaataaaaattctttaaggcatacagaaa

SEQ ID NO: 58679 - DNA, 1089 bp, Homo sapiens
gcgtcttcggtcatctccggcgcttctagggctggttcccgtcatcttcgggagccgtggaggtacgaacttaagacatgcctattttattaatttacttccaaacgcaacgaaaggtccatggacaatttgtgggccatttaattcagggcccccaattcgtacgtggagaagtgggaatgcaaaagtactttgacctttaaccttcggtccggcgcggtggagggaaacgcctccgtctctatataaggaattttccggtctcttcgggtcctttttcctctcttcagcgtggggcgcccacaatttgcgcgctctctttctgctgctccccagctctcggatacagccgacaccatgggtttcggagacctgaaaagccctgccggcctccaggtgctcaacgattacctggcggacaagagctacatcgaggggtatgtgccatcacaagcagatgtggcagtatttgaagccgtgtccagcccaccgcctgccgacttgtgtcatgccctacgttggtataatcacatcaagtcttacgaaaaggaaaaggccagcctgccaggagtgaagaaagctttgggcaaatatggtcctgccgatgtggaagacactacaggaagtggagctacagatagtaaagatgatgatgacattgacctctttggatctgatgatgaggaggaaagtgaagaagcaaagaggctaagggaagaacgtcttgcacaatatgaatcaaagaaagccaaaaaacctgcacttgttgccaagtcttccatcttactagatgtgaaaccttgggatgatgagacagatatggcgaaattagaggagtgcgtcagaagcattcaagcagacggcttagtctggggctcatctaaactagttccagtgggatacggaattaagaaacttcaaatacagtgtgtagttgaagatgataaagttggaacagatatgctggaggagcagatcactgcttttgaggactatgtgcagtccatggatgtggctgctttcaacaagatctaaaatccatcctggatcatggcatttaaataaaagattgaaagattaaaaaaaaaa

SEQ ID NO: 58680 - DNA, 1575 bp, Homo sapiens
ggagtcccccgcgccccccgcgttccgcccggccatggctgcggtggcgctgatgccaccgccgctgctgctgctgctgctgttggcgtcgccgcccgccgcctccgcgccgtccgcccgcgatcccttcgccccccagctcggggacacgcagaactgccagctgcggtgccgcgaccgcgacctcggcccgcagccctcgcaggcggggctggagggcgcctccgagtctccctatgacagagccgttctgatcagcgcttgcgagcgtggctgccgcctcttctccatctgccgatttgtggccagaagctccaagcccaatgccacccaaactgagtgtgaagcagcctgcgtggaagcctatgtgaaggaggcagagcagcaggcctgtagccacggctgctggagccagcccgcggagcctgagccggagcagaagagaaaggtcctggaggctccaagtggggccctctccctcttggacttgttttccaccctctgcaatgaccttgtcaactcagcccagggatttgtctcctccacctggacatactacttgcagactgacaatgggaaagtggtggtgtttcagactcagcccatagtggagagcctcggcttccaggggggccgtctgcagcgcgtggaggtgacctggcgaggctcccaccctgaagccctggaggtgcacgtggaccctgtaggccccctggacaaggtgaggaaggccaagatccgagtcaagaccagcagcaaggccaaggtggagtctgaagagccacaggacaatgacttcctcagttgcatgtcccggcgctcgggtctgcctcgctggatcctggcctgctgcctcttcctctccgtgctggtgatgctgtggctgagctgctccaccctggtgaccgcgcctggccagcacctcaagttccagcctctgaccctggagcagcacaagggcttcatgatggagcccgattggcccctgtacccgccgccgtcccacgcctgtgaggacagcctaccaccctacaagctgaagctggacctgaccaagctgtaggcctccactggccccatcactgccaactgcagggggcccctcgggcctcacttgccctgagcccagggagtccaagggcagggtgggtccagccttgagcccctccacccccaaatccttcctctcctcccagacccaccccttgccccacggagtcctggggacgcagtgccccagctgggaagagggcgggatcgggcactggttcctccttgtccccgctttcttgggggcttgctactttttgtcttctattgtgtggctttctgagtatttgaaccccagtcctgtgtcaccttcctttttccttctctgtcccctctctgcgggggggcgctgaggctgagggggagctgcgtcttgctagggcttcccccttctccccatcccggtctccagagacccagcttctgagagacagggtgtgggcatctccatgcccctataaagcgtgcctggggcttgtctggggctggggaggaataaaccatgtatataaaagaaaaaaaaaa

SEQ ID NO: 58681 - DNA, 1957 bp, Homo sapiens
ctcggaaaagcttttcagtaaatgcactcatgctgctccaggagctcttctctgcaacaagccacccatctgccatcaacaagttaagaccaagagaactaacggctgcggaaatgagactgaagctttgattaaccagctgagcagttagaggtggagaaatttaataacttatattcaaaactgatttagggatcagagcaatcacagaaaatgaaaccaatgctttccagagggatatcctaaggaaaaaacaactcgtcctggtggattcaattttacttggaaagcctgggacacagaaaacaggaaactggtcaaaggctcctacatgttagagccttttacagactcactgcgttgagtctaacaaccgcgactgaatgcagcctccaatgtgctcagaagaatgggcttacatttcaagtggccattaggggcccctatgctggcagcaatatatgcaatgagtatggttttaaaaatgctgcctgccctgggtatggcgtgtccacccaaatgccgctgcgagaagctgctcttctactgcgactctcagggcttccactcagtgccaaacgccacagacaagggctctctgggcctgtccctgaggcacaatcacatcacagagctcgaaagagatcaatttgccagcttcagtcaacttacttggctccacttagatcacaatcaaatttcaacagtaaaagaagatgcttttcaaggactatataaacttaaggaattaatcttaagttccaacaaaatattttacttgccaaacacaacttttacccaactgattaacctgcaaaatttggacctgtcttttaatcagctgtcatctctgcacccagagctcttctatggccttcggaagctgcagaccttgcatttacgttccaactccctgcggactatcccagtacgcctgttctgggactgtcgtagtctggagtttctggatttgagcacaaatcgtttgcgaagtttggctcgcaatggatttgcaggattaattaaactgagagagcttcacctagagcacaaccagctgacgaagattaattttgctcatttcctacggctaagcagtctgcacacgctcttcttacaatggaacaaaatcagcaacttgacatgtgggatggagtggacctggggcactttagaaaagctagacctgactggaaatgaaatcaaagccatcgacttgacagtgtttgaaacgatgcccaatcttaaaatactactcatggataacaacaagttaaacagccttgattccaagatcttaaactccctgagatccctcacaaccgttggtctctctggcaatctgtgggaatgcagcgcccgaatatgtgctctggcctcctggctgggcagtttccaaggtcggtgggaacactccatcctatgccacagtcctgaccacacccaaggagaggatattctagatgcagtccatggatttcagctctgctggaatttgtcaaccactgtcactgtcatggctacaacttatagagatccaaccactgaatatacaaaaagaataagctcatcaagttaccatgtgggagacaaagaaatcccaactactgcaggcatagcagttactaccgaggaacactttcctgaaccagacaatgccatcttcactcagcgggtaattacgggaacaatggctttattgttttctttcttttttattatttttatagtgttcatctccaggaagtgctgccctcccactttaagaagaattaggcagtgctcaatggttcagaaccacaggcagctccgatcccaaacacgactccatatgtcaaacatgtcagaccaaggaccgtataatgaatatgaacccacccatgaaggacccttcatcatcattaatggttatggacagtgcaagtgtcagcagctgccatacaaagaatgtgaagta

SEQ ID NO: 58682 - DNA, 1900 bp, Homo sapiens
gaggcggggcgcgggcgtgcagcggcgcaggctccgccccggggccgtctccagccgggggcgccgagccgctccagtccccggcgcgccgcgggctggtgggctcagcggcggcgccggcactgggaaatgaccctgcccgggggcccaacgggcatggcgcggccggggggcgcgaggccctgcagcccggggctggagcgggccccgcgccggagtgtcggggagctgcgcctgctcttcgaggcgcgctgtgcggcggtcgctgcggccgccgccgcgggggagccccgggcccgcggggccaagcggcgtgggggacaggtccccaacgggcttccgcgggctcccccggccccggtgatccctcagctgaccgtgacagccgaggagcccgacgtgcccccgaccagccctgggccgccggagcgggagagggactgcctcccggcagcgggctcttcgcacctgcagcagccgcgccgcctttccacctcgtcggtctcctccactggctcctcgtcgctgctcgaggactcggaggacgacctgctgagcgacagtgagagccggagccgcggcaacgtgcagctggaagcgggcgaggacgtgggtcagaaaaaccactggcagaagatccggaccatggtcaatctgccggtcataagccctttcaagaagcgctacgcctgggtgcagctggcagggcacactgggagttttaaggcggcgggcaccagcgggctgatcctgaagcgctgctcggagccggagcgctactgcctggcgcggctgatggctgacgcgctgcgcggctgcgtgcctgccttccacggcgtggtggagcgcgacggcgaaagctacctgcagctgcaggacctgctcgatggcttcgacggaccttgtgtgctcgactgcaaaatgggcgtcaggacttacctagaggaggagctgaccaaggcccgtgagcggcccaagctgcggaaggacatgtacaagaaaatgctggcggtggatcctgaagctcccacggaggaggagcacgcgcagcgcgccgtcaccaagccgcgctacatgcagtggcgggaaggcatcagctccagcaccaccctcggcttccgcatcgagggcatcaagaaagcggacggctcctgcagcaccgacttcaagactacgcgaagccgagagcaggtgcttcgcgtctttgaagagtttgtgcaaggagatgaggaagtgctgaggcggtatctgaaccgcctgcagcagatccgggacaccctggaggtatccgagttcttcaggaggcacgaggtgatcggcagctcgctcctctttgtgcacgatcactgccatcgcgccggcgtgtggctcatcgacttcggcaagaccacgcccctccccgatggccagatcctggaccaccggcggccctgggaggagggcaaccgcgaggacggctatttgctggggctggacaatctcattggcatcctggccagcctggctgagagatgaggctggactcctgtccccgcgggccgctcacctgacatgtggacctgcagctttgtccccactgtgcatgccggcttgagactggagccccgcggtgcagggcagttcaccgggtcctgcaggaccaggtgccagccactaagggggggcaccgccgatgccaggggttttgcccacccgggccccagcgttcccagagccaaatgacactaacttatagaaggggagggggcaaagggcttcttcctcaggccagctcttctgaggaggctctgccctctccagaggtgccagaccgcggattttatttagcaagcccagaccttccggtctaacgtctcacaccacgacggactccccttcctaataaaactcaaagacaaaa

SEQ ID NO: 58683 - DNA, 2546 bp, Homo sapiens
tttcgtcaagcagggacacacgcagacacacgcacactcgcgcgcgcatcctcccgccagcctgcccgcctgctcgccggcgcccggagcccgctctggccgctggatgatctgaagctgccctctctccttcatttatatcaccagcttgctttttgctgagaaagcttcctgccctggaagatggcacccttccccatccagacaccttgggaatgaattatgagggagccaggagtgagagagagaaccacgctgctgatgactccgagggaggggccctggacatgtgctgcagtgagaggctaccgggtctcccccagccgatagtgatggaggcactggacgaggctgaagggctccaggactcacagagagagatgccgccaccccctcctccctcgccgccctcagatccagctcagaagccaccacctcgaggcgctgggagccactccctcactgtcaggagcagcctgtgcctgttcgctgcctcacagttcctgcttgcctgtggggtgctctggttcagcggttatggccacatctggtcacagaacgccacaaacctcgtctcctctttgctgacgctcctgaaacagctggaacccacggcctggcttgactctgggacgtggggagtccccagtctgctgctggtctttctgtccgggggcctggtcctcgttaccaccctggtgtggcacctcctgaggacacccccagagccacccaccccactgccccctgaggacaggcgccagtcagtgagccgccagccctccttcacctactcagagtggatggaggagaagatcgaggatgacttcctggacctcgacccggtgcccgagactcctgtgtttgattgtgtgatggacatcaagcctgaggctgaccccacctcactcaccgtcaagtccatgggtctgcaggagaggaggggttccaatgtctccctgaccctggacatgtgcactccgggctgcaacgaggagggctttggctatctcatgtccccacgtgaggagtccgcccgcgagtacctgctcagcgcctcccgtgtcctccaagcagaagagcttcatgaaaaggccctggaccctttcctgctgcaggcggaattctttgaaatccccatgaactttgtggatccgaaagagtacgacatccctgggctggtgcggaagaaccggtacaaaaccatacttcccaaccctcacagcagagtgtgtctgacctcaccagaccctgacgaccctctgagttcctacatcaatgccaactacatccggggctatggtggggaggagaaggtgtacatcgccactcagggacccatcgtcagcacggtcgccgacttctggcgcatggtgtggcaggagcacacgcccatcattgtcatgatcaccaacatcgaggagatgaacgagaaatgcaccgagtattggccggaggagcaggtggcgtacgacggtgttgagatcactgtgcagaaagtcattcacacggaggattaccggctgcgactcatctccctcaagagtgggactgaggagcgaggcctgaagcattactggttcacatcctggcccgaccagaagaccccagaccgggcccccccactcctgcacctggtgcgggaggtggaggaggcagcccagcaggaggggccccactgtgcccccatcatcgtccactgcagtgcagggattgggaggaccggctgcttcattgccaccagcatctgctgccagcagctgcggcaggagggtgtagtggacatcctgaagaccacgtgccagctccgtcaggacaggggcggcatgatccagcactgcgagcagtaccagtttgtgcaccacgtcatgagcctctacgaaaagcagctgtcccaccagtccccagaatgactgcgcttctcctacaagggtctctgggcactgcccagcctgagtctcggccctcacccagggccctgcctcgggtcctgggcctgctccccgcttcctccccttcagtcagctccctctgtcctctgtcagcctggcctgacccctaccctccagcattgctcttcctactgtacatattggggagtggggggcagggtcgggaagggacatgccaggccaggcctggggccccggggcctgacccacaccacgcagaccccgggctccagtttttaacgatggttccatcaatacctgatccagaatgtttccgtgctacactttgtgtcctgctgcaatgtgttctgtctgtccatccatctctgccctctgtaccggacactgtgtctcctcagccaggaaggggtaatgagctccagcccctaagcaaccggacttgcctgcctcggcctcacccgcacttctcccaaaaggcagatgacggggagttaggcatggggagctccagaaggtcaccagagagctttcagctgagggagagttctctaggttggagtgggcatcacagccagggtggcctctgggtgtcagatgctctcaggagggtgcccagcctgtgaggcactggca

SEQ ID NO: 58684 - DNA, 2903 bp, Homo sapiens
cgacgatttcgtgtgtggggtcagcccacggcggggactatggtgtaattcccggcgctcacgcactactggcccctgatccggttcttggtgcccctgggcatcaccaacatagccatcgacttcggggagcaggccttgaaccggggcattgctgctgtcaaggaggatgcagtcgagatgctggccagctacgggctggcgtactccctcatgaagttcttcacgggtcccatgagtgacttcaaaaatgtgggcctggtgtttgtgaacagcaagagagacaggaccaaagccgtcctgtgtatggtggtggcaggggccatcgctgccgtctttcacacactgatagcttatagtgatttaggatactacattatcaataaactgcaccatgtggacgagtcggtggggagcaagacgagaagggccttcctgtacctcgccgcctttcctttcatggacgcaatggcatggacccatgctggcattctcttaaaacacaaatacagtttcctggtgggatgtgcctcaatctcagatgtcatagctcaggttgtttttgtagccattttgcttcacagtcacctggaatgccgggagcccctgctcatcccgatcctctccttgtacatgggcgcacttgtgcgctgcaccaccctgtgcctgggctactacaagaacattcacgacatcatccctgacagaagtggcccggagctggggggagatgcaacaataagaaagatgctgagcttctggtggcctttggctctaattctggccacacagagaatcagtcggcctattgtcaacctctttgtttcccgggaccttggtggcagttctgcagccacagaggcagtggcgattttgacagccacataccctgtgggtcacatgccatacggctggttgacggaaatccgtgctgtgtatcctgctttcgacaagaataaccccagcaacaaactggtgagcacgagcaacacagtcacggcagcccacatcaagaagttcaccttcgtctgcatggctctgtcactcacgctctgtttcgtgatgttttggacacccaacgtgtctgagaaaatcttgatagacatcatcggagtggactttgcctttgcagaactctgtgttgttcctttgcggatcttctccttcttcccagttccagtcacagtgagggcgcatctcaccgggtggctgatgacactgaagaaaaccttcgtccttgcccccagctctgtgctgcggatcatcgtcctcatcgccagcctcgtggtcctaccctacctgggggtgcacggtgcgaccctgggcgtgggctccctcctggcgggctttgtgggagaatccaccatggacgccatcgctgcgtgctatgtctaccggaagcagaaaaagaagatggagaatgagtcggccacggagggggaagactctgccatgacagacatgcctccgacagaggaggtgacagacatcgtggaaatgagagaggagaatgaataaggcacgggacgccatgggcactgcagggacagtcagtcaggatgacacttcggcatcatctcttccctctcccatcgtattttgttcccttttttttgttttgttttggtaatgaaagaggccttgatttaaaggtttcgtgtcaattctctagcatactgggtatgctcacactgacggggggacctagtgaatggtctttactgttgctatgtaaaaacaaacgaaacaactgacttcatacccctgcctcacgaaaacccaaaagacacagctgcctcacggttgacgttgtgtcctcctcccctggacaatctcctcttggaaccaaaggactgcagctgtgccatcgcgcctcggtcaccctgcacagcaggccacagactctcctgtcccccttcatcgctcttaagaatcaacaggttaaaactcggcttcctttgatttgcttcccagtcacatggccgtacaaagagatggagccccggtggcctcttaaatttcccttccgccacggagttcgaaaccatctactccacacatgcaggaggcgggtggcacgctgcagcccggagtccccgttcacactgaggaacggagacctgtgaccacagcaggctgacagatggacagaatctcccgtagaaaggtttggtttgaaatgccccgggggcagcaaactgacatggttgaatgatagcatttcactctgcgttctcctagatctgagcaagctgtcagttctcacccccaccgtgtatatacatgagctaacttttttaaattgtcacaaaagcgcatctccagattccagaccctgccgcatgacttttcctgaaggcttgcttttccctcgcctttcctgaaggtcgcattagagcgagtcacatggagcatcctaactttgcattttagtttttacagtgaactgaagctttaagtctcatccagcattctaatgccaggttgctgtagggtaacttttgaagtagatatattacctggttctgctatccttagtcataactctgcggtacaggtaattgagaatgtactacggtacttccctcccacaccatacgataaagcaagacattttataacgataccagagtcactatgtggtcctccctgaaataacgcattcgaaatccatgcagtgcagtatatttttctaagttttggaaagcaggttttttcctttaaaaaaattatagacacggttcactaaattgatttagtcagaattcctagactgaaagaacctaaacaaaaaaatattttaaagatataaatatatgctgtatatgttatgtaatttattttaggctataatacatttcctattttcgcattttcaataaaatgtctctaatacaaaaaaa

SEQ ID NO: 58685 - DNA, 2204 bp, Homo sapiens
  misc_feature (1)...(2204): n = a,t,c or g
ctcgattcgaattcggcacgaggtgagagggcacggggaaaaggtggctctggccggggtggctcggtttcctggggctatgtaactgagctcgtcgacttaggggtccttcttcgctgccctcgccgcgtgctagcagggagtttccgctcgggagagagactgtcctcacgcccgctgcgcctcctcgacggcagagcaggcttgctcgcccgtgggagcgtcccggccgagaagccctgaggggggaggggaggccattttgtcccgaccgactccccggaaccgggcggagcggctgggagaggctgcggagccgcggtcgccgccctcggaggcactggacgccgccactgtcggggcttcctcaaagctgttcgtaggtcgcccgcgccgtctcgagcctttttcccacgcttccccggtcctccggcctgagaacgcccgagtgaggagttggccgtagtgagagggaccgatcccttggggccgccggcggcgagagcccgagccgctcctcccaatggcgaagaagacgtacgacctgcttttcaagctgctcctgatcggggattccggagtggggaagacctgcgtcctttttcgtttttcggatgatgccttcaatactacctttatttccaccataggaatagacttcaagatcaaaacagttgaattacaaggaaagaagatcaagctacagatatgggatacagcaggccaggagcgatttcacaccatcacaacctcctactacagaggcgcaatgggtatcatgctagtatatgacatcaccaatggtaaaagttttgaaaacatcagcaaatggcttagaaacatagatgagcatgccaatgaagatgtggaaagaatgttactaggaaacaagtgtgatatggacgacaaaagagttgtacctaaaggaaaaggagaacagattgcaagggagcatggtattaggttttttgagactagtgcaaaagcaaatataaacatcgaaaaggcgttcctcacgttagctgaagatatccttcgaaagacccctgtaaaagagcccaacagtgaaaatgtagatatcagcagtggaggaggcgtgacaggctggaagagcaaatgctgctgagcattctcctgttccatcagttgccatccactaccccgttttctcttcttgctgcaaaataaaccactctgtccatttttaactctaaacagatatttttgtttctcatcttaactatccaagccacctattttatttgttctttcatctggtgactgcttgctgactttatcataattttcttcaaacaaaaaaatgtataggaaaaatcatgtctgtgacttcatttttaaatgtacttgctcagctcaactgcatttcagttgtattataggtcccagttcttatcaacattaaaacctatagcaatcatttcaaatctattctgcaaattgtataagaataaagttagaattaacaattttattttgtacaacagtggaattttctgtcatggataatgtgcttgagtccctataatctatagacatgtgatagcaaaagaaacaaacaaaagccaggaaaacactcattttcgccttgaatatgtaaatgggattaattttgtcctgtgccttatgtggaaaggaacttctttggttttccttttttgttctggtggaagcatgtgcaggagacatatcatccaaacataaaccattaaaatgtttgtggtttgcttggctgtaattttcaaagtagttaattgaggacaaagggtaatgcagaagtgatagctttggtttgctgagtcttgttttaagtggccttgatatttaaaactattcctgccaccatttcttctccttggccacttcttccttgcgtctccctggcatgctgctttatttgcttctccctccccaaccacctcatgggtatatttaagagtggaaaggggacaaactagtagggtttgtccaagtttaatataaagcactgatgtaacttgctaggtaaacggaaagataagttcaactgccactatccatgtcgtaattgtgtctcccccccattgcttctcccnaaagtgccagagctcattgcggttactccagtcgcttcccccccttgtcctccggcaaccatgntttgaatgaaataagcagccnatttgagggtgggtgctcaataggaa

SEQ ID NO: 58686 - DNA, 2459 bp, Homo sapiens
tcagcattttatctgagtcttctgaatcccacttagaactgtgttgagctctcacccatcacgatgagcaacaaattcctgggcacctggaaacttgtctctagtgagaactttgacgattacatgaaagctctgggtgtggggttagccaccagaaaactgggaaatttggccaaacccactgtgatcatcagcaagaaaggagatattataactatacgaactgaaagtacctttaaaaatacagaaatctccttcaagctaggccaggaatttgaagaaaccacagctgacaatagaaagaccaagagcatcgtaaccctgcagagaggatcactgaatcaagtgcagagatgggatggcaaagagacaaccataaagagaaagctagtgaatgggaaaatggtagcggaatgtaaaatgaagggcgtggtgtgcaccagaatctatgagaaggtctgaaaaatcatttcttcattgaagtggctttttatcatttaatgatggaaatcaattgcttccattgacaaaactgaatacactgcaaatatttgtttttgcttttgtcttaatatatcagatatgcaaaggcctaaactgagaattaatctaaaagtcagtgttatttaaacattttcaatgtgcatgcatgtcattattacatcaaagcatatatattggccagacacaaacagttgatgatgtcattcaattaactacaaaattctaatctatgttgaactttgtatacttgaaatgataataaaaaggatataatttcttagtaaaatgaaatcaaagtattgatcagggtagcaaactcaaatgctgacaggggccagaggagatatggggaaggagcatcagaaatgaggcaagctaggagaatgggctattataatgtaaagaattgtagtctcagttaaaaggggtagcctctactccagccaacattttaaaattaatggataatttatagacagttaaatttatagacagttaagtaaaaatggataatttatagacagataatttatagacaggtaaatgtgagttaaatataactcacatcccactcaagacacaaaacattttcttaatcctagtacatttttttctgtcccttcccaatcagtgtccttttctgttccacccctaccaaaagcaagtagtggtttggtttctatcatatagattaattttacctgctcatatgaagggaattgtacatcatgcattcttttctgtttgccttttttaaattcagcatcatgtttttgtgatacatccacattgttgcatgcagctgtagtttgtttctttttattaccaagtactatttcattgtatgaatatatcacagtttatccattctactattaagacaattgagctatttctaattttcggctgctatgaataaagctgctacaaatatttttgtacaagactttttgtaaacataggagtccctttattttaaataaataactagtcatatcattaggtccagtaattgttgacaggcaggaacgggggaccattgcattgtgcccaagtaataataaaactatttcagatgtattatatgattgagcaaatgagaaaacatgttgatgttgatgggagtcaggatgttcactatggaaaaacaaatatacaaatatgaaatgagggaaggcaagaaagaaccatgtggaaatggaatagaattggtataaattcataatttctaaaccatgtatatgtacgtttatatgtattataattgcatacacatgcctccatgcatatatgtgtgtgataatacacatgcatttatgtgcgtgtgtgtatacacatgcatatatttactaatcctatctgccaaaatggcttagacacaaaaacacctcagcagaaatgaatatacctagcactcagatcttcgtgtctaatatagtttgccactaaaaggaaccaaggctacttggaaaaatggatgattccaaagcaagggcaaggtaggaacaagatgagcttgaaatatcttgttatgccagaaagtaatgttaaaaaaaaaaaatagaggtatattgccaaaacataaatccagcttgaaggggctcccactggccaaacttgagccaatttgagagcaaaataattgagaaaaataaataacaagataattgagaaaaaaataaaataaattcccaattccattggaaaaaaatagaaatccatgaatccatactgatataatgataaataatcgatagataggtagatgactgacagatgatagatagatatatagatagatagatagatagatagatagatagatagatagatagatagagaaatgagaaggtttctcttttgcaatagaacgtcatggaccagtgttaaatgtgagtggaaggagttctggaattggaaaaccatcatttttcaaccatcacagtaaatatggc

SEQ ID NO: 58687 - DNA, 3047 bp, Homo sapiens
tgggccgcagccctccccgccccgccgaccgcggtcacacactctcggagcctccccgtgagcgggagcgcggcgcacggcgatgcgccgaggcgggcgctgaggcggcgccgcgcgagcagcagcagaggcggcggcggcccccagcccagcccggcgccgccgccgagcccgggccccaaggtgcggcggcgccccaagttcccgccatgagcagccggctcggggggctccgcggccccggggactcccgccccgccgggcgcgaccgcagcgccccgcggccccgacgcgcttaacgttgtcgcttgccggtcccgccaccgccgcctccgccgccgctcgcgtcctcgccgccaccgcctcggccgctgcagctccgccggcagcatgtctcgaaggaagatttcgtccgagtccttcagctccctgggctccgactacctggagaccagcccggaggaggagggggagtgccccctgtctaggctctgctggaatggcagccggagcccgcccgggccgctggagcccagcccggccgcagctgccgctgccgccgccccggccccgaccccggctgcttctgccgccgccgccgctgccactgccggggccaggagggtgcagcgccggaggcgggtcaacctggactcgctgggcgagagcatcagccgcctgacggcgccctcgcctcagacgatacagcagactctcaagaggacactgcagtattatgaacatcaagttattggttacagggatgcagaaaagaatttccacaatatctctaacagatgctcctatgcagaccactccaacaaagaagaaattgaagatgtctcaggaattcttcagtgtactgctaatatactcggtttgaagtttgaggaaattcaaaaaagatttggtgaagagttctttaatatatgctttcatgagaatgagagagtccttcgagctgtaggtggcactttgcaggacttttttaacggctttgatgctttgttggaacacattagaacttcttttggaaaacaggccactctggagtcaccatctttcctatgcaaagagctccctgaaggtactctcatgctccactacttccaccctcaccatattgtggggtttgcaatgctggggatgattaaggctgcaggaaagaagatctatcggctggatgtggaagtggaacaggttgcaaatgagaagctatgctctgatgtttcaaacccaggcaattgtagctgtcttactttccttatcaaagaatgtgaaaatactaatatcatgaagaaccttccacagggaacctcccaagttcctgcggacctcagaattagcatcaacaccttctgtagagccttccctttccacttgatgtttgatcccagcatgtcagtccttcagttgggggaaggtctaaggaagcagcttcgatgtgacactcacaaagtgctcaagtttgaggactgcttcgagattgtatctccaaaggttaatgccacctttgaaagggtcctgctgcgactgtctaccccgtttgtgattagaaccaagcctgaggcttctggctctgaaaataaagacaaggtgatggaagtcaaaggacaaatgatccatgttccagaatcaaattccattttatttttgggctctccatgtgtggacaagttggatgaactcatgggccgagggctacatctctcagacatccctatccatgatgccacccgagatgtcattttggttggtgagcaggcaaaggcccaagatgggttgaagaaaaggatggataaattaaaggcaactttagaaagaactcaccaggccctggaagaagagaaaaagaagacagtggatcttctatattctattttccctggtgatgtagcccagcaattatggcaagggcagcaagtacaggccagaaagtttgatgatgtcaccatgctcttttcagacattgttggcttcacagccatatgtgcccagtgtactcccatgcaagtaatcagcatgctgaatgaactgtacaccagatttgaccaccagtgtggatttttggatatttataaggtggaaacaataggtgatgcctactgtgttgcagcagggctccacagaaaaagcctctgccatgctaaacccattgctctgatggccttgaagatgatggaactttcagaagaggtgctgacacctgatggaagaccgattcagccccagaggagtgaactccttttctcctttcctgtttccatccagctggttccagatcagcatcaaagtgaaacggatttgggtactgaaaagatgaggataggaattcactcaggctccgtgctggctggagttgttggggtgcgaatgccacgttattgcctgtttggaaataatgtcacactggcaagcaaattcgagtcgggaagtcaccctcggcgcatcaatgtcagcccaaccacttaccaattattaaaacgagaagaaagtttcacattcattccgcggtctcgtgaagagcttccagacaactttccaaaggaaattcctgggatctgctatttcctggaggtaaggactggtccaaagccaccaaagccttctctttcttcgtcgagaataaaaaaggtttcctacaacatcggcaccatgttcctccgggagacaagcctctgagacctgctacagatcaaagactcctccaaaaagcacaagcccagaacatgggtcaccaatggggggtggaaagagattgtgtctctttcattgctttgttgagaacaagcagcaaaatttctgtattatgtcaggcaataatcctactaaaaggtggaggtgaccgctgtcaataaaaagccggaggatgagggaaataagatgtgtccattcatatgagtggttttggtcatatatatacacatatattttaattacaagtgtgggtcccctttcagaactaaccaataaatagattccatgttttcttgtttatcacacatacaagtatctttccctatatatttgtaccacttttgagagcc

SEQ ID NO: 58688 - DNA, 2164 bp, Homo sapiens
gcgaaagaggaaactgcagaggaggaagctgcgccgcagcccgagccgcccggcatccccgccgcctctgcgcccgcgccgcgcccccggcgccccctccccagcgcgcccccggccgctcctccgcgccgcgctcgtcggccatggcccgggagaacggcgagagcagctcctcctggaaaaagcaagctgaagacatcaagaagatcttcgagttcaaagagaccctcggaaccggggccttttccgaagtggttttagctgaagagaaggcaactggcaagctctttgctgtgaagtgtatccctaagaaggcgctgaagggcaaggaaagcagcatagagaatgagatagccgtcctgagaaagattaagcatgaaaatattgttgccctggaagacatttatgaaagcccaaatcacctgtacttggtcatgcagctggtgtccggtggagagctgtttgaccggatagtggagaaggggttttatacagagaaggatgccagcactctgatccgccaagtcttggacgccgtgtactatctccacagaatgggcatcgtccacagagacctcaagcccgaaaatctcttgtactacagtcaagatgaggagtccaaaataatgatcagtgactttggattgtcaaaaatggagggcaaaggagatgtgatgtccactgcctgtggaactccaggctatgtcgctcctgaagtcctcgcccagaaaccttacagcaaagccgttgactgctggtccatcggagtgattgcctacatcttgctctgcggctaccctcctttttatgatgaaaatgactccaagctctttgagcagatcctcaaggcggaatatgagtttgactctccctactgggatgacatctccgactctgcaaaagacttcattcggaacctgatggagaaggacccgaataaaagatacacgtgtgagcaggcagctcggcacccatggatcgctggtgacacagccctcaacaaaaacatccacgagtccgtcagcgcccagatccggaaaaactttgccaagagcaaatggagacaagcatttaatgccacggccgtcgtcagacatatgagaaaactacacctcggcagcagcctggacagttcaaatgcaagtgtttcgagcagcctcagtttggccagccaaaaagactgtgcgtctggcaccttccacgctctgtagtttcatttcttcttcgtcgggggtctcaggagttggagccgagcggagacccaggcccaccactgtgacggcagtgcactctggaagcaagtgactggccctggaggtggggcccggggtcggggctggggaaggggagccccagggtcgccagagccgcgagccactccagcgagaccccaccttgcatggtgccccttcctgcataggactggaagaccgaagtttttttatggccatattttctactgcaattctgaagtgttcatttctcacaaactgtactgactcgaggggcgctgatttcataggatctggtgctgtatatacgaatcttgcaaagctctaactgaacggaccttcttattcctctcccctaacaccatcgtttccactcttctcagtgtaggtaaccgtctatggtgtgttttttcattaatgacaaaaaaaaaagggtttcaactggattatttaaatattggtaaatattgtgcattagggtttgtttttccttttaagaagtatgtcctttgtatctctaagttacatgacctatatcttttcctctttaatagtagttttatgttaacctttaagagatttgtttttcctcaaaggagaatttaaaggtatttttttaaaattctaataagaggatcagccgggtgcaatgactcatgcctgtaatcccagcacgttgggaggccaagtcgggcggatcacaaggtcaggagatcaaggccatcctggttctatactgtgtagattgctggctactaaaaatacaaaaaattagccgggcgtggtggcacacacctagtagtcccggctactcgggtaggctgaggcaggagaattgcttgaacccgggagacggaggttgcagtgagctgagatcgtgccactgcactccagcctgggtgacagagcaagactctgtctcaaaaaaaaaa

SEQ ID NO: 58689 - DNA, 2402 bp, Homo sapiens
cggcaaaaagacaacatacttagaaataaagttaaataaggaggtaaaagactcgtacactgaaaactataaaacattggtgaaagaaattaaagaaatgaataagtgaaagatggcccatgttcatggattagaagaactaatattgttaaagtgtccatactacccaaaatgatctacaaattagatgcaatccctatcaaaactccaatggcatatttacagggttagaaaaaacaattataaaattcacatgaacccacaaaagagctcaaatggccaaatcaattgtgagaaaaaaagaacaaagctggaggcatcacagttcttaatttcaaaatatattagaaagctatggcaatgagaacagtatgctactggcataaaaatagacatgtggaccgatggatcagaagagagaccccagtaggaaatttgcacatatacagtgatctgatctgcaacaagggtgccaagaataaacagtgctacaagcagaacgggcaactacagctcttttgtttaacgaaagagagaaaatgaaagaaagggaaaatttcagaagactaggacccatatgaacaaggagggtaactcgaagacaagcagacagatggacactttggatactgtgaaaagcaatcgcaggaggcagactgttgggggatgtgcgcatgttcgatagcatcttttttgctgaagtgatggcgtgccaaaagtattttcagtgggcataatcctcttcacataaatggcctgaccaaggaagaatgactacaagagagacaatgtgactgaattagaaaatgattgccaaagaatagtattaaggagaagaaaacatttttggtcaccaatctctcatataccactactggatatttacaacatgcttcagtggaggagaagacactgctgctttgcaaagatgacctggaatgccaaaaggtctctgttccgcactcatcttattggagtactttctctagtgtttctttttgctatgtttttgtttttcaatcatcatgactggctgccaggcagagctggattcaaagaaaaccctgtgacatacactttccgaggatttcggtcaacaaaaagtgagacaaaccacagctcccttcggaacatttggaaagaaacagtccctcaaaccctgaggcctcaaacagcaactaactctaataacacagacctgtcaccacaaggagttacaggcctggagaatacacttagtgccaatggaagtatttacaatgaaaaaggtactggacatccaaattcttaccatttcaaatatattattaatgagcctgaaaaatgccaagagaaaagtccttttttaatactactaatagctgcagagcctggacaaatagaagctagaagagctattcggcaaacttggggcaatgaaagtctagcacctggtattcaaatcacaagaatatttttgttgggcttaagtattaagctaaatggctaccttcaacgtgcaatactggaagaaagcagacaatatcatgatataattcaacaggaatacttagatacgtactataatttgaccattaaaacactaatgggcatgaactgggttgcaacatactgtccacatattccatatgttatgaaaactgacagtgacatgtttgtcaacactgaatatttaatcaataagttactgaagccagatctgcctcccagacataactatttcactggttacctaatgcgaggatatgcacccaatcgaaacaaagatagcaagtggtacatgccaccagacctctacccaagtgagcgttatcctgtcttctgttctggaactggttatgttttttctggagatctggcagaaaagatttttaaagtttctttaggtatccgccgtttgcacttggaagatgtatatgtagggatctgtcttgccaagttgagaattgatcctgtaccccctcccaatgagtttgtgttcaatcactggcgagtctcttattcgagctgtaaatacagccacctaattacctctcatcagttccagcctagtgaactgataaaatactggaaccatttacaacaaaataagcacaatgcctgtgccaacgcagcaaaagaaaaggcaggcaggtatcgccaccgtaaactacattagaaaagacaattttttttcaaatgtgcaatttgtaaatattgctaaaagcatgtatagttagaactgattacatccgtaggacaagttttagttaaaactcatcacataaagaaattcaagaagtatttttttaatttctgaagaagttaattcttaaaactataacattatataacaaaaaaggtttcccaaaacaatctatttaaaaaactgtataaggagattctgtgtattaacatgcaat

SEQ ID NO: 58690 - DNA, 4088 bp, Homo sapiens
tttcgtgcctgactgctcggttaggacctcggagagcgccaggcgccgcgaccagagggcccagagaagcggccggagcccgcctacctcggccccctcagcttcccgggctggcaggcggctagaggcgtctgaggaagtgtttaaaatgaagaagtttaatttccgaaaagttttggatggcttaactgcctcctcccctggcagtggtagcagcagtggcagtaacagtggtggtggggctggaagtggttccgtacatccggcggggactgcaggggttctcagagaggaaattcaggaaactttgacttcggagtatttccagatttgcaagacagttcggcatggttttcctcatcagcccacagcattagcctttgatccagttcagaaaatcttggctattgggacgagaacaggtgctatacgaatactcgggagacctggtgttgattgctattgccaacatgaaagtggtgcagctgtcctacagctccaatttttgatcaatgagggtgccttggtcagtgcaagttcagatgatacacttcatttgtggaaccttagacaaaaaaggccagccatactccattctcttaaatttaaccgggaacgaattacttactgtcatctacctttccagagtaaatggctttatgttggaacagaaagaggaaatacacatattgtaaatattgaatctttcattctttctggatatgttatcatgtggaacaaggcaattgaactatccactaagactcatccaggtccagttgtacatttaagcgatagcccaagagatgaaggcaaactgctaataggttatgaaaatggtactgtagtattctgggacttgaaatctaaaagagcagaactgagagtttattatgatgaggctattcattcaattgattggcatcatgagggcaaacagttcatgtgcagccattcagatggtagtttgactttatggaacctgaaaagcccaagtcgccctttccagaccacaattccacatggaaaaagtcaaagagaaggaagaaaatctgaatcttgtaaaccaattcttaaagtagaatacaagacctgcaaaaacagcgaaccattcataatattctctggtgggctgtcctatgacaaagcttgtagaagaccaagtttaaccatcatgcatggaaaagcaattacagtacttgaaatggatcatcctattgttgaatttctaactttatgtgaaacgccctatccaaatgaatttcaagaaccctatgctgtcgtggtacttctggagaaagatctcattgtagttgatctgacacaaagcaattttccaatctttgaaaatccatatcccatggacattcatgaatcaccagttacatgcacagcatactttgcagattgtcctccggatttgattctagtactgtattctataggagtcaagcataaaaaacaaggatacagtaataaggagtggccaatcagtggaggagcttggatccttggagcacaaacatatccagaaattattattactggtcatgcagatggatcaataaaattttgggatgcttctgcaataactctgcagatgctgtacaagctaaaaacttcaaaagtgtttgaaaaacagaaggtaggagaaggaaaacaaacatgtgaaattgtagaggaagacccatttgccattcagatgatttactggtgtccagagagcagaatattctgtgtatcaggagtctctgcatatgtcataatttataaattcagcagacatgaaattacaacagaaatagtgtcattagaggtacgacttcagtatgatgttgaagatattattacccctgaaccagaaacaagtcctccgtttccagatctctcagcccagcttccttcttcaaggagtctttctgggagcactaacactgttgctagtgaaggagtaacaaaggacagtattccatgcctcaatgtgaagacacggccagtgcgaatgcctccaggatatcaagcagaacttgttattcaattggtgtgggtagatggtgaacctccacaacagattactagtcttgctgtaagctcagcatatggaatagttgcatttgggaactgcaatgggttggctgtggtggattttatacagaagacagtactgttaagcatggggaccattgacctatatagatcaagtgacttataccagcgacaaccacggtctcctcgaaaaaacaaacagttcattgcagacaacttttgcatgcgtggcctgtctaacttttatcctgatttaacgaaacggatccgtacttcctatcagagtttaactgaactgaatgacagtccagttcccctagaacttgagcgctgcaagtctcctacctcagaccatgtaaatggacactgcacaagtccaacttctcagagttgcagttctggaaaacgtctttctagtgccgatgtttcaaaagtaaatcgctggggtcctggaagaccaccatttcgaaaggcccagtcagcagcctgcatggagatttctttaccagttacaacagaagaaaaccgagaaaattcctataatcgttctagaagctctagtatctccagtattgacaaagattctaaagaagcaattacagcactatacttcatggactcctttgcacggaaaaatgactctaccatctctccttgtctgttcgttggaaccagtctgggaatggtgttaatcatctccttaaacctaccattagcagatgaacaaaggtttacagagccagtcatggtattgccaagtggtacattcctctcattgaaaggagctgtgctaacattctcctgtatggaccgaatgggtggattaatgcaaccgccatatgaagtttggagggatccaaacaacatagatgaaaatgaaaaatcttggagaaggaaagtggtaatgaactcatcttctgcatcccaagaaataggagatcatcagtatacaataatctgctcagaaaaacaagccaaagtcttctcactgccttctcagacttgcctttatgttcataacatcacggagacatcttttatactgcaagcaaatgtggtggtcatgtgtagcagtgcctgcttggcatgcttttgtgctaacggacatatcatgataatgagcctacctagtcttcgcccaatgttggatgttaattatttgccactgacagacatgaggatagcacgaacattttgttttaccaatgaaggacaggcattatacctcgtctctcctactgaaattcagcggttaacatacagccaagaaatgtgtgataatctacaggacatgctaggagatttgtttactcccatagagacaccagaagctcaaaacagaggctttctcaagggactgtttggtggaagcggacaaacatttgacagagaagagctctttggggaagcttcggcaggaaaagcatcccgcagccttgcgcaacacattcctggaccaggtagtatagaagggatgaaaggcgctgctggaggggtgatgggagagctgacccgtgcacggattgcacttgatgaaagaggacagaggctaggagagctggaagagaaaactgcaggcatgatgaccagtgcagaagcattttccaaacatgcacatgagttaatgctgaaatacaaggataagaaatggtaccaattctgacttctaaagaagctgtgactgctttgagaaatcatattcagggaaaccaaatttattcccagcatcactattcaactgctagaagccagtttcttctacaaaatgttccatttacagtcaatctgaaattttcataaaagagatgtatcagagacactgtgcaacccaaaggctggagccctggttaaaatcccaaaatacggctgaatttgccttttcccatgtggaatggagctatcatcttggcatgtcattcgataaggatttatatttagtaactacggggagtcctcttgatttgaaaattcctgtacaaacaaaagcattaatgcacttaatgaaaaaaaatctttgcatgataaattaacatcttaagggg

SEQ ID NO: 58691 - DNA, 739 bp, Homo sapiens
ttttttttttttaaaatcttttctgtcacacacagatgaactttaataaattacaaatgcacctgaaaatgccttcttgatttcctttcagtttaggcctcaaatgggctctcctcaaggctggacctcaaaggcccagtttgggccttcgcaaatgtctctaacccttgacttagagtttgaagattcattccattctggatgtgaatgcaggtaacacccagtttgctgacgtctacaatattccgcctctcatcatcaaagaagatcatctgggagaaaggaattccagtcttctgctgcaacctctcaaagtgtgtgatcttgctgcctggatagatttcccgatgaacaaagtacctgaagaggtcaaagagctccagtagctggttggccccttctatctcacttgtccttgaagcagccgcaccgggcaccccaaggctctgcaatcgttttaggacctcaggcacctctgggtacagtcggacgtcttggccccgcctatctcgtacagttccatcactgctcttatggaacggagggtctacgtgcgtgtcgacccagaaaggccagagagtgtaatccaaatcaaagactgccagcttcggtagccgcgccatgacccgcaccgcaggctgcgcgcagcagaggtggggcttcacccggggccttagagagtgcggaacctccggcagctaaggcagccaccctgcctgccatagacaaatggcggccg

SEQ ID NO: 58692 - DNA, 869 bp, Homo sapiens
agcgcgagccgccgccgccatcactgccgctgccaagtcctccacccgctgcccccgccatgtctgctaccgctgccacggccccccctgctgccccggctggggagggtggtccccctgcaccccctccaaacctcaccagtaacaggagactgcagcagacccaggcccaggtggatgaggtggtggacatcatgagggtgaacgtggacaaggtcctggagcgagaccagaagctgtcggagctggacgaccgtgcagatgcactccaggcgggggcctcccagtttgaaacaagcgcagccaagctcaagcgcaaatactggtggaaaaacctcaagatgatgatcatcttgggagtgatttgcgccatcatcctcatcatcatcatagtttacttcagcacttaaatccccgaggagtctgccctgcctagagaagggcctctcccccaaccctcagccgttcctccacctctcagccatatctttcagccccccctcccctggatccgtgtgtgtgtgtgtccgtgtgtgtgtccccctgtaaatagccagctgttatttatacatatataatattatatatatttggtctgtttgtagttttattactagatgatttttccggttgtccttaacaccccttcctgaggttcccttcacccctctctcttgccttccttccctttccctttcttcctgactagccccaagtcccttcatttgcatctgctatgcaatagtccctctcctttccttcttcttccctcagatttagctgatccttcctcccaccctggccttcctttcctctttcctcctcactctccccgtcatgctccctctgccccgccctcaaaaaaaaaa

SEQ ID NO: 58693 - DNA, 1064 bp, Homo sapiens
gagagcgcctcattgccactgcagtgactaaagctgggaagacgctggtcagttcacctgccccactggttgttttttaaacaaattctgatacaggcgacatcctcactgaccgagcaaagattgacattcgtatcatcactgtgcaccattggcttctaggcactccagtggggtaggagaaggaggtctgaaaccctcgcagagggatcttgccctcattctttgggtctgaaacactggcagtcgttggaaacaggactcagggataaaccagcgcaatggattgggggacgctgcacactttcatcgggggtgtcaacaaacactccaccagcatcgggaaggtgtggatcacagtcatctttattttccgagtcatgatcctcgtggtggctgcccaggaagtgtggggtgacgagcaagaggacttcgtctgcaacacactgcaaccgggatgcaaaaatgtgtgctatgaccactttttcccggtgtcccacatccggctgtgggccctccagctgatcttcgtctccaccccagcgctgctggtggccatgcatgtggcctactacaggcacgaaaccactcgcaagttcaggcgaggagagaagaggaatgatttcaaagacatagaggacattaaaaagcagaaggttcggatagaggggtcgctgtggtggacgtacaccagcagcatctttttccgaatcatctttgaagcagcctttatgtatgtgttttacttcctttacaatgggtaccacctgccctgggtgttgaaatgtgggattgacccctgccccaaccttgttgactgctttatttctaggccaacagagaagaccgtgtttaccatttttatgatttctgcgtctgtgatttgcatgctgcttaacgtggcagagttgtgctacctgctgctgaaagtgtgttttaggagatcaaagagagcacagacgcaaaaaaatcaccccaatcatgccctaaaggagagtaagcagaatgaaatgaatgagctgatttcagatagtggtcaaaatgcaatcacaggtttcccaagc

SEQ ID NO: 58694 - DNA, 416 bp, Homo sapiens
gtctgatcttcctgcggctgaaccgcccggctgagccgacattgccggcgtcttggcgattcggcccgacgagctccgctttcgctacagcatggtggcctactggagacaggctggactcagctacatccgatactcccagatctgtgcaaaagcagtgagagatgcactgaagacagaattcaaagcaaatgctgagaagacttctggcagcaacgtaaaaattgtgaaagtaaagaaggaataatctaccctgactaaagcttgaaatgctacatttccaaggtgaagatgtgtgggcacatgttatggcagattgaaaaggatctcattccatgggaaaaaaaaaaatcctgtcttgttcataaattgacaatgtcaataaattgaaatatggttcactgttaaaaaaaaaa

SEQ ID NO: 58695 - DNA, 1422 bp, Homo sapiens
tataaatgcagaccgcgcggccgtagcttcctctctgctctcgcggccgactcgcaagatggcgccgcagaaagacaggaagcccaagaggtcaacctggaggtttaatttggaccttactcatccagtagaagatggaatttttgattctggaaattttgagcaatttctacgggagaaggttaaagtcaatggcaaaactggaaatctcgggaatgttgttcacattgaacgcttcaagaataaaatcacagttgtttctgagaaacagttctctaaaaggtatttgaaataccttaccaagaaataccttaagaagaacaatcttcgtgattggcttcgagtggttgcatctgacaaggagacctacgaacttcgttacttccagattagtcaagatgaagatgaatcagagtcggaggactaggcaaaggctccccttacagggctttgcttattaataaaataaatgaagtatacatgagaaataccaagaaattggcttttagtttatcagtgaacaaaaaatatgatactcttgaacttttgtctcatttttttgagtatgctgattatatgattttgatttccctctgataactatcaacagtatttaaatagcttatagctggtataattttttcccacgatttccaaaatcttttatggactcaggtaaaagtagcgttatataggaaatctttttttttagacactctcgttctgtcacccaggctggagtgcagtgactcagcttcctaaatagctcggaattacaggtgtgagccaccatgcccggctaattttttgtacttttagtagagtagggtttggccatgttggcagggctggtttcaaactcctgacctcaagtgatctacccacctcggcttcccaaagtgctgattatagctgtgaaccaccatgcccggccaggaaatcttactgtagaacaattttttatatagctgtataaaatgtatatgattgtcttgacagtctcaaatactgtttttaatagcttgtaaatgtaatctcaagtgcttagaacagttcttacatataagttgctctgtagtttgctcttatagttagcccaaagactctgggtgtgaggcctgctgtaaaccaatgttaaactgcttattagaaagccctaaccacctgctttgtaggcaccagaaactcaaaaccaaatctcaactcagctacagaatctactgtggtccttgtctgaaaaaattagttcactcggttggaatcttgtctcagagcatcctcatctctttctcaaaagcccctaaccccaacaccggcgtgttggttgtctattgaaacttacaagtggatggaccctttctcccgaataactggcctttgaagctctaatcgaaatggtttggcacaatccatactggcagg

SEQ ID NO: 58696 - DNA, 4562 bp, Homo sapiens
cctcaggatgcactgttgccagtcagcgttactcattttattccctagggaacagtgggtttggtagaactctcttctaaatctctttttcatagaatttaaattataaattggtcatttactgttgtcacacaatattgcgttgctgaattttccactgattatattcattttatttcctcccagaacttggtttcttgtttttctgctcactgtccacacccactccaccccaaggctggaataattctcttggagcaaaaaaatcatctttttctttgtatttcattgaacgttctctttacagtgttaggtaaaccgctgctgcgcgttttgtcccgcgtctcgccccgtccgtctcctgactggccgctcttgtccttcctcccgctttttcttctctcgtcttgcggtctgaagatgccctcggccaccagccacagcgggagcggcagcaagtcgtccggaccgctcaccgccgtcgggtatctccgggagtgaggcggccgcgggagccggggccgccgcgccggcttctcagcaccccgcaaccggcaccggcgctgtccagaccgaggccatgaagcagattctcggggtgatcgacaagaaacttcggaacctggagaagaaaaagggtaagcttgatgattaccaggaacgaatgaacaaaggggaaaggcttaatcaagatcagctggatgccgtttctaagtaccaggaagtcacaaataatttggagtttgcaaaagaattacagaggagtttcatggcactaagtcaagatattcagaaaacaataaagaagacagcacgtcgggagcagcttatgagagaagaagctgaacagaaacgtttaaaaactgtacttgagctacagtatgttttggacaaattgggagatgatgaagtgcggactgacctgaaacaaggtttgaatggagtgccaatattgtccgaagaggagttgtcattgttggatgaattctataagctagtagaccctgaacgggacatgagcttgaggttgaatgaacagtatgaacatgcctccattcacctgtgggacctgctggaagggaaggaaaaacctgtatgtggaaccacctataaagttctaaaggaaattgttgagcgtgtttttcagtcaaactactttgacagcacccacaaccaccagaatgggctgtgtgaggaagaagaggcagcctcagcacctgcagttgaagaccaggtacctgaagctgaacctgagccagcagaagagtacactgagcaaagtgaagttgaatcaacagagtatgtaaatagacagttcatggcagaaacacagttcaccagtggtgaaaaggagcaggtagatgagtggacagttgaaacggttgaggtggtaaattcactccagcagcaacctcaggctgcatccccttcagtaccagagccccactctttgactccagtggctcaggcagatccccttgtgagaagacagcgagtacaagaccttatggcacaaatgcagggtccctataatttcatacaggattcaatgctggattttgaaaatcagacacttgatcctgccattgtatctgcacagcctatgaatccaacacaaaacatggacatgccccagctggtttgccctccagttcattctgaatctagacttgctcagcctaatcaagttcctgtacaaccagaagcgacacaggttcctttggtatcatccacaagtgaggggtacacagcatctcaacccttgtaccagccttctcatgctacagagcaacgaccacagaaggaaccaattgatcagattcaggcaacaatctctttaaatacagaccagactacagcatcatcatcccttcctgctgcgtctcagcctcaagtatttcaggctgggacaagcaaacctttacatagcagtggaatcaatgtaaatgcagctccattccaatccatgcaaacggtgttcaatatgaatgccccagttcctcctgttaatgaaccagaaactttaaaacagcaaaatcagtaccaggccagttataaccagagcttttctagtcagcctcaccaagtagaacaaacagagcttcagcaagaacagcttcaaacagtggttggcacttaccatggttccccagaccagtcccatcaagtgactggtaaccaccagcagcctcctcagcagaacactggatttccacgtagcaatcagccctattacaatagtcgtggtgtgtctcgtggaggctcccgtggtgctagaggcttgatgaatggataccggggccctgccaatggattcagaggaggatatgatggttaccgcccttcattctctaacactccaaacagtggttatacacagtctcagttcagtgctccccgggattactctggctatcaacgggatggatatcagcagaatttcaagcgaggctctgggcagagtggaccacggggagccccacgaggtcgtggagggcccccaagacccaacagagggatgccgcaaatgaacactcagcaagtgaattaatctgattcacaggattatgtttaatcgccaaaaacacactggccagtgtaccataatatgttaccagaagagttattatctatttgttctccctttcaggaaacttattgtaaagggactgttttcatcccataaagacaggactacaattgtcagctttctattacctggatatggaaggaaactatttttactctgcatgttctgtcctaagcgtcatcttgagccttgcacatgatactcagattcctcacccttgcttaggagtaaaacaatatactttacagggtgataataatctccatagttatttgaagtggcttgaaaaaggcaagattgacttttatgacattggataaaatctacaaatcagccctcgagttattcaatgataactgacaaactaaattatttccctagaaaggaagatgaaaggagtggagtgtggtttggcagaacaactgcatttcacagcttttccagttaaattggagcactgaacgttcagatgcataccaaattatgcatgggtcctaatcacacatataaggctggctaccagctttgacacagcactgttcatctggccaaacaactgtggttaaaaacacatgtaaaatgctttttaacagctgatactgtataagacaaagccaagatgcaaaattaggctttgattggcactttttgaaaaatatgcaacaaatatgggatgtaatccggatggccgcttctgtacttaatgtgaaatatttagatacctttttgaacacttaacagtttctttgagacaatgacttttgtaaggattggtactatctatcattccttatgacatgtacattgtctgtcactaatccttggattttgctgtattgtcacctaaattggtacaggtactgatgaaaatctctagtggataatcataacactctcggtcacatgtttttccttcagcttgaaagcttttttttaaaaggaaaagataccaaatgcctgctgctaccacccttttcaattgctatcttttgaaaggcaccagtatgtgttttagattgatttccctgtttcagggaaatcacggacagtagtttcagttctgatggtataagcaaaacaaataaaacgtttataaaagttgtatcttgaaacactggtgttcaacagctagcagcttatgtgattcaccccatgccacgttagtgtcacaaattttatggtttatctccagcaacatttctctagtacttgcacttattatcttttgtctaatttaaccttaactgaattctccgtttctcctggaggcatttatattcagtgataattccttcccttagatgcatagggagagtctctaaatttgatggaaatggacacttgagtagtgacttagccttatgtactctgttggaatttgtgctagcagtttgagcactagttctgtgtgcctatgaagttaatgctgcttattgtctcattctgacttcatggagaattaatcccacctttaagcaaaggctactaagttaatggtattttctgtgcagaaattaaattttattttcagcatttagcccaggaattcttccagtaggtgctcagctatttaaaaacaaaactattctcaaacattcatcattagacaactggagtttttgctggttttgtaacctaccaaaatggataggctgttgaacattccacattcaaaagttttgtagggtggtgggaaatgggggatcttcaatgtttattttaaaataaaataaaataagttcttgacttttctcatgtgtggttgtggtacatcatattggaagggttaacctgttactttggcaaatgagtatttttttgctagcacctccccttgcgtgctttaaatgacatcctgcctgggatgtaccacaaccataatgttacctgtatcttaaggggaatggataaaatatttgtggtttactgggtaatccctagatgatgtatgcttgcagtcctatataaaact

SEQ ID NO: 58697 - DNA, 406 bp, Homo sapiens
gaggcctacgagcaggtccaaaagggacccctgaagctgaaaggcgtcgcatagctgggagcgaccaagtggcaataataagaaccggagacggcagatgcaggcggaactcctgtgaactgctgataatcagctggaacatcttcgacgagctgctgcacgggttcaagtactccatgcagaatctggcatacacggagtcgcggaccgagcggcaggtgttgggggagcgcatgcagcgagcccccaactgaggccccagctaccagccctgggcggtcgtatcatcagatgctcctgtgcatctcggccaacacgggagccagtgccgcgcaggaatgtggggtcccctgtgttccctcgccataggagcactcggtaaggtcagtgagggtccactagaccg

SEQ ID NO: 58698 - DNA, 4685 bp, Homo sapiens
agctcggggacctcttcatgcacctttctggagtggaatcatcagaaccctaaagagtagatggttgccctgcatcttgggctccatcggccgaaactttcccaagccagggtgtgcggcttccctgtactgcagccaaggtgacgtgtgacttggatttgagtggagttgcgcttagccttagtctcattcaatctccattattacagccatggggaagagtgaaagatataaagtaacctaattaaatgtatggaattgctatttttatagctgatatagttacacctcaagcccctcaggggtaacaactaacaaacacccaaactgtttggattgattgctttaaaaaacaaacctggctcttatctttgatcttttcttccccagaaatagtaaacttgcagctgcccctaatgcagcatatttttcttaccaaaggagtcttcagccctataaaaggattcctctatagtgtatttctctagtgtatttagtgtgtcgtcaaaattttgatttatacagagctttcaagaacacacaatgcaaagtgagcgcagcatagctgttaacaaacatacaacttttttctagggctttaagggtggtcatttttttcgagttctctcaagtgtcccaaatcagggtagcaatcttgttgccacatgtgcagcaaacaaagtggaagtatagatcttcttctcccttagggaggctcttgaaggagcaggaggtacagtactgggtagcagtctggccctcctgtcgtctggttggtgttggggcctccagccagggccctctaggggaaccaagcctctgctctcacctgtgggttcttgcccatcagggtaattgtattgagaactcaaatatacgtgcacttacatgtgtggttcgtactcaagtgatctattatctagctgcaaagcctggctttgatttgaaattttgtaaaaatttcatggcacccaaggtttctgattctgacccagcagtggtcctgaagagagctgatggcaagtcttgtagtcattttgattttaattgaagggtgagcataaccttgtgaaccagcactagcttgttccaagctggaatttatctaatctatttttgtgtttaaaaaagctgtacctaccaaataaataaatagtttataaaatgtattacttaaggtattagctgagtttagagtactttctgcttaattaatttttatacttaactcttcagtagaggtttacaaagagtacaaaggttaaattacaaattcattcccagcctaggctctgggcacatttcctgttcttgaattctgctcctgaagagggtgaacaaatggggcattcaagttgtgagctcagaattactttaaaaggaggtaacagccagccattacacctaaatttaatttattttattaaaataacataattgagggaccatcagataactgtattttgtcaggtgcaataaaaacaaaattaaaacccaaatcatcaagaaaacctgtattcctggcttccttgtatacacatgatgtgactagagaaacaaggctgtttgtttgtttgtttgttagagaaacttagagaaacaaggctggcccttgtttgttagagaaacaaggctggccctgcggccccgccccataggggcagctcctggaagacaaaattcagcatgatggaagactgctccctgagagggctgagatgcggattggccgagtgccttgcctggaaaaccatcccaatgcactggacaccttagaagctgtgaaaggaggacgtgtcccctaagaaaagttccatagtaccaaagcaggctccttcgggcggccagagtctcggcagtcctgggctgtttggtgccttatgtgcaaaatgtctggcgctgcaccactctctgaagaaagtcccgcctgtgacatgcattcctccagaagctgatttccaaaatcccatgtgtctccacatcagggctggactgcctgctaccttacttcctctaaatactcatgtagccaacagctggggctgggcccctgctttttgtactaccatcaacatccacttgcgcatctacagaaggctgggccttgagcatggggaatgtggggagggagcaggacacaccagcactgcaaatggcttccttctcccagggcccaaagggatagaaaagaaggcaacatgaagttaaggccctgtgagcagtctagaaggtccttagcagcagcttctctgaaaacatgtgttctgcctctggagaaagggagcagaaaagtggtgcctgctggcttctcctcctcccctggcagcctgaagacaggtgcaaagtcaactagaagacaggcagcctcggggacgtggtcagcgtgcaagcattgatatcctcagtgtgggctgcccgatgcaaggatggctcggaagcgctccggttgatcttcggtagagagtgttggagcagctcaatggaagacaggatctggggaaaaagaggcctctcttcctttactttcttcacacagtcagctaccagcctcttcattgctttggggcagttcttatatagcttactaagatctggggaggcatatcctcggcccaccatgaagatgatctgatctcggttgttgatgtgagaataaggaagctcccccgtcatcagttcatacaatacgatgccataggagtagacatccgactggaaactgaatgggttgttatcctgcattcggatcacctctggggccatccagaggacagagccagtaggttgttcaacctgctgagaaccactccagcgtgactttactgttgccaaaccaaaatctccaattttcactgttaagccttcatggagaaatatattgttggatttcatgtctctatggatgatgttctttgcatgcaaatagtccattccctgagccgtctgccgggcaatgtcaattagctggaacatctgaaacttggtctcctggacatgcaggtgtttgtagaggctgctgccctcgcaccactgggtcacaattgccaggttgtcctttgtcatgtaccccatgaaaagcagaatgttcacatgccgtgttttgcgcagaacagccacctcattcctgaaggcctggaattgctctggggttgggtcgacaacctttaggatctttactgcaacatctccgtgccatttacccttataaacagttccaaaagagcctgacccaatccgagtggacagcatcacttcactggcttctatttcccaataatagcttgaatctctctgtccacgaggcctaattttgtttttctcctgggtcccagatactggtgcccgctctctttgtgctggcacgggggttttcggctgtgaccagcctgttgggctcagattgttggggctactggacagggctgaaggtgaggctgattcgctgtgacttcgaattgcatcctcaatcatcctgctgtccacaggcagggtggtgctgaccatgtggacattaggtgtggatgtcgacctctgcctctgggagagggaaccttcagatgagggactggaggtgttaaaggtgaaggcgtgaggtgtagaatatctgtgctgagaactaacaggcatcctggaaacagactctcgcatacgacgcatagtcaaagaaggtagtgctgggactccactatcaccaatagtggaatttggaaacaataagagttgtctgatgttactccagtccacacacatagtaggtactttggtgctacagtgctcatgaaatttgtagccacaagtctgacatcgaaatccattgagcaggaatttctgacagatgtcacagaaggcaagcttcaggaacgtcttccgagcaaagttgtgtgttgtgaggggaacatgatccaggaaatctacttgaagttcttctccaatcaaagacgcagcatcagtattccaatctaagcgtgcttttttacctttgtgttcgtggagaagtctgaacactgcacagcactctggttgcaggcccctcaccttgagtgctttcataaggcagtcatgcaagctcattccatttcgcacattgaccactgttctttgcttgttcggcaagaaaacacggatagtgttgcttgtcttagaaggatctgtgagtttgccatcatctgatgcccggcgctgatagccaaactgctgaactattgtaggagagatgcagctggagccatcaaacacggcatctttgaatccaaaaccattgctgatcgtcttccaagctccctgtatgtgctccattgatgcagcttaaacaattcttaaacctgagggagccaggccgccccaacgtcctgtcgttcggcggcagcttctcgcccgctcctcctccccgcggcgggtgagggagcgggaggcggtcacattcggcgcgtccccagcccaggggacggagccccgagcagcccccgcatcgtagcaaacgcgctccgcgcctcagggcacgcgccccaaagcccggccagctgacccttttcggggcccaaaaaaggcagcagaaagccgttcccgcctcacaatcgttttcctcttactcccgccatctaagatggcggcccaagcgcccgcgattaagactctcgggcggcccagacgagcgagccctcgactcggtgctcgtcctcccgacc

SEQ ID NO: 58699 - DNA, 3002 bp, Homo sapiens
ctggggggctcttataaaagggaaaaattaatgccggggtagggagaacccaagttaaggtttgggccaatttggccggaaattctcctaaaaggaaaacctttgtttatgggaaaatttaaactaaatgcactatggtagaagtgggactaaaaaggcttcaatttacattggtccgacaaaaaaggagttagttttgggagagccccaaggggtttggggcatatatgttatcgggtttatcccaaattaattttttgaaataaaaaaaccttttttttttttttaaaggaaagccacccaaagattagggagtaagcctttagtttaaatgttcaatttaagtattgtcaagcctaggctaaatagaggactgcattttcttagagtgtggaatacaacttatttatttcatttttgtttctctttctcttgctcttctttttgtcagcaaaaaggggaaaagctattcaattaagtacaaaggaaattccctgtaaggttaaaataaaaaatgaagctaccattcaagggaacttctctgtattcaaccctaatgtcagtggtttatcactgagttggaattaagtgaatcaaagtctctatcaagcatactccacctagcataccatctgtacctgtaattcatttagagcccagatggtggtgccagttcacacctaaatggtacttggttcaagcccagttcactttgagggtttgaggtgtttgacttgaaacatctgaaccatctccctctgttgggctgccgtcgttaccactggtcaccaggcttgaggatgctgcttccccccgccaggaatattttcttccaaaggattttcttctatctgggttcctctaccttcactgacactggcatcttcaaacattgaatcttctggcagcaccagttccacatccttcacaccttctgacccatctttgatacaggggagctgggaatctgcactgatttctgtagttgctggaggaatcagggcaatactctgagggttcatgtcatgaaaccaagccatgatgttgccgagaagattgtcattgatgttggggtcctggccagctgagtcaggatcactagatgagggacagaaatcacttcttgcctcactgagagggtgtgagctcagggtgtcagttgaaaatgggtcattctctgctcctagtctcatgaggctgtcaccaagttccaaaagctcagagctgctcaatgcagcccgagggctatctgtatttctggggacagagtccagcctggaaggtaaagaagtgcctatcgcacctaaggatgcttcattactgaggaagtctctagtttcttcatcgagggccagcccagactcttgcagtgataactgtattgcaagaagtatattgggatcgtcttcatccaaggaactcagagcctgaagagagtcctggttttcagagcgactggcaggggtgtagtcacgcagggaagagctgtgcagcacactcatagatgcagaacttaccacggatgtgccaggcctgcggctgctgctgccgccttctggaatatctaaagtgctttcacttggctcatcagggtctggaggattactgagtagactgtgaacatctcctcgacgacgttgtctgtgcctcctccgatactgaaattcagcatattcctctggtgatgcaaatcctaaatattcccaatcccatgttccaccagcaaagctgcgccttggagcttctggtgagtctgcaggagctactccccgagccacagatgccaggaattcttgcctcttctgctgtacaaggcatgctgctttgatgatcttgtggcggggtgtgcgaaggtaaggcctattgactttctgggcaaggtcttcagtgaccatttctaggtctgtttgcattagttcaaaaatttctttctttgtgcttttaggttccaagaaaaatccatatggataagaacacttgagaatgcgccgagtttttaagagcacatgaactgcatcttcaatgaaagtggtatctggacagcctccttcagtttctttgagagctctgctcaattgctccatcttttctttggctgttttaagaaggcgttgttctagctgataactatgctcatggtttttaaatcttgtataatagtgcataaatctgtcaagttcctgaaatcgtttgtgttttttctcagcctccacagtcatttccttggattgctcctccacgtgttgaatgacttcatagcgagtacatctgtaaataacctcccagtggacgaaactatgttttttccactcttcaaggcaaatccagcaaaagtcatacttgcacttagcacactgcatgtgattgcagccttcattcttctgtattggagacttacagttggcacaaggcttggagttagttaataaccagagacaattggcggcatcctcgtaggcttcactaactcccacaagttcttctggtttcatttcggttattttttgcagccaattcttccatgtttggcagtcacaaggctcatgtgcttcaccaaggcactcccagcagaagaggtgtccttttccacaatcaacagcaggagctctcagcaatgggaagctgagtgtatcagatccagatgtatttgacccttgtttcgttagtcttactgctctgtcacagcctggagtaggacaccatttaatggcaggattattttcaacaaaggccttaatatcaaactgtaggtatcgtttgtccatctcctttgaaactacactttttatgatatccccaggtacaagttggaagcaatcatatgcagggcaaaaaatgttgtgagcttccccttcttgaattttcagattcaaaaacctattaaaatggatcaatgcccttcccccgagcaaggatattaagttatgcgtgcattataaggattttccattttctttcctttttttgttagagacaggcatcgtgtcacgcaagtcgtaatc

SEQ ID NO: 58700 - DNA, 1868 bp, Homo sapiens
ttttttttttttcagccatagacacatctctatatttatatattagacgggtcagggaggtggcaggggcgccgggctctccacgccccccagctccacttctgctcaccacacacagaagcagcgagggcacgcgaagtgacagctttgacagggaggggattcggcccggcctggctcctcagggatgctagcccttgagactaaggaatgttccttcagggaaactagggtggggtttgaatgagatgaggggggcaggcatggccctgagtccctactcagcgccccccaccctccacctctgcccttcagcaggttggggcagccagaacccttccattccagaactgccagagactgggacgctggggaaggtaagggcgcagcagcagcagcagcgggagattgaactggggccacctgagctcccgaggccccgtggggagggcgggtggggaggagaaggccttggccttggcctgcctgaagctggaggcctcagcaaaggagagaggtggccaggcccatgctccaccccggcctgggctgccaaggtccgggctgggcacagtgtccattttctaacagtctggcgggagaggggcaggcaggaggcaggtccaggccccagggtgcagagatgtctgtctgggctagggggcctccagcactccgggctggaagcgtgctgtctcctggaagatgagctccttcagccgctccttaggtaggtcatccagctccatggcgaaggtgaagggctcctcggccactggctcatccgtcgggtcatagtactgctccaggtaggggtgagccagcgcttcctccactgtgatccgtttattggggttaaaggttaacatccggtccagcaggtcaagggctttggagtctgacttggggaaaagcttggcccaagccaccttggtcttggagggcagagactgtaggtagtttcgggccttcatgttgatgatacaattcaggtcctcctgggatggggagcccaggatgcccagaatgtggttgagctgatccaggtagtgcttgccagggaagatgggccggttagagagcatctcagccagaatgcagcccacagaccagatgtcgatggacttggtatagcccttggagttcagcatgatctctggggcccggtaccagcgcgtagccacatactccgtcaggaagccggtgtggtcatgctcaggatcggcaatccgggccaggccgaaatcacaaatcttaaggtcgcaggtggtgttgatgagcaggttggagggctttagatctcggtggagcacgttggcggagtggatgtacttgaggccccgcaggatctggtagaggaagtagcagatatggtcattgctcagctgctggcttttcagcaacttgtacaggtcagtctccatcaggtcctgcacaatgtagacatctctcatggcttccagggtggacgcccgcagaatgtctcggatgccgatgacattctcatggcggaagcgcagcaggatctggatctcccggagcgtgcgctggcagtaggtctgatgttcgaaggggctgatcttcttgatggccacgcgagtcttgcgcacgtggtcataggccgagctgaccatgccgtacgcgccctcgccgatgtactgcaactgcgtgtagcgcgggcccacgtcgaacggctgccccttcaccatctccacctcccccgggacccccgggccgaccccctcggttctacggggctccccgcccccgcccccctgagccgccgccgccgccatctccactcccgctgctgctgctgctgctgttgctgccgctgccctctggggccccggcggcgccgaggaacg

SEQ ID NO: 58701 - DNA, 1945 bp, Homo sapiens
ctcctcctgggctgggcccgcggtgtctcgtcccctcgcggagccgctcctgccgccgccgccgccgcctcctcattcatcctcgtgcaccataggcggcacaggcaccaagatgtccaaccgagtggtctgccgagaagccagtcacgccgggagctggtacacagcctcaggaccgcagctgaatgcacagctagaaggttggctttcacaagtacagtctacaaaaagacctgctagagccattattgccccccatgcaggatatacgtactgtgggtcttgtgctgcccatgcttataaacaagtggatccgtctattacccggagaattttcatccttgggccttctcatcatgtgcccctctctcgatgtgcactttccagtgtggatatatataggacacctctgtatgaccttcgtattgaccaaaagatttacggagaactgtggaagacaggaatgtttgaacgcatgtctctgcagacagatgaagatgaacacagtattgaaatgcatttgccttatacagctaaagccatggaaagccataaggatgagtttaccattattcctgtactggttggagctctgagtgagtcaaaagaacaggaattcggaaaactcttcagtaaatatctagcggatcctagtaatctctttgtggtttcttctgatttctgccattggggtcaaaggttccgttacagttactatgatgaatcccagggggagatttatagatccattgaacatctagataaaatgggtatgagtattatagaacaattagaccctgtatcttttagcaattacttgaagaaataccataatactatatgtggaagacatcccattggggtgttattaaatgctatcacagagctccagaagaatggaatgaatatgagtttttcgtttttgaattatgcccagtcgagccagtgtagaaactggcaagacagttcagtgagttatgcagctggagcactcacggtccactgaagctctgaatcctcagggatgccacctgcacattctcatactctgtccggggtcccagcctagcctttaccacgatactggtcctggtttggggggattctgaaacctcaaactaatagaactttcttctctttttttctagtaggggtagtccttccttaatttcaactcattaaaaaatgctttatagtttagggcagtggaaggaaggctggcatcaaaatattttgatcaaaaaagatgacaatgtaaaggctcagttgtggcagacagttttttgaaagtaacttgtaaagcatttaccatatcctaaatttgcactctttgcagacttgtgcacatatattccgctttcagaatagttttgcaaattgtacacaaacaaacaaaaaggtggaagctttttaataaagaaattgcatttataaatgatctgtattagaatataataaatctccagttatagtcaattactacccatgttgtacaacagatacgcttctattttgagttgcgtaatagaagggctacacaactcaaaataataaaaaaaaaaataaataatttaaaaaataaataaaaataaactgaatgaaattgaaaacatatcaatgtgagatgccactaaagtcatactaaaagggaatttacaccacttactgcctacattagaaaagaagtctcaaatcaatgcaaatcaatgacttctgcctttacagtaagaaaccagaaaaagagcaaataaaatccagtaagcagaagaaaggaaacaaagatcagaacagaaattaatataatcaggaaaagagagagagagagaatcattgtaaccagaagtttgaggaaaatcaaatcaattggtaaacctctagccagacagatcagaaaaaaacacgaaagacacaaaccagtctcagaaatgacaggtagcatcattac

SEQ ID NO: 58702 - DNA, 2000 bp, Homo sapiens
cgggtcgacccacgcgtccgcatggctccgcggctgtgcagcatctctgtgacggcgcggcggctgctggggggcccggggcctcgcgctggggacgttgcgtctgcagctgcggcgcgtttctattccaaggacaatgaaggcagctggttccgctccctctttgttcacaaagtggatccccggaaggatgcccactccaccctgctgtccaagaaggaaaccagcaacctctataagatccagtttcacaatgtaaagcctgaatacctggatgcctacaacagcctcacggaggctgtgctgcccaagcttcacctggatgaggactacccatgctcactcgtgggcaactggaacacgtggtatggggagcaggaccaggcagtgcacctgtggcgattctcaggtggctacccagccctcatggactgcatgaacaagctcaaaaacaataaggagtacctggagttccgaagggagcggagccagatgctgctgtccaggagaaaccagctgctcctcgagttcagcttctggaatgagccacagcccagaatgggtcccaacatctatgagctgaggacatacaagctcaagccaggaaccatgatcgagtgggggaacaactgggctcgggccatcaagtaccggcaggagaaccaggaggcagtgggcggcttcttctcacagataggagagctctacgtggtgcaccatctctgggcctataaagacctgcagtctcgggaggagactcgaaacgctgcctggaggaagagaggctgggatgaaaatgtctactatacagtccccctggtgcgacacatggagtctaggatcatgatccccttgaagatctcgcctctgcagtgatgctgcctacacctccacctccttccccttctccctcaggcaaccccgacagacagtggcactcctggtcctgctgtcttggttttgtcttggctctgggaggactctgaggggcagtgctcagttcagacaagggggaactgaaggctgacaagttctgaggattacagctctgcccaggccctttctactttccctgcctgcctccctccccctgctagaagtagtttctgatttccctgaatgaaagatagtgatcttttaggccttcatatatcttctaaaattcctcatctcaaggccaccagtccccagttatcacccttggaaatcctctgtttagcttagttgcacaaaaggtagtatgtccagtggctagaggtggggtgggaagagaggaggccaggccaggccctcaggaattccctggtttccactgggccacccacttgctggacagtctgagccaagtccctcctgctggagaaaagcctggaactgccaaaacaaaaaaacaaatacaaacaaacctcgtcaccacggtcaggaggaggttcagacattctgcccagaggggctggggaaagggatgggagccaggaaagatttaggggcaggagacagacacgtaacaggaactcggaaggtagaacttagaattcagaacttgggtttcaattgtagaatttggaatctggaatacagaattgggaagaagaacagagatgacaaaagaccacttgaagagaggttcctaatactagacagatggagagtggcttggctgtttccccctgcatattggggttgaaaacttaaatgtgtagttccagtccttctatgcagagtctctcctgccctccctccttcctgcaggcaaatatacaagctagaccctgttccctcaccctgtatcctgtctcccctaattgacattctatcagcccaaccctcattctgcagggccacctggtgtgtggaggtggcgggaggggtcagtgactctgggggtctcctcagtgacccccatacctcatcatgaacccttgggtagcttgattctgcctaccatccaggaaaacttgtgctggaattgctgatggaaacaattaaatatttactat

SEQ ID NO: 58703 - DNA, 1737 bp, Homo sapiens
agaccacatggttgagaaaggagaaagagaaaatgattacttgtaaagaaaaatccatttctgcagtggtatggttaaggataatctaaccataatcacattatccttgtatgcctggctacttgtgctggcctgtatgtgaatgttaaccccaaagactcctttagatgtcgctgaactagttactataaaaagtatttcgctttcaaactcccacatttcaagaagagcaaaactcaatacaaggcaattttgaagtttccctgaaacctgggctcttgaagacgcatcactggagcagatggataatggagactggggctatatgatgactgacccagtcacattaaatgtaggtggacacttgtatacaacgtctctcaccacattgacgcgttacccggattccatgcttggagctatgtttgggggggacttccccacagctcgagaccctcaaggcaattactttattgatcgagatggacctcttttccgatatgtcctcaacttcttaagaacttcagaattgaccttaccgttggattttaaggaatttgatctgcttcggaaagaagcagatttttaccagattgagcccttgattcagtgtctcaatgatcctaagcctttgtatcccatggatacttttgaagaagttgtggagctgtctagtactcggaagctttctaagtactccaacccagtggctgtcatcataacgcaactaaccatcaccactaaggtccattccttactagaaggcatctcaaattattttaccaagtggaataagcacatgatggacaccagagactgccaggtttcctttacttttggaccctgtgattatcaccaggaagtttctcttagggtccacctgatggaatacattacaaaacaaggtttcacgatccgcaacacccgggtgcatcacatgagtgagcgggccaatgaaaacacagtggagcacaactggactttctgtaggctagcccggaagacagacgactgatctccgaccctgccacaggttcctggaaagactctccaggaaatggaagatactgatttttttttttaaatcacagggggagatattttttttcttttaaatagttgtatttatttgaaggcagtgaggaccaaaaggaagttttgtgctttggcagactcctccatgttttgttcccttccccctgagtatgcatgtgcctgttcagagtctccagataccttttttataaaaagaagcctgaaaatcattatggtatataatctacccttaacagagcttttcttattacagtgctaaaatgatttctgataaaatggtccctaactcaactagaaggctaaaaatacaagaatgaaagaataagcagagtactcatgatgcctttgagaaaaatcaaaaacatcatgtagggtgacctagtttccaaaccaataaataagtagtattgtaatattaaaggaaaactgttccaatcatttaaaagtacttattaagtactgctttttacagttatgacaactgtttctttctatgcatataaatcaaggaaccaaatatctgtagccatggaaatgtctgactagaaatatttatattgaattctgaatacaaaatgtccctgtggtagaaaacttactctttatgcctggtgcagtataaattcccaagtgtactgtctaccagaaaaaaaaaacaaaactaataaaaaatgaaatatg

SEQ ID NO: 58704 - DNA, 1354 bp, Homo sapiens
ttttttttttttcagagtgaaaaactttattaacaacaggtttcaacgagaaagcaaatgaatacccctagaaacatggacagcatctcccccagcagcaggcaggggaagggaggcaggaggggtaagcctagggtgttccctaggaaagggccaggttccctctatccagctgggggcaccgagacggcctcattcagggaagtccaggatggcagctgaaggcagcaggtttagcagccaaagcccaggcctagtggatagacagggtccaaaatgtgacccttctaggctggtatcaccatgggggcgtcatgggctgaggattctgcagataggacatcaccacggcagagatggacagcatgaagctactcatcatttgcttcgtgtcctccgagctccgagagttggcaaagctgatgaaggagcagtagacagcgacccaagcacaccacttcagcttaagcatgaggccgcacatgctgaagatcatgcccagcaggttcatgtagtccggcgtcgggtcgtccaaggccgggttacattcgctcggcgggggcttgtacctcagcactttgttcggcctccgtgggtccgacatattgttagtggacatagcgagtcgaaggccagatcacgccctcttccgctgcaggaatcgcagcttccgggcgtgcaagctgagggcggattttagagtaacacccgagggccctcgcatttccgttcctcatgacagaggcttggactccccttacccagagaacggagatttaggagaagccagaagtcttcctttcaaagggaaaatggggaaaagaacctgaaagcgggcttcaatagttccaacccgatcaccgaaatgccaaaatgatgaacccggaagtgataaacaggaagtaggtcaggaagaacaataataaggttacacccaagcgtgggtttctaaggcgcggaattttccgtacagaccgatttaaggctgcaaggaaggagtcctgggagcatggctttccctgagccaaagccgcggcctccagagctgccgcagaaacggttgaagacgctggactgcgggcagggggcagtgcgagccgtacgatttaatgtggatggcaattactgcctgacgtgcggcagtgacaagacgctgaagctgtggaacccgcttcgggggacgctgctgcggacgtacagcggccacggctacgagctcctttgacaacagtagtctctgctccggcggcggggacaaggcggtggttctgtgggatgtggcatcagggcaggtcgtgcgcaaattccggggccacgcagggtcctccaaagtccagcctcctctgagtggcaa

SEQ ID NO: 58705 - DNA, 814 bp, Homo sapiens
ttttttttttttcctttaaaaattttaatggacaggaaatggtatagaataactgccaagtcacataagttaacttttttgttaatgtttgtgatcccggaaagaacacactatcagtcgatgcaaaccgcatgggcgttttcatcagtcgttgtctgagcacatgaccgagtgtgggccacggacccatctttacttggtccagaaataaaagcggctgccatgtgtggcaggctgcagatctccctcgatctcagggctgggatccggtcttggtcttgagtgatagggattctccggtaaaggtcgatctgttttcactttggtgacctttgacagttctcccaggtcaggccgcacccagcccagtttgtccagcacacactcgtcaaactttgcctgctgtttgcgacagtgacgaaataactgctggccagtataatcaatgcaagtccaatattctgtaaaaggctctgcacagtgacgttttatctgcctaaagaagtccaaagcacacttgttgaccagtttgccttcctctaaacaccgcctcggatctttctcttcccagcggcagagcataaattccttgttgggcttatcacattgagctccatagtgatgggccgcagctttaagcacagcagaactaattttcacctcatctactttcagctcctctagagtgggcagctccactatccccggcatgacggctgcagccccgaccccgacgagaagccctcagccgcgtcgcccccgtctccttgaactcccctttcgaccgccgagtgccacacggcgcctgcgcatg

SEQ ID NO: 58706 - DNA, 957 bp, Homo sapiens
ccgccccggcccgagagggtgctcggcgccagcagcccggaggcccggcccgcgcaggaggcgctcctccttcccaccggtgtctttcaggttgcagaaaagatggaaaaaaggacatgtgcactctgccccaaagatgtcgaatataatgtcctgtactttgcacaatcagagaatatagctgctcatgagaattgtttgctgtattcttcaggacttgtggaatgtgaggatcaggatccacttaatcctgatagaagttttgatgtggaatcagtaaagaaagaaatccagagaggaaggaagttgaaatgcaaattttgtcataaaagaggagccaccgtgggatgtgatttaaaaaactgtaacaagaattaccactttttctgtgccaagaaggacgacgcagttccacagtctgatggagttcgaggaatttataaactgctttgccagcaacatgctcaattcccgatcatcgctcaaagtgctaaattttcaggagtgaaaagaaaaagaggaaggaagaaacccctctcaggcaatcatgtacagccacccgaaacaatgaaatgtaatacattcataagacaagtgaaagaagagcatggcagacacacaggtttgcgctaagtgttgtctgtaacaaatatggcctacaatacttataaaaatgtcaacccacctgtttcaaacttggtatcccgcctaaatctttattcttctaggcttgtggtaattaatgagtataaatctttatcgcaactgtccactctattgtaatcccagcatatcaagataacttaggttggaatggtccattgcattcagtattaagaaaagatagacttctattaataaagacacagacaggcttgcctgagctcagaatccagcaatgtgtcacccctcacactgtgacccctgtaactgtagttctctgttctttaaagaaat

SEQ ID NO: 58707 - DNA, 829 bp, Homo sapiens
cggttgtcgccccagtggccgccctctgagcacgtgttactgccagtctgcgtcacgttgggtaaatacatgactggccgacgscgccgggcgggggctatttaagagacagmcgcccgctggtcctccctgaacttggctcagctgccgggctgctccggttggaaacgccaagccagctgcgtcctaatccaaaagccatgaacagcggcgtgtgcctgtgcgtgctgatggcggtactggcggctggcgccctgacgcagccggtgcctcccgcagatcccgcgggctccgggctgcagcgggcagaggaggcgccccgtaggcagctgagggtatcgcagagaacggatggcgagtcccgagcgcacctgggcgccctgctggcaagatacatccagcaggcccggaaagctccttctggacgaatgtccatcgttaagaacctgcagaacctggaccccagccacaggataagtgaccgggactacatgggctggatggattttggccgtcgcagtgccgaggagtatgagtacccctcctagaggacccagccgccatcagcccaacgggaagcaacctcccaacccagaggaggcagaataagaaaacaatcacactcataactcattgtctgtggagtttgacattgtatgtatctatttattaagttctcaatgtgaaaaatgtgtctgtaagattgtccagtgcaaccacacacctcaccagaattgtgcaaatggaagacaaaatgttttcttcatctgtgactcctggtctgaaaatgttgttatgctattaaagtgatttcattctaaaaaaaaaa

SEQ ID NO: 58708 - DNA, 1977 bp, Homo sapiens
tttcgtgtagacgaggacgccaacagcagcggagaaacgtttctctttcctctcagtttgcgcacaccatggcggcccctgcccagcagactactcagcctggcggcgggaagcgcaaaggcaaggctcagtatgtgctggccaagcgcgctcggcgctgcgacgctggcgggccccgtcagctagagcccgggctacagggcatcctcatcacctgcaatatgaacgagcgcaagtgcgtggaggaggcctacagcctcctcaacgaatacggcgacgacatgtatgggccagaaaagtttacagacaaggatcagcagccctctggaagtgagggagaggatgatgatgcggaggctgccttgaagaaagaagttggtgacattaaggcatctacagagatgaggttaagaagattccagtcagtggaaagtggagcaaataacgttgtcttcatcaggacacttgggatagagcctgagaaattggtgcatcatattctccaggatatgtacaaaaccaagaaaaagaagactcgagttattttgcgaatgttacccatctcaggcacatgcaaggcttttttagaagatatgaaaaaatatgcagaaacatttttggaaccctggtttaaagctccaaacaaagggacatttcagattgtgtacaaatctcgaaataacagtcatgtgaatagagaagaagttatcagagaattggcaggaatagtgtgcaccctcaattcagaaaataaagtggatctcaccaatccacagtacacagtggtagtagaaatcatcaaagctgtctgttgcctgagtgttgtgaaagattacatgttgtttagaaaatacaatctccaggaggtggtgaagagccctaaggatccgtcacagcttaactcaaagcagggaaatgggaaagaagctaaactggaatctgcggacaaatcagaccaaaacaacacagcagaaggaaaaaataaccagcaggtaccagagaatactgaggagctggggcagacaaaaccaacgtctaatccacaggtggtaaatgagggaggagccaaacctgaacttgcaagtcaagccacagaaggatccaagtcaaatgaaaatgacttctcataggaagtcatttggtgttggagctgacagtccagtgtcgcaattttggaaggcaagatgtgagagagacgagaaccattttaggcatagaactacagacatttctgaaaaggttggtgatgaagaacttcagtcttctgagtatacttcagtatactagtgcaacaagggacacaaagaaattctgtcttaataaagaaagctacttctcaagggtattatgtggactcagtccaagctctcctgtcccattgtgcattgtctgtgacatgcaacttacaaaactagcaattgtaacaataaatcacagccacttgacaagaaaggatattcattattttcaaatggcttttggactatcaaaaacagtaaggcttttgttcagaaatcacctttagtcaaaaggtttaagaagcaaattatttagtagcagaacttatctcaggaaaggaaaatatgcatggttggtgagaatctaataacattaaaatgctggggcaagatgcagtacaaagttgaagagactttattctcaataagttgatttactgatgatatgtcatatgatgcaaaaaagggtttggggccattaactgaaaaatagcagcttctctatccaggatgatgagtcaacaggtttcactaatatttgtccatgctgtagcatttgtaagatttgtaaatgatgaaattcaaagaaaactttttctattgctaggagcctgccagaacaaaggccaatatataatgttgtgacatcatatctgataaccagaggtctggtatctacactcctggtgccccatcagtggttgtctccataagtcattttgcgttattaaaaaaaaaa

SEQ ID NO: 58709 - DNA, 1778 bp, Homo sapiens
tgagcgcccagggagcagcgcagcgcgcgactgacacccacctgtcccgcccaggagccttgcaggctggagggcggctggagagcggcggcgcccggcggcgaggcgggcgctgccggccgggactcgggcagcgcccaccaaccgctccgccccgggacagccagcatgagcaagccagccggatcaacaagccgcattttagatatcccctgcaaagtgtgtggcgaccgcagctcggggaagcactacggggtctacgcctgcgacggctgctcaggttttttcaaacggagcatccgaaggaataggacctatgtctgcaaatctggaaaccagggaggctgtccggtggacaagacgcacagaaaccagtgcagggcgtgtcggctgaagaagtgtttggaagtcaacatgaacaaagacgccgtgcagcacgagcgggggcctcggacgtccaccatccgcaagcaagtggccctctacttccgtggacacaaggaggagaacggggccgccgcgcactttccctcggcggcgctccctgcgccggccttcttcaccgcggtcacgcagctggagccgcacggcctggagctggccgcggtgtccaccactccagagcggcagaccctcgtgagcctggctcagcccacgcccaagtacccccatgaagtgaatgggaccccaatgtatctctatgaagtggccacggagtcggtgtgtgaatcagctgccagacttctcttcatgagcatcaagtgggctaagagtgtgccagccttctccacgctgtctttgcaagaccagctgatgcttttggaagatgcttggagagaactgtttgttctaggaatagcacaatgggccattccggttgatgctaacactctactggctgtatctggcatgaacggtgacaacacagattcccagaagctgaacaagatcatatctgaaatacaggctttacaagaggtggtggctcgatttagacaactccggttagatgctactgaatttgcctgtctaaaatgcatcgtcactttcaaagccgttcctacacatagtggttctgaactgagaagtttccggaatgctgccgccattgcagcccttcaagatgaggctcagctaacgctcaacagctacatccataccagatatcccactcaaccctgtcgctttggaaaactcctgttgcttttgccagctttacgttctattagcccatcaactatagaagaagtgtttttcaaaaaaaccatcggcaatgtgccaattacaagactgctttcagatatgtacaaatccagtgatatctaagctcacaagatacccacttttcaggatgggacagtatcagatgaacttcaacccatggagaacaagcctcaactaacaaacccttcaggaagcatataccggggaatgtgtagccttcaggaaaaaaatgccaattgacacaaagcattccagtagctatgacctgccgccctgaccaggatagggcgggtgggaaggagaggggtgcaacaggaccgcctgcactgaaaactcactgctgccatgccctgggagggggcaaactgggggttgccacaggccgtgccattctgcctcttacctggaagatcaggctgaacgatcaaaagctgaacataagtagtgctttctcttcctttttagcatacaaagtttggtaaccaaatatagctctgtgtataacatcgtactgcggccttcaaaactacgttatgttggagcatttattttaa

SEQ ID NO: 58710 - DNA, 1085 bp, Homo sapiens
tccgtaggaagtttggcccaatatgtcccccccccaaaataaaggtccctcccaaaaattcccaagtagcagattttccagtccccacgttgttaaaacacgggcaaggcctaggttataaataggccccccataaggaaaaaactattacctcgcaagcacgggtaaacttgggccccccaagggatcctttaaaacggccgccccttttttttttttttggctatttatttatttattttttaaataaagattgggtcttatctcactctgttgcccaggctgatcttgaactcctgggctcaagcagtcctcccacctcagcctcccaaagtgctgggattacaggcatgtgccgtcacacccagccctgcttgttttaaaaggggacttttttttttcttaatggaaaaaaatgaaacagagagccaaaagcttttaactgttgtttttttcttttcttcaatgaaagcctctcattttgaaaagacatgtttttcttcaagcaacaaaggtggtagaggaaattcctcaactttctcaacgagtcatgtaacgttacactggcctccataaagcaccgattaagaaagctaaagaataagatgttgtatttcttttaaaataatttaaaatatattaaattttcctaaggcaggttttgtttgaatgaggtgtcttgattagataactacatgccactgaaggagaacagtacttttaaggagctatttttgtttcgcagtagagttgaaaccagctgattaatccaatgaagttaaacagcagagacagatctcgtacataagagtatcagctaaagtcatgactacaccaattctttacacaattaagacatctttgcaactgttcaatttaagtactatggtttttagataatcgagaaaaacacagttgtaccttaacatctgttgagaaaatacaaataaatatgatgctaataaatggccactgataactcagtagccatctgaatagtcatgcggtttaagaatacatccttgtataatctgacatacaaatttgtcatttcctgcacatgcacaccattgttaaaaaaaaaa

SEQ ID NO: 58711 - DNA, 1965 bp, Homo sapiens
cgagcgcaccgcgggaagatggcgttggaggtcggcgatatggaagatgggcagctttccgactcggattccgacatgacggtcgcacccagcgacaggccgctgcaattgccaaaagtgctaggtggcgacagtgctatgagggccttccagaacacggcaactgcatgtgcaccagtatcacattatcgagctgttgaaagtgtggattcaagtgaagaaagtttttctgattcagatgatgatagctgtctttggaaacgcaaacgacagaaatgttttaaccctcctcccaaaccagagccttttcagtttggccagagcagtcagaaaccacctgttgctggaggaaagaagattaacaacatatggggtgctgtgctgcaggaacagaatcaagatgcagtggccactgaacttggtatcttgggaatggagggcactattgacagaagcagacaatccgagacctacaattatttgcttgccaagaaacttaggaaggaatctcaagagcatacaaaagatctagacaaggaactagatgaatatatgcatggtggcaaaaaaatgggatcaaaggaagaggaaaatgggcaaggtcatctcaaaaggaaacgacctgtcaaagacaggctagggaacagaccagaaatgaactataaaggtcgatacgagatcacagcggaagattctcaagagaaagtggctgatgaaatttcattcaggttacaggaaccaaagaaagacctgatagcccgagtagtgaggattattggtaacaaaaaggcaattgaacttctgatggaaaccgctgaagttgaacaaaatggtggtctctttataatgaatggtagtcgaagaagaacaccaggtggagtttttctgaatctcttgaaaaacactcctagtatcagcgaggaacaaattaaggacattttctacattgaaaaccaaaaggaatatgaaaataaaaaagctgctaggaagaggagaacacaagtgttggggaaaaagatgaaacaagctattaaaagtctaaattttcaagaagatgatgatacatcacgagaaacttttgcaagtgacacgaatgaggccttggcctctcttgatgagtcacaggaaggacatgcagaagccaagttggaggcagaggaagccattgaagttgatcattctcatgatttggacatcttttaagtacattttcaacagtttgaggactaagcctttctaaaataacattgtaataaaccatttttactgagattgcaacgttttgcactgataaacatgagaatctggaggaaagacaattgttttcttgtttaaaatatgtgtggaaaggaatgcaattgatagaacatttaaagatatatctgacaaaatacttaagagtatatagcacaggatttaatttctcaatctgttgcatgtgctaattatgagtattactagttgataatcagttttgtctaggtcataacataccatttgtaagtttgtttgctttttcaggtttatctttgcagtgaattatgctttgctttaaaacattccgctaaaatcataatgggacatataaattattaagctgttagaaatgcattcaaatttgttttttctgtgttctaagaactcaggcaattttaaggataaaaactaacattggccaggcacggtggctcacgcctgtaatcccaacactttgggagaccaaggcgggcagatcacttgaggtcaggagtttgagaccagccaggccaacatggtgaaacttcatctctactaaaaatacaaaaactagccaggtgtggttctccatgcctataatcccggctactcgggaggctgaggcaggagaatcacctgaaccctggaggcaaaggttgcagtgagctgagatcgtaccactgtactccagcctgggcgacagagcaagactctgtctcaaaaaaaaaa

SEQ ID NO: 58712 - DNA, 2508 bp, Homo sapiens
agatagtaaataatctcggaaaggcgagaaagaagctgtctccatcttgtctgtatccgctgctcttgtgacgttgtggagatggggagcgtcctggggctgtgctccatggcgagctggataccatgtttgtgtggaagtgccccgtgtttgctatgccgatgctgtcctagtggaaacaactccactgtaactagattgatctatgcacttttcttgcttgttggagtatgtgtagcttgtgtaatgttgataccaggaatggaagaacaactgaataagattcctggattttgtgagaatgagaaaggtgttgtcccttgtaacattttggttggctataaagctgtatatcgtttgtgctttggtttggctatgttctatcttcttctctctttactaatgatcaaagtgaagagtagcagtgatcctagagctgcagtgcacaatggattttggttctttaaatttgctgcagcaattgcaattattattggggcattcttcattccagaaggaacttttacaactgtgtggttttatgtaggcatggcaggtgccttttgtttcatcctcatacaactagtcttacttattgattttgcacattcatggaatgaatcgtgggttgaaaaaatggaagaagggaactcgagatgttggtatgcagccttgttatcagctacagctctgaattatctgctgtctttagttgctatcgtcctgttctttgtctactacactcatccagccagttgttcagaaaacaaggcgttcatcagtgtcaacatgctcctctgcgttggtgcttctgtaatgtctatactgccaaaaatccaagaatcacaaccaagatctggtttgttacagtcttcagtaattacagtctacacaatgtatttgacatggtcagctatgaccaatgaaccagaaacaaattgcaacccaagtctactaagcataattggctacaatacaacaagcactgtcccaaaggaagggcagtcagtccagtggtggcatgctcaaggaattataggactaattctctttttgttgtgtgtattttattccagcatccgtacttcaaacaatagtcaggttaataaactgactctaacaagtgatgaatctacattaatagaagatggtggagctagaagtgatggatcactggaggatggggacgatgttcaccgagctgtagataatgaaagggatggtgtcacttacagttattccttctttcacttcatgcttttcctggcttcactttatatcatgatgacccttaccaactggtacaggtatgaaccctctcgtgagatgaaaagtcagtggacagctgtctgggtgaaaatctcttccagttggattggcatcgtgctgtatgtttggacactcgtggcaccacttgttcttacaaatcgtgattttgactgagtgagacttctagcatgaaagtcccactttgattattgcttatttgaaaacagtattcccaacttttgtaaagttgtgtatgtttttgcttcccatgtaacttctccagtgttctggcatgaattagattttactgcttgtcattttgttattttcttaccaagtgcattgatatgtgaagtagaatgaattgcagaggaaagttttatgaatatggtgatgagttagtaaaagtggccactattgggcttattctctgctctatagttgtgaaatgaagagtgaaaacaaatttgtttgactattttaaaattatattagaccttaagctgttttagcaagcattaaagcaaatgtatggctgccttttgaaatatttgatgtgttgcctggcaggatactgcaaagaacatggtttattttaaaatttataaacaagtcacttaaatgccagttgtctgaaaaatcttataaggttttacccttgatacggaatttacacaggtagggagtgtttagtggacaatagtgtaggttatggatggaggtgtcggtactaaattgaataacgagtaaataatcttacttgggtagagatggcctttgccaacaaagtgaactgttttggttgttttaaactcatgaagtatgggttcagtggaaatgtttggaactctgaaggatttagacaaggttttgaaaaggataatcatgggttagaaggaagtgtttgaaagtcactttgaaagttagttttgggccagcacggtagctcacccttgtaatcccagcactttgggaggctgaggtgggtagattacttgagcccaggaattcaagaccagcctgggcaacatggtgaaaccctgtttctataaaaaataatctgggctttgtagcatatgcctgtggtcccagctactgaggaggctgaggtgggaggattgcttgagcccaggaggcagaggttgcagtgagccaaggtcacgtcactgcactctagcctgggcaacagagtaagacaaaaaaatatatatatattgaaaatcaaaggaggcaaaattt

SEQ ID NO: 58713 - DNA, 840 bp, Homo sapiens
cccacgcgtccggagggaagacagagcagtgcatggttatggatactggacaaggatatttggaaaggttgacgatgtgtcacactgtgtaagggaatcgcatggagatgggcattccgaactgttaatggggacatgggactccagttgtctctgatcacttgtgtggattttcctggcgtagaacgacagaagccgctagtaagtcgccaagacctacagcaggaattctgcaccaaagggcataaaatcttgttattttaatttgcatctgggagaatgtctgagcaaggagacctgaatcaggcaatagcagaggaaggagggactgagcaggagacggccactccagagaacggcattgttaaatcagaaagtctggatgaagaggagaaactggaactgcagaggcggctggaggctcagaatcaagaaagaagaaaatccaagtcaggagcaggaaaaggtaaactgactcgcagccttgctgtctgtgaggaatcttctgccagaccaggaggtgaaagtcttcaggatcaggaatcaattcatttacagctttccagtttttccagcctgcaagaggaggataaatctaggaaagatgactctgaaagagaaaaagaaaaggataaaaacaaagataaaacctctgaaaaacccaagatcagaatgttatcaaaagattgcagccaagaatacacggattctacaggcatagacttacacgagtttctgattaacacattaaagaataattccagggacaggatgatacttttgaaaatggagcaggaaattattgatttcattgctgacaacaataatcattataaaaag

SEQ ID NO: 58714 - DNA, 3041 bp, Homo sapiens
ttttttttttttaattgttttatttgggaaaagtgcttcttacaaaagggcagctgcaaaatacagagacctctgcaacaattatttgttttttcttaaagtgaaagaatgggtgggatccaaggaatcaaagcagtagatggacaaaccaggagcatccccgagttattttcaggaaacagagcaacaaaacacaaaggtacaatttccaatcaaggaattcttccaacaacttaactttagctaatctcagggattcccaagccctccctttcggtggaaaagtatgacttatcactgcaaacccattactccactacaataaacaccttagaacagagttttgaatcacgtctgtctacctgaaagctcaggggtggaatgaggcaaatacccacaaaaacaaacacaaaaacccgacaacaaaatgcctcaagtgaggacaaaggtttctcagaaagtgcctgtactggaaaggctagatcgtaaaacattaaatacaactgtgtatccaagacccagtttgtgttattatatgggataaccaggtagttttaacctctatggctaaccccatttctctatttatatagacagagctagcactgctatattgacaactaccaatatactgctttgccctttaagatctatctgccacacaaggcttaaaccactaaaccaggtttttctactaaggctaagaatactgcatctatgcagggatgagaagcttatcacacacccacacactcacaccatgtcagcccttgggagccaacttccaactctgcattgatgttatgcctctctatcttttatacgtattctttctcaattttcctatcatgcaaaacagtaaaaaatctcaacacattcacacctgattctggttacccagtagtattacttgtgtgcaattaaacaagagaccaaaaccacagaacaagtgcacgtggtagggattacagggtagggaacagatataaaaacacagatgtgcagatttcaccagaaacctcaaggatccacatcccatgtctggggcagagggctattggccagcttaggtcccttcacccatcactcctattcttggaccccaaagcagggccactgcttttacttttgaacctggggtcctcaaaatgagtgtgtgaaaagtccataaatgcaatctggttgaaaacagatgacgcaacacacctacactaactgtctgacagttaaattcgtgttacaaaaaactaactttaagatttatttttgtaacttttttcaacagggaaaacaacacactcctcagggaaaggtgaggggttgagaagacaggccctgggtaaaaattcttaggacagcacctggagttgagaggcctgcctaggagagaacacaggcactgccacaccaccacaggggacagctgctgtctgaggtcagcagaccagttcacacgccacgcaaggttgctatagatccaagtcataaaaatcttccagctcatcatgaaacaagtcccactcatcttcagagtctgttagttcgtcgtccccacctgcagccaaaagcataagcaacatctcgcccagctcaaaggtgacaacctcttcttcatcgttgtcaaaggggttgctgttctctctttcctcaatgagttcccagaagtggttccttcgttgggcccggtatctgcttgatgttcccactttctgtctctgtggctcctctctacggccatcagggtacgcatgcttgtaaaaacagttccctccaaatgggcagctcccacgtccttcatcaaaatacctgcacgccttgttgctcattgcctccttgtatttcagaatgagtttctgcttctcttctttctcctccacccagtactcacttggaatgacaaagttagatgtgatccggcattctgggcaggactttatgatcttgctctcaaattgcttagcactcctccacttgcgaatgcacttgagacagtaggtgtggttgcagttggagaggatcccgaagcggcgctcactggggttggctttctcatagaccacctccatgcagatcccacacaccatgtccttgctgcgctgcacggcaaatgagagctccatgtccttctcatgggcctcaatgcacgatttgatatgctgcgatctctgggcagcatccattggatgcaggacctgcagcccacacatgtcacaagaatctccgtggagatacacacagttctccccgtatcggcactctcccactgcagcataggggcacagctgcttctttgtctccacggcggtttgctctttctctgattcttccttggtcactgagccctgcaggggtgcttcagtgcaggaaggcgcagtacggccacagtagggttgcccaggaacaaactcaatagcattcacccagtcctctgaacctgctcctacagttgcaaagtttgaatttcttgactcagcttcgcctgtattcatttcaacaagtggtccaactatcgatgagagacttgaggaagcagcaagggatgactttgtagttagctctgtagcagttgcttcttcctgtttcaatggtttgctatgttcatatctgcagcggtctccataaatacagtaccctcgctgaaaatacttgcacactacactatacggactgtcagagaggtcatgcgagtagcgacagttgtctccttccttacaaaccccatgcataaaatacctgcaggtgacctgtttagtccagccgccgccgctgccgtcgctgccgccgccccctccgcccgcccccagggacggggcggtgactgtggggatcggggtgggggaggctgctgccgccgtcgccgctgccgctcctgctcctgatgttgtggctgttgttccgggagttgcagcctccgccattactgtttatcccacacagcaaaggccccggaacttccgggatcacatagttccggtccggctgcggggagaggacggcgaggccaggcgaggggaggggaaggacactgaggcacccgttcg

SEQ ID NO: 58715 - DNA, 1513 bp, Homo sapiens
ttttttttttttaaagagatagttttatgggtaacagtatgggacagactgggaaggttgccagggcctgtagtgatgagcttcccaggaatagaccaacacacaggcaggagtggcccagacagacaagtagatagacagacagacagagggacaagaaaacaaccaagtgggtaagaggcccaggccaggctcagcagctgtgtccaggcatcagctccagctctgctctggggaactggtggaggagaagggctggccggggcctcagtccttacagggctccttctcctcatgccctactatccctcatccagcctgctgggatccttggcaggtggaattcccagggctatggatggctgggctgagtgagcagaggatcgaggctcttggagactccctggggaggtggaggcctgggtggtgtggggttagcagcagcactggggggaatctggtcaagttccaggatggggccactgctcagcagggcccctgtgtccagggcaggccctccacctgcccaccacaccaacatggtgcaataaataaagtttcaagtagtaagtcagtgtcaagcaggagagctgcaggctggcagacaggcagggactgagaaagagaagcctccagccacccaccatatctgctcagtgggctcaagcggtcgcaagtctgtcttgtgcactggagtgggtgtctggccctgatgtcccatgagcactccccgcaggggctcagcccctcacaccagcgccagagcctgctcggtggggcagaagcagggcaacatggtgcccacagcgtccacgatggctgccaggtgctcgtcctgcgcctgaggcccacagagctgcatgacgtcccgcacacgcagcaagtattcaaggttgtggccggagaagccccggcaggccaggatctgcgtggcaatggcctcttcaggcgcagggcccaggtaaccagggttctgtggggtggccacataggccaatgccttcagtggttggtcaggagcatcttggggatagaaggtgacctccttggtatcgtagccaccaagcactgcctctcgcacattcaggtacttcagggccttgcttacctgctccccttgcacttggtatgccacgccccaagtgcagccctcatgatcttcaaggagcgtcaccacacggccaggcatcttgtcgctgccccgatggaaggtgtctccctgccagaaacggcggctgtagccgcgcacgaagcccacacggctgtcgctgtaggcgaagtcgggcctccacaccagggagccgtacccgaaaatccacagcgcttgagggtcgccgtcgtttcgggggaactgagcggacggcgtaggggactgcgaggtgggcggggtgttcggggctgcagactcctgcttcatggtgcctggcacagggataggcccaggcggcctccggggctggtctccggcgtgggcacggaaagaccgacggacgcacacacctggcctcgtgcc

SEQ ID NO: 58716 - DNA, 3248 bp, Homo sapiens
ggcacgagagtaacgccattaccgccggagccgccgagagccttagccgacggaaactggacactggaccggcagcgccatgagactcctcccccgcttgctgctgcttctcttactcgtgttccctgccactgtcttgttccgaggcggccccagaggctcgttagcagtggcacaagatcttacagaggatgaagaaacagtagaagattccataattgaggatgaagatgatgaagccgaggtagaagaagatgaacccacagatttggtagaagataaagaggaagaagatgtgtctggtgaacctgaagcttcaccgagtgcagatacaactatactgtttgtaaaaggagaagattttccagcaaataacattgtgaagttcctggtaggctttaccaacaagggtacagaagattttattgttgaatccttagatgcctcattccgttatcctcaggactaccagttttatatccagaatttcacagctcttcctctgaacactgtagtgccaccccagagacaggcaacttttgagtactctttcattcctgcagagcccatgggcggacgaccatttggtttggtcatcaatctgaactacaaagatttgaacggcaatgtattccaagatgcagtcttcaatcaaacagttacagttattgaaagagaggatgggttagatggagaaacaatctttatgtatatgttccttgctggtcttgggcttctggttattgttggccttcatcaactcctagaatctagaaagcgtaagagacccatacagaaagtagaaatgggtacatcaagtcagaatgatgttgacatgagttggattcctcaggaaacattgaatcaaatcaataaagcttcaccaagaaggttgcccaggaaacgggcacagaagagatcagtgggatctgatgagtaaatgttcctttgtgcaacaattcggtctttacttaacctgccctaatatttttcggcctgatgggaattagtgcagagaagccatgtcaccatagaaggcaactcctacttgtgtgtggactgagcaatcagagtctgtggcgataatattgctgaaaatgcactgcattcatttttctaaagtaacaaatttggtttttttttaaaccattaaaatctatgtgtgtgcgtgtgtatgtatgtgagcagttggtcttaccagaatcattgttgaactacctgaaacaagtctttagaatactaaatataatgctgttgtctcttcctttttgacattttctgatttttttcccccaaaactcagttaatatttacccactatgattattgatgtcctgccttgaacagttttaaagaaaacaatttttggaatagctcaaatttcaattgatggcacaaatcagcattttgttgttgttactgtattacaattagtattctaaaggcagaagcagaagtagctgctttttagcaatagaattgtttcagtattttgctgctgtttaatgcgcatcttcagaaaacttcccagtggcttcaaggaatttggggatctctctggcaacaaattgtgaaacatgaaatttctgctgactttaatatatgaaacctaatcctacccccttttttaacaaaaagaaactagtacatttgtgaaaattgtgttgtgttgtccattgttgctctagttctgacccagaggtagctctggagtgattttagacctactcactcagttgtgtgtaggtttttttgttttgttttgagagagaatttttctctccttaatagaagcatcctttttaaagagaagttgccttggtccacacactaagcagaaaaccaagttatcaggacagagatatttcccagttactcctaatcaatgaagaaagtgagttggatatttttaaagcagttaactaattttttcttacctaatcttttgggagttttgcttgttgatataacctttttagttaacctgaaagattccaaaaattgttcttaagtgcttgagactggaaccaaaattaaattgtacttcataaaatcctcttatagagttactcttgccctagattgtaaattaagtttggcattattgtcagactggatggagggtgaagtaaaatagtatgaacaattaagaggctctccccctcttgtctttaagccatattctcctacatgtattttataagaaaatgttaagtcaaattttagtggctctttaattcctgacctcttcattctccttttcagtataacctcccctatgctcatgcccacacagacaaaaaaacaaaacgaaatacacacagaaaaaagtctttccaaactgtttaagtatttaaacatctgagccaaagcagatagaagttattgtataattgttaatcactttgcaaataggggctatcaaattacctatattggcattgctggattataaactctatatctgtaatataaagtgtttgagtttttaattgggctgttatgatcagtagttgattttgagaaagctctatgagctctaagtaactgcatggttttttgtttaatgtaatataggagacccttcacattcccaaggaatatattccaaaacatttttgtgaatatctaagtttgtgaaactactagggcatgatacagtaaggtgtaattacagaatttacgaaatgtaaatgacctctacagagttttatggaatacctggtactaacgtaggcagctgcaaaaccacactgagttacagctgtcagccctcctcattcctaaataacttgccttacatatcagccctcccacttctgaagttcaaattagtgcctcggaaatgtagaatttattatttgtcatttttttttttttagcatagattgagaacagttgaactcttaaatcctcagatgccaggggtctgctctagcatcagtaagtatttagcagaaactaactccgtaatgaatggaattcaattccacacatggtttgttcaagcacacttaataagtagcctattttttaaatgtctttttaaaatgtaaatatttggatgaagtttttctttgttttgatatattcatttgctacaccaactatgttttcagaattcatcttttgaacaacttggtttcagaatatgtaaaatgactttaaggatcttgtgtatcaaacctatccccggatgtgtgagaataatgtgttcataaagcataaatctcgcaaaaaaaaaaaaa

SEQ ID NO: 58717 - DNA, 4514 bp, Homo sapiens
cttttatgaatgtcaagctattaattcaagacttggaggatattgagcagagggtgcctgtgatggatgcccaatacaagataattacaaagacagcacacctcattaccaaagaaagcccccaagaagaaggaaaagaaatgtttgcgaccatgtcaaagctcaaagagcagctaaccaaggtcaaagaatgttactccccactcctttatgagtctcagcagctgttgattccgttggaggaattagaaaagcagatgacgtccttttatgactcacttgggaaaatcaatgaaattatcacagttcttgagcgtgaggcacaatcgagtgccctttttaaacaaaaacatcaggaactgttagcttgtcaagaaaactgtaagaaaaccttgacacttattgagaaaggcagtcaaagtgttcaaaagtttgtgaccttgagcaacgtgttaaagcattttgatcagacgaggctacaaagacagattgcagatattcatgttgcttttcagagtatggtaaagaaaactggagattggaagaagcatgtggaaaccaacagtcgcttgatgaagaagtttgaggagtctcgagcagagttggagaaggtactgcggattgctcaggagggcctggaggaaaagggggatccagaggagctcctgcggagacacactgagtttttcagtcagctggatcagagggtgctcaatgctttcctgaaagcttgtgatgaactcaccgacatccttccagagcaggagcagcaggggctgcaggaagctgttcgaaagctccacaaacaatggaaggatcttcaaggagaagccccttatcatttgcttcatctgaagattgatgtggagaagaataggttcttagcctctgcagaagaatgcagaactgagctggatcgagagaccaagctgatgccccaggaaggcagtgaaaagataattaaagagcacagggttttcttcagtgacaaaggtcctcatcatctctgtgagaaaaggttacagctcatcgaggaactctgtgtgaaactcccagtgcgggacccagtaagggacacacctggaacctgtcacgtgactctcaaagagctcagagctgccattgacagcacctacaggaagctcatggaagacccagacaagtggaaggactacactagcagattctctgagttctcatcttggatatctacaaatgagacacaattaaaggggatcaagggtgaggccatcgatactgccaaccacggagaggttaaacgtgccgttgaagagatcagaaatggtgttaccaaaaggggtgagaccctcagctggctgaaatccaggctgaaagttttgacagaagtttcttctgagaatgaagcccaaaagcagggagatgagctggcaaaattatccagctctttcaaggctcttgtgacgctgctgtcagaggttgaaaagatgctaagcaattttggggactgtgtccagtacaaagaaatagtcaaaaattctctcgaagaattaatttctggctctaaagaagtccaggaacaagctgagaagatcttggatactgaaaatctgtttgaagcacagcagttacttcttcatcaccagcaaaagacaaagcggatctcagcaaagaagagagatgtgcagcagcagatcgcgcaggcgcagcagggagaaggggggctgcctgaccgaggccacgaggagctgcggaagctggagagcacactggatggcctggagcgcagccgggagaggcaggaacgccgcatccaggtcacattaagaaaatgggagcgatttgaaacaaacaaagaaacagtagtaagatacctttttcaaacaggttccagtcatgaacgcttcttgagttttagcagtttggaaagtttatcttcagaactggaacaaacaaaggagttttctaaacggacagaaagtattgcagtccaggctgagaaccttgtaaaggaagcttcagagataccgcttgggccccaaaataagcagctgcttcaacagcaggccaagtcaatcaaagaacaagtcaaaaaattagaagacacgcttgaagaagagtatgtgattgacaagtcctaaactttcttctctgagataaagtttcatacaatctttcctgtaccttgtattcaaaacactcttttaaaatctcaaagtgtctgtgtatttcagcatgttttgaggaaacaactcacagttcaaaagaaagtatcgctaatacagaaaccaatatctataacagagcccaaaaaatataaaggatgtgggttttgcatcttaaactgatcatgttcatgagaaagccatatctattctattctgtggcctttgtacattgtagagggaatcttgaaaaagaactaatatttaaaataatttttttactatattattctgctgtcaccatttagagcgaaaaggagatattttgttagtgtagattccaggcctaaatacacatcacatagaccatatatctccaacctgaagaagctcctggagcttgtttacagtgcctcggtattcaagttatcctgactaatatgctctttccagaaattaactttaaaatattttatttttaaacttttaatgtttgtttatctgaaaaaaaaaaactgcttggcctattgatatcctgttatatacccaaaatatacaaaaaagtttggaggggaaaaacatatgaggatacagccaatattattcaaaacaatatggctaaacatttctatttttaacataatttagtggcaaatcaatgatacataatagcatattattattaagggacaggccatcatttctaaggtgggttttaaaatgtaaaatgtgtttttaatactattaacagcttaaaattaacattttacatttgcctaaactttaaaatttgatacatattttatttaaaacaaattatgacttgaaattttgaggactttatattacattaaatattctctatcaagttatggaaatagtaaaacagagtttattagaaaggaatttacttctattaagaatagccattttaacctttatttaatttaaaaagttgcaatataacacagcttgcattacctgtactgctgacagcattaggcacattcagggtataaatttgagactgcaatattatttaatttgacagtcaatgatgccactctatttttcttgatgtcttcaagtgccttttggtaaacagggacattctttcactttttttttttttaccccagggacttactagttcaattatatactgttagtttcttagtctttttctaaactgaaagccatagcccccgggttatacatgcatagctaatacaaattaaaaatctatagttgaaattctgttcactaaatttgttacaaataaaacctataagttgtctaaaagtagttagggtgctcatgtacaataatttataaatgtcttttggaatcaggaccataagacatttatgaaaatggctgaagtcacaaagattatacatcgcaggattagctctaataatagaaacagttcttgcccggcagcatgggattgagatcacgagctctgtcttgattgataagatgcagtttataaaggtatttctatagaaagcatcactgcagtgtctctcctttaagtgtaagaagaacatttctttggaaataggactattgaaaagctgtgtacactgaaatcttttctggcatagtttataaaaataagtcctggcaacaactggtcacatgcagagtttaattagattctacctggattcaaacccctttggacccagcaatgttttgttcaaagtgcagtttcactcaaagtgtagatactgcctcattaaatgttcattctcagagaagataggaaaacctgataaactactcagaacaactgtgcaattttttttttagcgtgaatagtttcaactttgaaatggtcacaaatgtcttcattatctcttcacctggtgatttcaaggaaaatgtgttgttgttctctattaaaatactgagttttatttacttaatttggttaattttagtattaaaaccatggaaatggtgaaaaccaagtgggatcattttggcagtaattttgagactctgtccgtctggataactgagaaagaaaaagaactcaatgccttggaaacttcgtcatctgccatggacatgcaaatcagccaaattaaggtgacctgctcacacattatatttataatccatgtctagcttttaagaactactttcttacatttcatcaaatgctgttcggtcccaggacaagactttcattgcaatgtgactattaaaattaaattcatacattttatcaagctaagaggtctggattaatactgggcaacatttatagttggaattatgtattcacattgtctgacttgtgcattcaaagttaatattgtgtgaaatatcattaaaatatttttatggttacattaa

SEQ ID NO: 58718 - DNA, 533 bp, Homo sapiens
agagagagaactagtctcgagttttttttttttttttcttttttccggcgttcaagatgtcgaagcgaggacgtggtgggtcctctggtgcgaaattccggatttccttgggtcttccggtaggagctgtaatcaattgtgctgacaacacaggagccaaaaacctgtatatcatctccgtgaaggggatcaagggacggctgaacagacttcccgctgctggtgtgggtgacatggtgatggccacagtcaagaaaggcaaaccagagctcagaaaaaaggtacatccagcagtggtcattcgacaacgaaagtcataccgtagaaaagatggcgtgtttctttattttgaagataatgcaggagtcatagtgaacaataaaggcgagatgaaaggttctgccattacaggaccagtagcaaaggagtgtgcagacttgtggccccggattgcatccaatgctggcagcattgcatgattctccagtatatttgtaaaaaataaaaaaaaactaaacccattaaaaaaaaaa

SEQ ID NO: 58719 - DNA, 1643 bp, Homo sapiens
agggtcgacgatttcgtgctgaaggctcggttcatgccgtgcccccgggcagttctggtgaggctaagcaagaggcctctgcatcttgacacctaggagagcagggacggagtctcccagggtggaggaccatgctgcgccgcaagccctccaatgccagtgagaaggagcccactcagaagaaaaagctctcccttcagcgctccagcagcttcaaggattttgccaaatccaaacccagctcccccgtggtgagcgagaaggagtttaatctggatgataacattccagaagatgactcaggtgtccccaccccagaagatgctgggaagagtggcaaaaagctggggaagaagtggagggcagtgatttcccgaaccatgaacaggaagatgggcaagatgatggtgaaggccctgtcagaagagatggcagacactctggaggagggctctgcctccccgacatctccagactacagcctggacagccctggccctgagaagatggcgctggccttttctgagcaagaggagcatgaacttccggtgctcagccgccaggcatcaacaggcagtgagctctgcagccccagcccaggttctggcagcttcggggaggaaccacctgccccccagtacacagggcctttctgtggccgggcacgagtccacaccgacttcactcccagcccctatgaccacgactcgctgaaactgcagaaaggagatgtgatccagatcattgaaaagccacctgtgggcacgtggctgggcctactcaatggcaaggtgggctctttcaaattcatctatgtggatgtgctgcccgaggaggccgtggggcatgcccgccccagccgccgacagagcaagggcaagaggcccaagcctaagaccctgcatgagctgctggagcgcatcggcctggaggagcacacatccaccctcctgctcaatggctaccagacactggaagacttcaaagagctgcgagaaacacacctcaatgagctgaacatcatggatccacagcaccgggccaagctgctcacggccgccgagctgctgctggactatgacactggcagtgaggaggctgaagagggcgccgagagcagccaggagccagtggcacacacagtgtcggaacccaaggtggacatcccgcgcgactcaggctgctttgagggctcggagagcgggcgcgatgacgcagagctggcaggcactgaggagcagctgcaaggcctctccctggccggggcaccttgaggtggcggtggcaataggccagggctgggacccagctgcaaaggctgtaggagtgggcccagcctcccgtggtggcccaggccctgaggactggcactgagcctggccctgcttccccagggacacttagggccacagaggccaggccagggccctacaggttccaggctcagctggagtggttggggagtcgcccaagggcacatcccacctgcctgagccccgccctccaccagcgactgacagcgcagcccctcctggcaccaactgctcccctgccatggccacggccacagcaagtggggcactgggaaaccctgcccatgtccctcaccaacaaggcctccaaatcctcctcacccccacacc

SEQ ID NO: 58720 - DNA, 633 bp, Homo sapiens
acgcggggacactttcttctgacataacagtgttcactagcaacctcaaacagacaccatggtgcatctgactcctgaggagaagactgctgtcaatgccctgtggggcaaagtgaacgtggatgcagttggtggtgaggccctgggcagattactggtggtctacccttggacccagaggttctttgagtcctttggggatctgtcctctcctgatgctgttatgggcaaccctaaggtgaaggctcatggcaagaaggtgctaggtgcctttagtgatggcctggctcacctggacaacctcaagggcactttttctcagctgagtgagctgcactgtgacaagctgcacgtggatcctgagaacttcaggctcttgggcaatgtgctggtgtgtgtgctggcccgcaactttggcaaggaattcaccccacaaatgcaggctgcctatcagaaggtggtggctggtgtggctaatgccctggctcacaagtaccattgagatcctggactgtttcctgataaccataagaagaccctatttccctagattctattttctgaacttgggaacacaatgcctacttcaagggtatggcttctgcctaataaagaatgttcagctcaacttcc

SEQ ID NO: 58721 - DNA, 820 bp, Homo sapiens
ctttcccgagcttggaacttcgttatccgcgatgcgtttcctggcagctacattcctgctcctggcgctcagcaccgctgcccaggccgaaccggtgcagttcaaggactgcggttctgtggatggagttataaaggaagtgaatgtgagcccatgccccacccaaccctgccagctgagcaaaggacagtcttacagcgtcaatgtcaccttcaccagcaatattcagtctaaaagcagcaaggccgtggtgcatggcatcctgatgggcgtcccagttccctttcccattcctgagcctgatggttgtaagagtggaattaactgccctatccaaaaagacaagacctatagctacctgaataaactaccagtgaaaagcgaatatccctctataaaactggtggtggagtggcaacttcaggatgacaaaaaccaaagtctcttctgctgggaaatcccagtacagatcgtttctcatctctaagtgcctcattgagttcggtgcatctggccaatgagtctgctgagactcttgacagcacctccagctctgctgcttcaacaacagtgacttgctctccaatggtatccagtgattcgttgaagaggaggtgctctgtagcagaaactgagctccgggtggctggttctcagtggttgtctcatgtctctttttctgtcttaggtggtttcattaaatgcagcacttggttagcagatgtttaatttttttttaacaacattaacttgtggcctctttctacacctggaaatttactcttgaataaataaaaactcgtttgtcttgtcttctgcc

SEQ ID NO: 58722 - DNA, 1098 bp, Homo sapiens
  misc_feature (1)...(1098): n = a,t,c or g
ttttttttttttggcataaacacaaactttattgaggccctcagcactagttctctttctcctgcacagtcttggttccccggagacgtccagtccggcgggcagcaatgagacccactttgcggccagcaggggcatctctgcggatggtggagggcttgccgatgtgctggtggttgccacctccaaaaggatgctccacaggattcatggccacaccccgtactcgtggccagcagttcctctttgccttatatttgtggtacgcccggccagccttcaagatgggtttgtcaattcggccacctccagccaccacaccaaccacagctctgttggctgaggagataaccttcttggagccggagggcagcttcacacgggtcttcttggtctcagggttgtgggagataacggtggcatagttccctgatgcccgggccagcttgccacggtctccaggcttctcctccaggcagcacacgattgtaccctcaggcatggtgcccacagggagcacattgccaatgttgagctgggccttcttgccgcaatacacaaactggcccgtgtgaatgccctcggcggcaatgaacagctccgtccgcttcttaaaccgatacggatcccggaagaccaccttggcgaggggcgcgccgcggcccgggtcgtggatgatgtccttgacgatgcccttgatgtagccgtgccgctcagcgaaatccacggcgcgcaggcgcgcagcgcctttacggtgcttcacgtgcgcgcggaacacagacccggcgcccttcctctgtccacggatcacacggcccatggcgacgggtcctgggggcgactcacgattagcgcggccgggcggcccgggtacccccgccagcccggctttccgggaccccgcccccgaggccgccgcgcccaccactccctaccctctccgcgggcgcccgcaccggcatcctctcaggagggccggtccgggtctcagcgcgcctcacggaagaggatggcggcggatactgcccatgccgcaaggccgcaaggatgacctacctggaattccncgcnncgggctagtggtctcgattggtcctg

SEQ ID NO: 58723 - DNA, 1021 bp, Homo sapiens
cggaagtggcgatcggagcggaagtggagctaccgccaccgccgccgccgattccggagccggggtagtcgccgccgccgccgccgctgcagccactgcaggcaccgctgccgccgcctgagtagtgggcttaggaaggaagaggtcatctcgctcggagcttcgctcggaagggtctttgttccctgcagccctcccacgggaatgacaatggataaaagtgagctggtacagaaagccaaactcgctgagcaggctgagcgatatgatgatatggctgcagccatgaaggcagtcacagaacaggggcatgaactctccaacgaagagagaaatctgctctctgttgcctacaagaatgtggtaggcgcccgccgctcttcctggcgtgtcatctccagcattgagcagaaaacagagaggaatgagaagaagcagcagatgggcaaagagtaccgtgagaagatagaggcagaactgcaggacatctgcaatgatgttctggagctgttggacaaatatcttattcccaatgctacacaaccagaaagtaaggtgttctacttgaaaatgaaaggagattattttaggtatctttctgaagtggcatctggagacaacaaacaaaccactgtgtcgaactcccagcaggcttaccaggaagcatttgaaattagtaagaaagaaatgcagcctacacacccaattcgtcttggtctggcactaaatttctcagtcttttactatgagattctaaactctcctgaaaaggcctgtagcctggcaaaaacggcatttgatgaagcaattgctgaattggatacgctgaatgaagagtcttataaagacagcactctgatcatgcagttacttagggacaatctcactctgtggacatcggaaaaccagggagacgaaggagacgctggggagggagagaactaatgtttctcgtgctttgtgatctgttcagtgtcactctgtaccctcaacatatatcccttgtgcgataaaaaaaaaa

SEQ ID NO: 58724 - DNA, 950 bp, Homo sapiens
cggttttaccattttaacaaagcttctctctgtgcccacatggatgccacttagtcctccagaagcccacagtacagaggaggaaagttcagagtagagagacaacttggccaagattgccatcagtacccaagctgtggaaccaggactcagaactgggtttgatgactgaatcccacattcttccctctttcagctgcccactgctgtcacacaggagaaagaagggctgactgctgttttcgggagccggtgatccacactctgccttgagctgttggattcctcgtccactaaggtgatgcgctccagaggacaacccttgctctggccccgatgaacaaacatttcactttcaaaagctgagttttcagccttggagggggagacttcttcatttatgttcactttgttcacatacaccaagagagagcatccgttccagaatccaactggactttatttgacacagaatacaatatggctacagaaacagcaaactgaaaaaacaaagcagaaaaaaacacagttccatccaatttgtaattaggtaacagcagggaaagtcattaaatgaataacaaaacaattaagcttgatggaagaagtcttttcctagtgcccatacttttggaattcccactctctgttgtccaatggacacacctgtcgtgttttgagccagcgagagatgcagtggaagtgaaaagcatggttacagactccccatgcgacagtacactcttctgaagtagcggacgcctggttagcttgacattctatgcaaagatccataatgtggttcctgcagatggcacagttatcaaccacaatatcccaggcccagagggctactgcattccactttttcacttcaaagcgcttcttgcccgcgccgctgttggtgccgctcggggtatccacatccatcgctgccgccattttggaaa

SEQ ID NO: 58725 - DNA, 725 bp, Homo sapiens
cacagggctgcggagcagcaactctcacgatatttgctgcgacccgcaggcgctatccgctgccgggttctggcgcgccctttcagttctgcttgctgtcggcaccgctgcgttacccggaaccgccgggccgaacagcatgacgtccgctttggagaactacatcaaccgaactgttgccgttattacatcagatgggagaatgattgtgggaacactgaaaggttttgaccagaccattaatttgattttggatgaaagccatgaacgagtattcagctcttcacagggggtagaacaagtggtactaggattatacattgtaagaggtgacaacgttgcagtcattggagaaatcgatgaagaaacagattctgcgcttgatttggggaatattcgagcagaacctttaaattctgtagcacactgaggaaaaactacatacttggacatctgtaaatctttgtacagaaactgattattctgaggatgatatatggagtttttatgaatgtgtcactggattttgactccttattgattcattgtaatatgtaaattaaaatatttctacattttattgaaaaaaaaacctttttttttgcctaaatataagtttggtagcttggtttcttttttttattaaatagtgtgaaaatataatggggcattttgaaaacttttaggaaaaaagtaggtactttttgatactttagtatttatgg

SEQ ID NO: 58726 - DNA, 1744 bp, Homo sapiens
cggacgcgtggggccggcggcagtgatgagtcctaggaggcgctggctctttggcggctcggaggagcggctgctgctgctgctgctgctgctggtggcccctttgcagatgtattgctgtccttgaatattagcccatttgaaaacgcctgggaagttcagccatcagtatgtccaagtacaaacttattatgttaagacatggagagggtgcttggaataaggagaaccgtttttgtagctgggtggatcagaaactcaacagcgaaggaatggaggaagctcggaactgtgggaagcaactcaaagcgttaaactttgagtttgatcttgtattcacatctgtccttaatcggtccattcacacagcctggctgatcctggaagagctaggccaggaatgggtgcctgtggaaagctcctggcgtctaaatgagcgtcactatggggccttgatcggtctcaacagggagcagatggctttgaatcatggtgaagaacaagtgaggctctggagaagaagctacaatgtaaccccgcctcccattgaggagtctcatccttactaccaagaaatctacaacgaccggaggtataaagtatgcgatgtgcccttggatcaactgccacggtcggaaagcttaaaggatgttctggagagactccttccctattggaatgaaaggattgctcccgaagtattacgtggcaaaaccattctgatatctgctcatggaaatagcagtagggcactcctaaaacacctggaaggtatctcagatgaagacatcatcaacattactcttcctactggagtccccattcttctggaattggatgaaaacctgcgtgctgttgggcctcatcagttcctgggtgaccaagaggcgatccaagcagccattaagaaagtagaagatcaaggaaaagtgaaacaagctaaaaaatagtctttctcaactgttggctaagaagaaatgcaaaagaagtggcataggagtgtgttatgggtgctgaactctctctctttttccccgattttccagagctaggctgtggagtagagtttgtataggtaactaggtaacttattgtggcccagataaggctttaggatgcctcagtgcttatgtcatagccttatgagttagctttcttgctagcccccttagtcggtcacaacatagttacctagtggggcttaatgaaggtccataagtttctgagatgggagagcaacaagtagagatgaagttaaaggtatttatcattcaagaaatcattattgagtcaccattgacaggcactattctaatcagtagttcactttaatatttaataagattttctgggataacagtaagggatattagataatataccgtatgtatttattactagtcttttcctctaggaaaagggatactttgataattaaggccagaggcccattagttgagaaagtcacagatatatttctccaagaaagccaacaaccaccaccacaatgacagaaatgacaacaaggccctttaacttgtcttctagtttagagacatccttcatttgacatttagtagaattcctctttggccacaagaataagcagcaaataaacaactatggctgttgaggttctcattttggtttgttttaattttttgaactttgggtacctgtaattagtttaaaaataaagttcctgataataaagtgactgaaaatggcatccccaaaaaaaaaa

SEQ ID NO: 58727 - DNA, 1758 bp, Homo sapiens
ttttttttttttgtggttttttttatttttaatttttttaaatttttattattattttttaaaataaattcagtgttcacatttctataaagaattaacccagtttcaggaaaccctgccccagcagggcaggtaagcaaccctctccctgcccacatctagtttgatttcacgccctgatgcttcaaggtgcccagaaaagcggcagcttgtggaagaggaaatctatgcccggcccgtgcttggggcccagggctcagtaagctttcgagaaagcagaggggaagactagcttactgcaaaaacctttttaaaaaatattcatacacttcagtgagcgcctgttgagacgttaggggaacaagagcttggaaacatcccgtccaggccattgggaggcagcgtcttcctcacaccccgtccctggatgtcgggggtgcagggggaaggtcccggctcttccactggagaaaggagactcacctggcttcctagttcatgtttgactatttcctctaaaacctgtgctgagtctttgactgcatgcacgggaagcacaaacgttcggcttgtatgcaaaaaaagtacaaaaacaactagaatataaaagttttggtaatataaggccatctgttcaagtccaccttggaaacctgtaacagatatttaaatactacagtgaaaaggcatcttaatatactttttaaaaacatctgaagtaatccgctaagattaagtgtgtaaaaaaaaaattcaattccctttgagggcactttgtcctttgaagaagggaaagtggggcggggagggcacggggcccaccggttaatgcttcagccacgggtgggcttcaatggaagccttgctgcggtccccatagtcatacaggagctcctccccagccgcgatgtctcgggaggcgatgaggatgaggtgaggtacgccgtcgatgtcgtgcagtttggtttggcagttcccacatttgctgtgattgatcagtcttcctaggcgatttgtctctctagttgcatccacgcagtaggttttgctcagatactgaaaatagtacatgtagcagcccgtggaagggtcctgtgcgtacagagcctcccgtttcttggcgtcggtgatctcgatgaggtccccgtggtattccaccacaaagtcaccccgggagaactgcttggtggcaatcacacccctgcctttgccatcgatgaggtcaatcttcattccttcttccttcccactttcaatcaattcatctattcttttcctttcttcagactgcagctcggctttgctcttcctggagctccttcggacagggtagaaatccgtaagtttgcgattctgttgcgtttttccttgagctttttttcggggggcctgtttgcccttgatgggctttttcagggcttgcttggcgatggctgcattggtggaatcacaagatgagggtggagtttttggaggttctgctgcttcagatttttggtttggaaaaggtaccaggggacctttcctggcgtctttgatcttctgttcctcggacttcatggcgctccgtactgcgttcccagcatttcttttctcttctcgtttcctgtagattccggctaatggtttcccctggcatttgacttcgtgatgtgtaactgagttctcttcctgaagggggaaacgcattccagagcatttgttcgggctcatgtaggaatagatctttgactgcatgcacgggaagcacaaacgttc

SEQ ID NO: 58728 - DNA, 3834 bp, Homo sapiens
atttatttaattcccttgaaagtctcatatacaccactaagtagtcacattcacaaacttaatttttataaattcagcagcagtcttaggaatcctaggagaagaagaactccataaaaatgcaactgtaatagtcagtgagagaggtgaatttttatggagttcttcttctcatatacaccactaagtagtcacattcacaaacttaatttttataaattcagcagcagtcttaggaatcctaggagaagaagaactccataaaaatgcaactgtaatagtcagtgagagaggtgaatttctgctccattcaatagtccaggtcttcatcaaggtatcttaaaggctgaactcactgggttataaattcccattttccttttcagtgtggctcagaatggcctcctgaggaattcattaggtccagatcatctgcattcaggcaagaattcatctcccggtattgaatttggtggactaagttctctcctcttgaggaaactgcaagccgctgtctctgtcttcgctttttagtcaagaagaataatgcgacgaaaatggccaacagaacaaccccaaggatcccgactgcaataaaggatgactgacgggatgagcgacctgttgtggctttttgtggggttttctgcactgaaatatctgtgcaattcactgcagcgtcttccttgtgcccacactcactatggccccagcgtctggcaggacaatcccacaaggaagactcattccctttgcacttcacttcattgagccatatcggtccagtcccctgaccaaactctgcttctttgaatgctttcaaagctggaccacagccaagttgttgacacaccacctgagcatcgtccaagtcccaagagtcatcacacactgtcccccaggaacctccatgccagatctccacacgtccagaacaggaagtgggtccttcctgaagtcttatcttgttgtcacatgtgatccaggtctcctccgaggggctggccagtctcttctcccatggagatgatgggcactgccacagcgtgtcaggtccttttggacactgaacattgtccacccacatgggaatggacatggccttgtctaaagatgcagggttgattttccctttgtctgcacagcccagctgcctgcacaccacacccacagtggtttcagacatgctactcttgccaacagtgccccaagctccattgtaaaaaacttccagacgccctgcacaggcctctctgctggcttcactggtcagtctcagagacatgaattctgagcagataactcccgcatcctccttgtgcctgcaattttgctgcccccagccgtgtgaatggcactgccaaatgcgggattcttttccattgcatttcatctcatccagccagatgggccctgttccttccccaaaatgagcagaaccagtggcattaatggcctctccacagcccagctgtctgcaaaccacgtgggcatcactcaggtcccagctgtcatcacagatggtgccccaggagccctcatgatagatctctactctcccagcacagcgacctcctccatttaccaggcgaagttgaccactctctatgcaggccacagcactttcttctggaatggtaggccttgttgggcccaaagacgatgaattgcacgaggacagtgtttgggactggtttcctgagcagattacagaggccacttgctctgaaggacataatgaagcacctagagcagttacaggacaatctcccatgtgctgctcagtcccagtgcagtgaaacatatgcctccagatctgaccatttccttttccaaaacgtgctcctcctggggtagaaagggcaactccacatttaagctgctggcaaagaacatgggcatcttctatgtcccagtgagagttacagagggatccccaggcaccaagcgttttgagctccactctgccctcacacggggtcttgccattcaccaagcgaatttctgtgtatcttgagcagactactccaacatccctgctgtggctacaagttccttctgggcggggtgctactgggcagagtgaaagatgggactcatgtccctcacactggaattcttcagcccagatctgtccatttccctctccaaagtgagctccccccaggatagagacaactgtgccacactgtaattccctgcatagaacgctggcagcttccagagagaagtccgaatcacagatggagccccacgtgtcaccatgcttcacttcaacacgtccagaacagggaatgtcccctccaaccagtctgggttccctgtgggctgagcaggtaattttggcttcttcatagtgatcacaggtaagtccaccccattgccagttcttgcagtcccaaagagaagtttcatttccgttacagctacttagaaacagccatgtgtttgttgcctggattttggagtacacttgataagatgttttgagtgcagatccacatcccagctgcctgcaaaccacatcagcttctttcagtccccagcctctgtcacacaccttccctaacagtctctgaatctccacctcaactgtcccagcacagcggctgcctccacctctaagtcttagctccagatctgatccatcagaacatgtcacgccagcatcttcattgtgattgcaataatgctttccccattcatggtgtttacattgccagacagcaggttcatgtccctggcaagaaacgctgtcaagccagatgtgtccaaatcccttactggcgttaactcgaccaatggctgtgacggcagttggacatcccagttgcttgcatgccacagcagcatcgtaactgtcccagccgtcatcacatattgtcccccattctccttggaatctcacttctaatcttcctgaacattcagtgactccatctaccagtctcaggctcagatctgctccctttgagcaaatcactccagcatcctcagcatgatcacagttatgctttccccatccttgatgtttgcagttccagagagctgactcatttccgttgcatataagatcatcaaaccagattggtccagagccttctccaaaattagatgaaccagagaaactgacagcacttccacattcaagttgtctacaaatgacagatgcatgatctatgttgaagttatcatcacacactgttccccaccgtccttggaatttgatctctattcttccagaacacatattccctccacgcgtcagcctcatttccaaattggatccatctgagcaggtcactccagcatcttgttggtgagtacagttactatgctttccccatccatcatgtttgcaatcccaaagagctgactcattcccacgacaagaaacatgatccatccaaatgcgtccagaacctgcactggaattagcccatccaggggctttgatagcagttggacatcccagctggttacaaatcacagagaccgcttccatgctccagccattattacacaccgttccccactcctcctggactttcacttccactctcccgctacacttgttttcaccatccactagcctcagctccttgtctgttcctccaagagaactggtgacaaaacaggcactgagaagtaagaccacagtaatggtgaagggactcaggttgacaaaatgtcttctgaagtcagcagatccagagtcttcaagtagcaccattctgagtttgctcattccaaagatttataacttcaatgattcctaaatcttcttgtattattccctagaaatgttcttctaaagaaaacaactaagaattc

SEQ ID NO: 58729 - DNA, 1826 bp, Homo sapiens
gacgccggacgtgcggcagttgcaggcgagcaggcgaggaatcgccgtggcgtcttggtgttctccacgctggttcgcaggtgaagagatggcgtttgtgaagagtggctggttgctgcgacagagtactattttgaagcgctggaagaagaactggtttgatctgtggtcggatggtcacctgatctattatgatgaccagactcggcagaatatcgaggataaggtccacatgccaatggactgcatcaacatccgcacggggcaggaatgtcgggatactcagcccccggatggaaagtcaaaagactgcatgctccagattgtttgtcgagatgggaaaacaattagtctttgtgcagaaagcacagatgattgcttggcctggaaatttacactccaagattctaggacaaacacagcgtatgtgggctctgcagtcatgaccgatgagacatccgtggtttcctcacctccaccatacacggcctatgctgcaccggcccctgaggtagggagaaccctgagcctccagcaggcttatggctatgggccatacggtggtgcgtacccgccaggaactcaagttgtctacgctgcgaatgggcaggcgtatgccgtgccctaccagtacccatatgcaggactttatggacagcagcctgctaaccaagtcatcattcgagagcgctatcgagacaacgacagcgacctggcactgggcatgctggcaggagcagccacgggcatggccttagggtctctattttgggtcttctaggggcctcaaggtcttgatgtgcatagcttctgataaccctgtgtgcaataatatgatttgcagggcatttctgtttgtgacaaaagtttttaataatagttttaatcattcctttgaaagtagtgatgtcataattgtactaatccacataagtaccacagagaagggtttgaactgtgctattttgttcaaatgttgactctccgggggcactggctcattccaagactgttcttgtgcaactctcagaataccttatttgagcatacctgttttgaaaggcattttctttttagagttaggtgtagtgcttaagggttaatttattttcatgttatgccagtaatatagtgttgtatgcctattgagtgattgtggcaagaaaagctacagcttctttgcgtttaactttttcaaaccacagaccagaactggttgcatgttactttaggagttgtgggttggtaagctcccaggtacttcccgaggctatggtgtgagagcccccgtcctgccctctggggctccacaggcccctggcaaggccgatggctcaggatgatggggcacagcccgcctttgaacaatcatgcttcagaaatctgcctgaccctagctgctgctgctggctcactttattcttgtatggctttggtaggcatacttggagaacatatcccacattagggaattgatttaagcctgagagtttgagggctttaatcctttaaaacttggagaagctggctggggcgcggtgggttcacgcctgtaatcccagcactttgagagaccgaggccgggccggatcacgaaggtcaggaagatcggagaccatcctggctaacacggtgaaaccccatcttctactaaaaatacaaaaaattaacctgggcgtggtggcaaggcgcctgtggtcccagctactcgggaggctgaggcaggagaatagtgtgaacccgggaggcggagcttgcagtgagccaagatagtgccactgcacttcagcctgggtgacagaagcgagactccgtctcaaaaaaaa

SEQ ID NO: 58730 - DNA, 1192 bp, Homo sapiens
ggcacgaggctggctggaatctctcagcctcacctgccagacaacaccccctccttcctcaccctgtctcctgcattctcctgaaaccttcatccacacaatgcctcccaacctcactggctactaccgctttgtctcgcagaagaacatggaggactacctgcaagccctaaacatcagcttggctgtgcggaagatcgcgctgctgctgaagccggacaaggagatcgaacaccagggcaaccacatgacggtgaggacgctcagcaccttccgaaactacactgtgcagtttgatgtgggagtggagtttgaggaggacctcaggagcgtggacggacgaaaatgccagaccatagtaacctgggaggaggagcacctggtgtgtgtgcagaaaggggaggtccccaaccggggctggagacactggctggagggagagatgctgtatctggaactgactgcaagggatgcagtgtgcgagcaggtcttcaggaaggtcagatagccggagaggagccaagatccctccagacagcaccagctcacagacgctcttgttgtgcccccttcaagcccagattgtgccaggtcagctgtcccttcctctggccacctttcctccctctgggtccctcctcacccctccccgtgttaatctgtaacttgcagcccccaggccaaagtcctttctcacactccactgcccaatagtgacctcacttccaggtcaaggtctggcgtcccaaatgaaagaagcaggcaaagggaaggagcccctgagaacaaccaatctccgctctctcctgtccatttgacctcttcttttccttctaagaaagaactaagctttgggcatttggcgattagtgaaaattctatcctgatggacttctggaaaactgtgactggggttcaagagtttaaacaggggctactggcagagtctttttgtccatttctttgtccttattcttgagaaagtctcatgtgctcaacaaaaccaggcccaagacacagccccccacacacagggttcaacggactccacggttctgacatctgaaggcatctggccatttgatacttccatcctatgtgttgggaatgagggatggaatggggtaagacctttgtccagtgcttggggaggcggggagcttctaaatggtgacctgtcctccgtacgaaa

SEQ ID NO: 58731 - DNA, 1779 bp, Homo sapiens
  misc_feature (1)...(1779): n = a,t,c or g
ttttttttttatttccaaaggttttattttatatattgtttgaagctttctcaggctttgcactaaatgcatgtcaggtgcatattcaatctctttcaaaggaaacatggcagttgagtatccagaacacaagtgagtaccgtatactttaaaagaatgcttacagagctctcctcttcggccatgagaaaaaaaaacaagtacctgcagaagtgagcgatacccaatgctctcccagacacacgcctggggtgcttactgtcaatgacactcctccacaccaacatgtggtccaaaatagaatccctctcatcttccattacactcttttaaaaaatgcagagaaaatatgaattaactcatcttaaatgtgagagaaacagggggaaaaggacaagttaatgcacaagcacaatacacaatggtaatttttcttttcaaaagatattatggaatgtattactagcagcataaattccaacaaaaagttgggcacccagatttggttatttagattaaaaatatttattacaggcagatttgcttttcccaggaaaacatatcactggaaacatttggagaatgcaaactgggttaaacctattcccaagtccattatcaagtaaggtatccctaaagaaaaagataggagtttaaaactggggaagcccacacacaatttagacaggggaaaagaaaaaaaaaactcataaaaaaagtcagaatgatcctttacgttttacagtctttaattaagcacataaaactgtactatttaatatatttctccatgaactttttgtgaaattcagatcgcagtgtgtcatttacaaatcttttgtctttcttctggtcatctacaccttttgcacagttcttgaagacaacgtcatcatcccaccttcttttaactttgaagttggcctgaggctgggatgggccagtgagattaaggagagggtttccgctcagaatgttttccatacgaatcctctcttcttcagctttttgttcttgttccttcctggcctgctcttcagctctttcttttttaattttttccagttctgcaagaagagctgcagtatcatcatcatcactttcttcttcaaaatcttcatcttcctcatctgttagagggtcatctgcatcaaggttggcggcaggaatctggtctaaccgtggcttttttgacactgaagaggaggttgtatgttctcgggttggacgatccctatttttctctcttgcagcagctctctctctttcttccaactctctcctgaagtcacggttacgaacctcttcaggggcatcctgagtagtctgtctgtattttatctttgtatgagagggtaggtctctgcttgaatactgctttgaaagttggctcaaatcaccttctccttttccccttccacctctggcaggttcaaaggttggcctggctgctgttgtcatcttttatgctggggttcgctttacgcagtaggcgagctgcctgtacgctgcgatctcctcggcgggcccaagagctccagacgcgcctgacaggcactcggttccgcccctagcccgctgctccagggcctccaccgcccgcgctctgcactctgccgccgactccgaccccaactgccctttcccgtcccatcgcgataagaaagataatctcctatcctcttgccgctcacactggccgaggtccgatgcagcaggctccgaagatcatacagacgcgaattccaccacactgagtagtgaaacagtangagcact

SEQ ID NO: 58732 - DNA, 1888 bp, Homo sapiens
ggcacgagggggaagctacgtcccggaggtgcggtgtggggcaccgggcggggccgcgggaaccggcgccccacggagctgctgctgtcagaccaaccccgggcccccatcatcactgcgccgcgctttcaggcgccgagaactaccgttcccggcatgccatgaaattggcctcggcgctgaggcggggtccggccctccacccgctcccgccgcgcgcgaatcgcggtcgcgagccatggaggaggaggcatcgtccccggggctgggctgcagcaagccgcacctggagaagctgaccctgggcatcacgcgcatcctagaatcttccccaggtgtgactgaagtgaccatcatagaaaagcctcctgctgaacgtcatatgatttcttcctgggaacaaaagaataactgtgtgatgcctgaagatgtgaagaacttttacctgatgaccaatggcttccacatgacatggagtgtgaagctggatgagcacatcattccactgggaagcatggcaattaacagcatctcaaaactgactcagctcacccagtcttccatgtattcacttcctaatgcacccactctggcagacctggaggacgatacacatgaagccagtgatgatcagccagagaagcctcactttgactctcgcagtgtgatatttgagctggattcatgcaatggcagtgggaaagtttgccttgtctacaaaagtgggaaaccagcattagcagaagacactgagatctggttcctggacagagcgttatactggcattttctcacagacacctttactgcctattaccgcctgctcatcacccacctgggcctgccccagtggcaatatgccttcaccagctatggcattagcccacaggccaagcaaagagtcagcatgtataaacctatcacctacaacacaaacctgctcacagaagagaccgactcctttgtgaataagctagatcccagcaaagtgtttaagagcaagaacaagatcgtaatcccaaaaaagaaagggcctgtgcagcctgcaggtggccagaaagggccctcaggaccctccggtccctccacttcctccacttctaaatcctcctctggctctggaaaccccacccggaagtgagcacccctccctccaactccctaccagctccagagtggtggtttccatgcacagatggccctaggggtgacctccagttttgcgtgtggaccgtaggcctctttctagttgaatgaccaaaattgtaaggcttttagtcccaccgacattagccaggctcgtagtgaggcctccagagcaggttgtgctgtcccctgcctctagaagcaatggggaatttggaatcttgtgtaagtgcccaaataagtctgagtgctttcctcttcttcaacactcaaccctcaatcccttagcactgattgattagagaggtcccccaaagaaaccactggttttgacccatgaagcattagaactgcattgttcattcaggagccactagtcacatatgactatttaaatttaaagtaaattgtatgaaaaattcatttcttcaattgcattagccacattttgagtattcatgtggctggtagattctgtattagcacaaagatatggaacatttccatcaccacagaaagttctgttggacagcactgcattagaatattttcatactgctcttcctcaattaatttttgttgttaatgttgatgtcttcattggatgggtcataatgttccatgaaacctctcaagtacacaattgtatgttctttgtatcccttaccacaaatatctcgctctgctcatttcttttgcagcttcctataaagtttgtcttcctcatcaaaaaaaaaaaaag

SEQ ID NO: 58733 - DNA, 449 bp, Homo sapiens
cctcctttccctttcggattcccgacgctgtggttgctgtaaggggtcctccctgcgccacacggccgtcgccatggtgaagctgagcaaagaggccaagcagagactacagcagctcttcaaggggagccagtttgccattcgctggggctttatccctcttgtgatttacctgggatttaagaggggtgcagatcccggaatgcctgaaccaactgttttgagcctactttggggataaaggattatttggtcttctggatttggaggcaatcagcggacagcatggaagatgtgtgctctggctcggataagagatgggacatcattcagtcactagttggatggcacaaggctcttcacagacgcatctgtagcagagtggaacttgtactaacttatgatagaatgtatcagaataaatgtttttaacagtgttaaaaaaaaaa

SEQ ID NO: 58734 - DNA, 2145 bp, Homo sapiens
attgaccctcgctgcacgaattcggcacgagcagggctctggcgcccgcccctgtccgcaccgctggcagcctgaagagagtcgctggccgtggtcgccgctaggtaggatatatctgcatcttgaaaggaagataaaacaaaagccttctttggaatagatggatttttgtcactttctgtgtgaactaaagtgattcaatgtctcttttggattgcttctgcacttcaagaacacaagttgaatcactcagacctgaaaaacagtctgaaaccagtatccatcaatacttggttgatgagccaaccctttcctggtcacgtccatccactagagccagtgaagtactatgttccaccaacgtttctcactatgagctccaagtagaaataggaagaggatttgacaacttgacttctgtccatcttgcacggcatactcccacgggaacactggtaactataaaaattacaaatctggaaaactgcaatgaagaacgcctgaaagctttacagaaagccgtgattctatcccactttttccggcatcccaatattacaacttattggacagttttcactgttggcagctggctttgggttatttctccatttatggcctatggttcagcaagtcaactcttgaggacctattttcctgaaggaatgagtgaaactttaataagaaacattctctttggagccgtgagagggttgaactatctgcaccaaaatggctgtattcacaggagtattaaagccagccatatcctcatttctggtgatggcctagtgaccctctctggcctgtcccatctgcatagtttggttaagcatggacagaggcatagggctgtgtatgatttcccacagttcagcacatcagtgcagccgtggctgagtccagaactactgagacaggatttacatgggtataatgtgaagtcagatatttacagtgttgggattacagcatgtgaattagccagtgggcaggtgcctttccaggacatgcatagaactcagatgctgttacagaaactgaaaggtcctccttatagcccattggatatcagtattttccctcaatcagaatccagaatgaaaaattcccagtcaggtgtagactctgggattggagaaagtgtgcttgtctccagtggaactcacacagtaaatagtgaccgattacacacaccatcctcaaaaactttctctcctgccttctttagcttggtacagctctgtttgcaacaagatcctgagaaaaggccatcagcaagcagtttattgtcccatgttttcttcaaacagatgaaagaagaaagccaggattcaatactttcactgttgcctcctgcttataacaagccatcaatatcattgcctccagtgttaccttggactgagccagaatgtgattttcctgatgaaaaagactcatactgggaattctagggctgccaaatcattttatgtcctatatacttgacactttctccttgctgctttttcttctgtatttctaggtacaaataccagaattatacttgaaaatacagttggtgcactggagaatctattatttaaaaccactctgttcaaaggggcaccagtttgtagtccctctgtttcgcacagagtactatgacaaggaaacatcagaattactaatctagctagtgtcatttattctggaatttttttctaagctgtgactaactctttttatctctcaatataatttttgagccagttaatttttttcagtattttgctgtcccttgggaatgggccctcagaggacagtgcttccaagtacatcttctcccagattctctggcctttttaatgagctattgttaaaccaacaggctagtttatcttacatcagacccttttctggtagagggaaaatgtttgtgctttccctttttcttctgttaatacttatgggtaacacctaactgagcctcactcacattaaatgattcacttgaaatatatacaggaaattgtaatttggcttttttttaaaaaagggggggggctaaagtaaccctttcctacttatgtaaattatagatcctaaattgcacgcaccccgtgggagctcaataaagatttactgaattgaaaaaaaaaa

SEQ ID NO: 58735 - DNA, 1716 bp, Homo sapiens
aaagggagtgagggaggagagatgagtggctattccagaacgacataaagaatttccagccttggacggacagctgggaacgtcttccaatttggactggtgtttacaagcgggaagctaggtggaccttggattttggcgggtgaagaggctaggttgtttaaggaggtggggcgcgtttcaatggctctctttgaaaaagcccagcaagatgtcagacctgctctcagtcttcctccacctcctccttctcttcaagttggttgccccggtgacctttcgccaccaccgctatgatgatcttgtgcggacgctgtacaaggtgcaaaacgaatgccccggcatcacgcgggtctacagcattgggcgcagcgtggaggggagacacctctacgtgctggagttcagcgaccaccctggaatccacgagcccttggaaccagaggtcaagtatgtggggaacatgcacggcaacgaagcgttgggccgcgagctgatgctgcagctgtcggagtttctgtgcgaggagttccggaacaggaaccagcgcatcgtccagctcatccaggacacgcgcattcacatcctgccatccatgaaccccgacggctacgaggtggctgctgcccagggcccaaacaagcctgggtatctagttggcaggaacaatgcaaatggagtggacctgaaccgcaacttccctgatctcaatacctatatctactataacgagaagtacggaggccccaaccaccacctgccccttccagacaactggaaaagtcaggtggaacccgagacccgggcggtgatccggtggatgcactccttcaactttgttctttcagccaatctccacggaggggcggtggtggccaattacccgtatgacaagtcctttgagcaccgggtccgaggggtccgccgcaccgccagcacccccacgcctgacgacaagctcttccagaagctggccaaggtctactcctatgcacatggatggatgttccaaggttggaactgcggagattacttcccagatggcatcaccaatggggcttcctggtattctctcagcaagggaatgcaagactttaattatctccataccaactgctttgagatcacgctggaactgagttgcgacaagtttccccccgaagaggagttacagcgggagtggctgggtaatcgggaagccctaatccagttcctggaacaggttcaccagggcatcaagggaatggtgcttgatgagaattacaataatctcgccaatgctgtcatttctgtcagtgggattaaccatgatgtcacttcaggtgaccatggtgattacttccggctgctgcttccaggtatctacactgttagtgccacagcacctgggtatgacccagagacagtaactgtgaccgtgggtcctgcggaaccaacgttggttaacttccacctcaaaagaagcatccctcaagtaagccctgtgaggagagctcccagcagaaggcacggagtcagagccaaagtgcagccccaacccagaaagaaagaaatggagatgaggcagctgcagagaggccctgcctgaaacccacagtgccaggcaccccctcagaaaggctttgctcctgctctcagatcagatcaagcattctttgtattttattatctgggacatatttaaatacaaacgtattcagagcaataaaaaaaaaa

SEQ ID NO: 58736 - DNA, 2029 bp, Homo sapiens
gggcgggacaactggtctgagtactatggctgattttcgctgtctggcattgagaagccacacgccccttttgcttaggaggcctctctgctggaggatgacgatggcatggtttatctaaggccactgacaagtcatcaatataggacagcacagctgagagccatgctcaggaagtttctggatcctaggctcagctccacagaggagaacacgcaggcagcagagaccatggggcccctctcagcccctccctgcacacagcgcatcacctggaagggggtcctgctcacagcatcacttttaaacttctggaacccgcctaccactgcccaagtcacgattgaagccgagccaaccaaagtttccaaggggaaggacgttcttctacttgtccacaatttgccccagaatcttgctggctacatctggtacaaagggcaaatgaaggacctctaccattacattacatcatacgtagtagatggtcaaataattatatatgggcctgcatacagtggacgagaaacagtatattccaatgcatccctgctgatccagaatgtcacccgggaggacgcaggatcctacaccttacacatcgtaaagcgaggtgatgggactagaggagaaactggacatttcaccttcaccttatacctggagactcccaagccctccatctccagcagcaacttataccccagggaggacatggaggctgtgagcttaacctgtgatcctgagactccggacgcaagctacctgtggtggatgaatggtcagagcctccctatgactcacagcttgcagttgtccaaaaacaaaaggaccctctttctatttggtgtcacaaagtacactgcaggaccctatgaatgtgaaatacggaacccagtgagtgccagccgcagtgacccagtcaccctgaatctcctcccgaagctgcccaagccctacatcaccatcaacaacttaaaccccagggagaataaggatgtcttagccttcacctgtgaacctaagagtgagaactacacctacatttggtggctaaatggtcagagcctcccggtcagtcccagggtaaagcgacccattgaaaacaggatcctcattctacccagtgtcacgagaaatgaaacaggaccctatcaatgtgaaatacaggaccgatatggtggcatccgcagttacccagtcaccctgaatgtcctctatggtccagacctccccagaatttacccttcattcacctattaccattcaggagaaaacctctacttgtcctgcttcgcggactctaacccaccagcagaatattcttggacaattaatgggaagtttcagctatcaggacaaaagctctttatcccccagattactacaaagcatagcgggctctatgcttgctctgttcgtaactcagccactggcatggaaagctccaaatccatgacagtcaaagtctctgctccttcaggaacaggacatcttcctggccttaatccattatagcagccgtgatgtcatttctgtatttcaggaagactggcagacagttgctttcattcttcctcaaagtatttaccatcagctacagtccaaaattgctttttgttcaaggagatttatgaaaagactctgacaaggactcttgaatacaagttcctgataacttcaagatcataccactggactaagaactttcaaaattttaatgaacaggctgataccttcatggaaattcaaggacaaaggaaaaaaaccccaattttattgggacttaaatagtccaaaccatggtttttcataattttcctatttggaaaatgtggctggattctttggaatgttttattctcccggatttatggcacttttttttcttcagcaattggtaaagtatacttttgtaaacaaaaattgaaacatttgcttttgctccctaagtgccccagaattgggaaactattcaggagtattcatatgtttatggtaataaagttatctgcacaagttcaaaaaa

SEQ ID NO: 58737 - DNA, 1601 bp, Homo sapiens
ttttttttttttagggatgcattttgaatatttattgtccttgtttttaacataatttgcaaatttacataattataatggctgtgtttgacaactggcttgcaacaaaattcttgaaaattgaataattggcccacctgggctgggatgagccagctggatcacaccgttgccccctcagcctctaggaggcctcaggattatggcgtccatcttatgatattggccgaaaggagacagtcttggaggtgctgcttactgttgaacttccttttggaatgtatgggagaaggcagggaaaggaatctttaggcagactgccatccagggactgctattctgttcactgagattcagctgtgaacatctgttctttcttcctcttctgtctactgcatgcaggcccggaagctgagcgttagtcaaaggtacaggaagggaaaagagaagagggcaaggcccatcccccaagaaaggaagggctctgatgcagagggagcaggagctgaggtggagacggccactgcctctctcaccctctgttccatccctctgctcaagaaaaccaggcttagcagagtgggacagacgctttttattggtctggctggcgtgcctagtggaaagctcaggcagagcttcctatcttgccctggctcccatcttccctctcctgggagttcatcacacatcccgagagggaagagtgtcctgggcagaggtggcaggcaaagccgggtaaaaactccagggctgggaagcaaatggggctcagggtgatgcagaaaatgtgatgttgccaggccatccaaataaagcatccatcggggcagaggagaagctgtttccctgcagacactcctctgcccccaccaggaatgggaggggcaggaggaagagcttcccagagaggctccctactgggcccttcgtgccatcagcatctcccggatgttgtcctcagcttccttaacgcttcgctccaggtaggactttttctgttctagttctttaattttttcttctgctattttctgcttctctaacagctgactgtgaattgcttccttggactgaagaataaacattcttcctacaccttcatacatgttagtctcatctaccaaagtcatgatctctgtatctgtaagatgtgcatgctttttcgttctgtttagctgttcaatctgtatgtctgcgagcttcaccttctgttgagtgtcaataactttggcttgaagctctgtgaaggctatgaaagtgagtccctgaagcctccaaacgcaacgaaatgtctctggagctcagaaagactggacaagcccgagacaggcccgcagacttacccgacccagaccaaccggctcctacccagcaagagccgctcgccccccaccccgtttatggagacccagtgaggccttaggactctgggaaaccattccctagtccactggaccctccttccttctgcaaggctcgtgcctcacttgatattcttgtctatagtcccctcagcctccaaaaagaagacctccgcctgccaaagaccctcttttaccttcttcagctctagatccacgggggcggccactcgtgcc

SEQ ID NO: 58738 - DNA, 3221 bp, Homo sapiens
actccctcactggctgccattgaaagagtccacttctcagtgactcctaactgggcactggatgcagttgaggattgctggtcaatatgattcttcttgctgtgctttttctctgcttcatttcctcatattcagcttctgttaaaggtcacacaactggtctctcattaaataatgaccggctgtacaagctcacgtactccactgaagttcttcttgatcggggcaaaggaaaactgcaagacagcgtgggctaccgcatttcctccaacgtggatgtggccttactatggaggaatcctgatggtgatgatgaccagttgatccaaataacgatgaaggatgtaaatgttgaaaatgtgaatcagcagagaggagagaagagcatcttcaaaggaaaaagcccatctaaaataatgggaaaggaaaacttggaagctctgcaaagacctacgctccttcatctaatccatggaaaggtcaaagagttctactcatatcaaaatgaggcagtggccatagaaaatatcaagagaggtctggctagcctatttcagacacagttaagctctggaaccaccaatgaggtagatatctctggaaattgtaaagtgacctaccaggctcatcaagacaaagtgatcaaaattaaggccttggattcatgcaaaatagcgaggtctggatttacgaccccaaatcaggtcttgggtgtcagttcaaaagctacatctgtcaccacctataagatagaagacagctttgttatagctgtgcttgctgaagaaacacacaattttggactgaatttcctacaaaccattaaggggaaaatagtatcgaagcagaaattagagctgaagacaaccgaagcaggcccaagattgatgtctggaaagcaggctgcagccataatcaaagcagttgattcaaagtacacggccattcccattgtggggcaggtcttccagagccactgtaaaggatgtccttctctctcggagctctggcggtccaccaggaaatacctgcagcctgacaacctttccaaggctgaggctgtcagaaacttcctggccttcattcagcacctcaggactgcgaagaaagaagagatccttcaaatactaaagatggaaaataaggaagtattacctcagctggtggatgctgtcacctctgctcagacctcagactcattagaagccattttggactttttggatttcaaaagtgacagcagcattatcctccaggagaggtttctctatgcctgtggatttgcttctcatcccaatgaagaactcctgagagccctcattagtaagttcaaaggttctattggtagcagtgacatcagagaaactgttatgatcatcactgggacacttgtcagaaagttgtgtcagaatgaaggctgcaaactcaaagcagtagtggaagctaagaagttaatcctgggaggacttgaaaaagcagagaaaaaagaggacaccaggatgtatctgctggctttgaagaatgccctgcttccagaaggcatcccaagtcttctgaagtatgcagaagcaggagaagggcccatcagccacctggctaccactgctctccagagatatgatctccctttcataactgatgaggtgaagaagaccttaaacagaatataccaccaaaaccgtaaagttcatgaaaagactgtgcgcactgctgcagctgctatcattttaaataacaatccatcctacatggacgtcaagaacatcctgctgtctattggggagcttccccaagaaatgaataaatacatgctcgccattgttcaagacatcctacgttttgaaatgcctgcaagcaaaattgtccgtcgagttctgaaggaaatggtcgctcacaattatgaccgtttctccaggagtggatcttcttctgcctacactggctacatagaacgtagtccccgttcggcatctacttacagcctagacattctctactcgggttctggcattctaaggagaagtaacctgaacatctttcagtacattgggaaggctggtcttcacggtagccaggtggttattgaagcccaaggactggaagccttaatcgcagccacccctgacgagggggaggagaaccttgactcctatgctggtatgtcagccatcctctttgatgttcagctcagacctgtcacctttttcaacggatacagtgatttgatgtccaaaatgctgtcagcatctggcgaccctatcagtgtggtgaaaggacttattctgctaatagatcattctcaggaacttcagttacaatctggactaaaagccaatatagaggtccagggtggtctagctattgatatttcaggtgcaatggagtttagcttgtggtatcgtgagtctaaaacccgagtgaaaaatagggtgactgtggtaataaccactgacatcacagtggactcctcttttgtgaaagctggcctggaaaccagtacagaaacagaagcaggcttggagtttatctccacagtgcagttttctcagtacccattcttagtttgcatgcagatggacaaggatgaagctccattcaggcaatttgagaaaaagtacgaaaggctgtccacaggcagaggttatgtctctcagaaaagaaaagaaagcgtattagcaggatgtgaattcccgctccatcaagagaactcagagatgtgcaaagtggtgtttgcccctcagccggatagtacttccagcggatggttttgaaactgacctgtgatattttacttgaatttgtctccccgaaagggacacaatgtggcatgactaagtacttgctctctgagagcacagcgtttacatatttacctgtatttaagatttttgtaaaaagctacaaaaaactgcagtttgatcaaatttgggtatatgcagtatgctacccacagcgtcattttgaatcatcatgtgacgctttcaacaacgttcttagtttacttatacctctctcaaatctcatttggtacagtcagaataagttattctctaagaggaaactaagtgtttgttaaaatcaaaaataaaaacaaaaccacacaaggagaacccgaattttgtttcaacaatttttgatccaatgtatatgaagctcttgataggacttccttaagcatgacgggaaaaccaaacacgttcccctaatcaggaaaaaaaaaa

SEQ ID NO: 58739 - DNA, 1902 bp, Homo sapiens
gttccacctggcggctggctctcagtcccctcgctgtagtcgcggagctgtgtctgttcccaggagtccttcggcggctgttgtgtcagtggcctgatcgcgatggggacaaaggcgcaagtcgagaggaaactgttgtgcctcttcatattggcgatcctgttgtgctccctggcattgggcagtgttacagtgcactcttctgaacctgaagtcagaattcctgagaataatcctgtgaagttgtcctgtgcctactcgggcttttcttctccccgtgtggagtggaagtttgaccaaggagacaccaccagactcgtttgctataataacaagatcacagcttcctatgaggaccgggtgaccttcttgccaactggtatcaccttcaagtccgtgacacgggaagacactgggacatacacttgtatggtctctgaggaaggcggcaacagctatggggaggtcaaggtcaagctcatcgtgcttgtgcctccatccaagcctacagttaacatcccctcctctgccaccattgggaaccgggcagtgctgacatgctcagaacaagatggttccccaccttctgaatacacctggttcaaagatgggatagtgatgcctacgaatcccaaaagcacccgtgccttcagcaactcttcctatgtcctgaatcccacaacaggagagctggtctttgatcccctgtcagcctctgatactggagaatacagctgtgaggcacggaatgggtatgggacacccatgacttcaaatgctgtgcgcatggaagctgtggagcggaatgtgggggtcatcgtggcagccgtccttgtaaccctgattctcctgggaatcttggtttttggcatctggtttgcctatagccgaggccactttgacagaacaaagaaagggacttcgagtaagaaggtgatttacagccagcctagtgcccgaagtgaaggagaattcaaacagacctcgtcattcctggtgtgagcctggtcggctcaccgcctatcatctgcatttgccttactcaggtgctaccggactctggcccctgatgtctgtagtttcacaggatgccttatttgtcttctacaccccacagggccccctacttcttcggatgtgtttttaataatgtcagctatgtgccccatcctccttcatgccctccctccctttcctaccactgctgagtggcctggaacttgtttaaagtgtttattccccatttctttgagggatcaggaaggaatcctgggtatgccattgacttcccttctaagtagacagcaaaaatggcgggggtcgcaggaatctgcactcaactgcccacctggctggcagggatctttgaataggtatcttgagcttggttctgggctctttccttgtgtactgacgaccagggccagctgttctagagcgggaattagaggctagagcggctgaaatggttgtttggtgatgacactggggtccttccatctctggggcccactctcttctgtcttcccatgggaagtgccactgggatccctctgccctgtcctcctgaatacaagctgactgacattgactgtgtctgtggaaaatgggagctcttgttgtggagagcatagtaaattttcagagaacttgaagccaaaaggatttaaaaccgctgctctaaagaaaagaaaactggaggctgggcgcagtggctcacgcctataatcccagaggctgaggcaggcggatcacctgaggtcaggagttcaagatcagcctgaccaacatggagaaaccctactaaaaatacaaagttagccaggcatggtggtgcatgcctgtaatcccagctgctcaggagcctggcaacaagagcaaaactccagctcaaaaaaaaaa

SEQ ID NO: 58740 - DNA, 541 bp, Homo sapiens
ggcacgagctaacttcaggaaccagctcatgatctcaggatgtatggaaaaataatctttgtattactattgtcagaaattgtgagcatatcagcattaagtaccactgaggtggcaatgcacacttcaacctcttcttcagtcacaaagagttacatctcatcacagacaaatggagaaacgggacaacttgtccatcgtttcactgtaccagctcctgtagtgataatactcattattttgtgtgtgatggctggtattattggaacgatcctcttaatttcttacagtattcgccgactgataaaggcatgaggatgtggcctgcatgctgcctgatcttgcctgcatgctgcctgatcttgcctagaaccggctgcacctgctgttctcttgtttatgcaaactggctgcacctgctattcctttgcttatgcccctacccctggctatcctaattccctgttctcctgcctcactattactgtattctctacttctaaataaaaataaaacaaaatacaaaccgttaaaaaaaaaa

SEQ ID NO: 58741 - DNA, 2162 bp, Homo sapiens
gccgaccccgagaggcccggatcctttaggccgcctgcccgcctccagctctcggggacggctccaggaggcgccctcaggagaggggcgggcgctctattccagagaccgagtggcagggcggccactgtggcggggctctttccccgtttcgcctcagctacccctcagctccggtagtcgccagtccggggtcgtcgccgtttggggcgggagctgctcggccccgccgccgtccccgtcgccgcttccgggtccaggcccctcgggccgcctgccgccgtcatgaggctgcgggtgcggcttctgaagcggacctggccgctggaggtgcccgagacggagccgacgctggggcatttgcgctcgcacctgaggcagtccctgctgtgcacctgggggtacagttctaatacccgatttacaattacattgaactacaaggatcccctcactggagatgaagagaccttggcttcatatgggattgtttctggggacttgatatgtttgattcttcaagatgacattccagcgcctaatataccttcatccacagattcagagcattcttcactccagaataatgagcaaccctctttggccaccagctccaatcagactagcatacaggatgaacaaccaagtgattcattccaaggacaggcagcccagtctggtgtttggaatgacgacagtatgttagggcctagtcaaaattttgaagctgagtcaattcaagataatgcgcatatggcagagggcacaggtttctatccctcagaacccatgctctgtagtgaatcggtggaagggcaagtgccacattcattagagaccttgtatcaatcagctgactgttctgatgccaatgatgccttgatagtgttgatacatcttctcatgttggagtcaggttacatacctcagggcaccgaagccaaagcactgtccatgccggagaagtggaagttgagcggggtgtataagctgcagtacatgcatcctctctgcgagggcagctccgctactctcacctgtgtgcctttgggaaacctgattgttgtaaatgctacactaaaaatcaacaatgagattagaagtgtgaaaagattgcagctgctaccagaatcttttatttgcaaagagaaactaggggaaaatgtagccaacatatacaaagatcttcagaaactctctcgcctctttaaagaccagctggtgtatcctcttttggcttttacccgacaagcactgaacctaccagatgtatttgggttggtcgtcctcccattggaactgaaactacggatcttccgacttctggatgttcgttccgtcttgtctttgtctgcggtttgtcgtgacctctttactgcttcaaatgacccactcctgtggaggtttttatatctgcgtgattttcgagacaatactgtcagagttcaagacacagattggaaagaactgtacaggaagaggcacatacaaagaaaagaatccccgaaagggcggtttgtgatgctcctgccatcgtcaactcacaccattccattctatcccaaccccttgcaccctaggccatttcctagctcccgccttcctccaggaattatcgggggtgaatatgaccaaagaccaacacttccctatgttggagacccaatcagttcactcattcctggtcctggggagacgcccagccagtttcctccactgagaccacgctttgatccagttggcccacttccaggacctaaccccatcttgccagggcgaggcggccccaatgacagatttccctttagacccagcaggggtcggccaactgatggccggctgtcattcatgtgattgatttgtaatttcatttctggagctccatttgtttttgtttctaaactacagatgtcaactccttggggtgctgatctcgagtgttattttctgattgtggtgttgagagttgcactcccagaaaccttttaagagatacatttatagccctaggggtggtatgacccaaaggttcctctgtgacaaggttggccttgggaatagttggctgccaatctccctgctcttggttctcctctagattgaagtttgttttctgatgctgttcttaccagattaaaaaaaagtgtaaattaaaaaaaaaa

SEQ ID NO: 58742 - DNA, 918 bp, Homo sapiens
gcacgagctggcgccgtccgcgatccgcagggctgcccgcttaggcttaggcccggcccgctggcaaagccgagccgcagcattttatttcgttcgtggtttccgcacaggctggagtttcgtgggttgggtcgtacttgggacctcggcgaagaggacccgtttatttttttttctttccaaaatggcagcctccagtcgcgcacaagtgttagctctgtaccgggcgatgctgagagagagcaagcgtttcagcgcctacaattacagaacatatgctgtcaggaggataagagatgccttcagagaaaataaaaatgtaaaggatcctgtagaaattcaaaccctagtgaataaagccaagagagaccttggagtaattcgtcgacaggtccacattggccaactgtattcaactgacaagctgatcattgagaatcgagacatgcccaggacctagcaagccggggaccagccaccagtggcggccagggaccaccttcagcatccactctctgtttgagatgggggctcccaaaaccagcttacaatagccttttgcgctgcctgtcctgtgggagctgataaaccaagtcacatttgcattctgttgcaggcttagtgaaaaaggactgctgtctttccttggttcaagtgttagaatggagagctggagttcgttcagaatagtgctgtgtgttaccacgtctcccctgcaccccattcctaccttgtagctcatgaccattgtgtatagcatttctacactttgtttcttggtccttggcaataaaaagaatgatctccctgagcctttgaccccagataaacccctcccaattaatgcattttcatttcctactgatacaaggcctggagagggctgttgggggccctcagggagggttcaactctgag

SEQ ID NO: 58743 - DNA, 2629 bp, Homo sapiens
tttcgtcgcaggcgggcctcgcgggtccgggagcgcggcggagacgatgcctgagatcagagtcacgcccttgggggccggccaggacgtgggccgaagctgcatcctggtctccattgcgggcaagaatgtcatgctggactgtggaatgcacatgggcttcaatgacgaccgacgcttccctgacttctcctacatcacccagaacggccgcctaacagacttcctggactgtgtgatcattagccacttccacctggaccactgcggggcactcccctacttcagcgagatggtgggctacgacggccccatctacatgactcaccccacccaggccatctgccccatcttgctggaggactaccgcaagatcgccgtagacaagaagggcgaggccaacttcttcacctcccagatgatcaaagactgcatgaagaaggtggtggctgtccacctccaccagacggtccaggtagatgatgagctggagatcaaggcctactatgcaggccacgtgctgggggcagccatgttccagattaaagtgggctcagagtctgtggtctacacgggtgattataacatgaccccagaccgacacttaggagctgcctggattgacaagtgccgccccaacctgctcatcacagagtccacgtacgccacgaccatccgtgactccaagcgctgccgggagcgagacttcctgaagaaagtccacgagaccgtggagcgtggtgggaaggtgctgatacctgtgttcgcgctgggccgcgcccaggagctctgcatcctcctggagaccttctgggagcgcatgaacctgaaggtgcccatctacttctccacggggctgaccgagaaggccaaccactactacaagctgttcatcccctggaccaaccagaagatccgcaagactttcgtgcagaggaacatgtttgagttcaagcacatcaaggccttcgaccgggcttttgctgacaacccaggaccgatggttgtgtttgccacgccaggaatgctgcacgctgggcagtccctgcagatcttccggaaatgggccggaaacgaaaagaacatggtcatcatgcccggctactgcgtgcagggcaccgtcggccacaagatcctcagcgggcagcggaagctcgagatggaggggcggcaggtgctggaggtcaagatgcaggtggagtacatgtcattcagcgcacacgcggacgccaagggcatcatgcagctggtgggccaggcagagccggagagcgtgctgctggtgcatggcgaggccaagaagatggagttcctgaagcagaagatcgagcaggagctccgggtcaactgctacatgccggccaatggcgagacggtgacgctgcccacaagccccagcatccccgtaggcatctcgctggggctgctgaagcgggagatggcgcaggggctgctccctgaggccaagaagcctcggctcctgcacggcaccctgatcatgaaggacagcaacttccggctggtgtcctcagagcaagccctcaaagagctgggtctggctgagcaccagctgcgcttcacctgccgcgtgcacctgcatgacacacgcaaggagcaggagacggcattgcgcgtctacagccacctcaagagcgtcctgaaggaccactgtgtgcagcacctcccagacggctctgtgactgtggagtccgtcctcctccaggccgccgccccttctgaggacccaggcaccaaggtgctgctggtctcctggacctaccaggacgaggagctggggagcttcctcacatctctgctgaagaagggcctcccccaggcccccagctgaggccggcaactcacccagccgccacctctgccctctcccagctggacagaccctgggcctgcacttcaggactgtgggtgccctgggtgaacagaccctgcaggtcccatccctggggacagaggccttgtgtcacctgcctgcccaggcagctgtttgcagctgaagaaacaaactggtctccaggctgtcttgcctttattcctggttagggcaggtggtcctagacagcagtttccagtaaaagctgaacaaaagactacttggtactctcttcttggtgtacatggctgtgtcctgcactgtgccccatcccgcctgggacagagacgggcatccagggtgctgggacccgggcagggaggctactgtggagaccaggcagcagtgctgtgggccccaagcagctgtgactgccctggcttgaccagcacagggttgggcctggtgtggcctaactttggcttgagtgtccagggtcatccgtggctcccgaactgtggcccctgcagggtgcaggaggcagcaccgaggttcccgtacagcactgacttgaggaataagccgtgggctggggctacacgtgtctggtgcttgcccaggggatcttggctctccagaatcgtcttcacctgggcaggtgccaaagcccccagccccacggccaccagcacagccgtcatcctccgtacctgtctatacaggaaagactggctctcaaactccaggttccagaaccgcagcttcctgctctcctcgggggtgaccaagcctcgtgcc

SEQ ID NO: 58744 - DNA, 596 bp, Homo sapiens
aatagattagcagaccactaggccagagccgaggaattcggcgctgcggcagtccagatcaaaaatggcggtagttggtgtgtcctcggtttctcggctgctgggtcggtcccgcccacagctggggcggcctatgtcgagtggcgcccatggcgaagagggctcagctcgcatgtggaagactctcaccttcttcgtcgcgctccccggggtggcagtcagcatgctgaatgtgtacctgaagtcgcaccacggagagcacgagagacccgagttcatcgcctacccccatctccgcatcaggaccaagccgtttccctggggagatggtaaccatactctattccataaccctcatgtgaatccacttccaactggctacgaagatgaataaagagaatctggaccactacccgggcaccagggaccacagcactggtttggaccgttactctgcacatggaccagaaaaagtatatgggaccttaagctcaccttctttacttgtatcaaatgatgactggtatactggtctcccatccctttgcttgtggcaggagatggcttaaataaataacttaaacttaaaaaaaaaa

SEQ ID NO: 58745 - DNA, 346 bp, Homo sapiens
ggcacgagggtgtctttgctgagggtcacattgagctgcaggttgaatccggggtgcctttaggattcggcaccatgacggaagacatgcataccactatcaacaactactggaccgccccttatgacagccgctttcgaaaccagaaccagactaaaaactgttggcacaactacctgtacttccaccgctgtcacaaggcgatgaacggtaaacgaggcgatatctctgtgtgcgaatggtgccaccgtgctgaccaggccctttgtcacagatactggctcacagactgggatgatcaaccacctgaaagcacgtttcccgagaagaactgaactggctggat

SEQ ID NO: 58746 - DNA, 2251 bp, Homo sapiens
ttttttttttttcttaaaacaaccagtttctttaattagaaagcaacaaacatgcaaatggcaagtgtagaaatttatttgaaccaacattttcactatgatgaaaattattcttcaacattgatccaagctcccacatttgaaggttagggaaaatattgcactttgcattttctagcactcctcatacacggcaaaaagttttaaaaacattctgctagttttgttttatacaatctcccaaattcatgcacacaatcattccaaaccaatgttaggttatcccaaaaaaagggaaaaactccaaaaaccataaccttaaaattgcactaaagctctgtaaagaaaaaaatataataaatgtcttatacaaatttcagaacatttaagtgcttgccaaaaagagtttattattcctcatcctcattttcattctcttgaccagagccttctgatctgtcaccctccaaccggtcagctcggatatgattaagtgaagccaacatcctcaacatgaaagaggctggaactgtaatggtgtttctagtttcttccagcatgagttcgtttcgagttataacttcatcagcaagttttcggttaaaaatccttgactcttctaatggtgaccagatctttatgtcataatctatgccagatgaggctaaaattgggtcaaacggatgtggctgcaggcagtttaccacatgattatcagcttccagaagcatcaaatgctcagcagtgtgccgatcccagatgaaaatgtggccacagtcagaaccactcattacaaagttagcaccccagaaattggcttcttttatcattgtcctggagttgcgatggcctttataaaccatttttactagcggccttctaatgttcaaagtatccaattcttccatttctttcctttcttttctccgtctgaagaactcctgaatacgggcaacagcagagcgtctatcaccaggtcctgctcgataccttgcacctgggatcaggactgggtcatcatcactgtcatctgtgtcctgaagagcagagtccctggtggatgtttcttcatgagctgaaggcccagtggcttctgtttggaactgaggctcaggattggtgttattttcattggtagcactctcagtgctagtctgatctgaagtttctggttccttggctttttcagatgaagcagattcttctggaaccccacaagagcgatcaagattgaggtcatttctttctcctgagttggaatccaatggcttggctgtgaacttatctgattgtgttatattgatatggttctcaactgggttttctgcagatactccttcctgatattttgtcacatcctctgatgattcttcaggagcttttgtttcactgtctccttctggtggttgcactgagctctgtgggacgaaagattcctcctgaccctcagatttgcaatggctcccaattcctctagaacttgatgctatactgctccattcatctgtaaagttcagttttattgtgcttgtagttgttccttctgtgctgtagtgcaaacttaaaactggttcacctgtccctggtttggggctcagcttttcattattgttatcctgttgctcgtcaagtgacatggatccgagctgtttgttaaccacagaagaaggagaatcagactgatgatgtgtgtggtgtccagatgcctcaacagactgcctttgttcactgtctggagaagatagcaaaggagtagaatgagggctttctgtgggagatgatgtcgaatgagcctggagttgcgatggcctttataaaccatttttactagcggccttctaatgttcaaagtatccaattcttccatttctttcctttcttttctccgtctgaagaactcctgaatacgggcaacagcagagcgtctatcaccaggtcctgctcgataccttgcacctgggatcaggactgggtcatcatcactgtcatctgtgtcctgaagagcagagtccctggtggatgtttcttcatgagctgaaggcccagtggcttctgtttggaactgaggctcaggattggtgttattttcattggtagcactctcagtgctagtctgatctgaagtttctggttccttggctttttcagatgaagcagattcttctggaaccccacaagagcgatcaagattgaggtcatttctttctcctgagttggaatccaatggcttggctgtgaacccacgcgtccg

SEQ ID NO: 58747 - DNA, 1393 bp, Homo sapiens
ggagggggaattcccggctgcggtattcgcacgaggacgagttacagctgccgcggctccccgagctgttcgaaactggtagacagttactggacgaagtagaagtggcgactgaacccgccggttcccggatagtccaggagaaggtgttcaagggcttggacctccttgagaaggctgccgaaatgttatcgcagctcgacttgttcagccgaaatgaagatttggaagagattgcttccaccgacctgaagtaccttttggtgccagcgtttcaaggagccctcaccatgaaacaagtcaaccccagcaagcgtctagatcatttgcagcgggctcgagaacactttataaactacttaactcagtgccattgctatcatgtggcagagtttgagctgcccaaaaccatgaacaactctgctgaaaatcacactgccaattcctccatggcttatcctagtctcgttgctatggcatctcaaagacaggctaaaatacagagatacaagcagaagaaggagttggagcataggttgtctgcaatgaaatctgctgtggaaagtggtcaagcggatgatgagcgtgttcgtgaatattatcttcttcaccttcagaggtggattgatatcagcttagaagagattgagagcattgaccaggaaataaagatcctgagagaaagagactcttcaagagaggcatcaacttctaactcatctcgccaggagaggcctccagtgaaacccttcattctcactcggaacatggctcaagccaaagtatttggagctggttatccaagtctgccaactatgacggtgagtgactggtatgagcaacatcggaaatatggagcattaccggatcagggaatagccaaggcagcaccagaggaattcagaaaagcagctcagcaacaggaagaacaagaagaaaaggaggaagaggatgatgaacaaacactccacagagcccgggagtgggatgactggaaggacacccatcctaggggctatgggaaccgacagaacatgggctgatcttcccacaacaccacaggactgcagggtgcacaactcccctgccaaggaaaaccatgcagtcctcccctccctggtctcctgcttcagctctgtacaacgagggcaaagatgctaaatcttgctttgcattcagtaaagtgtcaagtgattaagtgtgtatttgtaccctagatgatatgaaccagcagtcttgttttggcatcatcctcatcatgttgtattccagcttcttaagtggaaggaaaagagtgctgagaaatggctctgtataatctatggctatccgaattctctgaaaaaataataaaagtcccctctattatatgagcctgtacagaaaaaaaaaa

SEQ ID NO: 58748 - DNA, 2312 bp, Homo sapiens
acgctccggaatttctcgggtcgacgatttcgtcagggagcatgattgatgccaacctgaaattgctgcaggaagctgagcaacgtctcaaagccattgtggcagagaagtttgccattgccaccaaggaaggtgatttgccccaggtggagcgcttcttcaagatcttcccactgctgggtttgcatgaggagggattaagaaagttctcggagtacctttgcaagcaggtggccagtaaagctgaggagaatctgctcatggtgctggggacagacatgagtgatcggagagctgcagtcatctttgcagatacacttactcttctgtttgaagggattgcccgcattgtggagacccaccagccaatagtggagacctattatgggccagggagactctataccctgatcaaatatctgcaggtggaatgtgacagacaggtggagaaggtggtagacaagttcatcaagcaaagggactaccaccagcagttccggcatgttcagaacaacctgatgagaaattctacaacagaaaaaatcgaaccaagagaactggaccccatcctgactgaggtcaccctgatgaatgcccgcagtgagctatacttacgcttcctcaagaagaggattagctctgattttgaggtgggagactccatggcctcagaggaagtaaagcaagagcaccagaagtgtctggacaaactcctcaataactgccttttgagctgtaccatgcaggagctaattggcttatatgttaccatggaggagtacttcatgagggagactgtcaataaggctgtggctctggacacctatgagaagggccagctgacatccagcatggtggatgatgtcttctacattgttaagaagtgcattgggcgggctctgtccagctccagcattgactgtctctgtgccatgatcaacctcgccaccacagagctggagtctgacttcagggatgttctgtgtaataagctgcggatgggctttcctgccaccaccttccaggacatccagcgcggggtgacaagtgccgtgaacatcatgcacagcagcctccagcaaggcaaatttgacacaaaaggcatcgagagtactgacgaggcgaagatgtccttcctggtgactctgaacaacgtggaagtctgcagtgaaaacatctccactctgaagaagacactggagagtgactgcaccaagctcttcagccagggcattggaggggagcaggcccaggccaagtttgacagctgcctttctgacttggccgccgtgtccaacaaattccgagacctcttgcaggaagggctgacggagctcaacagcacagccatcaagccacaggtgcagccttggatcaacagctttttctccgtctcccacaacatcgaggaggaagaattcaatgactatgaggccaacgacccttgggtacaacagttcatccttaacctggagcagcaaatggcagagttcaaggccagcctgtccccggtcatctacgacagcctaaccggcctcatgactagccttgttgccgtcgagttggagaaagtggtgctgaaatccacctttaaccggctgggtggtctgcagtttgacaaggagctgaggtcactcattgcctaccttaccacggtgaccacctggaccatccgagacaagtttgcccggctctcccagatggccaccatcctcaatctggagcgggtgaccgagatcctcgattactggggacccaattccggcccattgacgtggcgcctcacccctgctgaagtgcgccaggtgctggccctgcggatagacttccgcagtgaagatatcaagaggctgcgcctgtagctgcctggatgagcacacctggctcatcacacttgcaggcctgttccctaaggggccccagccaaggagctgagcgaggctgtcgggcttgggggagatctgacagcccagacctttctacggctggcagcagagaaacaaagtctggacccactccatgctctgccctcagacctggccaggtgatgctctgggggcagcatctccccaccgagagaagcgggctcctaatgaggtgggaaagccacggcaggcagcgagcagcccaggccagctttctgcatggatggtcagtctcttgccctcaaacactacagcaaacaagctacccctgccagtcctagacaacttgggtacatctggggacctagcagttaggcttgactttgaggagaggctgtgatgtttatgatccctgaataaagctactccttggagagaaaaaaaaaa

SEQ ID NO: 58749 - DNA, 1464 bp, Homo sapiens
actagttctagatcgcgagcggccgctcgcgatctataatgcctcttctgaagcagccatcccggcctcttggtactgctgaccccagccaggctacagggatcgattggagctgtccttggggctgtaattggccccagctgagcagggcaaacactgaggtcaactacaagccacaggccccttccccagcctcagttcacagctgccctgttgcagggaggcggtggcccttctgttgctagaccgagcctgtgggatataccaaggcagaggagcccatagccatgaggagcctcggggccctgctcttgctgctgagcgcctgcctggcggtgagcgctggccctgtgccaacgccgcccgacaacatccaagtgcaggaaaacttcaatatctctcggatctatgggaagtggtacaacctggccatcggttccacctgcccctggctgaagaagatcatggacaggatgacagtgagcacgctggtgctgggagagggcgctacagaggcggagatcagcatgaccagcactcgttggcggaaaggtgtctgtgaggagacgtctggagcttatgagaaaacagatactgatgggaagtttctctatcacaaatccaaatggaacataaccatggagtcctatgtggtccacaccaactatgatgagtatgccattttcctgaccaagaaattcagccgccatcatggacccaccattactgccaagctctacgggcgggcgccgcagctgagggaaactctcctgcaggacttcagagtggttgcccagggtgtgggcatccctgaggactccatcttcaccatggctgaccgaggtgaatgtgtccctggggagcaggaaccagagcccatcttaatcccgagagtccggagggctgtgctaccccaagaagaggaaggatcagggggtgggcaactggtaactgaagtcaccaagaaagaagattcctgccagctgggctactcggccggtccctgcatgggaatgaccagcaggtatttctataatggtacatccatggcctgtgagactttccagtacggcggctgcatgggcaacggtaacaacttcgtcacagaaaaggagtgtctgcagacctgccgaactgtggcggcctgcaatctccccatagtccggggcccctgccgagccttcatccagctctgggcatttgatgctgtcaaggggaagtgcgtcctcttcccctacgggggctgccagggcaacgggaacaagttctactcagagaaggagtgcagagagtactgcggtgtccctggtgatggtgatgaggagctgctgcgcttctccaactgacaactggccggtctgcaagtcagaggatggccagtgtctgtcccggggtcctgtggcaggcagcgccaagcaacctgggtccaaataaaaactaaattgtaaactcctaaaaaaaaaa

SEQ ID NO: 58750 - DNA, 3516 bp, Homo sapiens
tacggctgcgagaagacgacagaagggggggtcccatattgaactcgggttggaagaggcgagtccggtctcaaaatggaggtaaaaccgccgcccggtcgcccccagcccgactccggccgtcgccgtcgccgccggggggaggagggccatgatccaaaggaaccagagcagttgagaaaactgtttattggtggtctgagctttgaaactacagatgatagtttacgagaacattttgagaaatggggcacactcacagattgtgtggtaatgagagacccccaaacaaaacgttccaggggctttggttttgtgacttattcttgtgttgaagaggtggatgcagcaatgtgtgctcgaccacacaaggttgatgggcgtgtagtggaaccaaagagagctgtttctagagaggattctgtaaagcctggtgcccatctaacagtgaagaaaatttttgttggtggtattaaagaagatacagaagaatataatttgagagactactttgaaaagtatggcaagattgaaaccatagaagttatggaagacaggcagagtggaaaaaagagaggatttgcttttgtaacttttgatgatcatgatacagttgataaaattgttgttcagaaataccacactattaatgggcataattgtgaagtgaaaaaggccctttctaaacaagagatgcagtctgctggatcacagaggggtcgtggaggtggatctggcaattttatgggtcgcggagggaactttggaggtggtggaggtaattttggccgtggtggaaactttggtggaagaggaggctatggtggtggaggtggtggcagcagaggtagttatggaggaggtgatggtggatataatggatttggaggtgatggtggcaactatggcggtggtcctggttatagtagtagagggggctatggtggtggtggaccaggatatggaaaccaaggtggtggatatggtggaggtggaggatatgatggttacaatgaaggaggaaattttggcggtggtaactatggtggtggtgggaactataatgattttggaaattatagtggacaacagcaatcaaattatggacccatgaaagggggcagttttggtggaagaagctcgggcagtccctatggtggtggttatggatctggtggtggaagtggtggatatggtagcagaaggttctaaaaacagcagaaaagggctacagttcttagcaggagagagagcgaggagttgtcaggaaagctgcaggttactttgagacagtcgtcccaaatgcattagaggaactgtaaaaatctgccacagaaggaacgatgatccatagtcagaaaagttactgcagcttaaacaggaaacccttcttgttcaggactgtcatagccacagtttgcaaaaagtgcagctattgattaatgcaatgtagtgtcaattagatgtacattcctgaggtcttttatctgttgtagctttgtctttttctttttcttttcattacatcaggtatattgccctgtaaattgtggtagtggtaccaggaataaaaaattaaggaatttttaacttttcaatatttgtgtagttcagtttttctacattttagtacagaaactttaacaaaatgcagtttcgaaggtgtttccttgtgagttaacaagtaaagaagatcattgttaattactattttgtatgaattttgctaaagttaactgtaaagaaacacctgctgacttgcagtttaaggggaatctattctccccatttccaaaccatgatatgaatgggcgctgacatgtggagagaatagataatttgtgtgtttgcaatgtgtgttttagataaataggattgggtatttaaattagcatttgtgaatttaatagcattaagattaccttcaaatgaaaaaaaatctcaaaatttctatttggtttttgtgcattttcttttaaaatgtaatcatatgattttagtgtgttagacttgctgagtcctagctgtgtttagaacagaacatctctattctacatttaccttggtcaaatttgaactgctgccataggttttgggtgtaaagaatgtttactgccctccatttaaattctgaaaagggatggtggatgttttccctctcctacgttagaaaccattcttaaaaacttttgaaaatatagaaccattaagcctgctatatctgagcaaattaatgggtaccttttttttcttatttaaagcacaagaggcccataaatcttgagttactttaaattcttttttttgatacaagttttcagagcaagagaataaaaatcatgtgttattaaacccctaactggctggcatgctttcctgtttgtattctatacattttgctggatgaaaccaaggatagttcaggtataattgtccaaaataacctaactgcagcagaaatgtagcacagttgcttagtacaggcttctcacttcctacagacctgaattcaaatttggatagtctgagttcttaaattcccaaagaacacactgttatttcttgtgtatatttcaacataaatcatgttgttaccaatttgtttggaaggccctggttgagaagagttttagttaataaggtcatatatacatatattaatataaaccaatgtctactgttttgctccagctagtgcttacagtttcattcgagccctgagtatgtgccctgctgttactctctttggtagttgaacgttgaattcaagtcttttgttttaagaagtactaagcaaacaagcaataaaaaggggaatggggtgtgctagtgtttgaatatgctctcttgttgctctaattctgtgcctctgtgcattaatatttggatgcatgcaatgccagcatggaaattggtcttcacatatactgcagttttccagaaacattcacaaaccaataaatgtaacagacattccatttgttaatgggcatatatgtgaaaagcagtgtagaaaataggctaatattagaaaatggttaagtcctaaataacttcaagtgtggttatataatggacactgtcaatgttcataacttaaacctgggtacctggtcaaaataatgcttgggaaacattaaaattgagctaaattgtctcaagttcttttattcatataaataaagtttaaaggaatgggggagattaacatttcctgttttatgtttgtgaaattgtttgacacaaccttgacagtatcctttaatggcatgaggttaattgtactgttaaccaactttctatgttctggaactagtattatagtgaaaacatttacagtaagttgatgtttacaacctataagcaggtgaaatctgtgtatgtgacctgtttataagttgtaattagccttagcctccttggtgaacagtggtgggaaaagtaagcccatggagggaggagcggatttaaccacctttaaaggacctaagatgtgctttttaagcacagtggtgg

SEQ ID NO: 58751 - DNA, 1426 bp, Homo sapiens
tttacaagaaacactcattatttattcatgtggctgaaagagtatattaattatgtttagatttttggaaaaagtctgaacaaaaaaaggacctatacagtgctcaaactatatttttaaaaatactaattttatttttactccacatatggaaaaaaatggctgtactatcatgtttaccatacatactaacattggaaacagaataacgaattgtatttaaattttatgaagaacacacaaacattaaaacactgattggttacagaaagcagagtttgaggaaaaaacattagctataattttcattttcattaaagagcagcaccctctgagaataatcaaactgattagtaatattcatctatactgcaaaataatatgtacaaaggaaagttagtgattgtactgattttattacttttaccaagccattttatgttcctcactcaatgcaaagaaataaaacataatctgaagaaaaatatgtccttattattattcacaataaaaagttggctttattctgcaagcctgggcatattgtacaattggcagcacttaacggctcaagtggatcaatgtaccagtttgattctgatccactgaatagaatctctcatccatatctggtgaccagactaactccatgggagctgtgatagactgaaccatttctgtggtatccctagatctcactaaataagaaagaccctacaccagaaaatatagcaactgatctatctataaattacatctatatgctagctctttagtataagttggaaaaaggggccctttcttgagcacatggataaaagtattattgtagtctaaagattgctggattgatattgtgttgttataatgaagataaggtacacactgaaaccactgtcagattaagaaacttccacaacttgtctcagttcttcaaacaatggagcaagttccttttctaggctgacaattagtcctgtattggcactgctgctggctatgaaactcaccaccaaaggtaaacgattaaattgaaccacctggtaggtgttatagtaacagatgatacttttatttttggaaagtccaagtttgcttccttggtctgttgcaagggcaaaagtggataagaaaccaggtcgcaaagcatgctctggagcattgtcatttgccactttaataacaggtactccatctctatctgacacaacaatggcatggagcccttcaacacttggtaactttttatacaagaatcgctttaggtcctggggtttctgggctgcctggttctctccgctgtcacttcagggacagctttaaagacaggttcctcctcaagcccaccgtcacatgattcatgacctcgtctgcgctccaggaagcactttctacgccgccgtcgccctacgatacgggatttcgg

SEQ ID NO: 58752 - DNA, 839 bp, Homo sapiens
gcggggaattccgatctgctgctcgtctcaggctcgtagttcgccttcaacatgccggaaccagcgaagtccgctcccgcgcccaagaagggctcgaagaaagccgtgactaaggcgcagaagaaggacggcaagaagcgcaagcgcagccgcaaggagagctactccgtatacgtgtacaaggtgctgaagcaggtccaccccgacaccggcatctcctctaaggccatgggaatcatgaactccttcgtcaacgacatcttcgaacgcatcgcgggtgaggcttcccgcctggcgcattacaacaagcgctcgaccatcacctccagggagatccagacggccgtgcgcctgctgctgcccggggagttggccaagcacgccgtgtccgagggcaccaaggccgtcaccaagtacaccagcgctaagtaaacttgccaaggagggactttctctggaatttcctgatatgaccaagaaagcttcttatcaaaagaagcacaattgccttcggttacctcattatctactgcagaaaagaagacgagaatgcaaccatacctagatggacttttccacaagctaaagctggcctcttgatctcattcagattccaaagagaatcatttacaagttaatttctgtctccttggtccattccttctctctaataatcatttactgttcctcaaagaattgtctacattacccatctcctcttttgcctctgagaaagagtatataagcttctgtaccccactggggggttggggtaatattctgtggtcctcagccctgtaccttaataaatttgtatgccttttctcttaaaaaaaaaa

SEQ ID NO: 58753 - DNA, 1124 bp, Homo sapiens
tgcctttccgtcaattcctgtcctgggcgtacgtcaagatggcggcgtctgtattaaacaccgtgctgaggcggcttcctatgctatctctcttccgaggttctcacagagttcaggttcccctccagactctttgcaccaaagctccctctgaggaagattctttgtcctcagttcccatttctccttataaggatgagccctggaaatatctggaatcagaagaataccaggagcgatatggttctcgccccgtctgggctgactaccgccgcaaccacaagggtggtgtacccccacagcggactcggaagacatgtattcgtcggaataaagttgttgggaatccctgccccatctgtcgagatcacaagttgcatgttgactttaggaacgtgaagctcttggagcaatttgtctgcgcccacacgggtatcatcttctatgctccatacacaggagtctgtgtgaagcagcacaagcggttgacccaggccatccagaaagccagggatcatggtctcctcatttaccacatcccccaggttgaaccacgggaccttgacttcagtacctctcatggggctgtgagtgctactccgccagcccccaccctggtctcaggtgacccctggtacccatggtacaactggaaacagccaccggagagagaactgtctcgccttcgccggctttaccagggtcatctccaagaagagagtggccccccacctgagtcaatgcccaagatgccccctagaacaccagcggaagcctcctccactgggcagacaggccctcagagtgctctgtaggagctgtagactgggaagagaggccaggcgtggtggctcactcctgtaatcccagcactttgggaagccaaggtgggctgatcacttgatcccaggagtttgagaccagcctgggcaccatggtgaaacctcgtctttaccaaaaaatacaaaaattagctgggtgtggtggtgcacacctgtagtctcaactattggggaggctaaggtaggatcacttgatcccaggaggcggaggttgcagtgagttgcagtcacacccctgcactccagcctgggtgacagctagaccctgtctcaaaaaaaaaa

SEQ ID NO: 58754 - DNA, 1841 bp, Homo sapiens
cgccgggcctggggaaggggcgggcgcggggacccgatgcgcgggagcggaggccgagatggcttcggcgggaggcgaagactgcgagagccccgcgccggaggccgaccgtccgcaccagcggcccttcctgataggggtgagcggcggcactgccagcgggaagtcgaccgtgtgtgagaagatcatggagttgctgggacagaacgaggtggaacagcggcagcggaaggtggtcatcctgagccaggacaggttctacaaggtcctgacggcagagcagaaggccaaggccttgaaaggacagtacaattttgaccatccagatgcctttgataatgatttgatgcacaggactctgaagaacatcgtggagggcaaaacggtggaggtgccgacctatgattttgtgacacactcaaggttaccagagaccacggtggtctaccctgcggacgtggttctgtttgagggcatcttggtgttctacagccaggagatccgggacatgttccacctgcgcctcttcgtggacaccgactccgacgtcaggctgtctcgaagagttctccgggacgtgcgccgagggagggacctggagcagattctgacgcagtacaccaccttcgtgaagccggccttcgaggagttctgcctgccgacaaagaagtatgccgatgtgatcatcccgcgaggagtggacaatatggttgccatcaacctgatcgtgcagcacatccaggacattctgaatggtgacatctgcaaatggcaccgaggagggtccaatgggcggagctacaagcggaccttttctgagccaggggaccaccctgggatgctgacctctggcaaacggtcacatttggagtccagcagcagaccccactgaggggctgccgagcctcagggcaggtctcccgcccggcatgtgtgttcagggactgagcctggggacgcccacccacacccactgcttcctctcggcgcaccccaggggagtgttagcagcgaggccttcctcactcaggagtggaaactcagatgtgtcactcagactcaacttgctgggacactgacaggcgttcctgaggttttcagccacttaggctcgttgcggtttaaagatccctctaggtcactgagaaatgccacagaatgtgcaggaagcctgggaggcttctgtgaggaatgtgaggcacattattggggaaattgaggagacagcctagacactggctggcctgatgttttgttgacagtgaacccacagtgggagagagttttttccagtctgatctggttcttacacactcacacacataactcaaaagttttgtgaacaagtactttccttttttacatgttacatgtcctcatgttttctgttttctgtttcataacacaaggctggttgtggcctacaaacctaatttcatgacccagtggtttgcagtccagcgtggcctacacggatatggggagccactgagggatgttttccccccttgcttgtgccttaaaggcagagaagcgaggcggatgccctggaagcacccagcatcacacccaggcttgtgcggggccaggctgggagcccatgcagtagggcagaaggcagcggaggccaggtctgtcccggctggagaacagcgtccacgcagtcctgcctggggtcaggccctcactgaccctcaggggagcccccaaggtgctgtctgtctagacaggctgtcccaccccagggtgggtagtgggccatatgcagggaatggtgcttctggctgtggcacgcactggatcacccaggtcccagcagacatggccgcccaaagtcagca

SEQ ID NO: 58755 - DNA, 883 bp, Homo sapiens
tttcgtgccggtcggaggcggtcggcggaggtgtctaccccgccggtgatggcgttgaacgccactggcttcccggccttccgtccgctgcctccgtccgattctgcgtctgcttgctgaggaggcggattaggggggcgcggagtctcttcccttgagtgcataggtcccggttggtagagggtttgagtccgcatcgccacagctgaaggctgcgagggactaagagcagaatatatctttagaaatgagttgcacaattgagaaggcacttgccgacgctaaagctcttgttgaaagattaagagatcatgacgatgcagcagaatctctgattgagcaaaccacagctctcaacaagcgagtagaagccatgaaacagtatcaggaagaaattcaagaacttaatgaagtcgcgagacatcggccacggtccacgttagttatgggaatccagcaagaaaacagacaaatcagagagttgcaacaagaaaacaaagaattacgtacatctctggaagaacatcagtcggccttggaacttataatgagcaagtaccgagaacaaatgtttagattgctaatggctagcaaaaaagatgatccgggtataataatgaagttaaaagagcagcactccaagattgacatggtacatcgtaacaagtccgaaggattcttccttgatgcatctcgacacatccttgaagcacctcaacatggactggagagaaggcacttggaagcaaatcagaatgtacactaaataaacagtcaacttttggggtgtggatggaaggggggtccattttaaaagtgcttttacattgaatttccctcccagattagatcagcaaataaatgaaatttattaaaaaaaaaa

SEQ ID NO: 58756 - DNA, 5599 bp, Homo sapiens
  misc_feature (1)...(5599): n = a,t,c or g
ttgagatctttgttccctgaggtgccaggcaggcaagtttagcacatgatgaaaacagacttccacctcagtggcctgtgggcacgcacaagtgaggtctgtttttctagacaccaagggggagtaagctgagctgtctagcacggattggagactccctctccctggtgggcctggcaatgacagcatttctcacagaggcattctggtaaatgaagctgaaaggggtgttttacatctgtaaacggtttcaaacaggtagagagaaaaacaccacaattaacactgttactttttgccttgtctggcatgtttgttttaaatgaatacattaatggggtttttatccttttgaatgacttttcagacactagacataaatctcttccctccagtgtatgctctgcctttttaaccactgacatgtaaggaggactactgtctagcatcagcttatggggtcagctggctgtggggatagagtcctgaggaatgtggtcacagcaagaaggcggggagcagcagagccttgcctttgaatgaggcagcttgtgaggcaagcattctggagagaggtgctttgaaagtaaggtgcggcctttcacctcttccttgattactcacacatctttgcgttctcccctgccgtccttcaactgtatcttacttttcttaccagaaaggaatggagtctgtttagagacaacttggacaacctgtgagtgcatctcttctttcctttagtcttcacagctaactctggagagcttcaaaactagaaggatctactccgcatgggtgcatgcagaggctcctggatctgggaagcccgccccctcacaaatgctgagccgttcttgctctgaaactgcgtgagtcaaggcaaatgcaaaaagccaggttttggggatgtgtcttactgtgcttcaacttcccaaggaattgaaagtcaacctaactgtaacaacagggtgagaaatgaccaaactgcccgtgactttttctgaatggacttcataaccggaagacttaaccggtggcctcatcaccagagcatcgccaggatttctaatgcactcagtttccctacatagcagggattcttagctaggtgtccccatgaaccccgtaaagttctacacaaagtcttgcatacaggagcctttacaagatgattatacagggtggcagattgggtgactgaccagacttgttggggtcctgggatgagttgccccgggctgcaaattaagagtacagctaagtgcgggggtggcggtggagggaacgaaaattgaacctgtctgcctgtgctgtgtcgtgtggctttatcagcccgaggaagggcaggtgtattctaatttgcacaaaggtgctgggtagactagtggcagctctcatgtgctgcacataagtggaatcagtatgaatagaagaacttgctgtataaaggaatttcatggcaacaatgctggtaagggcaattagcctcgcttaagttgccttttttacacaccaaaactttttacatgaagggctggtttcacatgaatactatactgaaatctgtgctctcaagatctagcagtgaccagggctgcccggcgggggctctcctggcaagtcaggaaggtttctgttgctaatataacatagaaacacattagtgcactgggcctctctgaggtcagcatatttgtactcttggaatatttgtttttttcttcagtaacaacagaaaccccagttgggagtttaacaaataactgactaccactcactcatgcatttttatttccaattaaagcaaagcactgtgctgtgctcagataataatagtttgtaagtaaaagtttttagttttcagtgttcaggttatagaatataactgaccataaaaattacctgcaggtattttctttttatgaacttgtttttaaattaccaagtaattactggtgtcattttgttttatgacagacacacgtatctaacaaacaaacaaacagtgaccttctccatgggtcaaggacttccttacaatttctcctgagttaacttttgtgaaaataatacctaaggttttctggcttattgaggaaatttcctaacaaacaaacaaacaaacaaacagaagagaagatcattaaccactgtatactttgtgtatataataggtcagtgtaaagaaatatgatttgaggtggtgcatgcaagtaactagggtttattctatataatgaatatttatagatctgtaacatttgtttcaaaatgctgtttcatttttataaagtaccagtgtttagctgctttttatacattaaattagcaatttgaaaaactcaaatatctgaaggtattttattttcgtggtcctcatgaactcactagagattaaaagtagactcaaacaacttgaaaatttgactcttttagcataagattttaagtcttttgagggaattaattttcctttaccctatttgttcttcctaaatactaattaattttcaaagtcaggaaaataatagaaatcaaatggcttcctgcctgggtgatttatagaaggattgtataagggccttcaaacttaatttgttcactgaacaaggctatctatctatctatctccatcctgatttttttcccttgtgtataacaggttctataccgattcagcaaaatcaccatttatctcagcttgctgataaaagggggccatgaatcttgtggtctcctacttagagttcaactccttgggtacttgacctttgtatttcagataaacagtaagtaaagtagaaatgtccccttttggtaatctggtaattccctgatctattcaaggatgacttagtttatcttatttggcttattactttgctatagtactaagtaactcctctttctttaaaaaacggaaaaaaccaaaaaagaacactagccatgtgacagtgctataaaactcccagtgtgcttttgtcaggggtgggtgggaggtgcctaattacccatacaagggcatcattcccactgggtatgcaggggcagaaccacagtagtaaattctaaaattttttcaagtatgttcgtataacggaaaatctcactggatggggccgttttaagaacgcttcttagtgatgatcctgtctgtgggacataaggaagaagcattggaaggcactattttgaaagaatgctgcacaggtatggcaacagccccaagcacattccttcctcacgagtcccaggtccagctttattacctaatacaagtccaacctgtggaacatccaaattcgctgttccaaagtttaattaaaaacacaatttacaaatatttaatatcttctgaaaaagccatttcctaagttaagaatgaaaaagtatgtacataatatataatcaaataccaggcagcctcaacttccaccaggtccacactcagcaacatccgtctttttaggttcttcagtgtcttctgtcaaatccacaaagttgttttccatgacgggggaaggaatggaaatccccattgcttttcgaactccatacgtgcttacgatatcacctggagttacttgctgtgcaagttctttaagattattggtcacttgttcagcaagatgcatttctctgtatgagggacccaagagacagatcatgttcggagggggtctggtgctcaaacgttcattctgggcttcctggagttccctgagcaatctggtggtctcatcaagtttcttctggaatatttcagcttcttcagagtcaaaaacttcaactggaacgccaaaatttgttactgctttcagcgctatgagcctgtcttgagtactggagtccaaacgccctggtggctctacttctgtaatctgctccatttcttttgctgtgtcaagtgtcctagtatggccttcatcttcaggcaatgacatctccatctcttgtagggtcctggaatgccctccttttgttaaaacatccagtaaactatctgccatgacatacggataatcttggcacgtggccaaaaactcatggatgctgaaatcacttggaagatcagagtcttccccataggttgaatagattaaatcagaatcatccttgctgatatttgcaaatgtggagtcataatgcggtgcataagaactgtagggcccataattcaaatataacactggagtgactttgttccttttatcctctttgaacccctgcaaagtattcactccagactgaagtcttccagttgtcattcccagtctcacagggcagtagcctggctctcctacaatgggatccacaggatggagaagtcccaacgtcgttgttccatctggttttcttctttcaaattcgcactgactgttcacaagccgcctggtcagctttcctccagattccttcacgatgcggtcaagctgctcctgctctctctctaaattattgcttttaaacttatcttcaagcatatctttgtctttctttttattttctttgctgggactcttgaaggcgtgtgcttcggcatctccagagtcctctctctctctctgccagcagcctccgtcctccccactctgtgaggtgtctgttccatctttctgctttcgagttttctgcaagtcagccatgaagtctatgctctgcttcaggctctgaattctttcctggctaagaattttcattcctgagtgcaacagcttctttgcagctttataataaatggtctctggtttattgtaaatcatggcattagtacacattagtttgaagttatcctttagttcttctatggactgatagtcattgttcttgatcttttctttcatggtactaaaatccattgggtgtttaatgatcatggagtagccaggagcaataaaatcagtcacaggaaatgaaaagaaagcacttggatcttttctctgcaattgtctcatcagttgattcaaagcttcttgaaggggtgtctgttctacttcttcttgtttggctaaagagcttgtgagaggcttctcaggaggcaagtctaatctcacaggggcgtgacactggagatctttttctgcctcattctccacccggtctcgatctcgcttctttttatcctccttaactcttctccgttttctccccttttcttcccctggaatctgcttctctcctttctttctctttttccgctttctgtccttgtgtttgtcatgatcgtttttgtcttcgaagaggctggagtcgtgccccgagctgcccgtggagagttcggtgacttcgttccctcctactttgaggaccagcttcaagggcttctctacatactcctcgtagaggtgtttgtccgacttgtgcttcttgtgcttcttgcagaaaactcgaaagcagaaagatggaacagacacctcacagagtggggaggncggaggctgctggcagagagagagagaggactctggagatgccgaagtacacgccttcaagagtcccagcaaagaaaataaaaagaaagacaaagatatgcttgaagataagtttaaaagcaataatttagagagagagcaggagcagcttaaccgcatcgtga

SEQ ID NO: 58757 - DNA, 1944 bp, Homo sapiens
ccagtctggtggaattcctgtgaggggccgcgtctcgcagcagccgcccggaccgggcatggtgttgggcgccgggcccgcctcgcctgtctcggggagcccagggtaaaggcagcagtaatgctaacgctagcaagtaaactgaagcgtgacgatggtctcaaagggtcccggacggcagccacagcgtccgactcgactcggagggtttctgtgagagacaaattgcttgttaaagaggttgcagaacttgaagctaatttaccttgtacatgtaaagtgcattttcctgatccaaacaagcttcattgttttcagctaacagtaaccccagatgagggttactaccagggtggaaaatttcagtttgaaactgaagttcccgatgcgtacaacatggtgcctcccaaagtgaaatgcctgaccaagatctggcaccccaacatcacagagacaggggaaatatgtctgagtttattgagagaacattcaattgatggcactggctgggctcccacaagaacattaaaggatgtcgtttggggattaaactctttgtttactgatcttttgaattttgatgatccactgaatattgaagctgcagaacatcatttgcgggacaaggaggacttccggaataaagtggatgactacatcaaacgttatgccagatgataaaaggggacgattgcaggcccatggactgtgttacagtttgtctctaacatgaaacagcaagaggtagccccctctcccgtcctcatgctccctctcagtcccctggattgccccagtcctgtgaccatgttgccctgaagaagaccatcttcatgactgctcattgtagatggagaattcaacataaatacagcaagaaaatgtgtttgggcttctgaagagttgtctgcttaccttaacatgtttacttttttgaacttgtactgtataggctgttggtgaaattcttaagaagttgtaatgaactcaaaattgaggccagagcttgctttcccttttcccaaacaaaattggttttctgcacaagcgatgctaatgatgtgttcagtgtaactcgcagattggcaataagatacccgctacaaactgtgattggatgcaaaatctcttagcttctttcacgaatgttggccctgcctagatgttgtgaagcctcccagaatgcatagagtcattcactgtagatctcttattgaaatgcgtattttatttaatgtaagtatattttggaacagatttgtaatttgtacaattcaatgctttaattattttttctattctcatttagtttgtattttcattgtatagagcagacagaaagatgttgggtcaagcaactattgaagagaaatacaaagaaaatatgaaaggcacattattcattttgtccaaatgcaatgagaatctcactcttaaaaatcagctcttgctttcgggtccggatgtggtgagcacattttggagccctttgaagctagatttggatgatcaaaacaaaaaggcagggagcccattctaacatgctgcccagaggaaactggctggagcctggaccagctggggctgatgcttttgcagtggtcatgtgattgtgacctggtagctacttatcagagagcccagaccctgctgtcctgggagacaggagcgatgcctcaggaatcagcccaatgtctgatgtcactgagactgtacctgtggccattcttctgagtttgctatggctccaaggccctgccggctggggtgaagcctcctaaggcccttggaaggaccaaggagtcaacagtggcatatgccatcctccggccaggttaatatactgcagaggaaaagccctgaagagaggcaagtggatttactccagcatgtagacatttgaaccagtgaaatcaaacacaaaataaatgtctgtctagtttc

SEQ ID NO: 58758 - DNA, 1573 bp, Homo sapiens
ggcacgaggtctgcagtcggcagcctcgccggcagctcgctcggcccccgcttggcccggcccgcagggttctctccccttgccaccatgagcgagtcatttgactgtgcaaaatgcaacgagtccctgtatggacgcaagtacatccagacagacagcggcccctactgtgtgccctgctatgacaatacctttgccaacacctgtgctgagtgccagcagcttatcgggcatgactcgagggagctgttctatgaagaccgccatttccacgagggctgcttccgctgctgccgctgccagcgctcactagccgatgaacccttcacctgccaggacagtgagctgctctgcaatgactgctactgcagtgcgttttcctcgcagtgctccgcttgtggggagactgtcatgcctgggtcccggaagctggaatatggaggccagacatggcatgagcactgcttcctgtgcagtggctgtgaacagccactgggctcccgttcttttgtgcccgacaagggtgctcactactgcgtgccctgctatgagaacaagtttgctcctcgctgcgcccgctgcagcaagacgctgacacagggtggagtgacataccgtgatcagccgtggcatcgagaatgtctggtctgtaccggatgccagacgcccctggcagggcagcagttcacctcccgggatgaagatccctactgtgtggcctgttttggagaactctttgcacctaagtgcagcagctgcaagcgccccatcgtaggactcggtggaggcaagtatgtgtcctttgaagaccgacactggcaccacaactgcttctcctgcgcccgctgctctacctccctggtgggccagggcttcgtaccggatggagaccaagtgctctgccagggctgtagccaggcagggccctaagccagggctcctggacccaggctttcccataccacgggcccaggactgtggctccttttctaaaccacctctgggactcagctccccccgccaaaaaaaatgggtctccttctgggctccaggattgtctccccactccagcatccccaaactggtactccctgacccaggcccccaatcctgggctcttacagagcctccatgagtcaagccccctccccacacctggactccagaattcaccctctcccctgcagtctgggttcccagactgagtcctctccccaaatcagggctctagacccgagccctccaaacctggactctgggacttaggcccccttaaatctagacttctctttataggtttcaggtctcctatgggtgcctgggaagtccttgaaagtggactgttctcaggcttgacctgccccaccccatccccgcggttgaggctgtgggggcagcagatcaggagcccactgataaggggccctagggtacagggtgctgcccagcaggtcgccaccgagtgtcttctcattttatttcagctccattttgcccatagatgggcagaggggtgagattggctcatcccccttccagattctgcaataaagcggtgtgaggaaaaaaaaaa

SEQ ID NO: 58759 - DNA, 2031 bp, Homo sapiens
gatcggtattaccggcccgacccacgcgtccgcgctcgcgtagaggaattccgggttttcttcctcgccctaccttggtttacctgcagccgcctagtcctcttctccttctctttgatgattcagggcctcggcttccctcacgatattgcagaaagacacagctttcctcttcctctccaaaccacctcgaagcaggggcataattggaatatcatttggagaaagtgtcatggaagttctgcgtccacagcttataagaattgatggccggaattacaggaagaatccagtccaagaacagacctatcaacatgaagaagatgaagaggacttctatcaaggctccatggagtgtgctgatgagccctgtgatgcctacgaggtggagcagaccccacaaggattccggtctactttgagggcccccagcttgctctataagcatatagttggaaagagaggggacactaggaagaaaatagaaatggagaccaaaacttctattagcattcctaaacctggacaagacggggaaattgtaatcactggccagcatcgaaatggtgtaatttcagcccgaacacggattgatgttcttttggacacttttcgaagaaagcagcccttcactcacttccttgcctttttcctcaatgaagttgaggttcaggaaggattcctgagattccaggaggaagtactggcgaagtgctccatggatcatggggttgacagcagcattttccagaatcctaaaaagcttcatctaactattgggatgttggtgcttttgagtgaggaagagatccagcagacatgtgagatgctacagcagtgtaaagaggaattcattaagctacaagaattagttgatcgagtgctggaacgttttcaggcatctggactaatagtgaaagagtggaatagtgtgaaactgcatgctacagttatgaatacactattcaggaaagaccccaatgctgaaggcaggtacaatctctacacagcggaaggcaaatatatcttcaaggaaagagaatcatttgatggccgaaatattttaaagttgtttgagaacttctactttggctccctaaagctgaattcaattcacatctctcagaggttcaccgtagacagctttggaaactacgcttcctgtggacaaattgacttctcctgaggtggatcttggaaagcactagaaactaaacatcttcaccaggtgctgaagaaaagtgtcttcgttttaattgccaagcagggatgtggacatttggatggtgactttcctgggtggttccccatagattcaccattgcctctaatggtgtctacacccgtcatactaccagctgagatggtggtgggcataaggagaatttgtgcctataacccttagtgtgttctggttttttttcttttaatttttaaattgtcgtaaaatactcataaaacatactgtcttcaccatttttaagtgcacagttcagtaacgttaactgttaatacattcataatgctgtgtggccgtcaccggccgtccaatctccccataggcttctccagcctgtaaaaatgggaaaactgtacccccattaaaacagtaaatccccaactccctcccccagccccccgcagcccacccatcctgcctttcctgtcctcctctggttttgactattctcagtatctcatataagtggaatcatacagtgacttgtctttttgtgactggcttatttcacttagcataatgtcctcaaggttcatccatgttgtgtcaggtgacaggatttccttcctgtattatacatataatggaatgttccgttacatgtgcgtaccacactctgttcctccatcagtgaacacttggcttgcttcctcttgactattgggagtagtgctaatacagacacgggggtgcaaatatctctttgagactctgcctttaattcctttaccacccagagttttatctttagcaaaataaccattaaagttgtttgccttttaaaaaaaaaa

SEQ ID NO: 58760 - DNA, 902 bp, Homo sapiens
atcgtctcctattagattgtggtgactattttctctaggttgtagggatccagtatatactagacctctttgaacaccttatagaccgctacgcaggatttcatcgagacgaattcggcacgagccgcagccatgagtatgctcaggcttcagaagaggctcgcctctagtgtcctccgctgtggcaagaagaaggtctggttagaccccaatgagaccaatgaaatcgccaatgccaactcccgtcagcagatccggaagctcatcaaagatgggctgatcatccgcaagcctgtgacggtccattcccgggctcgatgccggaaaaacaccttggcccgccggaagggcaggcacatgggcataggtaagcggaagggtacagccaatgcccgaatgccagagaaggtcacatggatgaggagaatgaggattttgcgccggctgctcagaagataccgtgaatctaagaagatcgatcgccacatgtatcacagcctgtacctgaaggtgaaggggaatgtgttcaaaaacaagcggattctcatggaacacatccacaagctgaaggcagacaaggcccgcaagaagctcctggctgaccaggctgaggcccgcaggtctaagaccaaggaagcacgcaagcgccgtgaagagcgcctccaggccaagaaggaggagatcatcaagactttatccaaggaggaagagaccaagaaataaaacctcccactttgtctgtacatactggcctctgtgattacatagatcagccattaaaataaaacaagccttaaaaaaaaaaaaaaggggcggccgttttaaaggatccttgggggggcccaagtttacgcgggcatgcaaggtaatagttttttccttatagggaggcgaattataac

SEQ ID NO: 58761 - DNA, 2315 bp, Homo sapiens
ggcgctactccggggcttcacgggattgtggcggtcctctctcccaattcggaagctacagctacctccggacgctctcaagatggcgacctctctgggttccaacacctacaacaggcagaactgggaggatgcggacttccccattctgtgccagacatgtcttggagaaaacccatatatccgaatgaccaaagaaaagtatgggaaggaatgcaaaatctgtgccaggccattcacagtgtttcgctggtgccctggagtccgcatgcgtttcaagaagactgaagtgtgccaaacctgcagtaaattgaagaatgtctgtcagacctgcctcttagacctagagtatggcctgcccatccaggttcgtgacgcaggattgtcttttaaagatgacatgccaaagtcagatgtcaacaaagagtactatacacagaatatggagagagagatttctaactctgatggaacacggccagttggcatgctggggaaagccacatctaccagtgacatgctgctcaaactggcccggaccacaccctactacaaaaggaatcgaccccacatttgctccttctgggtgaaaggagagtgtaagagaggagaggaatgtccatacagacatgagaagcctacagatccagatgacccccttgctgatcagaatattaaagaccgttattacggaatcaatgatcctgtagctgacaagcttctaaagcgggcttcaacaatgcctcggctggacccaccagaggataaaactatcaccacactatatgttggtggtctaggtgataccattactgagacagatttaagaaatcatttctaccagttcggagagatccggacgatcactgttgtgcagagacagcagtgtgctttcatccagtttgccacacggcaggctgcagaagtggctgctgagaagtcctttaataagttgattgtaaatggccgcagactgaatgtgaaatggggaagatcccaggcagccagaggaaaagaaaaagagaaagatggaactacagactctgggatcaaactagaacctgttccaggattgccaggagctcttcctcctcctcctgcagcagaagaagaagcctctgccaactacttcaacttgcccccaagtggtcctccagctgtggtgaacattgctctgccaccgccccctggcattgctccacccccacccccaggttttgggccacacatgttccacccaatgggaccaccccctcctttcatgcgggctccaggaccaatccactatccttctcaggaccctcagaggatgggagctcatgctggaaaacacagcagcccctagcaccttgtcaccactctggggctctgtggaagaaagggcacttaaaactcccagtaaatcttggaataaatatatttttccttcccttgtagtttccatggtagctgaatgtgctcagatgtgagcagtcagagactgacagccatgctttcctatacttgttcaaaggatcgatggaccgtaaataagctgccattaacacatctggttactgctgtaacatgactaataaaaccgaacgcctgttccccttacccgtgtgggggacacgcagatgagtgaattggaatgtccagcagagttaccctcccaattatatgttcattttgtatattttttggtcgggggaaaaattgacctgcagtaaaaaaacctttgaccatttttatgtccattggatactttcctttttatcatcttaaaaaaagataactagtactaatcattgtagtgggcctaagtgtgatttaactcttggaagtcacaccctccgaaagatgagtagaaaccagcaccagcacagcccagatcttctctttcctctccttttcctcatttattcctaaaggaatctgaccattttacgtctctacggcccaaaaaaagacaaaaataaaaattcctttttattcctgtcaactggatggaaacacaaatttcatggagctgtgtaccatcgaagaaacctggtgtctggcatgaaattactgtaaagaacttcctgtaaaacacgttctttaacaaactgaaatgaaaagcattggagcgtctgaatgaaagacgtgacctcctgctgggactctgatggtcttcagcattcaccttcgtgtgtcttcagtgtctcattgtcatccctgcttctgtttggtcttagagtgtttggatataactgaattgtagatggtaaaggaaatttgatgtgttttttgtttttaaataattaaaacgggtcaatttttcaaaaaaaaaa

SEQ ID NO: 58762 - DNA, 1646 bp, Homo sapiens
tttcgtggcaccccggggggcggggcgtggtatactgttttctggggcgcgagctgccccaggtgagccgtggctcatgtccggagcgcggtcgggacacagcgcctctaggagaaagcctggaaggcgctccgggggtatccagagctcttatcgggccggcagcatgtgcggggcccaaggtcttccgggctctgcgtgggggtcgctgcggctggagaccagggagggggatggaaacggggttggaaagtaatcccacccgagcagtaaatggaaatgttttctaacatataaaaacctacagaagaagaaaataattttctggatcaaattagaagtctgtattatattgatgtctccagattcaaatatattagaaagcagccgtggagacaaccatcttcattttgggagaaataactaaagcccgcctcaagcattagaactacagacaaaccctgatgcgacctctccagattgtcccaagtcgattgatttcccagctatattgtggcctgaagcctccagcgtccacacgaaaccagatttgcctgaaaatggctcggccaagttcaagtatggcagattttcgaaagttttttgcaaaagcaaagcacatagtcatcatctcaggagctggtgttagtgcagaaagtggtgttccgaccttcagaggagctggaggttattggagaaaatggcaagcccaggacctggcgactcccctggcctttgcccacaacccgtcccgggtgtgggagttctaccactaccggcgggaggtcatggggagcaaggagcccaacgccgggcaccgcgccatagccgagtgtgagacccggctgggcaagcagggccggcgagtcgtggtcatcacccagaacatcgatgagctgcaccgcaaggctggcaccaagaaccttctggagatccatggtagcttatttaaaactcgatgtacctcttgtggagttgtggctgagaattacaagagtccaatttgtccagctttatcaggaaaaggtgctccagaacctggaactcaagatgccagcatcccagttgagaaacttccccggtgtgaagaggcaggctgcgggggcttgctgcgacctcacgtcgtgtggtttggagaaaacctggatcctgccattctggaggaggttgacagagagctcgcccactgtgatttatgtctagtggtgggcacttcctctgtggtgtacccagcagccatgtttgccccccaggtggctgccaggggcgtgccagtggctgaatttaacacggagaccaccccagctacgaacagattcaggtttcatttccagggaccctgtggaacgactcttcctgaagcccttgcctgtcatgaaaatgaaactgtttcttaagtgtcctggggaagaaagaaattacagtatatctaagaactaggccacacgcagaggagaaatggtcttatgggtggtgagctgagtactgaacaatctaaaaatagcctctgattccctcgctggaatccaacctgttgataagtgatgggggtttagaagtagcaaagagcacccacattcaaaagtcacagaactggaaaggtaattcatattatttggtttgaactgaaacgtgaggtatctttg

SEQ ID NO: 58763 - DNA, 1631 bp, Homo sapiens
  misc_feature (1)...(1631): n = a,t,c or g
tgaagccacgcgacgtgttgtgtctgagatcccggtgctgaagactaacgccggaccccgagatcgtgagttgtgggtgcagcgactgaaggaggaatatcagtcccttatccggtatgtggagaacaacaagaatgctgacaacgattggttccgactggagtccaacaaggaaggaactcggtggtttggaaaatgctggtatatccatgacctcctgaaatatgagtttgacatcgagtttgacattcctatcacatatcctactactgccccagaaattgcagttcctgagctggatggaaagacagcaaagatgtacaggggtggcaaaatatgcctgacggttcatttnaaacctttgtgggccaggaatgtgcccaaatttggactagctcatctcatggctctggggctgggtccatggctggcagtggaaatccctgatctgtttcagaagggcgtcatccaacacagggagaaatgcaaccaatgaagaatccagccactgaggcagggcagaggaagcagcttttattgatgggttatctccagaaaccagaaagactatatgtactcactttcagttacccccgtgcctccagaatcgcatgttgctccacctgggggcggatataaattacctctagattgtccaaagcccagtctttcccttccctgtgcagccttagaaactaagtagcagtactgtttggtgtgtgtttgtttcttccccagcaatgcctactgcagctacttagtaacaactagaggtggagggtgtccggggaagcagttagatgagttaagtgtgatgcacaggaaaatagtatcgtagcctatcaaaggtccctctgccctgcctcagtggcttgattcttcattggttgcatttctctttgtgttggatgacgcccttctgaatcagatcagggatttccactgccagccatggacccagccccagagccatgagatgagctagtccaaatttgggcacattcctggcccacaaaggtttgaaatgatccgtcaggcatattttgccacccctgtacatctttgctgtctttccatccagctcaggaactgcaatttctggggcagtagtaggatatgtgataggaatgtcaaactcgatgtcaaactcatatttcaggaggtcatggatataccagcattttccaaaccaccgagttccttccttgttggactccagtcggaaccaatcgttgtcagcattcttgttgttctccacataccggataagggactgatattcctccttcagtcgctgcacccacaactcacgatctcggggtccggcgttagtcttcagcaccgggatctcagacacaacacgtcgcgtggcttcatccgccatcttggaccagggcgcaagagaaacgcggaagtggtgttgcctgtagcttacctcaaggcgccgtcatctttactatgggaagatgagacgttgggttgctgtaagacctcttttgaataagatctttgttttcttgtcacctagttacccgcttgtgagtgcatcgagaagaacagaatgtaaacagattactccgtcctatatatgacacctatcattaaaatcaccgcataaggcaaaaaaaaaa

SEQ ID NO: 58764 - DNA, 393 bp, Homo sapiens
ccacgcgtccgcccacgcgtccgcccacgcgtccggttgctgcttgctgtgagtgtctctagggtgatacgtgggtgagaaaggtcctggtccgcgccagagcccagcgcgcctcgtcgccatgcctcggaaaattgaggaaatcaaggacttcctgctcacagcccgacgaaaggatgccaaatctgtcaagatcaagaaaaataaggacaacgtgaagtttaaagttcgatgcagcagatacctttacaccctggtcatcactgacaaagagaaggcagagaaactgaagcagtccctgccccccggtttggcagtgaaggaactgaaatgaaccagacacactgattggaactgtattatattaaaatactaaaaatcctaaaaaaaaaa

SEQ ID NO: 58765 - DNA, 975 bp, Homo sapiens
tttttttttttttatatttgaaattttaaggtcagtttattaagttcaatgatgaaagctatcagaagaatattctcctgaaaataattttttcttagaaaaaaagaaaggaaaatcataaccctctgagcatagccacagatgctgtggcagtcaagcctctctgcagatggggacagtccattagtcagctgagtcactctctgggtcagcaggattatagtctggatcatcttcatcatcctccagctccaagtcatccatttcttggaacaaagactcatctacctccacgttgtttccagcatcctccaagaactggatatcagatgtgtcaagattatgatctgtttcaaatagttgtttcccacttaatttattttttcctgcttgttcttcttctttcatccttttctttttaatttccaagagttctgcatcaaacttggctttccaatttaagaaattctcaattgtaactggagtaccatggaataattgcttttcagcttcttctgcttctttttctttttgtttcttttcttcttctcttctagtttttatctgatctactatttcatttaatttttcttgcacagctgtcactagagtaaaaatcatcaccataccaagattttcttcagcctgtaatgctagtaattttaaaatgtctgagacatcattatcttctagattttcctgggagaatatttcataaaggggagcttcatctgggtatttttcactgtatgtaaacttgagggtagtctggacagtttcatcattttctccagcctcagacgtcacagtaatggtgaagctgggtggattttctgataatactgtgaaggagtcagggtagatggactccagggcctccagctcgttgcgctgctcctcgccgtaatctgtcatcgtggcccttgctcttgcccatagatcgcccagacacctaggcggcgcgcagcagcccag

SEQ ID NO: 58766 - DNA, 949 bp, Homo sapiens
caagactgtccgcatctgggtacccaatgtcaaaggtgagtccactgtgtttcgtgcacacacagccacagtgaggagtgtccacttctgcagtgatggccagtccttcgtgacagcctctgacgacaagacagtcaaagtgtgggcaactcatcgccagaaattcctgttctccctgagccagcatatcaactgggtccgctgtgccaagttctcccccgacgggcggctcatcgtgtctgccagtgatgacaagactgttaagctgtgggacaagagcagccgggaatgtgtccactcgtattgtgagcatggcggctttgtcacctatgtggacttccaccccagtgggacgtgcattgccgctgccggcatggacaacacagtgaaggtgtgggacgtgcggactcaccggctgctgcagcattatcagttgcacagtgcagcagtgaacgggctctctttccacccgtcgggaaactacctgatcacagcctccagtgactcaaccctgaagatcctggacctgatggagggccggctgctctacacactccacgggcatcagggaccagccaccactgttgccttttcaagaacgggggagtattttgcttctggaggctctgatgaacaagtgatggtttggaagagtaactttgatattggtgatcatggagaagtcacgaaagtgccgaggcccccagccacactggccagctccatggggaatctgacagtctccattctggagcagcggttgacactggaagaagacaagctgaagcagtgtctggagaaccagcagctaatcatgcagagagcaacaccatgatcaggggagcaggaatcaggagctcggtggatttgcaggtggcaggccagggatttgtaccatgggacttgggtaaataaaggggactgaactctgtgggaatcacatccataa

SEQ ID NO: 58767 - DNA, 1356 bp, Homo sapiens
ttttttttttttccaaatcagataatagcccagcaaatagtgataacaaataaaaccttagctgttcatgtcttgatttcaataattaattcttaatcattaagagaccataataaatactccttttcaagagaaaagcaaaaccattagaattgttactcagctccttcaaactcaggtttgtagcatacatgagtccatccatcagtcaaagaatggttccatctggagtcttaatgtagaaagaaaaatggagacttgtaataatgagctagttacaaagtgcttgttcattaaaatagcactgaaaattgaaacatgaattaactgataatattccaatcatttgccatttatgacaaaaatggttggcactaacaaagaacgagcacttcctttcagagtttctgagataatgtacgtggaacagtctgggtggaatggggctgaaaccatgtgcaagtctgtgtcttgtcagtccaagaagtgacaccgagatgttaattttagggacccgtgccttgtttcctagcccacaagaatgcaaacatcaaacagatactcgctagcctcatttaaattgattaaaggaggagtgcatctttggccgacagtggtgtaactgtatgtgtgtgtgtgtgtgtgtgtgtgtgtgtgggtgtatgtgtgttttgtgcataactatttaaggaaactggaattttaaagttacttttatacaaaccaagaatatatgctacagatataagacagacatggtttggtcctatatttctagtcatgatgaatgtattttgtataccatcttcatataatatacttaaaaatatttcttaattgggatttgtaatcgtaccaacttaattgataaacttggcaactgcttttatgttctgtctccttccataaatttttcaaaatactaattcaacaaagaaaaagctcttttttttcctaaaataaactcaaatttatccttgtttagagcagagaaaaattaagaaaaactttgaaatggtctcaaaaaattgctaaatattttcaatggaaaactaaatgttagtttagctgattgtatggggttttcgaacctttcactttttgtttgttttacctatttcacaactgtgtaaattgccaataattcctgtccatgaaaatgcaaattatccagtgtagatatatttgaccatcgaccctatggatattggctagttttgcctttattaagcaaattcatttcagcatgaatgtctgcctatatattctctgctctttgtattctcctttgaacccgttaaaacatcctgtggcactcttatttattaatcagttaaataaaatcatgaacatata

SEQ ID NO: 58768 - DNA, 1975 bp, Homo sapiens
ggcacgagcagtactagagtcttcggcttcgctcacgcgccttgggcataagagtcctctcgttggtcccggaggtggggttgcgctcacaaggggcgaccgtcgccacggtggcggccactgcatcgcgtcccacctccgcggccctgggcgccgtggtgtcgacgggccccgagcctatgacgggccagggccagtcggcgtccgggtcgtcggcgtggagcacggtattccgccacgtccggtatgagaacctgatagcgggcgtgagcggcggcgtcttatccaaccttgcgctgcatccgctcgacctcgtgaagatccgcttcgccgtgagtgatggattggaactgagaccgaaatataatggaattttacattgcttgactaccatttggaaacttgatggactacggggactttatcaaggagtaaccccaaatatatggggtgcaggtttatcctggggactctactttgttttttacaatgccatcaagtcatataaaacagaaggaagagctgaacgtttagaggcaacagaataccttgtctcagctgctgaagctggagccatgaccctctgcattacaaacccattatgggtaacaaaaactcgccttatgttacagtatgatgctgttgttaactccccacaccgacaatataaaggaatgtttgatacacttgtgaaaatatataagtatgaaggtgtgcgtggattatataagggatttgttcctgggctgtttggaacatcgcatggtgcccttcagtttatggcatatgaattgctgaagttgaagtacaaccagcatatcaatagattaccagaagcccagttgagcacagtagaatatatatctgttgcagcactatccaaaatatttgctgtcgcagcaacatacccatatcaagtcgtaagagctcgtcttcaggatcaacacatgttttacagtggtgtaatagatgtaatcacaaagacatggaggaaagaaggcgtcggtggattttacaagggaattgctcctaatttgattagagtgactccagcctgctgtattacctttgtggtatatgaaaacgtctcacattttttacttgaccttagagaaaagagaaagtaagctcaaagaggacaattccagtatatctgcccaaggcagcaacaagctcttttgtgtttaaggcataaaagaagaattctgcatagaaacatggctcatattcgaaattgctctatagtcaatagaagccagagaactgctaagtctcctgcaatgtttttctgctttttgccttccccatatatatggaacttggctacctctgcctgaaatggctgccatcaacacaatgttaaaactgacacgaagtatagagtttcacagatttctacgttttattggtggaagctgatttgcaacatttgctaaatggattagatgaatgtacttctttttgtgagcttacttgcctggattgctttaaaattaacctttgtgcaataccaagaaaatagctctttaaaagaatgtctttgtatgtctcaaggtaaattaaggatttactgaataaggtgttgaccaaatccagaccattttattttatttttttatttatttattttttgagatggagtcttgctttgtcgcccaggctggagtgcagtggcgtgatctcagctcactgcaacctccacctcccgggttcacgccattctcctgcctcagcctcctgagtagctgggactacaggcacctgccaccacgcctggctaacttttttttatattttgagtagaaatggggtttcaccatgttagccaggatgggctcaatctcctgaccttgtgatccgcctgccttggcctcccaaagtgctgggattacaggcgtgagccactgcgcctggccagaccattttagaattgggaaattgtagtgagaaaaaatgcactgtaaatatgctttat

SEQ ID NO: 58769 - DNA, 2334 bp, Homo sapiens
tttcgttgccgggccagcccgaacagcagctgggtcggcaagcgacaggagcacgggtcatcttttccccagaggcgtcggaatggacctgtgccacccagagcccgcggagctgagcagcggggagacggaagagttacagaggatcaagtggcaccgaaagcagctcctggaggacatccagaagctgaaggatgagattgcagatgtgtttgcccaaatcgactgcttcgagagtgcggaggagagccggatggcccagaaggagaaggagctgtgtattgggcgcaagaagttcaacatggaccccgccaagggtatccagtatttcattgagcacaagctgctgacccctgacgtccaggacattgcacggttcctgtataaaggcgagggcctcaacaagacagccattggtacctacctgggggagagggatcccatcaacctgcaggtcctccaggccttcgtggactgccacgagttcgccaacctcaacctcgtccaggccctcaggcagttcctgtggagcttccggctgccgggcgaggcccagaagatagaccggatgatggaggcctttgccactcgatactgcctctgcaacccaggcgtcttccagtccacagacacctgctacgtgttgtccttctccatcatcatgctcaacaccagcctccacaatcccaacgtccgggacaggccgcctttcgagcgctttgtgtccatgaaccgcggcatcaacaatggtagcgacctgcccgaggaccagctgcggaacctcttcgacagcatcaagagtgagccattctccatccctgaggacgacggcaatgacctcactcacaccttcttcaatccagaccgggagggttggctgctcaagctagggggccgcgtgaagacgtggaaacggcgctggttcatcctgaccgacaactgcctctactacttcgagttcaccactgacaaggagccacggggaattatacctcttgagaacctctcggtgcagaaggtggatgaccccaagaagccattctgcctggagctctacaaccctagctgccgaggccagaaaatcaaggcctgcaagaccgatggcgacggcagggtggtggagggcaagcacgaatcgtaccgcatctcagccaccagtgccgaggaacgtgaccagtggatcgagtccatccgagccagcatcacccgtgtccccttctacgacctggtctctactcggaagaagaagattgccagcaagcagtgagattcctggaggtggcactgggggctggtcaccctgagagtcccatcgcctgcagcacctggagacccacctcccaccccagtgcactcttttgggccacagacatcattgctgttccccgttacctcgagctgactctagaggggaaggcagagctcaggagggtgggtgggagctgcagtgggctcagagtccagcaatgaggccccctggcctgggcacccagctgcaggcccctgccctacgtgcactacaggaaggggtgaggagagcagccagaggaaaaccagccccagaatgctgcaacttctcttctctctggacttcggtgtcctcggctctgaaggcgctctctgcacttagatgctgtcagccctcaacgtaggaggggccgtggggtccctaagtgattcttctccctggcaaggctcttccttttcaggatatctctgccaacccttcccctgtcctcgggttgggcttggccctctctgcctgagagagctcagcacacacacagctcagacccacggacaggaccccgggacagaaccccgggagcactgccctaggagcctggaccccacgagctcagtcccagctctgcctctgactcgctgtgtaccctctgccaagtcatgcccattctctagttcttgcaaaactgcagtgttttggactagaaaacgtatttggcccctgctagccctgtgctccagcttggagggggagatggcagccgttatttgcggcgccaggctgactccggattcaacgttgctggggagagaaaagcagtatagactccaccttccaggatgtccatttcggggagaggagcaggtgggaccctcaagaaaatgacggagaacatcccagacagatgggactcaagcaggatgggtgctatatccaagaagccaagaagggagagtttcgtgcactgtggttaacaggagggccgcctggaggcagtggctgagccagaaagtaacacagagctcatgcttggagagatagagtcttggccatggctttcctgcaagaccactgacgagcagtcccat

SEQ ID NO: 58770 - DNA, 2309 bp, Homo sapiens
ctggaccgatccgcaattccaggatcgacgatttcgtgggtggagacccacgagccgaggcctcctgcagtgttctgcacagcaaaccgcacgctatggctgacagccgggatcccgccagcgaccagatgcagcactggaaggagcagcgggccgcgcagaaagctgatgtcctgaccactggagctggtaacccagtaggagacaaacttaatgttattacagtagggccccgtgggccccttcttgttcaggatgtggttttcactgatgaaatggctcattttgaccgagagagaattcctgagagagttgtgcatgctaaaggagcaggggcctttggctactttgaggtcacacatgacattaccaaatactccaaggcaaaggtatttgagcatattggaaagaagactcccatcgcagttcggttctccactgttgctggagaatcgggttcagctgacacagttcgggaccctcgtgggtttgcagtgaaattttacacagaagatggtaactgggatctcgttggaaataacacccccattttcttcatcagggatcccatattgtttccatcttttatccacagccaaaagagaaatcctcagacacatctgaaggatccggacatggtctgggacttctggagcctacgtcctgagtctctgcatcaggtttctttcttgttcagtgatcgggggattccagatggacatcgccacatgaatggatatggatcacatactttcaagctggttaatgcaaatggggaggcagtttattgcaaattccattataagactgaccagggcatcaaaaacctttctgttgaagatgcggcgagactttcccaggaagatcctgactatggcatccgggatctttttaacgccattgccacaggaaagtacccctcctggactttttacatccaggtcatgacatttaatcaggcagaaacttttccatttaatccattcgatctcaccaaggtttggcctcacaaggactaccctctcatcccagttggtaaactggtcttaaaccggaatccagttaattactttgctgaggttgaacagatagccttcgacccaagcaacatgccacctggcattgaggccagtcctgacaaaatgcttcagggccgcctttttgcctatcctgacactcaccgccatcgcctgggacccaattatcttcatatacctgtgaactgtccctaccgtgctcgagtggccaactaccagcgtgacggcccgatgtgcatgcaggacaatcagggtggtgctccaaattactaccccaacagctttggtgctccggaacaacagccttctgccttggagcacagcatccaatattctggagaagtgcggagattcaacactgccaatgatgataacgttactcaggtgcgggcattctatgtgaacgtgctgaatgaggaacagaggaaacgtctgtgtgagaacattgccggccacctgaaggatgcacaaattttcatccagaagaaagcggtcaagaacttcactgaggtccaccctgactacgggagccacatccaggctcttctggacaagtacaatgctgagaagcctaagaatgcgattcacacctttgtgcagtccggatctcacttggcggcaagggagaaggcaaatctgtgaggccggggccctgcacctgtgcagcgaagcttagcgttcatccgtgtaacccgctcatcactggatgaagattctcctgtgctagatgtgcaaatgcaagctagtggcttcaaaatagagaatcccactttctatagcagattgtgtaacaattttaatgctatttccccaggggaaaatgaaggttaggatttaacagtcatttaaaaaaaaaatttgttttgacggatgattggattattcatttaaaatgattagaaggcaagtttctagctagaaatatgattttatttgacaaaatttgttgaaattatgtatgtttacatatcacctcatggcctattatattaaaatatggctataaatatataaaaagaaaagataaagatgatctactcagaaatttttatttttctaaggttctcataggaaaagtacatttaatacagcagtgtcatcagaagataacttgagcaccgtcatggcttaatgtttattcctgataataattgatcaaattcatttttttcactggagttacattaatgttaattcagcactgatttcacaacagatcaatttgtaattgcttacatttttacaataaataatctgtacgtaaaaaaaaaa

SEQ ID NO: 58771 - DNA, 2694 bp, Homo sapiens
ccctaggacacctttctaaaaagactccctgtggtgttcagaatcactcctacagtcaggttctccacaatggatctcagtgctgcaagtcaccgcatacctctaagtgatggaaacagcattcccatcatcggacttggtacctactcagaacctaaatcgacccctaagggagcctgtgcaacatcggtgaaggttgctattgacacagggtaccgacatattgatggggcctacatctaccaaaatgaacacgaagttggggaggccatcagggagaagatagcagaaggaaaggtgcggagggaagatatcttctactgtggaaagctatgggctacaaatcatgtcccagagatggtccgcccaaccctggagaggacactcagggtcctccagctagattatgtggatctttacatcattgaagtacccatggcctttaagccaggagatgaaatataccctagagatgagaatggcaaatggttatatcacaagtcaaatctgtgtgccacttgggaggcgatggaagcttgcaaagacgctggcttggtgaaatccctgggagtgtccaattttaaccgcaggcagctggagctcatcctgaacaagccaggactcaaacacaagccagtcagcaaccaggttgagtgccatccgtatttcacccagccaaaactcttgaaattttgccaacaacatgacattgtcattactgcatatagccctttggggaccagtaggaatccaatctgggtgaatgtttcttctccacctttgttaaaggatgcacttctaaactcattggggaaaaggtacaataagacagcagctcaaattgttttgcgtttcaacatccagcgaggggtggttgtcattcctaaaagctttaatcttgaaaggatcaaagaaaattttcagatctttgacttttctctcactgaagaagaaatgaaggacattgaagccttgaataaaaatgtccgctttgtagaattgctcatgtggcgcgatcatcctgaatacccatttcatgatgaatactgactgccgggagttcctgaacagatttttcactcccatgagtgccaagacggtgcaatgggtagtcccctagatgtgaaaatgaagagagagggttttaccatcctgagaagaaataatgatggaaacatgtttaatgtttgtgcagtgtaaatgactttgactcagtcacattgaagtaaaaatattaaaatctgttgaaataactcttaggaaattatcaactaattttttcagatcagtatcttctagattccagacagaaaaaaattacacttcagaaaagacatcaaaggcaacatatgacaacaagtaatttatgaatctgggtagtagcgttggtaatctgagttctttaagggttaacaggacaacgaagtgcatgtggcagtgtgctggcagtggccttgaggctttggaccattggttacaaaacagacacagccaagataagatccacacacacattattaacaaggaagtgatttgctgcaccttgagttgagagggctacatgtagaaaagtcttaaaatagagctaaacaccacagtggtcaacaaagccatcataatgttggtgtttgtttccctccaatgtatgtatgtttagtttttatccaacctgaggaatgaaaacttaactggatctctcttgcatccttaaagggcctgagtctcaacatggctgctgatccatacttacacatcttactgtcaatcttgcctacattgattatagaaccactattacgtgaaaaggcttgaaacaaccaacatatacaaataaaaccctgccttgtaaaatagtaaaagagaagccatatattggcttttcttcttaacttgggagatatattgaaacaaggtgctttataagattattgtacttaagactttaatagtgttacttggatagcttatatgaattttgagaattttatatgaattttgagaaagcaagttcaaaagaactctggtaattttcctgtatgtacaatttaaagagtgaataagattattagaattcagcaatagagatatatctattttcaattcaactacagaaatatattttattggccgggtgcggtggctcatgcctataatcccagcactttgggaggccaaggtgggcagatcaggaggtcaggagatcgagaccatcttggctaacaaggtgaaaccccgtctctactaaaaatacaaaaaattagccaggcgcggtggcgggggcctgtaatcccagctactcaggaggctgaggcagaagaatggcatgaacccgggaggaggagcttgcagtgagccgagatagcgccactgcagtccggcctgggtgaaagagcgagactccgtctcaaaaacaaaaaaaaaaaagaaaagaaatatattttattcattcacattaggtcactgtcatactgtcataggctgagagagttcttcaaaaattatgttttcccaagatcagttgcttatagataatgttcaatgacctcaagacatatatttttgagaaattatcattttaaaaaatttggtctatactgattgttttcactgattccaatattattacttataacactgacctctggaaaatattttgttcacaagaaataataaagtataatgatttgttgcatc

SEQ ID NO: 58772 - DNA, 599 bp, Homo sapiens
ggcacgagggaacgtctgaggttatcaataagctcctagtccagacgccatgggtcatttcacagaggaggacaaggctactatcacaagcctgtggggcaaggtgaatgtggaagatgctggaggagaaaccctgggaaggctcctggttgtctacccatggacccagaggttctttgacagctttggcaacctgtcctctgcctctgccatcatgggcaaccccaaagtcaaggcacatggcaagaaggtgctgacttccttgggagatgccataaagcacctggatgatctcaagggcacctttgcccagctgagtgaactgcactgtgacaagctgcatgtggatcctgagaacttcaagctcctgggaaatgtgctggtgaccgttttggcaatccatttcggcaaagaattcacccctgaggtgcaggcttcctggcagaagatggcagaagatggtgactggagtggccagtgccctgtcctccagataccactgagctcactgcccatgatgcagagctttcaaggataggctttattctgcaagcaatcaaataataaatctattctgctaagagatcacaaaaaaaaaa

SEQ ID NO: 58773 - DNA, 717 bp, Homo sapiens
tacggctgcgagaagacgacagaagggtacggctgcgagaagacgacagaagggtacggctgcgagaagacgacagaagggtacggctgcgagaagacgacagaaggggcttccgccacggccgtctctggagagcagcagccatggccctacgctaccctatggccgtgggcctcaacaagggccacaaagtgaccaagaacgtgagcaagcccaggcacagccgacgccgcgggcgtctgaccaaacacaccaagttcgtgcgggacatgattcgggaggtgtgtggctttgccccgtacgagcggcgcgccatggagttactgaaggtctccaaggacaaacgggccctcaaatttatcaagaaaagggtggggacgcacatccgcgccaagaggaagcgggaggagctgagcaacgtactggccgccatgaggaaagctgctgccaagaaagactgagcccctcccctgccctctccctgaaataaagaacagcttgacagaagccctggctctcctgctgtccgtgggtgggtgtgggtgtgtcgggggcccgcagtcccctgtctggtgcccgctttgagccacaccctctccgggtgctgcctggtcgtgaatcaaaagccgtggcccgcccacccttcccggggcagcaggtgaggaagccgccgtactgcaaatgactttaatcattaaatagcttatatgccccaaa

SEQ ID NO: 58774 - DNA, 2193 bp, Homo sapiens
gaagatatttaaaggcgtcggcgccacgcgcatatccctgctcggcgctgcccgcccagttcctgttcccagactgaggcccagcccccttcgcccgtttccatcacgagtgccgccagcatgtctgacaaactgccctacaaagtcgccgacatcggcctggctgcctggggacgcaaggccctggacattgctgagaacgagatgccgggcctgatgcgtatgcgggagcggtactcggcctccaagccactgaagggcgcccgcatcgctggctgcctgcacatgaccgtggagacggccgtcctcattgagaccctcgtcaccctgggtgctgaggtgcagtggtccagctgcaacatcttctccacccaggaccatgcggcggctgccattgccaaggctggcattccggtgtatgcctggaagggcgaaacggacgaggagtacctgtggtgcattgagcagaccctgtacttcaaggacgggcccctcaacatgattctggacgacgggggcgacctcaccaacctcatccacaccaagtacccgcagcttctgccaggcatccgaggcatctctgaggagaccacgactggggtccacaacctctacaagatgatggccaatgggatcctcaaggtgcctgccatcaatgtcaatgactccgtcaccaagagcaagtttgacaacctctatggctgccgggagtccctcatagatggcatcaagcgggccacagatgtgatgattgccggcaaggtagcggtggtagcaggctatggtgatgtgggcaagggctgtgcccaggccctgcggggtttcggagcccgcgtcatcatcaccgagattgaccccatcaacgcactgcaggctgccatggagggctatgaggtgaccaccatggatgaggcctgtcaggagggcaacatctttgtcaccaccacaggctgtattgacatcatccttggccggcactttgagcagatgaaggatgatgccattgtgtgtaacattggacactttgacgtggagatcgatgtcaagtggctcaacgagaacgccgtggagaaggtgaacatcaagccgcaggtggaccggtatcggttgaagaatgggcgccgcatcatcctgctggccgagggtcggctggtcaacctgggttgtgccatgggccaccccagcttcgtgatgagtaactccttcaccaaccaggtgatggcgcagatcgagctgtggacccatccagacaagtaccccgttggggttcatttcctgcccaagaagctggatgaggcagtggctgaagcccacctgggcaagctgaatgtgaagttgaccaagctaactgagaagcaagcccagtacctgggcatgtcctgtgatggccccttcaagccggatcactaccgctactgagagccaggtctgcgtttcaccctccagctgctgtccttgcccaggccccacctctcctccctaagagctaatggcaccaactttgtgattggtttgtcagtgtcccccatcgactctctggggctgatcacttagtttttggcctctgctgcagccgtcatactgttccaaatgtggcagcgggaacagagtaccctcttcaagccccggtcatgatggaggtcccagccacagggaaccatgagctcagtggtcttggaacagctcactaagtcagtccttccttagcctggaagtcagtagtggagtcacaaagcccatgtgttttgccatctaggccttcacctggtctgtggacttatacctgtgtgcttggtttacaggtccagtggttcttcagcccatgacagatgagaaggggctatattgaagggcaaagaggaactgttgtttgaattttcctgagagcctggcttagtgctgggccttctcttaaacctcattacaatgaggttagtacttttagtccctgttttacaggggttagaatagactgttaaggggcaactgagaaagaacagagaagtgacagctaggggttgagaggggccagaaaaacatgaatgcaggcagatttcgtgaaatctgccaccactttataaccagatggttcctttcacaaccctgggtcaaaaagagaataatttggcctataatgttaaaagaaagcaggaaggtgggtaaataaaaatcttggtgcctggaaaaaaaaaa

SEQ ID NO: 58775 - DNA, 349 bp, Homo sapiens
tgtgattcttatggcatctgccttctcaagcccttagtcattaattatttactctcatatctctcaatgcatgcagtttagtgcctagcactaagtgatggtttgtgtgcatggttggcccagcagaaatatgtttgtccatccatccatccatccatccatccatccatccatccatccatccctccctccctccctccaaatcattcatcaaataagggaaccttccccaaaggtcccagctgttctctctccccttcttataggctataactgggtaacatgcctagcccagatcattcactcccaggcacagcaaacaattagcttagactagccaggattggtt

SEQ ID NO: 58776 - DNA, 682 bp, Homo sapiens
ccactgaagcgctcagatggctgtaacgacggccgacccacgcgtccgcccacgcgtgggcacaactgtgttcactagcaacctcaaacagacaccatggtgcacctgactcctgaggagaagtctgccgttactgccctgtggggcaaggtgaacgtggatgaagttggtggtgaggccctgggcaggctgctggtggtctacccttggacccagaggttctttgagtcctttggggatctgtccactcctgatgctgttatgggcaaccctaaggtgaaggctcatggcaagaaagtgctcggtgcctttagtgatggcctggctcacctggacaacctcaagggcacctttgccacactgagtgagctgcactgtgacaagctgcacgtggatcctgagaacttcaggctcctgggcaacgtgctggtctgtgtgctggcccatcactttggcaaagaattcaccccaccagtgcaggctgcctatcagaaagtggtggctggtgtggctaatgccctggcccacaagtatcactaagctcgctttcttgctgtccaatttctattaaaggttcctttgttccctaagtccaactactaaactgggggatattatgaagggccttgagcatctggattctgcctaataaaaaacatttattttcattgcaaaaaaaaaa

SEQ ID NO: 58777 - DNA, 1393 bp, Homo sapiens
ctatttttgagaagctgaagcaactccaaggacacagttcacagaaatttggttctcagccccaaaatactgattgaattggagacaattacaaggactctctggccaaaaacccttgaagaggccccgtgaaggaggcagtgaggagcttttgattgctgacctgtgtcgtaccaccccagaatgtgcactgggggctgtgccagatgcctgggggggaccctcattccccttgctttttttggcttcctggctaacatcctgttattttttcctggaggaaaagtgatagatgacaacgaccacctttcccaagagatctggtttttcggaggaatattaggaagcggtgtcttgatgatcttccctgcgctggtgttcttgggcctgaagaacaatgactgctgtgggtgctgcggcaacgagggctgcgggaagcgatttgcgatgttcacctccacgatatttgctgtggttggattcttgggagctggatactcgtttatcatctcagccatttcaatcaacaagggtcctaaatgcctcatggccaatagtacatggggctaccccttccacgacggggattatctcaatgatgaggccttatggaacaagtgccgagagcctctcaatgtggttccctggaatctgaccctcttctccatcctgctggtcgtaggaggaatccagatggttctctgcgccatccaggtggtcaatggcctcctggggaccctctgtggggactgccagtgttgtggctgctgtgggggagatggacccgtttaaacctccgagatgagctgctcagactctacagcatgacgactacaatttcttttcataaaacttcttctcttcttggaattattaattcctatctgcttcctagctgataaagcttagaaaaggcaggttattcccttcctttcccaacccagctttgcctcgagttacgaattttgttattttcaaataaaaaatagtttggccacttaacaaatttgatttataaatctttcaaattagttcctttttagaatttaccaacaggttcaaagcatacttttcatgatttttttattacaaatgtaaaatgtataaagtcacatgtactgccatactacttctttgtatataaagatgtttatatctttggaagttttacataaatcaaaggaagaaagcacatttaaaatgagaaactaagaccaatttctgtttttaagaggaaaaagaatgattgatgtatcctaagtattgttatttgttgtctttttttgctgccttgcttgagttgcttgtgactgatcttttgaggctgtcatcatggctagggttcttttatgtatgttaaattaaaacctgaattcagaggtaacgtaaaaaa

SEQ ID NO: 58778 - DNA, 2052 bp, Homo sapiens
  misc_feature (1)...(2052): n = a,t,c or g
tacggctgcgagaagacgacagaagggggtgccactcctggaaaataatgaattgggtaaggaacagttaataagaaaatgtgccttgctaactgtgcacattacaacaaagagctggcagctcctgaaggaaaagggcttgtgccgctgccgttcaaacttgtcagtcaactcatgccagcagcctcagcgtctgcctccccagcacaccctcattacatgtgtctgtctggcctgatctgtgcatctgctcggagacgctcctgacaagtcgggaatttctctatttctccactggtgcaaagagcggatttctccctgcttctcttctgtcacccccgctcctctcccccaggaggctccttgatttatggtagctttggacttgcttccccgtctgactgtccttgacttctagaatggaagaagctgagctggtgaagggaagactccaggccatcacagataaaagaaaaatacaggaagaaatctcacagaagcgtctgaaaatagaggaagacaaactaaagcaccagcatttgaagaaaaaggccttgagggagaaatggcttctagatggaatcagcagcggaaaagaacaggaagagatgaagaagcaaaatcaacaagaccagcaccagatccaggttctagaacaaagtatcctcaggcttgagaaagagatccaagatcttgaaaaagctgaactgcaaatctcaacgaaggaagaggccattttaaagaaactaaagtcaattgagcggacaacagaagacattataagatctgtgaaagtggaaagagaagaaagagcagaagagtcaattgaggacatctatgctaatatccctgaccttccaaagtcctacataccttctaggttaaggaaggagataaatgaagaaaaagaagatgatgaacaaaataggaaagctttatatgccatggaaattaaagttgaaaaagacttgaagactggagaaagtacagttctgtcttcaatacctctgccatcagatgactttaaaggtacaggaataaaagtttatgatgatgggcaaaagtcagtgtatgcagtaagttctaatcacagtgcagcatacaatggcaccgatggcctggcaccagttgaagtagaggaacttctaagacaagcctcagagagaaactctaaatccccaacagagtatcatgagcctgtatatgccaatcccttttacaggcctacaaccccacagagagaaacggtgacccctggaccaaactttcaagaaaggataaagattaaaactaatggactgggtattggtgtaaatgaatccatacacaatatgggcaatggtctttcagaggaaaggggaaacaacttcaatcacatcagtcccattccgccagtgcctcatccccgatcagtgattcaacaagcagaagagaagcttcacaccccgcaaaaaaggctaatgactccttgggaagaatcgaatgtcatgcaggacaaagatgcaccctctccaaagccaaggctgagccccagagagacaatatttgggaaatctgaacaccagaattcttcacccacttgtcaggaggacgaggaagatgtcagatataatatcgttcattccctgcctccagacataaatgatacagaaccggtgacaatgattttcatggggtatcagcaggcagaagacagtgaagaagataagaagtttctgacaggatatgatgggatcatccatgctgagctggttgtgattgatgatgaggaggaggaggatgaaggagaagcagagaaaccgtcctaccaccccatagctccccatagtcaggtgtaccagccagccaaaccaacaccacttcctagaaaaagatcagaagctagtcctcatgaaaaacacaaatcataaatccccccacaaaaattccatatctctggaaagagccaagaagaaagctttgggcagccctggttccaccattccccatttgatgctcagacaacttggagttggggactgagggatccatccttaacagcntttaagggat

SEQ ID NO: 58779 - DNA, 2525 bp, Homo sapiens
ggaaaagacctgggcactccacgcagcctcccggctctcctgaggaactgatgggctttctctgtctctttcttgctgatctttctgcctgacttcgttttcaaaagagccagggtgggaaccctaactggactcttcgggacccccaggaaggatctgaggcctgagccatcctcctttctaccctgtctgccccccaggactgggcagttgcaggaggccctgggggggggcccaggactgtggttgtgccccccccccaaaggccggacaggatgggaccaagttagtctgtccagtctcacccagcacctcccaggcccagagagaacccccggggctctgaaagcttgccctgccgcctgaccgccatggagacgaagctgccccctgcaagcacccccactagcccctcctcccccgggctgtcgcctgtgcccccacccgacaaggtggacggcttctcccgccgttccctccgcagagcccggccccgccgctcccacagctcctctcagttccgctatcagagcaaccagcaagagctcacaccgctgcccctgctcaaagatgtgccggcttccgagctgcacgagctgctgagccggaagctggcccagtgtggggtgatgtttgacttcttggactgtgtggccgacctcaaggggaaggaggtgaagcgggcagccctcaacgagctggtggagtgtgtggggagcacccggggtgtcctcatcgagcccgtctacccagacatcatccgcatgatctcagtgaatatcttccggactctgccgcccagtgagaaccctgaatttgaccctgaagaggatgagcccaatcttgagccttcgtggccacacctgcagctggtatatgagtttttcctgcgtttcttggagagcccagacttccagccctccgtggccaagagatatgtggatcaaaagtttgtcctgatgctcctggagctatttgatagtgaggatccccgggagcgtgagtacctcaagaccatcctgcaccgggtctatggcaagttcctgggtctccgggcctacatccgcaaacagtgcaaccacatcttcctccggttcatctatgaattcgagcacttcaatggtgtggctgagctgctggagatcctaggaagcatcatcaatggctttgcgctgcccctgaagacggagcacaagcagttcctggttcgcgtcctgatccccctgcactctgtcaagtcgctgtctgtcttccatgcccagctggcatactgtgtggtgcagttcctggagaaggatgccactctgacagagcacgtgatccgggggctgctcaaatactggccaaaaacctgcacccagaaggaggtgatgtttctgggggagatggaagagattcttgatgtcatcgagccctcccagtttgtgaagatccaggagcccctttttaagcaggtggctcgctgtgtttccagcccccatttccaggttgcagagcgggctctgtatttctggaacaatgagtatatcctaagcctcattgaggacaactgccacactgtgctgcctgctgtgtttgggaccctctaccaagtctccaaggagcactggaaccaaaccatcgtatcactgatctacaatgtgctcaagaccttcatggagatgaatgggaagctgtttgatgagctcacagcctcctacaagctggaaaagcagcaggagcagcagaaggcccaggagcgtcaggagttatggcaaggtctggaggagctgcggctacgccggctacaggggacccagggggccaaggaggcccccctccagcggcttacaccccaggtggccgccagtgggggtcagagctagacagcacctcagaaggggaaaagctaaacccagagctgtcagtccctctatcccttctcctgtccaggggcccagagagaaacacacctacccctggccttgccagagtggcttctgaggactccctgcccagcccagctttcactggggggagacgaggagaggcaatggtggtcttggcaacagaatgctcagcccctcgtggcaggacttgacaagggcaagcttgaccaggaagctgccatcagggatcttcccctgccccgcaaagctaggctccagctggcaaggcggggttcccaaccctctgctccatggccttgggcaagggcaactcagcgcctcgccctgcccctgccttggcccaatgcgaggtccttccgttatccccgaccatggggtcccatggtcctatttattcctcgcccagctcaccctctacacagacactgtccctgggtgcacacttcctcccttccctcgctgtgtacttccttgtcccctttatgataaaatgggcagggggagggggagggcacaggccaagaagagattgcacagtgtccctggggtaagggggggttcacagtaatcatggtctactcctctttccggtggctgggggtagacgttaataaagagagaaattcaaaaaaaaaa

SEQ ID NO: 58780 - DNA, 2372 bp, Homo sapiens
ggcacgagatccggatgtctcggttatgaagtggagcagtgagtgtgagcctcaacatagttccagaactctccatccggactagttattgagcatctgcctctcatatcaccagtggccatctgaggtgtttccctggctctgaaggggtaggcacgatggccaggtgcttcagcctggtgttgcttctcacttccatctggaccacgaggctcctggtccaaggctctttgcgtgcagaagagctttccatccaggtgtcatgcagaattatggggatcacccttgtgagcaaaaaggcgaaccagcagctgaatttcacagaagctaaggaggcctgtaggctgctgggactaagtttggccggcaaggaccaagttgaaacagccttgaaagctagctttgaaacttgcagctatggctgggttggagatggattcgtggtcatctctaggattagcccaaaccccaagtgtgggaaaaatggggtgggtgtcctgatttggaaggttccagtgagccgacagtttgcagcctattgttacaactcatctgatacttggactaactcgtgcattccagaaattatcaccaccaaagatcccatattcaacactcaaactgcaacacaaacaacagaatttattgtcagtgacagtacctactcggtggcatccccttactctacaatacctgcccctactactactcctcctgctccagcttccacttctattccacggagaaaaaaattgatttgtgtcacagaagtttttatggaaactagcaccatgtctacagaaactgaaccatttgttgaaaataaagcagcattcaagaatgaagctgctgggtttggaggtgtccccacggctctgctagtgcttgctctcctcttctttggtgctgcagctggtcttggattttgctatgtcaaaaggtatgtgaaggccttcccttttacaaacaagaatcagcagaaggaaatgatcgaaaccaaagtagtaaaggaggagaaggccaatgatagcaaccctaatgaggaatcaaagaaaactgataaaaacccagaagagtccaagagtccaagcaaaactaccatgcgatgcctggaagctgaagtttagatgagacagaaatgaggagacacacctgaggctggtttctttcatgctccttaccctgccccagctggggaaatcaaaagggccaaagaaccaaagaagaaagtccacccttggttcctaactggaatcagctcaggactgccattggactatggagtgcaccaaagagaatgcccttctccttattgtaaccctgtctggatcctatcctcctacctccaaagcttcccacggcctttctagcctggctatgtcctaataatatcccactgggagaaaggagttttgcaaagtgcaaggacctaaaacatctcatcagtatccagtggtaaaaaggcctcctggctgtctgaggctaggtgggttgaaagccaaggagtcactgagaccaaggctttctctactgattccgcagctcagaccctttcttcagctctgaaagagaaacacgtatcccacctgacatgtccttctgagcccggtaagagcaaaagaatggcagaaaagtttagcccctgaaagccatggagattctcataacttgagacctaatctctgtaaagctaaaataaagaaatagaacaaggctgaggatacgacagtacactgtcagcagggactgtaaacacagacagggtcaaagtgttttctctgaacacattgagttggaatcactgtttagaacacacacacttactttttctggtctctaccactgctgatattttctctaggaaatatacttttacaagtaacaaaaataaaaactcttataaatttctatttttatctgagttacagaaatgattactaaggaagattactcagtaatttgtttaaaaagtaataaaattcaacaaacatttgctgaatagctactatatgtcaagtgctgtgcaaggtattacactctgtaattgaatattattcctcaaaaaattgcacatagtagaacgctatctgggaagctatttttttcagttttgatatttctagcttatctacttccaaactaatttttatttttgctgagactaatcttattcattttctctaatatggcaaccattataaccttaatttattattaacatacctaagaagtacattgttacctctatataccaaagcacattttaaaagtgccattaacaaatgtatcactagccctcctttttccaacaagaagggactgagagatgcagaaatatttgtgacaaaaaattaaagcatttagaaaacttc

SEQ ID NO: 58781 - DNA, 3597 bp, Homo sapiens
caacttccggtgtgggtgacgagtggtggccgaagcagggggacagcaagggacgctcaggcggggaccatggcggacggcggctcggagcgggctgacgggcgcatcgtcaagatggaggtggactacagcgccacggtggatcagcgcctacccgagtgtgcgaagctagccaaggaaggaagacttcaagaagtcattgaaacccttctctctctggaaaagcagactcgtactgcttccgatatggtatcgacatcccgtatcttagttgcagtagtgaagatgtgctatgaggctaaagaatgggatttacttaatgaaaatattatgcttttgtccaaaaggcggagtcagttaaaacaagctgttgccaaaatggttcaacagtgctgtacttatgttgaggaaatcacagaccttcctatcaaacttcgattaattgatactctacgaatggttaccgaaggcaagatttatgttgaaattgagcgtgcgcgactgactaaaacattagcaactataaaagaacaaaatggtgatgtgaaagaggcagcctccattttacaggagttacaggtggaaacctacgggtcaatggaaaagaaagagcgagtggaatttattttggagcaaatgaggctctgcctagctgtgaaggattacattcgaacacaaatcatcagcaagaaaattaacaccaaatttttccaggaagaaaatacagagaaattaaagttgaagtactataatttaatgattcagctggatcaacatgagggatcctatttgtctatttgtaagcactacagagcaatatatgatactccctgtatacaggcagaaagtgaaaaatggcagcaggctctgaagagtgttgtactctatgttatcctggctccttttgacaatgaacagtcagatttggttcaccgaataagtggtgacaagaagttagaagaaattcccaaatacaaggatcttttaaagctttttaccacaatggagttgatgcgttggtccacacttgttgaggactatggaatggaattaagaaaaggttcccttgagagtcctgcaacggatgtttttggttctacagaggaaggtgaaaaaaggtggaaagacttgaagaacagagttgttgaacataatattagaataatggccaagtattatactcggataacaatgaaaaggatggcacagcttctggatctatctgttgatgagtccgaagcctttctctcaaatctagtagttaacaagaccatctttgctaaagtagacagattagcaggaattatcaacttccagagacccaaggatccaaataatttattaaatgactggtctcagaaactgaactcattaatgtctctggttaacaaaactacgcatctcatagccaaagaggagatgatacataatctacaataagggtcttagtgctttagaaaaaagttaaaattggaagtcattaaaaaaagactgttataatggtgtatatgttggggttttttttctaagcttctttgtcttaaattttaaaatagtgaatatgtttgagactccctttgacctttcagttccccaagttcattgttaactttgcatttgcaattggggcaaaaatacagatttctgtccgtctgaatacacaaaaagttgtgtcataacttacccagatatgtttttctatcatttgaaacctttttdggttactgtttgttttcattcaactaacaaacaatattccaataataaaagcagtatatacatatttcctttctacagttacctctgattctcaacattttgtggggtagtgatttggcaagtgttttttaaataaaacaaatctcattgtaaagttatcagtcatttagtagaatagaaaagcaacatagagcatacaagaacatttggggatagagttggtgatttgtgaagaatttgtactttgatattgtggcggaaagtctagactgagtgtgtatgctggtaaactgtagacttttttttttttttttgagtccggctggttccaatcacagtagcttgattgctttcagccctcatcctctcacttgatcagttgttcaacagaatcagctgacataattgacacagtttattgggtgttaagtccgctctatagggatagtgactacttttttttttttttttttttttgctcttctttcctctcccctttctttatatgggtttaaatttaacataaagttgtttttataaggcttatttgtggctttaacttgtaagtctgattacatcattattgttccaaattcattatctctgtaggaacttttagttccattatatgaacactggataacctaattttttttaatgctttaaaaaaatggcaaaaagacgtcaggccaccctcatagtaagtggtgtagtattaaaatattttcacggaattaaaagtagcttgctgtcaaagaaacacctgagatgaattggtgtgaacgaattttgcaagtttaatttgatttatttcagagaaaatagaaaaaacaatgttagaaggttatttaaaatgatacttaaataaagaaagtgtgaggtctactttaaaaaaattcaaatgaagagaaaaagaaaaacagcattctagaaatggcatttctcctaattaattttccacttaatggaagattatcaattgtcctattttatgatcccaggactgaagacagttgtgggatatctgtcatatttatcctgtgagtcattgtgaataatgacatacagtactgaagtaatctgattttattctttggaaattcaatgcattggtcacactaataacatcaacatctgctatcacttatctttttaaaactaaccaaaaaaggccgggtgctgggattacaggcatgagccactgcacccaactcctctttcgtctttctttaacacacactaggctctttgtgtattatgattcagtgctatttgtaactgtgtcccagtgaccaaattgcactcgactcgatcagctgttcatccatttcgtgttttttcctgtcaaacattaatccagcaaatatatgaggtatttaccaatttattttcttagtattacaaaataattcattagcataaagtacaatagtgaaatatttgagttgttcggaacctcaattaatcctgttttacatttcagacctaaagctggcaatcaggagaagaagcactttgttttaaatgtggagaagataacacttgattccatttcattgtcattagtgtattaaccagcaggagaggtgatgagccatttttcaaatgaaataccttttatttccatataatttttttattttagagttcaatagctgtttctatgattatcctcaatttccatatgttactgaatctgaaaaacatctttaaaattcaaacagttccattttctctcttgtaagtgttaaatgtgataaaagtacatattttaaattgttttcagctcttggatatagcagcaataaaaacactaatttgtgggtatttaagaaaacctggagaataaactcatactttaaaagatcaaaaaaaaaa

SEQ ID NO: 58782 - DNA, 869 bp, Homo sapiens
ctgtgacctggacaatgacaagtacatcgccctggatgagtgggccggctgcttcggcatcaagcagaaggatatcgacaaggatcttgtgatctaaatccactccttccacagtaccggattctctctttaaccctccccttcatttttagcaccgttaatgtattcacttaaatctatgttagcaccttgtctccaggcagaacaacaaaccatccaaacattttaaacattgggggaaacacgaaggggagggcgaacgcggagagcacgccatgaaggcctcgggcacgctacgagagtacaaggtagtgggtcgctgcctgcccacccccaaatgccacacgccgcccctctaccgcatgcgaatctttgcgcctaatcatgtcgtcgccaagtcccgcttctggtactttgtatctcagttaaagaagatgaagaagtcttcaggggagattgtctactgtgggcaggtgtttgagaagtcccccctgcgggtgaagaacttcgggatctggctgcgctatgactcccggagcggcacccacaacatgtaccgggaataccgggacctgaccaccgcaggcgctgtcacccagtgctaccgagacatgggtgcccggcaccgcgcccgagcccactccattcagatcatgaaggtggaggagatcgcggccagcaagtgccgccggccggctgtcaagcagttccacgactccaagatcaagttcccgctgccccaccgggtcctgcgccgtcagcacaagccacgcttcaccaccaagaggcccaacaccttcttctaggtgcagggccctcgtccgggtgtgccccaaataaactcaggaacgccccggtgaaaaaaaaaa

SEQ ID NO: 58783 - DNA, 2211 bp, Homo sapiens
catggcgcgcgagctgcgggcgctgctgctgtggggccgccgcctgcggcctttgctgcgggcgccggcgctggcggccgtgccgggaggaaaaccaattctgtgtcctcggaggaccacagcccagttgggccccaggcgaaacccagcctggagcttgcaggcaggacgactgttcagcacgcagaccgccgaggacaaggaggaacccctgcactcgattatcagcagcacagagagcgtgcagggttccacttccaaacatgagttccaggccgagacaaagaagcttttggacattgttgcccggtccctgtactcagaaaaagaggtgtttatacgggagctgatctccaatgccagcgatgccttggaaaaactgcgtcacaaactggtgtctgacggccaagcactgccagaaatggagattcacttgcagaccaatgccgagaaaggcaccatcaccatccaggatactggtatcgggatgacacaggaagagctggtgtccaacctggggacgattgccagatcggggtcaaaggccttcctggatgctctgcagaaccaggctgaggccagcagcaagatcatcggccagtttggagtgggtttctactcagctttcatggtggctgacagagtggaggtctattcccgctcggcagccccggggagcctgggttaccagtggctttcagatggttctggagtgtttgaaatcgccgaagcttcgggagttagaaccgggacaaaaatcatcatccacctgaaatccgactgcaaggagttttccagcgaggcccgggtgcgagatgtggtaacgaagtacagcaacttcgtcagcttccccttgtacttgaatggaaggcggatgaacaccttgcaggccatctggatgatggaccccaaggatgtccgtgagtggcaacatgaggagttctaccgctacgtcgcgcaggctcacgacaagccccgctacaccctgcactataagacggacgcaccgctcaacatccgcagcatcttctacgtgcccgacatgaaaccgtccatgtttgatgtgagccgggagctgggctccagcgttgcactgtacagccgcaaagtcctcatccagaccaaggccacggacatcctgcccaagtggctgcgcttcatccgaggtgtggtggacagtgaggacattcccctgaacctcagccgggagctgctgcaggagagcgcactcatcaggaaactccgggacgttttacagcagaggctgatcaaattcttcattgaccagagtaaaaaagatgctgagaagtatgcaaagttttttgaagattacggcctgttcatgcgggagggcattgtgaccgccaccgagcaggaggtcaaggaggacatagcaaagctgctgcgctacgagtcctcggcgctgccctccgggcagctaaccagcctctcagaatacgccagccgcatgcgggccggcacccgcaacatctactacctgtgcgcccccaaccgtcacctggcagagcactcaccctactatgaggccatgaagaagaaagacacagaggttctcttctgctttgagcagtttgatgagctcaccctgctgcaccttcgtgagtttgacaagaagaagctgatctctgtggagacggacatagtcgtggatcactacaaggaggagaagtttgaggacaggtccccagccgccgagtgcctatcagagaaggagacggaggagctcatggcctggatgagaaatgtgctggggtcgcgtgtcaccaacgtgaaggtgaccctccgactggacacccaccctgccatggtcaccgtgctggagatgggggctgcccgccacttcctgcgcatgcagcagctggccaagacccaggaggagcgcgcacagctcctgcagcccacgctggagatcaaccccaggcacgcgctcatcaagaagctgaatcagctgcgcgcaagcgagcctggcctggctcagctgctggtggatcagatatacgagaacgccatgattgctgctggacttgttgacgaccctagggccatggtgggccgcttgaatgagctgcttgtcaaggccctggagcgacactgacagccagggggccagaaggactgacaccacagatgacagccccacctccttgagctttatttacctaaatttaaaggtatttcttaaaaaaaaaa

SEQ ID NO: 58784 - DNA, 2720 bp, Homo sapiens
ccggaaactcgggtcgacccacgcgtccgcgcgaggggcggggcgagcgcgggacaaagggaagcgaagccggagctgcgggcgctttttctgcccgcggtgtctcagattcattcttaaggaactgagaacttaatcttccaaaatgtcaaaaagaccatcttatgccccacctcccaccccagctcctgcaacacaaatgcccagcacaccagggtttgtgggatacaatccatacagtcatctcgcctacaacaactacaggctgggagggaacccgggcaccaacagccgggtcacggcatcctctggtatcacgattccaaaacccccaaagccaccagataagccgctgatgccctacatgaggtacagcagaaaggtctgggaccaagtaaaggcttccaaccctgacctaaagttgtgggagattggcaagattattggtggcatgtggcgagatctcactgatgaagaaaaacaagaatatttaaacgaatacgaagcagaaaagatagagtacaatgaatctatgaaggcctatcataattcccccgcgtaccttgcttacataaatgcaaaaagtcgtgcagaagctgctttagaggaagaaagtcgacagagacaatctcgcatggagaaaggagaaccgtacatgagcattcagcctgctgaagatccagatgattatgatgatggcttttcaatgaagcatacagccaccgcccgtttccagagaaaccaccgcctcatcagtgaaattcttagtgagagtgtggtgccagacgttcggtcagttgtcacaacagctagaatgcaggtcctcaaacggcaggtccagtccttaatggttcatcagcgaaaactagaagctgaacttcttcaaatagaggaacgacaccaggagaagaagaggaaattcctggaaagcacagattcatttaacaatgaacttaaaaggttgtgcggtctgaaagtagaagtggatatggagaaaattgcagctgagattgcacaggcagaggaacaggcccgcaaaaggcaggaggaaagggagaaggaggccgcagagcaagctgagcgcagtcagagcagcatcgttcctgaggaagaacaagcagctaacaaaggcgaggagaagaaagacgacgagaacattccgatggagacagaggagacacaccttgaagaaacaacagagagccaacagaatggtgaagaaggcacgtctactcctgaggacaaggagagtgggcaggagggggtcgacagtatggcagaggaaggaaccagtgatagtaacactggctcggagagcaacagtgcaacagtggaggagccaccaacagatcccataccagaagatgagaaaaaagaataagtgttgccttgttttgtgtgttctaaatactttttttaatgaaaaaatgttttttggttttaatggtgttacgtggtttgtgtattaattttttttcttgtccatatcacaccaccaaaggcttttggaccatttagcatcatgagcctaatggctcagtcagtcacctttcttaagtgttgtgaagatggctcttttctttggatcttgtttctagccctcaactgctgaaagcctcagaatttagattaattgagaaaacacccacctcttttagagaattatcctttgatgctgcagaatctactcttacaatgccttcctacagctcactggggtgcttaccaaagccatagctttaaaccttcccagtccccatcagtagcttcctgaaagtctcctctcttgtttacttctgcaaagggtagcttcttaaaaacgtgatcatgtatgagtatgtatttgttcacttacccttttttacttttaatcaatgtcagataccaagagttgtgttaagctgagtgtagtgtgtaactaactacacttggatcttactgatccagaaatagtccccatagttagagtagttacttatgaagtggttattaaagtgaacacagcacatatacattatctatactgctttttgttatgattaatactgggtatgttctggtaaatccatccttattgtatagaaaaaaaattacttttttaccaggttttccaaagacagaatagatcacaaagctcaaggaatttaatattcttgtaatggactagataattcaaactgattagcccattccagaagaaaaacagctgggaattaagttaatccacttgaaattgttttacaataatcagaacatccaaacctcaaggctcaggatcccatagaccagagcccacctttttgataaacttagtaaagtcttggagactagaagcaagatagtttgtgacacataagcttcccaaaaactagaatagatttttactgaatagtggtatatctgatggtatatgtttcttaaaggtccaaatgtaataaaaaaaaaatgaaaaaaaggtctcagtgtttttaatgcactacatatttgtatgcaagacaagcatccagtttttttctgtaatgcagtgacagtgtggaatgaccactcagccattataaatttgtgtactcagggcccttgtctcacccaactatctctataaactgctgcagtagcttatttgtacaagacacttgtgaaaattagttttcttacattatagtcattgtcacatatggaagttggtctttgattccaaaagtaaagggaatatgtttcta

SEQ ID NO: 58785 - DNA, 2068 bp, Homo sapiens
gtatgcccttgcctttttgaggatcccatcaggcgaggtcggacgaggcgacgtccagtgctccagccggtgtgaggacacgatatgctggggtttttgtccgcacgccaaacgggtttggaggaccctcttcgccttcggagagcagagtcaacacggagagttttgggactggaattaaataaagacagagatgttgaaagaatccacggcggtggaattaacacccttgacattgaacctgttgaagggagatacatgttatcaggtggttcagatggtgtgattgtactttatgaccttgagaactccagcagacaatcttattacacatgtaaagcagtgtgttccattggcagagatcatcctgatgttcacagatacagtgtggagactgtacagtggtatcctcatgacactggcatgttcacatcaagctcatttgataaaactctgaaagtatgggatacaaatacattacaaactgcagatgtatttaattttgaggaaacagtttatagtcatcatatgtctccagtctccaccaagcactgtttggtagcagttggtactagaggacccaaagtacaactttgtgacttgaagtctggatcctgttctcacattctacagggtcacagacaagaaatattagcagtttcctggtctccacgttatgactatatcttggcaacagcaagtgctgacagtagagtaaaattatgggatgtgagaagagcatcaggatgtttgattactcttgatcaacataatgggaaaaagtcacaagctgttgaatcagcaaacactgctcataatgggaaagttaatggcttatgttttacaagtgatggacttcacctcctcactgttggtacagataatcgaatgaggctctggaatagttccaatggagaaaacacacttgtgaactatggaaaagtttgtaataacagtaaaaaaggattgaaattcactgtctcctgtggctgcagttcagaatttgtttttgtaccatatggtagcaccattgctgtttatacagtttactcaggagaacagataactatgcttaagggacattataaaactgttgactgctgtgtatttcagtcaaatttccaggaactttatagtggtagcagagactgcaacattctggcttgggttccatccttatatgaaccagttcctgatgatgatgagactacaacaaaatcacaattaaatccggcctttgaagatgcctggagcagcagtgatgaagaaggatgaatatcatctttagtacctttttgtctctgctgaaactttttaaatgagactgtgtttttttcaactgtatggtctattcctgacagctaaattagccctaaatgtgggtaatatttttcctcatgttttaaaatgaggttaatatttgcataaaatcctaaaacagacttctgtatagtttatttagtcaaaatgtgttccttgatcccagatgttgtggcctgggaaagccctcattgctacagtacaagtaacacaagtcgttgtacctcagttgtgagcttcagcagattttatgaactataagatgcagtctcagaggatcagcaagtggaggccatcagtattgactttctcttacttgctgtactatccagcctgctcgtttcccacctttaagaatgattttgccaagaatgattatatcaaaaatagtagttgaaatggtaacatcaaaatcattttattctttcttcttcatgtattcacatttttcagtggtttcatttaattaaccatgctttatgttaaacattttggggctcaatgtctcctactatccaaaatgtgcatcacaggaggcttttaactttgtgaaaatcccatgtttgctttattttattttaatgtcagaaggcagtttgcgctaatgcttgaactctttttctgtgaaactcattaaggtatgaccaaatcctgcctcattaattcaagcagaaaatatcctggcagggaatctggcttaaacatgaaatgctgtaataaaatttctatgttattgtcaaaaaaaaaa

SEQ ID NO: 58786 - DNA, 1002 bp, Homo sapiens
ggcacgagccggcgcgaaccatggccggcatggtggacttccaggatgaggagcaggtcaagtcctttttggagaacatggaggtggagtgcaactaccactgctaccacgagaaggacccggacggttgctatcggctggtggactatttggaagggatccggaagaattttgatgaggctgccaaggtgttgaagtttaactgtgaagagaaccagcacagtgatagctgctacaaactgggggcctactatgtgactggaaaaggtggtctgacccaggacctgaaagctgccgccaggtgctttttgatggcgtgtgagaagcctggaaagaagtcaatagcagcatgtcacaacgttggcctcctggcacatgatggacaggttaatgaggatggccagcctgacttgggaaaggccagggactactacacaagggcctgtgatggtggctatacttccagttgcttcaacctcagtgccatgttcctgcagggtgccccaggcttttccaaggacatggacctggcatgtaaatactccatgaaagcctgtgacctgggtcatatctgggcctgtgccaatgccagtcgcatgtacaagctgggggatggtgttgataaggttgaggccaaggccgaggtgctaaaaaatcgagcccagcagctacacagagaacagcagaaaggtgtccaacccttaacatttgggtaatgtggtccaccctccctcccaggcaacaaactgcttgaggctggcagctcctgtttctgaagactgatgcagcccttgaaggtcaacctgctggagcaaaaaaacttgggacttgaatttgtagctccatttacatggatccattgccccagctactggagtatagcctacaatgtttatttcagtcaatattcctttatctgggtgttctgtacaatgtttattacagtcaatattccttcatctggatgttctgtgaagatagccatgtttatgggggtcttaa

SEQ ID NO: 58787 - DNA, 2115 bp, Homo sapiens
gggatctcaaagacttctttagctaattacttccattgccatggccaataataagaataataacacagtaatactagcagttgggaagctacataatagtaattaagagaacagactttgaagctagactgcctgtggctgtgaccttgaataaaacctttaacctatctctgtctcagctttcccatcggtaaagtgggcataataaaagtgtctacttcatagggctattgtggggattagtagcatatctaaagtagcttaaaacagtgtcttacatacagtaggtcaaatatagtgttagctattattaccattatcactgtcactatccttatcctccaaagtttgcaacaaactgagagacagatacaggaaccatagagatggtgatcagaggtcagctttaaaattgagcgatttagagaatgtgatatagatatgcacacaaatggacttgctaatattttaccccttaattaggtaaacttacctgccaattcatagagcatagtccattgcatggccaagagcagactggaatgaggtcctctgtgaacaatcaagagagaaagagcagtacagaaagagttaaattgacaatattcatattctcttcccaaatgctccagtcagacaggtcactgctacttatggggtagactgtgtgaggtgcagtacagaagctggaagcactctatccatactcttcccttctgggaaatgaggttcaaattccctcttcactctagaagcaggagaagtagggaatcattgttccaccctaacaaatggtaatgaaagctaaatttattgcatgtttccaatgtgctaggctctgtgctaagtactttgtattcattagctctttttattcttggaacatttctaagaagtatctatccacattatgcagatgaggaaactgaggctcagaaatgggaatttacttgatccagatcacctagctagaaagcagcgaggcagacatctgaagccaagtctgcctagcgtcaaagcctatgtccctgggcagttatgtgtactactccactacctaaaggtctcctagtgcctctgactcagtggtgatgagctttgagttttctttcttcttttcatcccagcttgcactggtttccgcctccgacctgtagctggcctgctttcctctcgggatttcttgggtggcctggccttccgagtcttccactgcacacagtacatcagacatggatccaagcccatgtatacccccgaacctgacatctgccatgagctgttgggacatgtgcccttgttttcagatcgcagctttgcccagttttcccaggaaattggccttgcctctctgggtgcacctgatgaatacattgaaaagctcgccacaatttactggtttactgtggagtttgggctctgcaaacaaggagactccataaaggcatatggtgctgggctcctgtcatcctttggtgaattacagtactgcttatcagagaagccaaagcttctccccctggagctggagaagacagccatccaaaattacactgtcacggagttccagcccctgtattacgtggcagagagttttaatgatgccaaggagaaagtaaggaactttgctgccacaatacctcggcccttctcagttcgctacgacccatacacccaaaggattgaggtcttggacaatacccagcagcttaagattttggctgattccattaacagtgaaattggaatcctttgcagtgccctccagaaaataaagtaaagccatggacagaatgtggtctgtcagctgtgaatctgttgatggagatccaactatttctttcatcagaaaaagtccgaaaagcaaaccttaatttgaaataacagccttaaatcctttacaagatggagaaacaacaaataagtcaaaataatctgaaatgacaggatatgagtacatactcaagagcataatggtaaatcttttggggtcatctttgatttagagatgataatcccatactctcaattgagttaaatcagcaatctgtcgcatttcatcaagattaattaaaatttgggacctgcttcattcaagcttcatatatgctttgt

SEQ ID NO: 58788 - DNA, 922 bp, Homo sapiens
cgctccacgcgcgcccggactcggcggccaggcttgcgcgcggttcccctcccggtgggcggattcctgggcaagatgaagtgggtgtgggcgctcttgctgttggcggcgctgggcagcggccgcgcggagcgcgactgccgagtgagcagcttccgagtcaaggagaacttcgacaaggctcgcttctctgggacctggtacgccatggccaagaaggaccccgagggcctctttctgcaggacaacatcgtcgcggagttctccgtggacgagaccggccagatgagcgccacagccaagggccgagtccgtcttttgaataactgggacgtgtgcgcagacatggtgggcaccttcacagacaccgaggaccctgccaagttcaagatgaagtactggggcgtagcctcctttctccagaaaggaaatgatgaccactggatcgtcgacacagactacgacacgtatgccgtgcagtactcctgccgcctcctgaacctcgatggcacctgtgctgacagctactccttcgtgttttcccgggaccccaacggcctgcccccagaagcgcagaagattgtaaggcagcggcaggaggagctgtgcctggccaggcagtacaggctgatcgtccacaacggttactgcgatggcagatcagaaagaaaccttttgtagcaatatcaagaatctagtttcatctgagaacttctgattagctctcagtcttcagctctatttatcttaggagtttaatttgcccttctctccccatcttccctcagttcccataaaaccttcattacacataaagatacacgtgggggtcagtgaatctgcttgcctttcctgaaagtttctggggcttaagattccagactctgattcattaaactatagtcacccgtgaaaaaaaaaa

SEQ ID NO: 58789 - DNA, 2198 bp, Homo sapiens
aattcccgggtccacgatttcgtggaggctcgggtcgttgtggtgcgctgtcttcccgcttgcgtcagggacctgcccgactcagtggccgccatggcatcagatgaaggcaaactttttgttggagggctgagttttgacaccaatgagcagtcgctggagcaggtcttctcaaagtacggacagatctctgaagtggtggttgtgaaagacagggagacccagagatctcggggatttgggtttgtcacctttgagaacattgacgacgctaaggatgccatgatggccatgaatgggaagtctgtagatggacggcagatccgagtagaccaggcaggcaagtcgtcagacaaccgatcccgtgggtaccgtggtggctctgccgggggccggggcttcttccgtgggggccgaggacggggccgtgggttctctagaggaggaggggaccgaggctatggggggaaccggttcgagtccaggagtgggggctacggaggctccagagactactatagcagccggagtcagagtggtggctacagtgaccggagctcgggcgggtcctacagagacagttacgacagttacgctacacacaacgagtaaaaacccttcctgctcaagatcgtccttccaatggctgtgtgtttaaagattgtgggagcttcgctgaacgttaatgtgtagtaaatgcacctccttgtattcccactttcgtagtcatttcggttctgatcttgtcaaacccagcctgaccgcttctgacgccgggatggcctcgttactagacttttctttttaaggaagtgctgtttttttttgagggttttcaaaacattttgaaaagcatttacttttttgaccacgagccatgagttttcaaaaaaatcgggggttgtgtgggtttttggtttttgttttagtttttggttgccgttgcctttttttttttagtggggttggccccatgaagtgggtgccccactcacttctctgagatcgaacggactgtgaatccgctctttgtcggaagctgagcaagctgtggcttttttccaactccgtgtgacgtttctgagtgtagtgtggtaggaccccggcgggtgtggcagcaactgccctggagccccagcccctgcgtccatctgtgctgtgcgccccacagtagacgtgcagacgtccctgagaggttcttgaagatgtttatttatattgtccttttttactggaagacgtacgcatactccatcgatgttgtatttgcagtggctgaggaattcttgtacgcagttttctttggctttacgaagccgattaaaagaccgtgtgaaatgaaccttgctctgacaattcccttgcattgcaccacacactccttgctgcgggctcctgcagccagacctgagcagagagagaaggtggagaagcagcgggtctgcaagccttccctggggcctgcagagctagaaagggaggcccagcagactggcgctggtcagggtaggggagccaggcgggggacgggagcgggcagctcaggcctcagggcagccctgggaggcttctggcagtggtggccagagggctggactgtgcgggcagcttagcagggacagtggacgtgcacctgacgctgacctggactgcctcagtctagaagcaggccagagagcagaggcacgtggcatcccagggcgacctcagacggccagccggttagctagttctgctgttgcttcacgagttctgagcattctctgctagcctatggaagctgcagccctcggaggacagaagtgttgtgcgcccaacagaaccctctgagacgcaagctgctcccttggctagctcatatgtggaaatagccctgtaattcgaggtaactccttccgctcgtgtccacatccctcttgttgagagctcactgaaagtcatgtgccccggggaatgttcctgtgactgttttttgtttttccttttttttttaactttgtttttgtttttttcaattaagctgggaactaaagtcagggccagccattacggttccccacgtggcagccagggtgcagcctgggcccagtcatgcctggctcatagatgaaatcccttaaagcaggattgaagaccagtgaacggccccggccttttggattttttgctaattaccgtttttcagacctttaagtaca

SEQ ID NO: 58790 - DNA, 1930 bp, Homo sapiens
ccccgcgctgcaggaattcggcacgagccaactctcgcactctgttcttccgccgctccgccgtcgcgtttctctgccggtcgcaatggaagaagagatcgccgcgctggtcattgacaatggctccggcatgtgcaaagctggttttgctggggacgacgctccccgagccgtgtttccttccatcgtcgggcgccccagacaccagggcgtcatggtgggcatgggccagaaggactcctacgtgggcgacgaggcccagagcaagcgtggcatcctgaccctgaagtaccccattgagcatggcatcgtcaccaactgggacgacatggagaagatctggcaccacaccttctacaacgagctgcgcgtggccccggaggagcacccagtgctgctgaccgaggcccccctgaaccccaaggccaacagagagaagatgactcagattatgtttgagaccttcaacaccccggccatgtacgtggccatccaggccgtgctgtccctctacgcctctgggcgcaccactggcattgtcatggactctggagacggggtcacccacacggtgcccatctacgagggctacgccctcccccacgccatcctgcgtctggacctggctggccgggacctgaccgactacctcatgaagatcctcactgagcgaggctacagcttcaccaccacggccgagcgggaaatcgtgcgcgacatcaaggagaagctgtgctacgtcgccctggacttcgagcaggagatggccaccgccgcatcctcctcttctctggagaagagctacgagctgcccgatggccaggtcatcaccattggcaatgagcggttccggtgtccggaggcgctgttccagccttccttcctgggtatggaatcttgcggcatccacgagaccaccttcaactccatcatgaagtgtgacgtggacatccgcaaagacctgtacgccaacacggtgctgtcgggcggcaccaccatgtatccgggcattgccgacaggatgcagaaggagatcaccgccctggcgcccagcaccatgaagatcaagatcatcgcacccccagagcgcaagtactcggtgtggatcggtggctccatcctggcctcactgtccaccttccagcagatgtggattagcaagcaggagtacgacgagtcgggcccctccatcgtccaccgcaaatgcttctaaacggactcagcagatgcgtagcatttgctgcatgggttaattgagaatagaaatttgcccctggcaaatgcacacacctcatgctagcctcacgaaactggaataagccttcgaaaagaaattgtccttgaagcttgtatctgatatcagcactggattgtagaacttgttgctgattttgaccttgtattgaagttaactgttccccttggtatttgtttaataccctgtacatatctttgagttcaacctttagtacgtgtggcttggtcacttcgtggctaaggtaagaacgtgcttgtggaagacaagtctgtggcttggtgagtctgtgtggccagcagcctctgatctgtgcagggtattaacgtgtcagggctgagtgttctgggatttctctagaggctggcaagaaccagttgttttgtcttgcgggtctgtcagggttggaaagtccaagccgtaggacccagtttcctttcttagctgatgtctttggccagaacaccgtgggctgttacttgctttgagttggaagcggtttgcatttacgcctgtaaatgtattcattcttaatttatgtaaggttttttttgtacgcaattctcgattctttgaagagatgacaacaaattttggttttctactgttatgtgagaacattaggccccagcaacacgtcattgtgtaaggaaaaataaaagtgctgccgtaacc

SEQ ID NO: 58791 - DNA, 2499 bp, Homo sapiens
ttctcccgcaaccttcccttcgctccctcccgtcccccccagctcctagcctccgactccctccccccctcacgcccgccctctcgccttcgccgaaccaaagtggattaattacacgctttctgtttctctccgtgctgttctctcccgctgtgcgcctgcccgcctctcgctgtcctctctccccctcgccctctcttcggccccccccctttcacgttcactctgtctctcccactatctctgcccccctctatccttgatacaacagctgacctcatttcccgataccttttcccccccgaaaagtacaacatctggcccgccccagcccgaagacagcccgtcctccctgggacaatcagacgaattctcccccccccccaaaaaaaagccatccccccgctctgccccgtcgcacattcggcccccgcgactcggccagagcggcgctggcagaggagtgtccggcaggagggccaacgcccgctgttcggtttgcgacacgcagcagggaggtgggcggcagcgtcgccggcttccagacaccaatgggaatcccaatggggaagtcgatgctggtgcttctcaccttcttggccttcgcctcgtgctgcattgctgcttaccgccccagtgagaccctgtgcggcggggagctggtggacaccctccagttcgtctgtggggaccgcggcttctacttcagcaggcccgcaagccgtgtgagccgtcgcagccgtggcatcgttgaggagtgctgtttccgcagctgtgacctggccctcctggagacgtactgtgctacccccgccaagtccgagagggacgtgtcgacccctccgaccgtgcttccggacaacttccccagataccccgtgggcaagttcttccaatatgacacctggaagcagtccacccagcgcctgcgcaggggcctgcctgccctcctgcgtgcccgccggggtcacgtgctcgccaaggagctcgaggcgttcagggaggccaaacgtcaccgtcccctgattgctctacccacccaagaccccgcccacgggggcgcccccccagagatggccagcaatcggaagtgagcaaaactgccgcaagtctgcagcccggcgccaccatcctgcagcctcctcctgaccacggacgtttccatcaggttccatcccgaaaatctctcggttccacgtccccctggggcttctcctgacccagtccccgtgccccgcctccccgaaacaggctactctcctcggccccctccatcgggctgaggaagcacagcagcatcttcaaacatgtacaaaatcgattggctttaaacacccttcacataccctccccccaaattatccccaattatccccacacataaaaaatcaaaacattaaactaacccccttcccccccccccacaacaaccctcttaaaactaattggctttttagaaacaccccacaaaagctcagaaattggctttaaaaaaaacaaccaccaaaaaaaatcaattggctaaaaaaaaaaagtattaaaaacgaattggctgaaaaacaattggcaaaataaaggaatttggcactccccacccccctctttctcttctcccttggactttgagtcaaattggcctggacttgagtccctgaaccagcaaagagaaaagaagggccccagaaatcacaggtgggcacgtcgctgctaccgccatctcccttctcacgggaattttcagggtaaactggccatccgaaaatagcaacaacccagactggctcctcactcccttttccatcactaaaaatcacagagcagtcagagggacccagtaagaccaaaggaggggaggacagagcatgaaaaccaaaatccatgcaaatgaaatgtaattggcacgaccctcacccccaaatcttacatctcaattcccatcctaaaaagcactcatactttatgcatccccgcagctacacacacacaacacacagcacacgcatgaacacagcacacacacgaccacagacacacagacgtgcaccaccatacctggcgaagttttgtatttttggtagagatggggtttcaccatgttgctcaggctgttctcaaactcctgagttcaagcgatctacctgccacagcctcctagagtgctgggatgacaggcatgagccaccgcacccagcctctgcgtggggtttcgtcagggctgggtctgtgccctgaaggggagctcattccagcccagctccccactgctgcagcttgtgtgtggactcctccagaaggggagcgggagtttccctgtaggagtttatcatccatggtgaggagggcagcagggggcactatttcctcagggtgaggtctttagttaggcctctgagcccaagctaagccatcatatcccctgtgacctgcacgtatacatccagatagcctgaagcaactgtaaaaatatccttaactgatgacattccaatattgtgattg

SEQ ID NO: 58792 - DNA, 1748 bp, Homo sapiens
ttttttttttttcatacaaacattatgtatctttatttaaatttgcaaatgaaaacaacacatatttcatgttagttttaataagagattccctatcctctgccccagtaaaacctaaccaagccagcctgacaggttatatcaatacagggagctggagtgggagccaagggtggtgttagataggggtggggtacagatcaagggggcctgggagactcagtgactggaagtctctgcccctcactcttggtgagtagctaatttcagcagctggcttcataaggaggagtcaggggtgggtggaggctcctcccaattccagatccacttcctcttctccttctgtctcctggacacttaggtcttactgagatggttttcccacagtaaagagaggtgggggcagagtactaagggtcaggagtgtgactctttcccatgactcaggcctctgtgctagaggtgacccttataggaaggagagaccccaaatcctttagccaatgagtggtggggtcatcataccagagagccagcttgactctgggcaggcaccatcacaggcacagcacccatgcggctcaagccagaggaagaaaccccaccagggatgggggatattggttgagggtgggccccatctgtcgtgggcagtcttggtgagggcagggcctggctggagagactgggcgtgggggtcaatgcaccaggcctgggagggccatggggtggccggagggctcgtgcggaggtgacagaggaaagggtcccattcttggagattgtgtctgagctcttgggccagggcagggtccggggagcaatggcatcctccttgatatcattggctggctcctccagggccttgccccggcggtggtacaagaggaccagcccagccagcaaccccagtccaaccagggtacccacaacagctccagcaaccactgcagctccaggccctgtgctcacttccagcgtcacattacattgggcagtgcccacctcattgtgggccttgcagacatagactccagccatggaagacgaaaggttggtgaggcttaaagacccacggatgacatctaatgctggtgcaaagaaagtctggaaggatggaagctgccgatcccactggtattggacagcgggcttactccttggagactggcagctcagggtcacgtttgcccccacatggggcacaccctggagacggcaggatggaggagctggaggaaccagtacattgagttctaaggttttgatgctgtggcccctagatttgccttgtttgtcttgcacattcacggagcagctgtaggggccagagtctttctcctggagaccctccagccgcagggacaggttccgggagggcatggagtagaccaaggatactccaggtttgcttgttgtgaccccattgatgtaggacaacacctggtgtggggcataacacatccccgtcattactacatgtgtctactgtgcctacaggctcagccactctccctcccccagctcgcattctccaaatgcccctcacatgcacccattcttctaacctgaaccagctccccattcaccttttgtccctagccccctctcactgcccctgggtcctcttcaccagaacagttcttcgttcctgcgcattgtctcatctcccaattgcggtgtttagaaaggtgacataatagtgggaggagggacatgtaaataggaggtatgtatctcgtgcc

SEQ ID NO: 58793 - DNA, 2303 bp, Homo sapiens
ttttttttttttcagtctgtcatttttattaagcctgcagagctgttttttttttctacacacgacaaatactttgatataatctaggataataaaatagttgaacaactttttaagatttatatttgtatagaaacaatctgtggaactcctcccctcaaaatgaaggtgtctaaaaacagtgattcatcagcattgctttaaataattgtttggttaaaagttgtggtttccattctcaaccgaaatgcgtctccatgcagttttccttgggtccaaagcttaaggccttgggaagggggccaagaaaaaaagaatggccactctcctttctgtccttcccttgtgtggaggacagtgattgaaacaggggagttaaaaagccaggaagaaaagaaatcaattgcacatctctagttcgcaagcgtcaaagtcacaacaagtctgtacacaacaactctctatctgtagatatgaaattccatcatgatagcacagcgcctgcttgcccctaaatgttcctttcttctgctaatcatgtcagttactatggatgggctgtggccataagttctccctcaagggctggtccttctgtcaccttgaagtgtcagcccctgaattatgccacttggatgctatgtcttgatacccaataaaggtctaccatcccctaagaaatcccttaccccaccctcaaacccccaaagtgcctaagagtgaagacgaagatgccatggagacggcgtcttcagtgaacacctccccaaagatgcccggggactcgggcctatatcatcccattgatcttagtccactcgtagatgtcctgttcgcacactatgtcagagttgatgaggaggtatctgtcacctacacagaaatgcttctgacaggcggcgcacttgaaacattccaggtgatacactttgtctttcacccgcattgtcatctcataggcacgaatccgcttgtcacaggatgcgcagagaccgtcttgcccaaaaagcctgagatagtctctccggcagagcttccggcccagtttgtagtagaggcgccgccccacctcacccagccggcagccacagaggtcgcagctcaggcagtcctcgtgccagtactggtcgatggccttcaggaagtagcggtccccgatgttctgctggcagccgccgcatgtcagcagggatggggggatctgcagcacctcatccactggttcctctgaagggtccaggctcttcctttcgatggccgaggacattggggagggaggcggggtgccgggcggcgggggcgctccctttgtggcgcggggctggccggctgccggggctcggaccccctcgggtgctcgggcgccgccgccgccgccgccgtcgccgccgctcctgcctccgcttgctcggcctccgccggcgagctcgcccctccgcgctcaaggacagtcaccgcgctcccttccatcccggtcccgccgccgccaccgcccggtccctctcgcgcgctgtcgccggctccgcgccgcccgcggggatggtgtgcgcccgcccggccgcccggagcccctggcacctttccggccccgggtcgcggcgccctgctcgccgccgagggcagagagggggcggcggcctaggggcggggaggggaccgtgcgtctctctccgggcttcctcctctctcgggaaggtctattttggctcaggcttccctctgtctctgtttcatttcctttttcctgcctctccactagctactgcaagttcaggttgaaaaatatcttcttttcagagcagttgttacagcagatgatgtaatcctggtggcttcccccatcagatctaggctgcctgccccacggataccttctgggctaattgcctgctttgcacctgttccttctcgggaggccctggcaccctagcacctggtgcctgtgccatctcccctctctgccaggacacccagaggcccttgtgaatagcaaagcccacttaacggctgagggcaggtgggggtatttccttctcaattctgctcaaggcccgttgctgttctttgaggatgttgcaaatccagggtttggagggctgggcctcttggtggcctggttgtctatctgatagggcggagccttcacccttgcagcgagctctctcacaccagatgtgctctgcgtggaatcctaggccatcaggggattccttagcaagccctgcaggacccaaatcctaactcagaccctcatcctcctactcagaatgtggagacttgtgatcctcagtttggacgaattc

SEQ ID NO: 58794 - DNA, 1792 bp, Homo sapiens
gggcggggattgcgactctcacaccctgagctccggtgctcctttcctaactccactggctgcggcatctgtgggaaaagtgtggctgggtcttcgaggagccgcaccaatggcttccgtgctgtcctacgaaagcctggtccacgccgtggccggagccgtgggaagcgtgacagcaatgacagtgttttttcccctggatacagctagacttcgacttcaggttgatgagaaaagaaaatccaaaactacacacatggtgctcctggagatcattaaagaagaaggactcctggcaccatatcgagggtggtttccagtgatttccagtctctgctgctccaattttgtctatttctacacttttaatagcctcaaagcactctgggtcaaaggtcaacattctaccactggaaaagatctggtagttgggtttgttgcaggagtggttaatgtgttgctaacaactccactctgggtggtaaacaccagactgaagcttcaaggagcaaaatttaggaatgaagacattgtaccaacaaactacaaaggtatcattgatgcttttcatcagatcattcgcgatgaaggaatctcggctttatggaatggcacatttccctcattgctgttggtcttcaatcctgccatccagttcatgttttatgaaggtttaaaacggcagcttttaaagaaacggatgaagctttcttccttggatgtgttcatcattggggcagtagccaaagcgattgccaccacggtgacctatcccctgcagacggtacagtcaattctgaggtttgggcgtcatagactaaacccagaaaacagaacattgggaagtcttcggaatattctctatcttcttcaccaacgagtaagacgttttggaataatgggactctacaaaggccttgaagccaaactgctgcagacagtcctcactgctgctctcatgttccttgtttatgagaaactgacagctgccaccttcacagttatggggctgaagcgtgcacaccaacactgagacgccttcccatgaaaaattccgaagatgctcaagagggaggtttcctcctgagtgaagagaagtgattctcccttgactctggctcctgccaccacaaatgttaccctcattggcttgaaaagcatccaagggtgcacagggagtatggccaactggacctgttgtcaccttaattgtcatgctggctggttggattttggggtggcagttggactaatgtgaaaaaaacattgctgaaaacctaaaaatgaaagtttgggagtgtttattggttttcttaagagaaatggactattttgctctcatgtgtaatggtttctatttaaatctttcttaaatataccagctgttctctttccctgaactctcccccaggttctaggacaaatttaataacatgtaattctcctcaaatacttttgtatgtctcagtgttggtgttttcctcccctaaaactaacattagggctgtgccacgggcatgactttatttttgttgggcttttttttcccctgcttaaggagaggtgtcttttttggatatgagctatttattttgtgaaatgaaaacttgttcacccaaaatgattctcttataaactatttgtaaatgtcacttattcattagtgtttgacataatttttagaatatttattttgaatcaatcctttcattacgaaagacttgaagttttgtgtccattcttacaagccctggtcagtcaagtcccaataaatggtcagcacaaaaaagaa

SEQ ID NO: 58795 - DNA, 1704 bp, Homo sapiens
cttacataaagggacaattggagcctgagaggtgacagtgctgacactacaaggctcggagctccgggcactcagacatcatgagttggtccttgcacccccggaatttaattctctacttctatgctcttttatttctctcttcaacatgtgtagcatatgttgctaccagagacaactgctgcatcttagatgaaagattcggtagttattgtccaactacctgtggcattgcagatttcctgtctacttatcaaaccaaagtagacaaggatctacagtctttggaagacatcttacatcaagttgaaaacaaaacatcagaagtcaaacagctgataaaagcaatccaactcacttataatcctgatgaatcatcaaaaccaaatatgatagacgctgctactttgaagtccaggaaaatgttagaagaaattatgaaatatgaagcatcgattttaacacatgactcaagtattcgatatttgcaggaaatatataattcaaataatcaaaagattgttaacctgaaagagaaggtagcccagcttgaagcacagtgccaggaaccttgcaaagacacggtgcaaatccatgatatcactgggaaagattgtcaagacattgccaataagggagctaaacagagcgggctttactttattaaacctctgaaagctaaccagcaattcttagtctactgtgaaatcgatgggtctggaaatggatggactgtgtttcagaagagacttgatggcagtgtagatttcaagaaaaactggattcaatataaagaaggatttggacatctgtctcctactggcacaacagaattttggctgggaaatgagaagattcatttgataagcacacagtctgccatcccatatgcattaagagtggaactggaagactggaatggcagaaccagtactgcagactatgccatgttcaaggtgggacctgaagctgacaagtaccgcctaacatatgcctacttcgctggtggggatgctggagatgcctttgatggctttgattttggcgatgatcctagtgacaagtttttcacatcccataatggcatgcagttcagtacctgggacaatgacaatgataagtttgaaggcaactgtgctgaacaggatggatctggttggtggatgaacaagtgtcacgctggccatctcaatggagtttattaccaaggtggcacttactcaaaagcatctactcctaatggttatgataatggcattatttgggccacttggaaaacccggtggtattccatgaagaaaaccactatgaagataatcccattcaacagactcacaattggagaaggacagcaacaccacctggggggagccaaacaggctggagacgtttaaaagaccgtttcaaaagagatttacttttttaaaggactttatctgaacagagagatataatatttttcctattggacaatggacttgcaaagcttcacttcattttaagagcaaaagaccccatgttgaaaactccataacagttttatgctgatgataatttatctacatgcatttcaataaaccttttgtttcctaagactaaaaaaaaaaaaaagggggggccgttttaaaggatccctcggggggcccaagtttacccgggcatgcaacgaaataattttttccttatagggaggcgaattataac

SEQ ID NO: 58796 - DNA, 1251 bp, Homo sapiens
ggaacctgggagggtcagctccggtcctgggtcgggaggggtgggggccagaggattcagggccggaggttctggtgggggcccagtgggcgggacccgaggacggaggggccgggaggccgagaggggcggggtcgcggcggggcctgagggacggaggccgggatacttgggaaaggatccgccggccttgaactcccggctccgccgcccctaggcctcatggcggtccgagcttcgttcgagaacaactgtgagatcggctgctttgccaagctcaccaacacctactgtctggtagcgatcggaggctcagagaacttctacagtgtgttcgagggcgagctctccgataccatccccgtggtgcacgcgtctatcgccggctgccgcatcatcgggcgcatgtgtgtggggaacaggcacggtctcctggtacccaacaataccaccgaccaggagctgcaacacattcgcaacagcctcccagacacagtgcagattaggcgggtggaggagcggctctcagccttgggcaatgtcaccacctgcaatgactacgtggccttggtccacccagacttggacagggagacagaagaaattctggcagatgtgctcaaggtggaagtcttcagacagacagtggccgaccaggtgctagtaggaagctactgtgtcttcagcaatcagggagggctggtgcatcccaagacttcaattgaagaccaggatgagctgtcctctcttcttcaagtcccccttgtggcggggactgtgaaccgaggcagtgaggtgattgctgctgggatggtggtgaatgactggtgtgccttctgtggcctggacacaaccagcacagagctgtcagtggtggagagtgtcttcaagctgaatgaagcccagcctagcaccattgccaccagcatgcgggattccctcattgacagcctcacctgagtcaccttccaagttgttccatgggctcctggctctggactgtggccaaccttctccacattccgcccaatctgtaccggatgctggcagggaggtggcagagagctcactgggactgaggggctgggcacccaacccttttccacctgtgcttatcgcctggatctatcattactgcaaaaacctgctctgttgtgctggctggcaggccctgtggctgctggctgagggttctgctgtctgtcctgtgccaccccattaaagtgcagttccctccgggcaaaaaaaaaa

SEQ ID NO: 58797 - DNA, 818 bp, Homo sapiens
gacgacgtagcagccatcttttccctggctttggtgattcagaaactcccgttctgtggcgaaattctgtgagtccatgaagctggattgtccctgacctcttttgaggaaggagagggttgcttctaactggtcctgggagatgccactgtgatgtatccgggatgaagacacaatcctggttacttcatagcctgtttttcttccccagccctgacttctcaaaaagcactgcacagaggaggaggcagcagaaccccatttcagcttcttaggactctgcacttccccagaaggaagaattaaaaatgaatatgttcaaggaagcagtgaccttcaaggacgtggctgtggccttcacggaggaggaattggggctgctgggccctgcccagaggaagctgtaccgagatgtgatggtggagaactttaggaacctgctgtcagtggggcatccacccttcaaacaagatgtatcacctatagaaagaaatgagcagctttggataatgacgacagcaacccgaagacagggaaatttagataccttacttgtaaaagctcttttgctctatgacctggctcaaacttaaacttggatttgaagttagaagaaatgttggaagtcatttatatatgaagaaatgttggaaggactcatatatgcatacattccttgagtgactatgaatgactgccgggcagtaacttctgggctgtggttgtaaactgtgagcactacaaaatgtttttccttattgataccatattatggtaggaaagacatggaataaaaaatttagatagtaaaaaaaaaa

SEQ ID NO: 58798 - DNA, 1111 bp, Homo sapiens
ctcaggacaatctccagcatggcctggggtcctctcctcctgactctcctggctcactgcacagggtcctgggcccagtctgtgctgacgcagccgccctcagtgtctggggcaagaattccacatgagaagtaaaaacagtttacagtactcatgtggaattcttgttcttcttccaaactactaacatcatcatcatctgagctcccagggtctgcgagagatttacagtcctgaccaaaactttgtggcttttgatagctatgctcacttgttatataagctccttccatttttaggggcaaacgaggtggttctttatggttctgtacatatttcttttcttctcgattaactgtgtcttgagctatttttttctccaccccagctattatttgatcttggtcttttcgcttcccggaacaagcccagagatgaaggtcaggatgatgtttattctttagtattccaatcttcagctgtagcccgtgtagcacttctgtaacaccatagacatcagcaagcaggtgatgtgtagaaactatctttttggcattgagatgagaataattttctttgaaaaatgataacccgcacattctcccattattcaaccactccttatcataacgatattttgcactccacctctgacctggtgggtcccggcagatatagcagatgtactgctctggaatgctctcctccagcagccccatgcacacgctgtgttgccaacacaagcactcttcacagtggatcatgaagccattctcctcatccatctcacaaatacatcgcacaatttcattaagagcatcatcctcatcctgagattcctcaaaattggttgaatcaaagtcctgattgtattcatccccactcagaagcaaactctccgttgaagaatcatctaggaagtctacatctgataagttttcaccactaagatcaacggatagaattgcccttgggtactgataggttgtagttttctccgtaaacatgcttcgtgaagccagagaactcccagaagatcgagttagtggagaagagcacctttccaaaaattcaagggaactgtcttcatagtctgaatagtcctcgtgcc

SEQ ID NO: 58799 - DNA, 1917 bp, Homo sapiens
cgacccacgcgtccgcccacgcgtccggctcgcaagcgaggcagccatgtcttatcccgctgatgattatgagtctgaggcggcttatgacccctacgcttatcccagcgactatgatatgcacacaggagatccaaagcaggaccttgcttatgaacgtcagtatgaacagcaaacctatcaggtgatccctgaggtgatcaaaaacttcatccagtatttccacaaaactgtctcagatttgattgaccagaaagtgtatgagctacaggccagtcgtgtctccagtgatgtcattgaccagaaggtgtatgagatccaggacatctatgagaacagctggaccaagctgactgaaagattcttcaagaatacaccttggcccgaggctgaagccattgctccacaggttggcaatgatgctgtcttcctgattttatacaaagaattatactacaggcacatatatgccaaagtcagtgggggaccttccttggagcagaggtttgaatcctattacaactactgcaatctcttcaactacattcttaatgccgatggtcctgctccccttgaactacccaaccagtggctctgggatattatcgatgagttcatctaccagtttcagtcattcagtcagtaccgctgtaagactgccaagaagtcagaggaggagattgactttcttcgttccaatcccaaaatctggaatgttcatagtgtcctcaatgtccttcattccctggtagacaaatccaacatcaaccgacagttggaggtatacacaagcggaggtgaccctgagagtgtggctggggagtatgggcggcactccctctacaaaatgcttggttacttcagcctggtcgggcttctccgcctgcactccctgttaggagattactaccaggccatcaaggtgctggagaacatcgaactgaacaagaagagtatgtattcccgtgtgccagagtgccaggtcaccacatactattatgttgggtttgcatatttgatgatgcgtcgttaccaggatgccatccgggtcttcgccaacatcctcctctacatccagaggaccaagagcatgttccagaggaccacgtacaagtatgagatgattaacaagcagaatgagcagatgcatgcgctgctggccattgccctcacgatgtaccccatgcgtattgatgagagcattcacctccagctgcgggagaaatatggggacaagatgttgcgcatgcagaaaggtgacccacaagtctatgaagaacttttcagttactcctgccccaagttcctgtcgcctgtagtgcccaactatgataatgtgcaccccaactaccacaaagagcccttcctgcagcagctgaaggtgttttctgatgaagtacagcagcaggcccagctttcaaccatccgcagcttcctgaagctctacaccaccatgcctgtggccaagctggctggcttcctggacctcacagagcaggagttccggatccagcttcttgtcttcaaacacaagatgaagaacctcgtgtggaccagcggtatctcagccctggatggtgaatttcagtcagcctcagaggttgacttctacattgataaggacatgatccacatcgcggacaccaaggtcgccaggcgttatggggatttcttcatccgtcagatccacaaatttgaggagcttaatcgaaccctgaagaagatgggacagagaccttgatgatattcacacacattcaggaacctgttttgatgtattataggcaggaagtgtttttgctaccgtgaaacctttacctagatcagccatcagcctgtcaactcagttaacaagttaaggaccgaagtgtttcaagtggatctcagtaaaggatctttggagccacaaaaaaaaaa

SEQ ID NO: 58800 - DNA, 825 bp, Homo sapiens
ggcacgaggggagctgccgggagttggagcctgcggagttcgagaccatgctgctgttctgccccggctgcgggaacgggctgatcgtggaggagggacaacgctgccaccgcttcgcctgcaacacgtgcccctacgtgcacaacatcacccgcaaggtaacaaatcggaagtacccaaaactgaaagaagtggatgatgtgcttggtggagcagctgcctgggagaatgttgactctactgcagagtcgtgtcccaaatgcgaacatcctcgtgcttacttcatgcagcttcagacccgctctgcagatgagccgatgaccaccttctacaagtgctgcaatgctcagtgtggacaccgctggagggattagggccaggatggcccagctgccctagtgtgtgcttgccttgtccctcggggtagatgcttagctggcagtatgagtcgtgtgtcctgagggtctttgctagtgtggtggaaagataaaccttttgaggtgaagagccagggggtcaggaaatatggcctatctgccaggcagggtggatgaagtcatgaatgtctgggagtttttctgtgtggggaggagacagagacccataactaaatatgctctgtgtaaagtcctattctttcatcttccactttattggcagttgacattcccttactccggatcaacactcttaaatatttgtactgtttgtaaaacttagtacatgtccctaaatatttaactgttacttgtaaacttgtgtaatttattatttattttaatcaaaattctgaatatttcatttaaatgaaagttggaatattgc

SEQ ID NO: 58801 - DNA, 1814 bp, Homo sapiens
gcggcccccacctccagcatcctcgagcgatggtttctcccacaactaccccggccaggtccagcacttgggagctgactgtgctggaggtgacaggctttgcggggtccgcctgtgtgcaggagtcgcaaggtcgctgagcaggacccaaaggtggcccgaggcagccgggatgacagctctccccaggaatcctgctgcctgctgagaaacatggtcagcaagtcccgctggaagctcctggccatgttggctctggtcctggtcgtcatggtgtggtattccatctcccgggaagacaggtacatcgagcttttttattttcccatcccagagaagaaggagccgtgcctccagggtgaggcagagagcaaggcctctaagctctttggcaactactcccgggatcagcccatcttcctgcggcttgaggattatttctgggtcaagacgccatctgcttatgagctgccctatgggaccaaggggagtgaggatctgctcctccgggtgctagccatcaccagctcctccatccccaagaacatccagagcctcaggtgccgccgctgtgtggtcgtggggaacgggcaccggctgcggaacagctcactgggagatgccatcaacaagtatgatgtggtcatcagattgaacaatgccccagtggctggctatgagggtgacgtgggctccaagaccaccatgcgtctcttctaccctgaatctgcccacttcgaccccaaagtagaaaacaacccagacacactcctcgtcctggtagctttcaaggcaatggacttccactggattgagaccatcctgagtgataagaagcgggtgcgaaagggtttctggaaacagcctcccctcatctgggatgtcaatcctaaacagattcggattctcaaccccttcttcatggagattgcagctgacaaactgctgagcctgccaatgcaacagccacggaagattaagcagaagcccaccacgggcctgttggccatcacgctggccctccacctctgtgacttggtgcacattgccggctttggctacccagacgcctacaacaagaagcagaccattcactactatgagcagatcacgctcaagtccatggcggggtcaggccataatgtctcccaagaggccctggccattaagcggatgctggagatgggagctatcaagaacctcacgtccttctgacctgggcaagagctgtagcctgtcggttgcctactctgctgtctgggtgacccccatgcgtggctgtgggggtggctggtgccagtatgacccacttggactcaccccctcttggggagggagttctgggcctggccaggtctgagatgaggccatgcccctggctgctcttatggagccgagatccagtcagggtgggggcgctggagccgtgggagcccggccagggcagggggctcgttgctgtggcaccccctctctgccagcaccaagagattatttaatgggctatttaattaaggggtaggaaggtgctgtgggctggtcccacacatccaggaaagaggccagtagagaattctgcccactttttataaaaacttacagcgatggccccaccaaggcctagacacggcactggcctcccaggagggcaggggcattgggaatgggtgggtgccctccagagaggggctgctacctcccagcaggcatgggaagagcactggtgtgggggttccaccgagaaggggacctcatctagaaaagaggttacaaacctaccattaaactatttttcctaaaacggaaaaaaaaaa

SEQ ID NO: 58802 - DNA, 590 bp, Homo sapiens
ccaagaattcggcacgagcacagactcagagagaacccaccatggtgctgtctcctgccgacaagaccaacgtcaaggccgcctggggtaaggtcggcgcgcacgctggcgagtatggtgcggaggccctggagaggatgttcctgtccttccccaccaccaagacctacttcccgcacttcgacctgagccacggctctgcccaggttaagggccacggcaagaaggtggccgacgcgctgaccaacgccgtggcgcacgtggacgacatgcccaacgcgctgtccgccctgagcgacctgcacgcgcacaagcttcgggtggacccggtcaacttcaagctcctaagccactgcctgctggtgaccctggccgcccacctccccgccgagttcacccctgcggtgcacgcctccctggacaagttcctggcttctgtgagcaccgtgctgacctccaaataccgttaagctggagcctcggtggccatgcttcttgccccttgggcctccccccagcccctcctccccttcctgcacccgtacccccgtggtctttgaataaagtctgagtgggcggcaaaaaaaaaa

SEQ ID NO: 58803 - DNA, 1220 bp, Homo sapiens
ttttttttttttatttcaaaatgataaaaatttattgtctttctggcctatggactcagctgtagttgactgaagtcgctaaacaggacggatttaagtagaggtgatatgtccagtcaccggcatagagacgtcctctgcgtcaccatccacacacagggcttctggtagacatcaggcaaagccctccatgttaatattcatctgaatatggataattagggtggctagcaaaactatcactgttaaaatagtggagatttctgtctaggccatctatggctttcatgtcctctgcagtcaactggaactcaaaaacctgcacgttctgtctgatgcgctgctcattgtagctcttggccaggaccacaaccccacgctgcagctggtagcgcagggcaatcagggctggggttcgcttgtgcttttttgccaaggcacaaaggactgggtcctccaagagcaccggggagttcgggtccacccatcgtttgtctcgttgagatcccagagcactataggcaaccagaacaatatctttcgacttgcagaaatctagcaatttactccggttgaaatacggatgacattctacctggttgcagacaggcttgtacttgagtcctggcttgttgaggatcatctccagctgcctgcggttgaagtttgacaccccaatggacttggccaatcctgcatccttacacttctccatggcctcccaggtggtacagagatccactatgtcaaatattacttttccattttcatctgttggtgaaagttcctcacctggctttagagacattggagaatgaataagatagaggtcaacatagtccaattgagcttttttcagtgagttttccaaggctggtcggaccaactctggtcgatgaaaagtggaccaaagctttgaagtgtagaatatgtcttctctcttcacactgccatctgcaatcttgcttcggatggccagtccaacctgctcctcattattgtataaatgagcagaatctatatggcggaacccagcttctattgctaattttgtgacctccaaagctttacttctcggaacctctggaggtgcataggtgccaaatcccaatacaggcatgaagtggccatcatttagctttacacactgctgtttggaatccattccctgtcacttgtctgactagcaaatgtttgctgctgcttctccgacagcaacg

SEQ ID NO: 58804 - DNA, 340 bp, Homo sapiens
ggcacgagattttttgttcagcaacctacaagaatcctactcggagaccggggataacctaaacgatagcgcttatatcaaaaaattctataagtccaaacttaagaacacacagacacatgataaaaatccactgccttccaaagaaactattgaacacgataatcaagcaagcgaatcgtaatgatgcgtgcgccgccaatatgcactgtacattccacaagcattgccttcttattttacttcttttatctgtttaactttgtaagatgcaaagaggttggatcatgtttaaatgactgtgctgcccctttcacatcaaagaactactgacaactag

SEQ ID NO: 58805 - DNA, 3100 bp, Homo sapiens
gctcagtagcgatagcagcggccgtggaggtggcgttggggactgttttctctcggaggccggagcggagccgcgtctgactgaggcgggcagcaagcggccccctcgctccctccctccctcctccgcgccctccccgccgccaccagccgtcaaacgccaaccgccgctcctggggaggagccgcggctcgcggggccggagccaggcctgcgtccggacatcagccggagccggagcgagagccggggcctcggcgtccccgccctctccccgcctcggccagcgtccgccgggcccccgcgcgtcgcgccatggactcggacgagggctacaactacgagttcgacgaggacgaggagtgcagtgaggaggacagcggcgccgaggaggaggaggacgaagacgacgacgagccggacgatgataccctggatctgggcgaggtggagctggtggagcccgggctgggcgtcggcggggagcgggacggactgctgtgcggggagacgggcggtggcggcggcagcgctctggggcccggcggtggcggcggcggcggcggcggcggtggtggtggcgggccggggcatgagcaggaggaggattaccgctacgaggtgctcacggccgagcagattctacaacacatggtggaatgtatccgggaggtcaacgaggtcatccagaatccagcaactatcacaagaatactccttagccacttcaattgggataaagagaagctaatggaaaggtactttgatggaaacctggagaagctctttgctgagtgtcatgtaattaatccaagtaaaaagtctcgaacacgccagatgaatacaaggtcatcagcacaggatatgccttgtcagatctgctacttgaactaccctaactcgtatttcactggccttgaatgtggacataagttttgtatgcagtgctggagtgaatatttaactaccaaaataatggaagaaggcatgggtcagactatttcgtgtcctgctcatggttgtgatatcttagtggatgacaacacagttatgcgcctgatcacagattcaaaagttaaattaaagtatcagcatttaataacaaatagctttgtagagtgcaatcgactgttaaagtggtgtcctgccccagattgccaccatgttgttaaagtccaatatcctgatgctaaacctgttcgctgcaaatgtgggcgccaattttgctttaactgtggagaaaattggcatgatcctgttaaatgtaagtggttaaagaaatggattaaaaagtgtgatgatgacagtgaaacctccaattggattgcagccaacacaaaggaatgtcccaaatgccatgtcacaattgagaaggatggtggttgtaatcacatggtctgtcgtaaccagaattgtaaagcagagttttgctgggtgtgtcttggcccatgggaaccacatggatctgcctggtacaactgtaaccgctataatgaggatgatgcaaaggcagcaagagatgcacaggagcgatctagggcagccctgcagaggtacctgttctactgtaatcgctatatgaaccacatgcagagcctgcgctttgagcacaaactatatgctcaggtgaaacagaaaatggaggagatgcagcagcacaacatgtcctggattgaggtgcagttcctgaagaaggcagttgatgtcctctgccagtgtcgtgccacactcatgtacacttatgtcttcgctttctacctcaaaaagaataaccagtccattatctttgagaataaccaagcagatctagagaatgccacagaggtgctctcgggctaccttgaacgagatatttcccaagattctctgcaggatataaagcagaaagtacaagacaagtacagatactgtgagagtcgacgaagggttttgttacagcatgtgcatgaaggctatgaaaaagatctgtgggagtacattgaggactgagaaatggcccctgcattaaaatgaactctgaaaacttttaccatcctagaagtgctcatgcaattaaaacaaacaaaacaaagcaaacacaaacaaggaggcactaagcctattctgacaccactggtctgtagtaccagaattgttttgttaatggaaagtttaagtaaattatattgtaataaaaaggtagataaaccattgtacaacagtattctaggccgccaacaaaagtgtgacagacacactaaaagccctccaactttaacttgtaacgtagcttcattctcaaagctgactccttttttttctttttccttttcctgagtgtagtacagttaaaatttcaaacagctccttgacactgcttttcatgttcaaaccagccattttgttgtactttggtaaaggacctcttccccttcctcccctacacatacagatacacccacacacagactgactctctttctctcataccccaaggtcatgagtgaatgatgcttagttccttgtaaagaaaatcttgggatggggaaaggggtaggcagcaagaggattcaacaaacgaaaaacataaaaactttgtatatgacttttaaaacaagaggacaacacagtatttttcaaaattgtatatagcgcatatgcatggacaaagcaagcgtggcacgtgtttgcataatgtttaattacaaaaaaatatttattctttaaaaatcttcaagattatgtctatttgctgtgcattttctttcagtttgcttatctttcccgggttggggttgggataaaggtgtgtcggtttagcacctctggaagacctatctagagctctttcactttcctgaggttattttgccctttctggtgttggtatgtctgttgccggccatgggcctcatgccttgaattcctgctcttgatcagggacaagggaggtcaagctctggactaatgccatgacctggatttaagggggtacagcagggagttttgtttgctacagcttcatggaatttaacctggtcccaacctaaatccccctccatgggcatccaggcctctacccaagcctttgtgtggcccatggttatggcacacagctgttt

SEQ ID NO: 58806 - DNA, 1843 bp, Homo sapiens
ttttttttttttactcaaatggtttttattttcctatctgacatttctaacaaaacgccaggtagacggagttaaaaagaatccaccgcacgaaaggtaaacaaagcagaccctcagaaactccctggcaaggatgttcccctccccagattggcccagtttcaccagcaactggtctcagctcagccttatgcctttccactgacaccccccacccctccacattctcgtgattcagaccaggaacttctcggctgattgtgtccgtgtgtctgagggaggggcacgctggaacctgggaacctactgggcacctctaatgcagatgagaaaaacttgagaatgtgaaagtagatcagtccccgctcccacccgaaggtgcagagacgcgggacattaaccagcagcacgcgggggtgaagtaactcaggccactctcctccccactgcccagggcgggtgcacgccccaggacctcctcccaggccccacacccacgcaaggcgacaggaagctccccacgcctgccccatgacgcaacgatgaccgcttatacaagtatgtcagcggagggggaaggggagtgcctggaattctccgaggttggaaacgcaaaaccaactcttgaaaaaccttgaaagggccagcacagcccacagtacaaaatgaagtccgaccctgaggagatctttaaaaacaaacaaacaaacaaaacaaaaaacacaacacccaagcctcccttctcccagtccagaaggagagcgaaaggttcacgtcccagtccactaagacagcacctgtgggcgcaggtctctgcggaaggcgcccgcgcccccggctcagactcctcggtgccgtccctgcacactgaaggcgatggctccccggggacagagtccctctccgggcctctcagcagcccgggcggcggcttctctccacggttttcgcgggcgcttcccccaggatggaggggggtggcctcgcctcaggtctgcgccctcgggccgacggttcgacgcgcgctctgggctccggcagcgccgctcggggtcctcagaaggccaccacggcccgcacgagcacgttgagcatgctgtccgccgggcggcaagcgggctttgcctcgcacgcgggcggcgccgtcggaggggccgcggggctgcagttcaggaggccggagaagcgcctctgcaggacgcgggccaggttgggaaaggcgccctccgcttgcgccggagggggctgcaggcgatcggcgacttcggatgacgctccctcctcttcttccttttcttccagacgggctttcttgctcgggaccagtccagcgtccccgccgtcgctcaggctgctgctgcgtcgtttgcggctgactttggcggggcgcggggcacagcaggcggaggtctcctcggctgtcggcgcctcctgcgtgtccattggctccggaaacgggtgctcaccgtcgggggtcgctgtctcggccgtggactcggcttctcggggcgggtgcaggcgagggtcagaggggagggcggccggcaacgacacctcgggctcgagggcctccaccttggccgagaggtagagctcccgggcgctgcgcatgaccagcgacagctgcagactccggtgcagccgcaggccaccgcgctgcatgcgggagtgatacatcttccacaccgacagggtcatgatgcgctgtgcctctttctgcacttccatggcgactcgacggcgacagcggcgggggctcccgggagggacagaacaggcagcaggtgcactccggacaacgggctcgctcaaaaactctctacacaaaccaacccacgcagtg

SEQ ID NO: 58807 - DNA, 848 bp, Homo sapiens
ttttttttttttaagggttgtcgtgcaggtagaggaaatgagagtgattacagaaaactggaagaaatgcaccaaagattcctggtttcagagcgttcaaaagatgatcttcagctaagacttacgagagcagaaaatagaataaaacaacttgaaactgactcctcagaagaaatatcacgttaccaagaaatgattcagaaacttcaaaatgtattggagtctgagagagagaactgtgggcttgtcagtgaacaaaggctaaaacttcagcaagaaaataaacagttacggaaagagactgagagtttaaggaagattgccctggaggctcaaaaaaaagccaaagtaaagatcagtacaatggaacatgaattttcaataaaggaacgtggatttgaagttcaattgagagagatggaagacagtaatagaaattccattgttgaactgaggcatctcctagcgactcaacagaaggcagccaataggtggaaagaagaaacgaagaaacttactgaaagtgcagaaattagaatcaataatctaaagagtgagctgagtcgacagaaacttcatacccaagagctgctttctcagctggaaatggcaaatgaaaaggtagctgagaatgaaaagctaattctagagcatcaagaaaaagccaacagacttcaaaggcgtctaagtcaggcagaagagagagctgcttcagcttcccagcagctcagtgtgattacagtgcagagaagaaaagcagcctccctgatgaatctggaaaatatttaaaaatattcatagttcactcacagaactttagagttgggaaagcagttggactagaagtg

SEQ ID NO: 58808 - DNA, 748 bp, Homo sapiens
tacggctgcgagaagacgacagaagggtacggctgcgagaagacgacagaagggtacggctgcgagaagacgacagaagggtacggctgcgagaagatgacagaagggtacggctgcgagaagacgacagaagggtacggctgcgagaagacgacagaagggtacggctgcgagaagacgacagaagggtacggctgcgagaagacgacagaagggtacggctgcgagaagacgacagaagggtacggctgcgagaagacgacagaagggggtttttttttcttgctgcagcaacgcgagtgggagcaccaggatctcgggctcggaacgagactgcacggattgttttaagaaaatggcagacaaaccagacatgggggaaatcgccagcttcgataaggccaagctgaagaaaacggagacgcaggagaagaacaccctgccgaccaaagagaccattgagcaggagaagcggagtgaaatttcctaagatcctggaggatttcctacccccgtcctcttcgagaccccagtcgtgatgtggaggaagagccacctgcaagatggacacgagccacaagctgcactgtgaacctgggcactccgcgccgatgccaccggcctgtgggtctctgaagggaccccccccccaatcggactgccaaattctccggtttgccccgggatattatagaaaattatttgtatgaataatgaaaataaaacacacctcgtggcaaaaaaaaaa

SEQ ID NO: 58809 - DNA, 2859 bp, Homo sapiens
ccgtatcgacctacgcgtccggcaagacctcatctgctggtgtacctcatccttttagcccctctttgatgtttgctgcaaacgtcacccagctcctggggcacactggactcccagatgagcttgtcctggatttgcagggagcctggctccctaaaccttttggccagatccccacaggggaattgtgcaggtgcgccctccccagatccccagctggtattggaatcacaccaactgtcacacatggggagggcagctgcacccagccaccctctgacttctctcctgccacagattggccatctgcaagcttcccttctccgtggagagcaggaagacagtcatgggacctcagggagccaggagacaggctttcttggcatttggggatgtcactgtggatttcacccagaaggaatggaggctgctgagccctgctcagagggccctgtacagggaggtgacactggagaactacagccacctggtctcactaggaattctccattctaaaccagaactcatcaggcggctagagcaaggggaagtgccctggggagaagagagaagacgccggccaggcccctgtgcaggaatatatgcagaacatgtcctgcggcccaagaatcttggacttgcacatcagaggcaacagcaactacaattttctgatcaaagcttccagagtgacacagctgaaggtcaagagaaagaaaaaagcactaagcccatggcattttccagcccacccctaagacatgcagtaagctcaaggaggaggaacagtgtagtggaaatagagtctagtcaaggccagagggaaaatcctacagaaatagacaaagtattgaaaggaatagaaaattcaagatggggagcattcaagtgtgcagagcgtgggcaagacttcagccggaagatgatggtaatcatacacaaaaaagcacattccaggcagaaactttttacatgcagggagtgtcaccagggctttagagatgagtcagcattgctcttgcaccagaacacacacacaggagagaagtcctatgtgtgcagtgtgtgtgggcgaggcttcagcctcaaggccaacctcctcagacaccagaggacacactcaggagagaagccttttctgtgcaaggtgtgtggacgaggctataccagtaagtcatacctcactgtgcatgagagaacacacacaggagagaagccttatgaatgccaggagtgtgggcgaaggtttaacgataagtcctcatacaacaagcacttgaaggcgcattcaggggagaagccttttgtgtgcaaggagtgtgggcgaggctatactaataagtcatacttcgttgtgcacaagagaatacactcaggagagaagccttacagatgccaggagtgtggccgaggctttagcaataagtcacaccttatcacacaccagaggacacactcaggggagaagccctttgcgtgcaggcagtgtaagcaaagttttagcgtgaaaggaagtctcctcagacaccagagaacacactcaggggagaagccttttgtgtgcaaggattgtgagcgaagctttagccaaaagtcaactcttgtctaccaccagagaacacactcaggggagaaaccttttgtttgtagagaatgtgggcaaggatttattcagaagtcaacccttgtgaaacatcagatcacacactcagaggagaagccttttgtgtgcaaggactgtggacgaggctttatccaaaagtcaaccttcactttacaccagaggacacactcagaggagaagccttatggatgtcgggagtgtgggcgaaggtttcgggataagtcctcctataacaagcacctgagggcacacttgggtgagaaacgttttttctgcagggattgtgggcgaggctttaccttgaagccaaatctcaccatacatcagaggacacactcaggagagaagcccttcatgtgcaagcagtgtgagaaaagttttagtttgaaggcaaatcttcttagacatcagtggacacactcgggggaaaggccatttaattgcaaggattgcgggcgaggcttcatcctaaaatcaactctcctcttccaccagaagacacactcaggggagaagcctttcatctgtagtgaatgtgggcaaggatttatctggaagtcaaatcttgtgaaacaccagcttgcacattctggcaagcagccttttgtatgcaaggagtgtgggcgaggcttcaactggaagggaaatctcctcacacaccagaggacacactcaggggagaagcccttcgtgtgtaatgtgtgtgggcaaggcttcagctggaagagaagtctcaccagacaccactggcggatacactcaaaggagaagccttttgtttgccaggagtgtaagcgaggctataccagtaagtcagacctcactgtgcatgaaagaatacacacaggagagaggccttatgaatgccaagagtgtggacgaaagtttagcaataagtcatactacagtaagcacttaaagagacacttacgtgagaagcgtttttgtacagggagtgtgggtgaggcttcatcttgaagttatatctcaccatccatcagaggacacactcaggagagtaactttgctttgttacaagctttagttgaggctgcataacttgttcgtgaagatataacagaggcagacagaatccagagggctacagagaacctgcctggcaggagtaaagcatgttggctggtggggcacaggtaggtggttagctgcaaaatatttcacaggtgatttcctgagaaaatgcctcaatgatagagaatgctgtggcagatgtg

SEQ ID NO: 58810 - DNA, 415 bp, Homo sapiens
cgtcaggctcctgcaaccccaggcatgaaccaaggtttctgaactactgggcgggagccaacgtctcttctttctcccgctctggcggaggctttgtcgctgcgggctgggccccagggtgtcccccatggcggggccgcgggtggaggtcgatggcagcatcatggaagggggcggccagagcctgagagtctctacgggcttgagctggctcctaagcctcccctggcgggcgcagagaattcgagccgggcggagttacgcctagactgtgagctcaacattcaactggactgaaacgggatcgcgagacgggaggtgggcatctgggaagacgcctgagctgggtcagcgcatttagagggctcgccttgcacgatccagaccgtgaggcacagtggtcgacatacgagag

SEQ ID NO: 58811 - DNA, 4377 bp, Homo sapiens
gaaccgctccggaatttccgggtcgacgatttcgtgaagaggctgagggaggcggtgtcgccgccgcggcgctgtcatggagctagcgcaggaagcgcgggaactgggttgctgggcggtcgaagagatgggggtgcccgtggcggcccgggccccggaatcgacgctgcgcaggctgtgtctgggccagggggctgacatctgggcctacatcttgcagcatgtgcacagtcagaggactgtcaagaagatccggggaaacctactctggtatggccaccaggacagtccacaggtccgtcggaagttagagctggaagctgctgtgacccgcctgcgggcagaaatccaggaactcgaccagagcctggagctgatggagcgagacactgaggctcaggacacggccatggagcaggcacgtcagcacactcaagacacccagcgtcgagctctcctcctccgggcccaagctggggccatgcgaagacagcagcatacgctccgagatcccatgcagcggctgcagaatcaactgaggcgcctgcaggacatggagaggaaagccaaagtagatgtgacctttggatccctcacgtcggcagctctgggcctggagcccgtggtcctgcgtgatgtccgaacagcctgcaccctccgggcccagttcctgcagaacctcctgcttccccaggccaagaggggcagcctcccaacccctcatgatgaccactttggcacttcgtaccagcagtggctgagctcagtggagacgctgctgacaaaccaccccccaggccacgtcctggctgccttggagcacctggctgcagagcgggaggcagagattcggtccctgtgcagtggggatgggcttggcgacacagagatatccagaccccaggccccggaccagtcagactccagccagaccctgccgtccatggttcatctcatccaggagggctggcggactgtgggtgtgctggtctcccagcggagcaccctcctgaaggagcggcaagtcttgacccagcgcctccagggcctggtggaggaggtggagagacgcgtcctgggatccagtgagaggcaggtgctgatactggggcttcggcgctgttgcctgtggacggagctcaaggccctgcacgatcagagccaggagctgcaggatgcagctgggcatcggcagctcctgctgagggagctacaggccaaacagcagcggatcctgcactggcgccagctggtggaggagacccaggaacaggtccgcctgctcatcaagggaaactcggccagcaagacccgcctgtgccggagcccgggggaggtgctagctctggtccagcgaaaggtggtccctacatttgaggcagtggcaccacagagccgggagctgctgcgctgtctggaggaggaagtccggcatttgccccacattctgttgggcacgctgctgcggcacaggccgggagagttgaagcccctgcccacggtcctcccatccatccaccagctgcaccccgcgtccccaaggggctccagcttcatagcgctgagccacaagctggggctgcctccagggaaggcctcggagctgctcctgccggcggctgcctctcttcgccaggaccttctgctcctgcaggaccagcggagcctctggtgctgggatctactccacatgaagaccagcctgccgccaggccttcccacccaggagctgctgcagatccaggcatcccaggaaaaacagcagaaagagaacctggggcaggctctgaagaggctggagaagctactgaaacaggcactggagcgaatccctgagctgcaggggatcgtgggggactggtgggagcagccaggccaggccgccctctctgaggagctctgccagggcctgtccctgccccagtggcggctgcgctgggttcaggcccagggggccctgcagaagctgtgcagctgaagagagggttcaaacggaagccgagaacttgacactgttcaccccaacacctcacctcccccaggacatttggaagaaagcagcgccagggattcctcggcagtcgtccccacccgcacctgcagtccccttcatgtgctgttctgcttgccccactcagctcctgggaccctgttcttttcatcccgctaaagcaccccctaaaaccccttcatcactttcattctcaaccaaaaaattaattgaaccaccctccctctaggccgcctggggagtccccacactgaaacaaaagaaaccagaaaacccctgtccttcccagcagttgaagttcctagggccagggagaacagagtttaacaagataaggaaaaatatatatgtagtatgcctgccaagttaactgcctgtgtgggaaatcccagcagggggtgggatgtgtgatttgaattgagggccacactgccccaggtcgtgctccgtcaaggggtgagcaggagcaacaggggtggctgagtaagggcttgcagctggaggcaacagcacatgcaaaggccctgagccaggatgtgctgcaataagggccactgagggggacagtgtaggttgggggtgaggaatgtattaaaagatgagattgccttctagtttgtatagtttctttttttacatgtaaatcagccatttggaatttatcctagcacatggatccaattttgtcttattttacatatatcctagtagcacttactgaaattcccagtcagagtggcagttgcctctgagggaaggtgggtggcagggatcaactgaggaggagacacagaaatgtcctagcctgatgggaaatgtgtggtgtcaagaccagcggcggtgacgcaggtgtagagatttgtcagagctcatgtagttgtagtcttaaggcctgtgcatttcactgcgtgggttactcaatttataaagcaaagcccttacacttttgagatgccacctttttatgcactaaatttccatgtttaattgggttatatctggcttctctccagacctgctttgtatttaactctccatgtgtcattcctacagtagcttaatagaaaggcttgtgacacattgtcatatctgttcttgttttcttttgttttttttttttttttttttgagatgcagtctcattctgttgcccaagttggagtgcagtggcatgatctcagctcactgcaacctccgcctcccaggttcaagccattctcatgcctcagcttccccagtagctaggattacaggtacgcaccaccacgcccagctcatttttgtacttttagtagggacggggtttcatcatgttggccagactggtctcgaactcctgacctcaagtgatctgcctgcctcggcctcccaaagtgctgggattacaggcatgagccaccgcgcctgaccacattgccatatctgaaatggctggattctcttaggtgcttttctttttctttctttctttctttttttgagacagaatctggctgtttcccaggctgaagtgcagtggcatgaactcagctcactgcaacctctgcctcctggattcaaacaattctcatgtctcagcctcctgaatagctgggattacaggcacccaccaccatatctggctaatatttgtattttttgtagagtcggagctttaccatgttggtcaggctgctctccaactcctggcctcaagtgattctatcgcctctgcctcccaaatcttcacctgctgggattagtttcccctgtctcagtaaatttttttttcccaaactaagtgaacattagatttaatttggctggccccagaagaaaaacatgcacagatggtagttttactggtgttgcagtaagttttcaaatttggaagtttggcagctttatgatcttgaaccttgctgtccatctctcacacaactcctctcttggcctccagagtccctttactctcccagctttcctcctgcccctggctgctgtttcccagcctttccacattggctttcccatgtagtccttagtgtgtctgctcctcctctctctcctcatcacagttcccagcccccaccttcaactgaactcaacaaaatcttcaacttcatacagtagtcacattgttagtaataacactggcatttttattttgataaaatagaccgtttaaatttttgagattctaccttatattttttgaattatatactaaagcaaataagtagtgatgtaatgtcattggggaccaagatttttagtgtaaatgaaaaaagataacaaatataaactcaagtaaacaccctgtagtctttcacatgaattggaaatatcagaataaagtcatgatttttctctttctaaaaaaaaaa

SEQ ID NO: 58812 - DNA, 2363 bp, Homo sapiens
gtagctaggattacaggtgtgcaccacgacacctggctaatttttgtatttttagtagagacggggtttcatcatgttggccaggctgatctcgaactcccagtctcaagtgatgtgcccgcctcggcctcccaaagtgctgggattacaggtgtgagccatcatgcccagccaaaatggcatctgtgggaaaactagaattgcagaagttggaggtgtgccttacttattgcctcttgtaaaccaaaaaaaagtttatgatctgaataaaattgcaaaagaaatcaagctgcctggagcctttattcttggagcaggagcaggtccatttcagactctcgggttcaattctgagtttatgccagttattcagacagaaagtgaacacaagcctcctgtaaatggaagttactttgcccatgtgaaccctgcagatggagggtgcctactggagaaatacagtgagaaatgtcatgattttcagtgtgcattactggctaatctttttgccagtgaaggccaacctggcaaggtaattgaggtgaaagccaaaagaagaactggaccacttaactttgtgacttgtatgagagagaccctggaaaaacattatggaaataagcctataggaatgggaggtactttcataattcagaagggaaaagtgaagtctcacattatgcctgcagaattttcttcctgccccttgaactctgatgaagaagtgaataaatggttgcatttttatgaaatgaaagctcctttggtttgtctaccagtttttgtctccagagacccagggtttgatttgcgactggagcacactcatttttttagtcgtcatggagaaggtggacactaccattatgacactactccagatatagtggaatatcttggatacttcttacctgcagagtttctctatcgcattgatcaaccaaaagagacgcattcaattgggcgagattaaatcagctgatacttatttagaaaaaaataattaaggttaattaattgattgacttattaattaatactgatataaaaccaatagaaatgatcccacaggccaggcacaatggctcatgcctataatcccagcactttgggaggctgaggcaggaagcacactggagcccaggagtttgagaccagcttgggcaacatagcaagaccctgtctatttttttaaaaaagtaaaaaatagaaattatctcactacttaaatcccatttttttcacttcatatgaaagaacatattgatagtatattctatattatttcatagatctgtctgaaagagattgggaacaaaaatatctaattgagatattctttaattttttacatagcagctttattttttttattctgtagtatcagcgaaatcagtcatgtttataccttgaatataaatatcaggaatcatgcaattatttctactatgtatttagtagtatcttatatttgtataacattattacattttgcaaattagtatcacaactgctaagtagatgtttctgagtattagaaaaatcagtgttattacctgcaggatattaaaaaacatttgaaaaagagaaaaagaaaaatcagtgtttagaaatgttgatagttattgaatctttgaattgaattttaaaaatccattctagtaatcagagtatactttttttatagaacaaggtggcaggtggggagccctttacccttctggtgaagttaaaccatagaagtttacaatttgcctttcacaaacattagcagtccgggcatggtggctgaagcctgtgatcccagcatgttgggaggccgagtgggaggattgcctgagcctaggagtttaaaccagcctgggcaccatggtgagaccccatctctattatttaaaatgtttcttaaataaaaaaaacacaaacattagcaactagttggctagccataattcctcccttgtttcgattgccagttagaagcaatttttatttcactggttatttgcaagagaaggggtaaaaaaacagcatcagagtgcaacactgaagtgagcttactttaatttgtaagtgaagctgttgctgaacatgaccactatcgttgttgaatattaaaattatactccctgattgtaatggttgaaattttcctgaataatcattagccaaagatcaactctctaatggtgctaatggcaatctagctaatgtgcaaatttaggaagtcttcagtactaagtacataattttcaaataatattttttaattgtctactttggatgttagctatgtcttgtgagtataaattccaattttaagcactattttgatgcaaaaaaatgaataaaaaatttaattt

SEQ ID NO: 58813 - DNA, 2787 bp, Homo sapiens
cccacgcgtttttgacgcgcgcgatttaaaaccagctcaggagacgccaaggaaagatgggacctcccggcccagcactgccagccacaatgaataactcttcttcagagacgcgaggacacccccacagtgcctcctctccttcagagcgtgtgttcccgatgcccctgcccaggaaggcgcctgtcaatattcctggcaccccagtcctcgaagactttcctcagaatgaccatgagaaggagcggctgcagcggaggcgctcgagggtctttgatctgcagttcagcactgactcacctcgcttattggcctccccctccagcaggagtattgacatttcagctactatccccaagtttacaaacacgcagattacggaacattactccacctgtatcaaactgtccactgaaaataaaatcactaccaagaatgcttttggtttgcacttgattgattttatgtcagagattcttaaacagaaagacaccgaaccaaccaactttaaagtggctgcgggtactctggatgccagcaccaagatctatgctgtgcgcgtggatgccgtccatgccgatgtatacagagtccttggggggctgggcaaagatgcaccgtctttggaagaagtagaaggccatgttgctgatggaagtgctactgaaatgggaacaaccaaaaaggctgtaaagccaaagaagaagcacttacacagaactattgagcagaacataaacaacctcaatgtctccgaagcagatcggaagtgtgagattgatcccatgtttcagaagacagcagcctcatttgatgagtgcagcacagcaggggtgtttctgtccactctccactgccaggactacagaagtgaactgctgtttccctctgatgtccagactctctccacgggagaacctctcgagttgccagagttaggttgtgtagaaatgacagatttaaaagcgcccttgcagcagtgtgcagaagatcgccagatctgcccttccctggccgggttccagtttacacagtgggacagtgaaacacataatgagtctgtgtcggccctggtagacaagtttaagaagaatgaccaggtatttgacatcaatgctgaagttgacgagagtgactgtggagacttccccgatgggtccctgggggatgactttgatgccaacgatgaacctgaccacaccgcagttggggatcatgaagagttcaggagctggaaggagccctgccaggttcagagctgccaggaagaaatgatttcccttggggatggagacatcaggaccatgtgcccccttctgtctatgaaacctggagaatattcttatttcagtcctcggaccatgtcgatgtgggctggcccggatcactggcgctttaggcctcgacgcaaacaagatgctccttcccaatcagaaaacaaaaagaagagtacaaaaaaagattttgaaattgactttgaagatgatattgactttgatgtatattttagaaaaacaaaggctgctactattctgaccaagtccactttggagaaccagaattggagagctaccacccttcctacagatttcaactacaatgttgacactctggtccagcttcacctcaaaccaggcaccaggttacttaagatggcccagggccatagggtagagactgagcattatgaagaaattgaagactatgattacaacaaccctaacgacacctccaacttttgccctggattacaggctgctgacagtgatgatgaagatttggatgacttatttgtgggacctgttgggaactctgacctctcaccttatccttgccatccacctaagacagcacaacagaatggtgacactccagaagcccaaggattagacatcacaacatatggggagtcaaacttggtagctgagcctcagaaggtaaataaaattgaaattcactatgccaagactgccaaaaagatggacatgaagaaactgaagcagagcatgtggagtctgctgacagcgctctccggaaaggaggcagatgcagaggcaaaccacagggaagctggaaaagaagcggccctggcagaagtggctgacgagaagatgcttagcgggctcacgaaggacctgcagaggagcctgccccctgtcatggctcagaacctctccatacctctggcttttgcctgtctcctacatttagccaatgaaaagaatctaaaactggaaggaacagaggacctctctgatgttcttgtgaggcaaggagattgagttcactatggagaagtcagcagcaggaggcccatcccttactcagttgccgggacatccccagtctcgggggaagaagatgccatgggcttatacccaggctgtagcccaactaccaacgtgcctgtttgtttgttgctctttccttctctccatcatagtctgggtgccagcgccctgaagctccgtgctcaactgattaaactttactgccctatggtgaccatctaggagaggggagggcagagggggtgagggtactattctggattgagaaaacctatatccattctttatatcaatgtatagttttagtctcctaaattgatctgttattttccaaactattctcttgtagaaaattttccagtgggcacttaatggtgcccttgaagaacttcctaatccatgtacataaaatacatcatatgtacacttataaatgtatatagaatgctcaaaaataaaattcttaataatagaactggcaaaataaaaaaaaaaa

SEQ ID NO: 58814 - DNA, 739 bp, Homo sapiens
ttatcggctgcttctcccacaggatgcgggcagggggcctctctcccactccccacacagggatttctgagtagcgacaggggctggaggcttattttatggggtagggggccgctggtaggcgaagattgcccgagggagagggggaggatgaagccagtgcgtggcggagacttgccagatgttgatgcctaagaagaaccggattgccatttatgaactcctttttaaggagggagtcatggtggccaagaaggatgtccacatgcctaagcacccggagctggcagacaagaatgtgcccaaccttcatgtcatgaaggccatgcagtctctcaagtcccgaggctacgtgaaggaacagtttgcctggagacatttctactggtaccttaccaatgagggtatccagtatctccgtgattaccttcatctgcccccggagattgtgcctgccaccctacgccgtagccgtccagagactggcaggcctcggcctaaaggtctggagggtgagcgacctgcgagactcacaagaggggaagctgacagagatacctacagacggagtgctgtgccacctggtgccgacaagaaagccgaggctggggctgggtcagcaaccgaattccagtttagaggcggatttggtcgtggacgtggtcagccacctcagtaaaattggagaggattcttttgcattgaataaacttacagccaaaaaaccttaaaaaaaaaa

SEQ ID NO: 58815 - DNA, 1169 bp, Homo sapiens
gttgggtccatttttattgtggatcagggcttagaggataagcaccggtcagcattgttggctgcaccatctgccatccttctctgtgagccacctctgtgagagagtctaaattcagcccaagaaatgaggatcaagaaggggtaaaaagccgtggaccacatggccactcctgctgtatctacacctaccagtcactgaacacctgcccaagtgtgatggcttccatgcaggagacccaagtggctctgctagggagaatgacttatttacctaaggcttttttatttctcaaaagtggggggaaaaagggctggtttctagaaacagatgtggaattgaagaatgtcccagggagctaagttttaaggactaatcacaaacttgtttctccaacaacatcctgaatccattccttgcaccatcacacatttttcatgcatcagaagtgtttctagagctccagaaccacgagtacctcatcacgtcctgagcgctcacatcccccagcaagccgcctgcaccaggcctttctctagaagtcctgagactgagtactctccagaggctggaggttcgtgcggagtttgtacatgtggttgagcgcttgtgtgaggaaagtcccgctggtgttgatctccatcaaggtcaagttatccagcttggcatgtgcctcctgctgtctcacaaagctgtcagcagacactcggagtttggctatacgagtgtcccacatatccttgaccagggtccggatttcgtctgccttcgggatgttgtctgaagcatgatttaacaggagcttcgtaagttccatgtagtaagggctgggcattggggtaaaagtttcttcctttcgttcatgatccctcatcttctccaacttttctacatccatccactctggagggagcaggcgacatttctgtctttgtttcaggttaatcgccagccacaggggcacttccacgggtaaaccagggttaaaaggccccaggtcccccccgatgaggtagatcttgtccagactgaagttggggataatggtaaccagctccttctcggcgaggaattcgacctcggcagcgtccatggcggcgcgagctgcaggccagagcctcacggtctcctcgggcccctcagcgtcccggaggagacgccgcggccgc

SEQ ID NO: 58816 - DNA, 2098 bp, Homo sapiens
aggatgtcttctggcaatttcatataagtattttttcaaaaatgtctcttctgtcaaccccacacgcctttggcacaatgaagtgggtaacctttatttcccttctttttctctttagctcggcttattccaggggtgtgtttcgtcgagatgcacacaagagtgaggttgctcatcggtttaaagatttgggagaagaaaatttcaaagccttggtgttgattgcctttgctcagtatcttcagcagtgtccatttgaagatcatgtaaaattagtgaatgaagtaactgaatttgcaaaaacatgtgttgctgatgagtcagctgaaaattgtgacaaatcacttcataccctttttggagacaaattatgcacagttgcaactcttcgtgaaacctatggtgaaatggctgactgctgtgcaaaacaagaacctgagagaaatgaatgcttcttgcaacacaaagatgacaacccaaacctcccccgattggtgagaccagaggttgatgtgatgtgcactgcttttcatgacaatgaagagacatttttgaaaaaatacttatatgaaattgccagaagacatccttacttttatgccccggaactccttttctttgctaaaaggtataaagctgcttttacagaatgttgccaagctgctgataaagctgcctgcctgttgccaaagctcgatgaacttcgggatgaagggaaggcttcgtctgccaaacagagactcaagtgtgccagtctccaaaaatttggagaaagagctttcaaagcatgggcagtagctcgcctgagccagagatttcccaaagctgagtttgcagaagtttccaagttagtgacagatcttaccaaagtccacacggaatgctgccatggagatctgcttgaatgtgctgatgacagggcggaccttgccaagtatatctgtgaaaatcaagattcgatctccagtaaactgaaggaatgctgtgaaaaacctctgttggaaaaatcccactgcattgccgaagtggaaaatgatgagatgcctgctgacttgccttcattagctgctgattttgttgaaagtaaggatgtttgcaaaaactatgctgaggcaaaggatgtcttcctgggcatgtttttgtatgaatatgcaagaaggcatcctgattactctgtcgtgctgctgctgagacttgccaagacatatgaaaccactctagagaagtgctgtgccgctgcagatcctcatgaatgctatgccaaagtgttcgatgaatttaaacctcttgtggaagagcctcagaatttaatcaaacaaaattgtgagctttttgagcagcttggagagtacaaattccagaatgcgctattagttcgttacaccaagaaagtaccccaagtgtcaactccaactcttgtagaggtctcaagaaacctaggaaaagtgggcagcaaatgttgtaaacatcctgaagcaaaaagaatgccctgtgcagaagactatctatccgtggtcctgaaccagttatgtgtgttgcatgagaaaacgccagtaagtgacagagtcaccaaatgctgcacagaatccttggtgaacaggcgaccatgcttttcagctctggaagtcgatgaaacatacgttcccaaagagtttaatgctgaaacattcaccttccatgcagatatatgcacactttctgagaaggagagacaaatcaagaaacaaactgcacttgttgagcttgtgaaacacaagcccaaggcaacaaaagagcaactgaaagctgttatggatgatttcgcagcttttgtagagaagtgctgcaaggctgacgataaggagacctgctttgccgaggagggtaaaaaacttgttgctgcaagtcaagctgccttaggcttataacatcacatttaaaagcatctcagcctaccatgagaataagagaaagaaaatgaagatcaaaagcttattcatctgtttttctttttcgttggtgtaaagccaacaccctgtctaaaaaacataaatttctttaatcattttgcctcttttctctgtgcttcaattaataaaaaatggaaagaaaaaaaaaa

SEQ ID NO: 58817 - DNA, 2951 bp, Homo sapiens
tgactaaggtcacaaggctagtgagtggtagaaccaagtctcttgcccatttcctaggtcttttatattacatcatgctactttctctaagtggtagtggtcgtcaagagtttgaaggtgacctaaagcctgacttgagcaacgtagttgtcagatatttgccaaatctagtataatgaggggccatggagtctagtgttacacaggagaacctgaaatagcaaggactgattacaatagataaaactatcaccagggcatttcctgatactctggaaaactgaaaaagaaacactgctgctaaaacgcactcactgtgaataacaataatattttttagaaaagtaagtggcaagtgggggtcgcgcctggagcggagcctcggcctccggagccgcagctgcagccctgtattgagctgagatggctcgagcctaacattccatgatccaggatcgtgacagatgtgcacaggctgctgctgttgctgctgtgggtaatttggaaccacgaggcaccccagggccagaagacgaggcattctgtctgcctggatgtgtgggaactctctgccaacttgattggtggatctggggggggatccacccccaccccacgaggaaagcacagtttattttgtgggtggggcttcaggtgccagccagctgaaggatggccacccctgtggtcaccaagacagcctggaagttgcaagagatcgtcgcgcatgccagcaacgtgtcctcactggtgctgggcaaagcctccgggcggctgctggctacaggcggggatgactgccgcgtcaacctgtggtccatcaacaagcccaactgcatcatgagcctgacgggccacacatccccagtggagagcgtccgcctcaacacccccgaggagctcatcgtggccggctctcagtcgggctccatccgtgtctgggacctggaagctgccaaaattcttcgcacactcatgggacacaaagccaacatctgcagcctggatttccacccgtacggcgagtttgtagcctctggttcccaggacacaaacatcaagctctgggacatcaggaggaaaggctgtgtcttccgatacagggggcacagccaggccgtgcggtgtctccggttcagccccgatgggaagtggttggcgtcggccgcagatgaccacaccgtgaagctctgggatctcactgccggcaagatgatgtctgagttccctggtcacacggggcctgtcaacgtggtcgagtttcaccccaacgagtacctcctggcctccggcagctctgacaggacaatccgcttctgggacctggagaagttccaggtggtgagctgcatcgaaggggagcctgggcccgtcaggagcgtcctcttcaacccagacggctgctgcctgtacagcggctgccaggactcactgcgtgtctacggctgggaacctgagcggtgctttgatgtggtcctcgtcaactggggcaaggtggccgacctggccatctgcaatgaccagttgataggtgtggccttctcccagagcaacgtctcctcctacgtggtggatctgacgcgtgtcaccaggactggcacggtggcccgggaccctgtgcaggaccaccggcccctggcacagccactgcccaaccccagcgcccccctccggcgcatctatgagcggcccagcacaacctgcagcaagcctcagagggtgaagcagaactcagagagcgagcgccgcagccccagcagcgaggatgaccgggacgagcgcgagtcccgcgcggagatccagaacgccgaggactacaacgagatcttccagcccaagaacagcatcagtcggacgccaccccggagaagtgagcccttccctgcacccccagaggacgacgcagccacagcaaaggaggcagcaaagcccagccctgccatggatgtgcagttcccggtgccaaatctggaggtcctgccccggcccccagtggttgcttccacacctgcacccaaggctgagcctgccatcatccctgccacccggaacgagcccatcgggctgaaggcctccgacttcctgcccgccgtgaagatcccccagcaggccgagctggtggacgaggatgccatgtcacagatccgcaaaggccacgacaccatgtgtgtggtgctcaccagccgccacaagaacctggacactgtgcgggctgtgtggaccatgggcgacatcaagacgtcggtggactccgctgtggccatcaacgacctgtcggtggtggtggacctcctgaacatcgtcaaccagaaagcctccctgtggaagctggacctgtgcaccaccgtcctgccacagattgagaagcttctgcagagcaagtatgagagctacgtccagacgggctgcacctccctgaagctgatcctgcagcggtttctgcccctcatcacagacatgctggcggccccaccctctgtgggtgtggatatcagcagggaggagaggctgcataagtgccggctctgctacaagcagcttaagagcatcagcggcctggtcaagagcaagtcaggcctgagcggccgccatggcagtaccttccgcgagctgcacctgctcatggccagtctggactgaggaaagcagtgggcaggggcgctcggcagcccacagggcctggcctcagcccccactcctgttccttgtgcacccactggcccatgagcctctgcctggcccctgctgctgtcctgtggccgtcctggaggaggtgatgctggtccctggccacctctacagccctgaactcttgagacaactctctccagcaatagctgcccagctttgcccaactgttgcttcttggggcagcgaactgagccctggggctgctgctgtaatttataaggcaaattttattaaatttgtaactattcccaaaaaaaaaa

SEQ ID NO: 58818 - DNA, 1623 bp, Homo sapiens
ggcacgagccgagtcgttggcgctgtcatggcgggtgtgctgaagaagaccactggccttgtgggattggctgtgtgcaatactcctcacgagaggctaagaatattgtacacaaagattcttgatgttcttgaggaaatccctaaaaatgcagcatatagaaagtatacagaacagattacaaatgagaagctggctatggttaaagcggaaccagatgttaaaaaattagaagaccaacttcaaggcggtcaattagaagaggtgattcttcaggctgaacatgaactaaatctggcaagaaaaatgagggaatggaaactatgggagccattagtggaagagcctcctgccgatcagtggaaatggccaatataattattaagtgactttggtgtgttcatgggaaactgatgtaattaaatattctgttatattaagagcgtgttcttattactgacattttgtaatcaagaaaagtgatatagaaaatatgtaggagactgttaaaattggtgattatggtaatatggtcatgtgaatcaatttttgatttataaagtactcacacaagttgtttcaaagatgatatttctgtgaacagagaggccatgggaagatttgaaaattattaaagaaaaattcctacagattttcaatgcagagaccataatcaaaaagtaaactttctttagtagtatgttcaatacatcatttaattttttaagttatcctgaagaaggaaaggtccttaattattatagtctaaacaaatttatagattactgtttgaagtaaataatacgagtgaatattttcaaatgtgataaaatagcacaagtggctggtgataaaatttgaaattatggttaacctcagctgtgatcttatgtatgtaaagtgaaatttaaatagataattataggttgattacaaaatccatagtgtcattttattttagtcattattgaattataccatttactctgttttcttatagtcttaattttattatattttgttgttactgtattatatttgaaaaccttcaaattagaatacattgtacagttaaagaaattgacttggtacttaaaagaaagatttcccattgcatacaggttattggagaaattttccttttgttgcatttgtggaagttagttttctggcccgtggcctttaattttcttaatcaacctaattacatcaggatagaggtagagtttctgtaaaagaagagacattaagagttcctgaaatttatatctggcatacggataggcttatattcaaaacatcttagtcatacgaccataaattaaaagtggagtcactaaatagtttgcagtacgtttctaatataagtgtaggtgggtatcaaaacaagacaaatgctgttcagggaaagaagttggcaagcttaaggttaaacaaaaataaaattacatgtgttttcgcaaaaaaaaaaaaaaggggcggccgttttaaaggatccttgggggggccaaatttaacgcgggcaggcaaggaaatatttttttccttatggggagccgaattataacctacctggggatttttgaaagggacccttacttgtggggggagacataatggaaa

SEQ ID NO: 58819 - DNA, 2023 bp, Homo sapiens
gtacgaccgtctcctggctgccgtcacttccggttctctgtcagtcgcgagcgaacgaccaagagggtgttcgactgctagagccgagcgaagcgatgcctaaatcaaaggaacttgtttcttcaagctcttctggcagtgattctgacagtgaggttgacaaaaagttaaagaggaaaaagcaagttgctccagaaaaacctgtaaagaaacaaaagacaggtgagacttcgagagccctgtcatcttctaaacagagcagcagcagcagagatgataacatgtttcagattgggaaaatgaggtacgttagtgttcgcgattttaaaggcaaagtgctaattgatattagagaatattggatggatcctgaaggtgaaatgaaaccaggaagaaaaggtatttctttaaatccagaacaatggagccagctgaaggaacagatttctgacattgatgatgcagtaagaaaactgtaaaattcgagccatataaataaaacctgtactgttctagttgttttaatctgtctttttacattggcttttgttttctaaatgttctccaagctattgtatgtttggattgcagaagaatttgtaagatgaatacttttttttaatgtgcattattaaaaatattgagtgaagctaattgtcaactttattaaggattactttgtctgcccaccacctagtgtaaaataaaatcaagtaatacaatcttaactgttgtggccttttttgatcataagagttggtactgtttaaggccaaaagtaacagtttttatagatcttttagtttcaactcagcttttacaataaaaaggatttgtattgcattgagtttataaacttttggtttgtgaacttcatatttgatcttttctcttccaatcaaatgtctaggcttgtttgacttccacccccaatggtttttcactctttttatttacttcattttcctttaataacttaatctcttcatgttcagtttttacttcactctttattcttttctttgattatggtatgcttatttggaaagtcagtgaaactgtcaaaatgttatctcaataagatacttatatgagaactacaatcaccgaatctactgtattcaatattagcagatctaatttgataaacaacatggcttgtgtgaaaactgagcaggtgtttgtttacccatagtgttctgtgtagttattgcttagtctgcagaaaataatgacttagatgagatgtctgacttgctttcacttattaaacatgttcaccatgggatgatgtctgtaacatcagatattgttcaactagactaggatttaataaaaattgtgaaagcttactggcctaacattttattttataatattgggtatgaattatatgtatccagagatgtcattaagctttactgttatagtaggtaatatggttagtttgtagggaaaagagcatatgagcacatgcttgtgtattttggcctttgccccatgagaacagaccaatggcattctagacttgatgatactaagttttagcagacactactggggggtttgtatttaaccatactgatgaagcagacagattgaggcacagattttagtggctttgtggcaataaatagggcatggtgtgccttaggaaaagaatgtttataaagggaattataactgaaattaaaggaggcggcagtgaagaggaaataattctcttctatctaaatgatatacatatgatattttgagatttttataacagcaggggaacacaattctaggtagagtagaaaaaggaaagttttaaagacatataaaagattcttgttgacaaattatttttggtagcaaatctcaaatggttacctgctattaaggtctgccatattagagttttgcactattttgctaccaagtttgattcatacatctaaaacattttgtagttacttgtcaaggacttaatttgaaaatcatttgccaggccacatagttatcaatttttttttctatg

SEQ ID NO: 58820 - DNA, 2226 bp, Homo sapiens
  misc_feature (1)...(2226): n = a,t,c or g
cgataatggcggatatggaggatctcttcgggagcgacgccgacagcgaagctgagcgtaaagattctgattctggatctgactcagattctgatcaagagaatgctgcctctggcagtaatgcctctggaagtgaaagtgatcaggatgaaagaggtgattcaggacaaccaagtaataaggaactgtttggagatgacagtgaggacgagggagcttcacatcatagtggtagtgataatcactctgaaagatcagacaatagatcagaagcttctgagcgttctgaccatgaggacaatgacccctcagatgtagatcagcacagtggatcagaagcccctaatgatgatgaagacgaaggtcatagatcggatggagggagccatcattcagaagcagaaggttctgaaaaagcacattcagatgatgaaaaatggggcagagaagataaaagtgaccagtcagatgatgaaaagatacaaaattctgatgatgaggagagggcacaaggatctgatgaagataagctgcagaattctgacgatgatgagaaaatgcagaacacagatgatgaggagaggcctcagctttccgatgatgagagacaacagctatctgaggaggaaaaggctaattctgatgatgaacggccggtagcttctgataatgatgatgagaaacagaattctgatgatgaagaacaaccacagctgtctgatgaagagaaaatgcaaaattctgatgatgaaaggccacaggcctcagatgaagaacacaggcattcagatgatgaagaggaacaggatcataaatcagaatctgcaagaggcagtgatagtgaagatgaagttttacgaatgaaacgcaagaatgcgattgcatctgattcagaagcggatagtgacactgaggtgccaaaagataatagtggaaccatggatttatttggaggtgcagatgatatctcttcagggagtgatggagaagacaaaccacctactccaggacagcctgttgatgaaaatggattgcctcaggatcaacaggaagaggagccaattcctgagaccagaatagaagtagaaatacccaaagtaaacactgatttaggaaacgacttatattttgttaaactgcccaactttctcagtgtagagcccagaccttttgatcctcagtattatgaagatgaatttgaagatgaagaaatgctggatgaagaaggtagaaccaggttaaaattaaaggtagaaaatactataagatggaggatacgccgagatgaagaaggaaatgaaattaaagaaagcaatgctcggatagtcaagtggtcagatggaagcatgtccctgcatttaggcaatgaagtgtttgatgtgtacaaagccccactgcagggcgaccacaatcatctttttataagacaaggtactggtctacagggacaagcagtctttaaaacgaaactcaccttcagacctcactctacggacagtgccacacatagaaagatgactctgtcacttgcagataggtgttcaaagacacagaagattagaatcttgccaatggctggtcgtgatcctgaatgccaacgcacagaaatgattaagaaagaagaagaacgtttgagggcttccatacgtagggaatctcagcagcgccgaatgagagagaaacagcaccagcgggggctgagcgccagttacctggaacctgatcgatacgatgaggaggaggaaggcgaggagtccatcagcttggctgccattaaaaaccgatataaagggggcattcgagaggaacgagccagaatctattcatcagacagtgatgagggatcagaagaagataaagctcaaagattactcaaagcaaagaaacttaccagtgatgaggtaagaccaaatttattcaattctaggggtttatcctgtactcaggagccaactgctttgaatgaagagctcacagatcaggcaggcacaaattagttgtctacacacgtcactgaaatccagtgagataaatgcagtaacaagacagagtgatccagaggaggatctgatacctgtgcttagagaggtcttagaaggctgcatggaggataagacttcttgctgggtgttgaagagtgatcanaagcttgctggtcaaactgtcctgtctctggtaggtcactccggatagatggaaaggcctggaagaaaaggtgcaggtccc

SEQ ID NO: 58821 - DNA, 1255 bp, Homo sapiens
tacggctgcgagaagacgacagaaggggacatttcctaatcaagaagttggcgtgcagctgggagagctagactaagttggtcatgatgcagaagctactcaaatgcagtcggcttgtcctggctcttgccctcatcctggttctggaatcctcagttcaaggttatcctacgcagagagccaggtaccaatgggtgcgctgcaatccagacagtaattctgcaaactgccttgaagaaaaaggaccaatgttcgaactacttccaggtgaatccaacaagatcccccgtctgaggactgacctttttccaaagacgagaatccaggacttgaatcgtatcttcccactttctgaggactactctggatcaggcttcggctccggctccggctctggatcaggatctgggagtggcttcctaacggaaatggaacaggattaccaactagtagacgaaagtgatgctttccatgacaaccttaggtctcttgacaggaatctgccctcagacagccaggacttgggtcaacatggattagaagaggattttatgttataaaagaggattttcccaccttgacaccaggcaatgtagttagcatattttatgtaccatggttatatgattaatcttgggacaaagaattttatagaaatttttaaacatctgaaaaagaagcttaagttttatcatccttttttttctcatgaattcttaaaggattatgctttaatgctgttatctatcttattgttcttgaaaatacctgcattttttggtatcatgttcaaccaacatcattatgaaattaattagattcccatggccataaaatggctttaaagaatatatatatatttttaaagtagcttgagaagcaaattggcaggtaatatttcatacctaaattaagactctgacttggattgtgaattataatgatatgccccttttcttataaaaacaaaaaaaaaaataatgaaacacagtgaatttgtagagtgggggtatttgacatattttacagggtggagtgtactatatactattacctttgaatgtgtttgcagagctagtggatgtgtttgtctacaagtatgattgctgttacataacaccccaaattaactcccaaattaaaacacagttgtgctgtcaatacctcatactgctttacctttttttcctggatatctgtgtattttcaaatgttactatatattaaagcagaaatataaccaagaaaaaaaaaa

SEQ ID NO: 58822 - DNA, 2448 bp, Homo sapiens
tacgccaagcttggcacgaagtgcactgcgcttgcgcgggttgagggcggtggctcaggctcctggaaaggaccgtccacccctccgcgctggcggtgtggacgcggaactcagcggagaaacgcgattgagaaatggaaaagaaaatgaaataaatcagcagttatgaggcagagcctaagagaactatggcaacatcaggtgactgtcccagaagtgaatcgcagggagaagagcctgctgagtgcagtgaggcgggtctcctgcaggagggagtacagccagaggagtttgtggccatcgcggactacgctgccaccgatgagacccagctcagttttttgagaggagaaaaaattcttatcctgagacaaaccactgcagattggtggtggggtgagcgtgcgggctgctgtgggtacattccggcaaaccatgtggggaagcacgtggatgagtacgaccccgaggacacgtggcaggatgaagagtacttcggcagctatggaactctgaaactccacttggagatgttggcagaccagccacgaacaactaaataccacagtgtcatcctgcagaataaagaatccctgacggataaagtcatcctggacgtgggctgtgggactgggatcatcagtctcttctgtgcacactatgcgcggcctagagcggtgtacgcggtggaggccagtgagatggcacagcacacggggcagctggtcctgcagaacggctttgctgacatcatcaccgtgtaccagcagaaggtggaggatgtggtgctgcccgagaaggtggacgtgctggtgtctgagtggatggggacctgcctgctgtttgagttcatgatcgagtccatcctgtatgcccgggatgcctggctgaaggaggacggggtcatttggcccaccatggctgcgttgcaccttgtgccctgcagtgctgataaggattatcgtagcaaggtgctcttctgggacaacgcgtacgagttcaacctcagcgctctgaaatctttagcagttaaggagtttttttcaaagcccaagtataaccacattttgaaaccagaagactgtctctctgaaccgtgcactatattgcagttggacatgagaaccgtgcaaatttctgatctagagaccctgaggggcgagctgcgcttcgacatcaggaaggcggggaccctgcacggcttcacggcctggtttagcgtccacttccagagcctgcaggaggggcagccgccgcaggtgctcagcaccgggcccttccaccccaccacacactggaagcagacgctgttcatgatggacgacccagtccctgtccatacaggagacgtggtcacgggttcagttgtgttgcagagaaacccagtgtggagaaggcacatgtctgtggctctgagctgggctgtcacttccagacaagaccccacatctcaaaaagttggagaaaaagtcttccccatctggagatgacagttgatgctttatttggaaagcagtgtgcatatcttgaggggtgatgaacacaagcaaaccaagttgcacctggcttctgcacactcctgcgaaagtcggtgaacattcactccacattgacccctccctagcctggcaggtgacgtcagggtccttcacagacaaacacgcttgggctcggcaggagctgccgtggccacccccgctgcccagtgtctgccctctagaagtaggctgtgtttccaggtgttcacccgtggtgcccacagtgccgacccgtggctgggtcggagctccatgttcctaagctaggtctaggtctacactcctaggacgcacgcatatcagcccgtgtaccctgtgacagtgactgtccccacctcctatgttagtggtgcccttactgccgtcgctcatccactcgtgtgggacgtaggattgcacagggctgtgccagtggcgtgtagggaacactgccctggctcagcgtgcgagctaaggtggcgatgtatgcgatgggactctgcatgggatagtacagttgtgtagacgtcttccaaataaattatgtgttggtccatcgcacatgctcaataaatatttttaaatgagtgaatgtcattgtgtatcctgttttatgcatatatgttattttttgtaattacaggatcatactatatgcattgctttataagtttttctcaatattgtgaaaaaacttccacatcagtagatacatgtccataatttttttttgtattgttttgatttttattaaattttattgaaatataggctgggtgcagtggcttacctctgtaatcccaacactttgagaggctgaggtgggatgattccttgagctcaggagttcaagaccaccctgggcaacacagcgagatactatctctacaaaaaaaatagaaaaattagctgggcatggtggcgtgtgcct

SEQ ID NO: 58823 - DNA, 3885 bp, Homo sapiens
cttttttttttttttcaaccctgcttccttcctgctaggaggtgccatgtcatttattcaaagaaaacaaaacgaaaccaaacaaaacagggcaaacacatttcttaataagtgcagtttgttaaaatcatgttaaaacatatgagtcaaggggaagtaaaaataaagggtatcactgtaggaaaagcttttgggtctggcacctgggagacccactggagaggaggcagtgggagaaacttcaagttctgaagggaaggagccccccaacctccccttcttccctctcacccactgaatcccaccagaaactaccaagacgcccggaataaaaggtttcaagttcaatagtcactctctccaaatacaaaaagcagttacaattcaactgaacacagaagcttgtgtgcaaagttatggggaactggggcatcgtataaaaagttgggttaaagatgattctgtggtttggttttgttgtgttttgttttgtggctcttcctcagtcacctgaactcaggaaagaaatgcttatcttgatgaaatatcaacagcccacccacagtaaaaagacaaattctaaaaattaaaaaaaagcgcataattaccaaaaaaaagtcactgcttcctccccctccccattttgctttttaaacttttttttttttaagttttgattttttttttaatcctgaaaagtagacagtaaaacagctcctgggagaatttacaaccaactgcatgagggtctgggaagctgaggggctggagcagggttgggagagtgaacaggaggggattctcccctcagtcactgtagcctcactgtatgatcaagggaggtggggattatttagtcaaaaaggaagaaggtaggaagaacaggaggtggaaggctggggaggtggggacaaacagaaaataaaaggtcattgttgcctgtttgaatccagaaaaaaatgcctggccctatggaggggaaggaagcccctcagaggggaggcagtgggctggagggaggcagccctgggatgaccccatccccagcaccacgggatctggcgggggcagaggaggggccgaggcaggcgctggtggaggaagccggcaggggcctccgggagcctctgggtcacactggctactgtgtacttgtgccaccctgtgtgttcccggagtagctcccgtagtcgtagttcccgtagtatggcggccactggccctggttctgatagtactggttccactgctgggcatactgctgatactggttatagctgggctgagggtaggtctgtgcggtggggggtggcggtggggtatagggggccgggttgtaaccgccgtagctcccatagttgtaggcaggtggtggtggaggtggaggcggtggggctgtgtagccctggctgtaacctccctggttgtagggtggctggctgtaactcggctgtggagggctgtagctgctgacggtgggggtgctggtattggcgcttgagccagggatgttgctgttcttattgtaggtgctggcccctggggggttccgagcagggctgtagctgggtggtggcggtggctgctggggtggtggctgtggtggcggaggctgctgtggtggcggctgttgctggggagcccggttgtagctgcctctgttgttggagttgttgttatcccggttgttgttaccccagcggttctggctatagccaccacctccgctgcggttgaaacctcctcggtagttgcctcctccaccgctgcctccccctcggttctggaagccgccacggttgcctccagggggtcctcggttttcatagcgctggaagccaccaccacccccgcggccccggaagccaccaccacctcggttgtcaaagcgcttttcagggggtggcccagccttgcggccttcctcgttgtactgcctcactagcttgtccgcttcctcccgctgcagctcaatgaacagaacctcatccaggaagtccccaacatctggcaacgtgaagttggctttcatttctaagaccgcatgatctgggacatccttcccttcctcgtcggttcgctttattgttcggtcttttaggtcctcgtcagtgggacaaattacaatagctttgcgctggaagccttcaaatggtctcatttttcgtctctgggctgacccataaacatttgtctgatctaggatatagttgcgtttcttgcgggcagcaatctggatgaggcggttgaggcactgggtggcctgctggatcaggacatcccagcggccagcatagttccgctgccggcgtaggcccatcacccgcatcttatccatgatggcattggtacccaggatgttgtacttcttggaagggttggaggctgcatgtttgatggcccatgtggtcttgccagcagcaggcaggcccaccatcatcagaatctcacattctgccttgctctttggtccaacggtgccccggatacgctcactaaggggaaggtgctggatgaaggtaaaccccgggaggacagaacagtagggctctgctctctgtccgaagttgaactccactgcgcaattcttcaccaggacatgaggatagagggcctgaccccccaaggcttccttctggattcggaaagcaatgcccatccactttccattcttggtaaaagacagttccacgtcatttccacattcaaaatccgcaaagcagccaatcacatcgttctctgcaaacttgtctccgtagttttcaaaccggctattggtggacttcttcccagtgcctccatagccataggagaaaggctcttcgcctagctgggtgctgcaggagtccagggaccagccgatacggaccacgtgggggtcaggctctgtagacggaaggtgcttcacggagatttcctcattgatcttcatctcgaagcatacacggcccctcctgaccccatagctggcacgggctcctgaccacaggtatgcaaagccctcaattgtgagcggatagccactactccgatctcgggccaccttgaagtggaggtcgcagttataggtgtcaatagcaacaagggtatcatcaaagtcatcttcatcctcttcagcaggaggctgaggagagcggcccctcctatcctctcggtgctcaaagtacccccgtccccggttttcttcataaggcctctttcgactctggaattgctgcctgtctggcttgagttgagaagcttcaggcgggaggaagctggtgggtgctccttgcttcatctctgtcttcatttctggacgataggcctgctgctgctccatttccagtggtctcctctcgtagcctgactcgttttcttgtttgatgacttgggtatcgtagaattggttctgcctggtaatattgtccatggcataatgtccgtccggccccgagtagccgccgggctccgcgtgcggctgcagcccgggcggcggtggctgcgcggtcccctccagctcggagcccccctcggtctcgacctcctcgttgatgtgcccgggtcgccccggttcgtcgtcggcgtcgagctcccgctcgtcgtcaggctcctcggcctccaacgccgcctgcagccgctcagcaagctcggtcttgaggcctcgagtgtccaggccgcggcgctgcagctcctcgcgaagttcgttcaccttcagacggcgcacatccatggcccgggcccccggggtggcccccgagcccggcccggcctcccagggctctgtcccccttaaacctttcctgtcaggaggcgaagggggaaagggggggggcccactccaatggcggcagcggctcaaaatggccgccgccaccgcctcccccctcactcgtgcctcgtccg

SEQ ID NO: 58824 - DNA, 1746 bp, Homo sapiens
  misc_feature (1)...(1746): n = a,t,c or g
ttttttttttttcaaaaggaaatcccaatctttttattacggaaagccatcaactgggtgtggggagtatgtcagagggttagtgaaagtccaggggatttctcctccaagtcctaccacacaaaggaaagtctcaagcctctattcaccccttctcaatccccacaaaatagggggttgttcaatattgtcttcaatgataaaaactttgtggttaaaggtttctccttaggactagcgacaaagttaggcttatacttttaatgaagaccataaacgaagccagaagggcttaaggaagcaagagtccttgggggaaaattcttagcgttctataccccagcatcttaccttagggttaaatctaggtctaaccaagctgtgcaggtcaactaagaaggaatgatgaaaccacagagtttcatggagaaaccatggagatgtctgaatagctgataagcagttaacacactgacccaagcttggagggaaaccatttccccctccgtcctatgagatctctttcttgctccagtgaaacagttggccacagcatggcaggccttcctgtagggtgcctgacaattccctagatgcctctttaaaatcagaagctgcatgctgccccacccagtcacagccaaagggaaaacataaataaaaggctgcagcctcaggcttgtggttatggaaagagcctggaattgacaggagaggaagcactgccaaagtgaggatcttatttatccttcttgttttccccatctgacactgtggtgggggttgaagccacaggctgctcctcagggatattgtctccagcctttgatagtttcttggcccgctggtatagctcatttaagttaaattctcggatcacattctcctcagagaaggtccatgagacagcccgtcctttcttgtcaatctgtggccgccgcattgcctccttgccaccttggaacaggatcagggtagggagttgcttggtgaggggtgatgtgctcactttgtaccgcgtactaacatcagtatagcgtccaacatccaccttcccaaaatttagccctgtacagttgtatttaagggagaggtcagcatagataggggcaaatgattggcagtcattagaccaattggcaaagaactccacaatccaagtgaccctcttgtcccgttctagttcctcatcaatggttttatcattgaagtacttgatatactcagggcccatatatagggggggtttgcacgtcatcaggaacactatgcagagtgtgatgtaaagtaggcccatgcgaatatccaagcggaagaaaagaattgtgttggccactttactaaacatgaaaatgttgcctatatgttgctccacagtgatggatctgcggttcttcatcatcacaatggcactgagaaacatcaggatctccacttctctccagtcaaagtcacacgggttaccgtcttcgcgttgggtgggcagaccgtggcagagcggcggcagtttcctcacgagtaggaaggcagcagagagcagggccgacagaaggtagtaaggttgggcgagccatcgtgaaagtcgcggcaccgaatacacgagagcaattagaggtgccaagaccgccatcttttcggccgtaacggccactgctcgccggcgtcgtaggtctcgccccgccctcgtgccgagttggcgangataatcagtggggnctcagttgnaaaanccactgggcctgccct

SEQ ID NO: 58825 - DNA, 2051 bp, Homo sapiens
ttttttttttttaaaaaagggtcctatgtggaaatgagtgggacaatgataaaaataaacaaataattaaaattccaaatcaaaacataactcctggccctgagatccccagttaatcctctaagaccacaatctccacattgtgaacttgatgctggtgttcttccatctcagccacaactttctcctcagtcctcagctctgtctccaagatgactgctttgccctcagtatcttcagcttctgggtccggggctggatcaatctcaatgatggtctgcccatcctctgaggtgctttcaacagcctgaattgccgaggttaggccggactccatggccaccaattccacagggctaaccatggtggtcatgttgcccagtgtactcccatcctgcatggcagtagagctcagcagcgccaagctagatgaagggtggatggtcactgtgtctggtgagctgctcttggcagaggagaccactgtggcatagcggaagagctgagggccagaaggcagtgtgtggacagtcacaggactggagccctggctgagggtggccactggaatattgcccatggaaaatgactgacccactggggtgatggtgatgggtgagatgactgtgaactgaggctgctggacaggaggagaagggctcaagacagtggtggaggctggccgctggagccggggcctttttggaggcttaggagtgctcacaggcatcagtaccacattttgaactgtctgagatttcagcctgtgatcctggccttgcttcttctgctcctccaactggcgttccaagtctgtcagagtatagagaaactgttcttctccctgctctacttggttccttctgttgtctaaaaccttcttgactgtgtccattacgccaaatgtgtgtgctacattgttgagaacagcagcatctgtgacttggaagggagcctggatgagccgctgctgaactcccctgagtagctcctctatttccttctgtatattgcagacaacctcttccatcagccctacatcagctattcctttccagaacatcaaagtgtcctctgaaatttcctctgagtctttctttacaccctcctccgtggccatggtgacagcagcggtgagagctgagttccattccagccctgcctcttccatgctctcttctgagatggcaatctgcgtgatgctaccatcagccgaagtgggtgtctgcaccacacttgtctgctgtcctggcactggagctcttgcactgctgatcagaagatcaaatttggtgcttctgcaggtattggagcaaactttgtcatgttggtaaaaatcaatctgtccggagtccatcattttcctgagcatgatcccacccagacgaatagctctcttccagtccttcagagtggacttgccagccagatgaacaaagtgcttggggctgatcaactgatcattgaacttgacacacttcacgtttattcctggacatacaaacttcttccagaggaggatggctttgctctccccacaagttatggggtaagcaatttccatatcctcatttgcttctatagtgcctgtatcaatcccttcttcaattttgtgtatcgtgtgagtttctactgctacaactgccgtgttgttctccgacccagcttcataaatcccttgttgcacaggctgtaactgcaaaatcacttgggttttagtgtcttcaggattctccccttcatttccttcagtaggtaccacaaccacatcccccactgggacactcacttctgcattagccatctttcacatgaagtcagatagctgggactgctaagcagaattctttcgcccttgaaaatcagtgttggaaaggtcgctagagaccccagtaactctccttcccgcactcatagatgaggaaaataggccctaaatgaaagaatcacctcaaccacaattgagggccaagctagctttctcgactcctctggaggactctactccatttacctccccaaatcctgttttatgaagtttacactcgtgc

SEQ ID NO: 58826 - DNA, 1603 bp, Homo sapiens
ctttttttttcatgtgaggtatttattttgcagccattcagttcagctgtccagtatcaggttaccaaagacaaattttcaagctcccggttaatccccaccaaagtttctactgttcggctacttcaggatggctaacatttggagagaagaggatcccccaggtagtctgtacataattcagagagaggacatcagaattttccatggttctatttcaggtattaaggtaccacagtgaagcatgtcatttgactgtggtggcaaagggacggcactgagcatgcctaacctattccccggcatttcagtccaatcagcgcatgctcgcaatgatcatccatgggtgaaaaggaagagctgaaagacacatgtgctgagcaacatttaatttctgcttgttaaacgggtgattaggcgccagtgtggcaccatccagacactgggaatttgtgccactccatcagttctgctggctctgctcattctgctttcctgcagtggatgccacttcccaaagaaccatgctccaaaaaacaaaagagaatttcctcattagctggacttggctgcagcaactgtttggtttggagtagctgtagttgttgggagatggtccatctctggtgcatcaaaaaagtatgccaagcagcccacagaaagcagcatatggagcaacacaattgtcacaattgtggccaatgcaacgcgtcggttatcctcacgaacagctggccaaaatgtcattgccaagagagatcctgagatgcccagggcaatcatgactagaatccaacgaacagctttgtgggggataatccacagtattgcggtggggatataaatgaagagggaatatccatagacacacacaatctccagaaatgaataggagacgatgttcataactttgctgtttctccacatgaggaaaccccagagtgcaagaggaaccagccaggcataggcatagatgatggtagctgctatggacacttttcggaattcgggcacataatggtacgtcttctctcccagatggatcaagaagttggaaagattcccactaattgctatggcaaagaccaacgtggcacatatccaaaaggggccatagagatctggattgctgcggatatataacctcacaaagtttttcccgggtattggcaaaagagatcctttaattctgtcaaagacctggtaggtgtccacatcaaagaatgtttggtagtattcaaatgtccagaagggggagcttttcttctgtccagcaagtaactcagttttgtcagagtcatcatttcccagtaactcatcatcttcttctcttcctgagcctcttggggatcctggctgatgttttggggtttcaccaggatcctcaatgtttactgtggtggcatctgggtttgctgtcagagaagtggctgcattgccaaattcttcaaattgcaagtcatctactgctgccattcggccagtgagtcttctcccaattatgaggaagaaaatttgcagggttctcgcggggttaggcgtcccccgggtcccgagaaggctcgggcctcagttgctccgcgccggtttcggtccagcccag

SEQ ID NO: 58827 - DNA, 1967 bp, Homo sapiens
agaaagacactggatcttttatttttttcctttcattttctttttcttaaaaaaacaaaatgaaaccaaaaaaaagcctgaatcaaaacctttttaggagtagttacagatattatagggatgggggcgggggggcactaaaacaaaagagaaaagcaccagtgagatgtctttcccattttcttctctccgccacggaacacgcacaccaacagagcccagggccactttttgccctcttcccttggaaaaaggaggaacagaagatttaagaattttgaaaggatttttttcttgtgtgaatgtgtgtaaaagtcaatgctataaatctaaaacgaggtctgtttttttaaaaaagttctaaaacaacaggaggaaaacacatggaaagaaacccctcgcggagacctgcttccttacagatggaggctcttttggaggagagtgtgaagggcagagggctccctgcgccggcaggacctgcccggccaccctccactcccctgccatcacccctcctctctccttttaaaaagcaaaaccccactcttgggactcgggtcgtcctccgatccctgctggaaagtgcggcggctacttggcgtcgagcttggccatctcctgcacgtagatgccgatgctctcgctgtcgaagagcaggaagtacacgttcttcagcgaggacgcgctcgagtcatcaaagtgggctgagatggctttgagggtcacctgggccgcagtctgtttgggaaagcagtttctgccgctggggaaaggcgggaacgcgacggactttagcttcttgtcctccgccgctgacaggcagtttttgatggtctcttcaagctgttcttcacatttgtcggagccccactgagggatgtgacagtggatgacaaatttggctgcgagtccactggattggctgacggcggcttcggcgacttccaaagggccttgggatttgcgaagctcctttaccgtttccaagaactcttttcccccagccttttccaaggctttacctatatcttctttgaggtcaatttcggctgtggttgggtggacaatgccctccactctcatggagccaatatggctgatgtcactctgggttaaggacagcttctgtcccagaacaaggctcttagaagacagaatggtgaatccatcccctggcccatcttcagaggtggaatttgaagttccttctttatcgctgtcctttggtttggactttttggacgtccgtggtttggcagccttggatttcttcccccccttcttgcctgacgtggccttcctgcctcttttctctgggggtggggagaggatcgtttccgacttgcctttggtccctcgctttttggccagcagttcggggtgaattctgggcaggacgcctccactggcgatggtcactccttttagcagctggttgagctcctcgtcattggcaactgccagcaagatgtgtctcggggctatccgggccttcttgttgtccctcgcggcattgccggccaattctagaatttccgctgccaggtactcaatgactgccgccatgtagacaggggcgcccacgctgatccggtacttgaacgtccctttcttcagataacgcatcagcctccccactggaaagatgacacctgccctagctgaacgggacagcttggacattttcttcttcccactccggcccgacatcttgcttcagtttccctctcagcttgctgacacagtggcctcccggcactaacacaatgctggtgctgcgccgcctgctcccggcgcccggtgccctctgcgcgcccctccacgggcgcaggtttggcccacgcggcgccggtgccgggcaggactctttgcctttctttgggttctatctgtgcgtgtcaatgacaacaatccccagttctctcgggtgggggggggggggaggggattaatttaataaggat

SEQ ID NO: 58828 - DNA, 3650 bp, Homo sapiens
accgccagcctatgccgctagttttaccccttatacccttaaaaattttttattttccctaaagccttaaatttttgtagggaggttgtcccaatatgtcccccccccaaaaaaaggttcctttccaaaaatccccaggtaggttttaattcggccccctataaggaaaaaactaataccttgcatgcccgcgtaaacttgggcccccccagggatcctttaaaacggcccccccttttttttttttttctttacttaaaattatttttccttttagaaagttcaccaggaaaccagctcccctcccaccacgccgggcaggccacagccatctttttaaaatccgcgctgattttccctcacacccccaaacaggaactcctcaggatggcctcagaaggctggagtctctccctgtctggcgggacaccctggtggcggtgaaggcccctctgccacaacggaggtttctgattgtgggacacagtctggtttttgttttcttcctgtcttctaattaaaaaagacattcctgggtgacaggcacagtgcaggagtgtgagctatcgaaacaacctggtgaagtctcgcaaggcccagcaaacttgtttacattcctcagcactagtgacttgcttgtggaagtctgtaagttgtttgtgtgtcactgtgacggctcccacggttgtttcctttggcaaaccttttaaggaattttctaaccatcgacaaaaagtcggtctgtcaacctgcatgatctcccagagcacttcagccacatctggtagggtatagggggggaggcaaaagcagcaggtgtgcagcagctggctgacaagctgctgtccaagctggttcatcacctgtccaatcagttctttccgtaattcaaagtcttcttcatgatcattggctacccctgtatgaatgaggtctcgtagaaacctcatgacactacaattggcatcccggtggtccagggtagtagaggcaatggcccactgtaagatagggatgaccacttggctccgcagcaaggtgacagggctacgctgaataaacctggtggctagccggaacaggtcatctacagtgtcagggtgattctggagaccattctgctgttctaggagctgaaaggtggggatgcacagtgcctggagcatgtctagcagtccctgccgacagccttcttccatgccatattcatccacaaggatactgccaaggtacaggaagcaggaatgctgatgtacgtggtacacattcaccatctgtgtgactagtggctgcagcagtgctgcagatcctttgcctacacagcgaacagcaaagcgcaggcacctgcaacaacgctctacaatccgattatcagctcggtgcttatttagagtctcggataaaactggccatatttcctgtatgactttctgacacggatgagtctgtccattttccacaatgggattggtatgcctaaatatcactgcaaggcgatctaagaacactgtgggatctgaggatatgccattgctgggctcttgagacaacagctttttcaatgccataacctgaacagaacatagttcactaagacattcggtaatcttatccaaaggtaatcgggctaggacaagtgctgtcccttttagcaagcccacagcagcttctggagacaacaggaaggaatcgagggagcgggcaatctccaggagtccattaaagtgctgagccatgtgatctcggcagacagagcaaatgttatgaatggctttggctgcagcagaagccaggggcttttcacacaggcctttcatcaaatagcccaacacagggtcaaggaactgaggatttcgatcaacgacttcactcatctctccaaccaattcaatgctggtgtatcgcacagccgtatgtacggtctccgggaggcggacaactccttctaggacttccacaagtgttggattgttttccggatcaacactctttgctatagcagccatgataaagagaaccgcttctgtcacctcccagggtgggttgccttctttcagagtagaatataactgagcaaaacactccatagaccctatcaagaaaatcaagtcctttaccaggtctgataccctcatgcgaaactccccaaagtcatcagtctcctcaggaaccccctcatggtctggttccagctggcagtgtcgagccaaggcgtgaagcagcctctgaatgtaagctttgaagatgccatgaataacttcatcgttagttttgtacaaatgttcccccagtcggtaccaaaagttaaatgaaatttctactacctcatattgaggatggcctgcacagataagcagcagctccagagttcgaaggtccccaagaccttggcctggagtacaaacaattttttcaagaaaagtttcacatagttcagtgaaaatacggcagtaattcagaactttgtctaaatcttcacgtgccacggccatatgataggcagtctccaatgtcagcactccctgaaaaagttgcatggctaatggcaagttagtctccacattctcaatggcatagagagctgagcatacacagtccgaagcagcttcatgtaggttagacgaggtcttatcctgttgcaaaacctcaaaaaggagtgctagtaatttattgttagccatgaagttactgtccaaaactcccaagttaaaccaacttcccaaacagcgaaaaaccttcataagcattttctcatctgttcctgctttttctacacaggtcatcaatagagatactactgtactagagtagaaggccaaatcttctataatttctgtgcgccgattagctccaattcgtaaggaacgcctatgtacttcttcaggtaacactgtaaggatctccagcaaaaaaggcaaagaagtcacatcattgctgtatttttccaccagtgtttgcacacatcccttccaggaaggcatctgtagggcaagatctgctattgctaaagccagctgcgttacaataacaggtgacaagtctttcaagttctggatatgggttagcaatgagtcccgtaaagaggcatgagagtctgtggggagctcataaaatgaggtctgaatcttcattttcatggtctgtgcagcaaaatagcatgactccacatcctgccggatctgtaacaactggtctgagatctcccatgcatgaaccgaacgctgcagctccccaagccaaaaagaggcgcgctcctttccgctgggatctgggtcgtggtaaagcgcctgcactgcctggtacacgagctgcaatgtcggctttgctccttccatggtggtggcggtagtggcggtagcgacggctctgattcttctccggaggattcctcggttgctccgccttcgcgcttcctcactgtctgggccacggccgctccctgactggcgccatctcctcctctttggccgttaccagggcagaaggttctccgtggaagttgccccctcggaaacagctattaggtcgtattcaggttcctggccttttttccggtttttccacttgattctagactcttgagtccgcagattctggcgctcccgtcttcagtcgctgacttgacctcagaagcctatcttgggacgaaa

SEQ ID NO: 58829 - DNA, 2828 bp, Homo sapiens
tttcgtgcctccgtgaaagactgccgggcgcatgcggtcggggttgttcactggctgtccggggctccgcgcgcgtcgccggcccagctctgtcgctgacgggaggatctgaagccggccgcaggtcaaagagtaaaatgaagtacattctggttactggtggtgttatatcaggaattggaaaaggaatcattgccagcagtgtgggcacaatactcaagtcatgtggtttacatgtaacttcaatcaaaattgacccctacattaacattgatgcaggaacattctctccttatgagcatggtgaggtttttgtgctggatgatggtggggaagtagaccttgacctgggtaactatgagcggttccttgacatccgcctcaccaaggacaataatctgaccactggaaagatataccagtatgtcattaacaaggaacggaaaggagattacttggggaaaactgtccaagttgtccctcatatcacagatgcaatccaggagtgggtgatgagacaggcgttaatacctgtagatgaagatggcctggaacctcaagtgtgtgttattgagcttggtggaaccgtgggggacatagaaagcatgccctttattgaggccttccgtcagttccaattcaaggtcaaaagagagaacttttgtaacatccacgtcagtctagttccccagccaagttcaacaggggaacagaagactaaacctacccagaatagtgttcgggaacttagaggacttgggctttccccagatctggttgtatgcaggtgctcaaatccacttgacacatcagtgaaggagaaaatatcaatgttctgccatgttgagcctgaacaagtgatctgtgtccacgatgtctcatccatctaccgagtccccttgttgttagaggagcaaggggttgtagattattttcttcgaagacttgaccttcctattgagaggcagccaagaaaaatgctgatgaaatggaaagagatggctgacagatatgatcgcttgctggagacctgctctattgcccttgtgggcaaatacacgaagttctcagactcctatgcctctgtcattaaggctctggagcattctgcactggccatcaaccacaaattggaaatcaagtacatagattctgcggacttggagcccatcacctcgcaagaagagcccgtgcgctaccacgaagcttggcagaagctctgtagtgctcatggagtgctggttccaggaggatttggtgttcgaggaacagaaggaaaaatccaagcaattgcctgggctcggaatcagaaaaagccttttttgggcgtgtgcttagggatgcagttggcagtggttgaattctcaagaaacgtgctgggatggcaagatgccaattctacagagtttgaccctacgaccagtcatcccgtggtcgtagacatgccagaacacaacccagggcagatgggcggaaccatgaggctgggcaagaggagaaccctgttccagaccaagaactcagtcatgaggaaactctatggagacgcagactacttggaagagaggcaccgccaccgatttgaggtgaatccagtctggaaaaagtgtttggaagaacaaggcttgaagtttgttggccaagatgttgaaggagagagaatggaaattgtggagttagaagatcatcccttttttgttggggttcagtaccaccctgagttcctgtccaggcctatcaagccctccccaccatactttggcctcctcctggcctctgtggggcggctctcacattacctccagaaaggctgcaggctctcacccagggacacctatagtgacaggagtggaagcagctcccctgactctgaaatcaccgaactgaagtttccatcaataaatcatgactgatcttgtagcggatgattcttcaagagacccttcaaacttgggtagagtttacagctctgactttacactcggctttggagactttctttaaattatgtttttattaagattattttattatgcggaaaggtatttgggaaacttgtcacttgcatgtcccatcacgtgtactggctcctctgtggtgtctgcctgttgcgtgacactctccttgcagttcttgagttgcggcagaacatcgcgatgggaaccgatggtgggtggggctgcagagtgccccatcggtcaccttgtttctcaactacctcgcatcattgcagatgctagcgcgttgcctgtcgctttcccttggatacctagaccgttataaagtgtgccacatggacttaccgagcatggagagaggattttagctaggatttgaacacttggtgctgggaacctcagggtattgcttgccactaagccatgaaaccagagacaaaatctctatactgccctgagttggggggaattctcagtgccaactgtggctggtcctcattcaaagggacggtcagtttggtgtcaacatgaaacaccaagatgtctgtctctgaagcgtgattttaaaatccccatgcctgtggctgcgcttcctatttctagggctgggaaacactccttgcatcaaggggtcacttacagaacaaagaatcttttgggggaaacttcctctaaaaccctctcatatatagacagctttgactggagggtccatttttcttccaggatggtgttactgcagttgaaagggcaatatgaagttactttcttaatgtgacctagcaataggcatagctacgtggcactatattctggccagactcgatgtgtactctaacttaagaaataaatcagtaaggcagaacaaga

SEQ ID NO: 58830 - DNA, 869 bp, Homo sapiens
ggcacgaggtcttaatgactaacacacctctaacatttcacctctagctcagatgagagagagaatgggacttcttggtactgattgtttttcccatgcctcaattggtttcttttagggagctacaaatttacgggttcactggtgattgatcttttcatccagcacaatggacagaagtctaaggaacgtccttgtggtttcctttgggttcctgcttctctttacagcctatggaggtctgcagagcctgcagagcagcctgtacagcgaggagggcctgggtgtcacagcgctcagcaccctctatggaggcatgctcctgtcctccatgttcctcccaccgctcctcatcgagaggctgggctgcaaggggaccatcatcctctccatgtgtggctacgtggccttctccgtgggcaacttcttcgccagctggtacactttgatccccacctccatactgctgggactcggggccgccccgctgtggtctgcacagtgcacatacctcacgatcacgggaaacacacatgcagagaaggcgggaaagcgtggcaaagacatggtgaaccagtattttggcatcttcttcctcatattccagtcatccggtgtgtggggcaacttgatctcatcgctggtatttggccagactcccagccaagagacccttccagaagagcagctcacgtcctgtggggccagtgactgcctgatggccaccacaaccaccaacagcacccagaggccctcccagcagctggtctacaccctcctgggcatctacactgggagtggtgtcctggctgtcctgatgatagctgcgttcctccaacccatacgagatgttcagcgggaaagtgaag

SEQ ID NO: 58831 - DNA, 3677 bp, Homo sapiens
ctttcgttgcggggacaacaatggcggggttctgggtcgggacagcaccgctggtcgctgccggacggcgtgggcggtggccgccgcagcagctgatgctgagcgcggcgctgcggaccctgaagcatgttctgtactattcaagacagtgcttaatggtgtcccgtaatcttggttcagtgggatatgatcctaatgaaaaaacttttgataaaattcttgttgctaatagaggagaaattgcatgtcgggttattagaacttgcaagaagatgggcattaagacagttgccatccacagtgatgttgatgctagttctgttcatgtgaaaatggcggatgaggctgtctgtgttggcccagctcccaccagtaaaagctacctcaacatggatgccatcatggaagccattaagaaaaccagggcccaagctgtacatccaggttatggattcctttcagaaaacaaagaatttgccagatgtttggcagcagaagatgtcgttttcattggacctgacacacatgctattcaagccatgggcgacaagattgaaagcaaattattagctaagaaagcagaggttaatacaatccctggctttgatggagtagtcaaggatgcagaagaagctgtcagaattgcaagggaaattggctaccctgtcatgatcaaggcctcagcaggtggtggtgggaaaggcatgcgcattgcttgggatgatgaagagaccagggatggttttagattgtcatctcaagaagctgcttctagttttggcgatgatagactactaatagaaaaatttattgataatcctcgtcatatagaaatccaggttctaggtgataaacatgggaatgctttatggcttaatgaaagagagtgctcaattcagagaagaaatcagaaggtggtggaggaagcaccaagcatttttttggatgcggagactcgaagagcgatgggagaacaagctgtagctcttgccagagcagtaaaatattcctctgctgggaccgtggagttccttgtggactctaagaagaatttttatttcttggaaatgaatacaagactccaggttgagcatcctgtcacagaatgcattactggcctggacctagtccaggaaatgatccgtgttgctaagggctaccctctcaggcacaaacaagctgatattcgcatcaacggctgggcagttgaatgtcgggtttatgctgaggacccctacaagtcttttggtttaccatctattgggagattgtctcagtaccaagaaccgttacatctacctggtgtccgagtggacagtggcatccaaccaggaagtgatattagcatttattatgatcctatgatttcaaaactaatcacatatggctctgatagaactgaggcactgaagagaatggcagatgcactggataactatgttattcgaggtgttacacataatattgcattacttcgagaggtgataatcaactcacgctttgtaaaaggagacatcagcactaaatttctctccgatgtgtatcctgatggcttcaaaggacacatgctaaccaagagtgagaagaaccagttattggcaatagcatcatcattgtttgtggcattccagttaagagcacaacattttcaagaaaattcaagaatgcctgttattaaaccagacatagccaactgggagctctcagtaaaattgcatgataaagttcataccgtagtagcatcaaacaatgggtcagtgttctcggtggaagttgatgggtcgaaactaaatgtgaccagcacgtggaacctggcttcgcccttattgtctgtcagcgttgatggcactcagaggactgtccagtgtctttctcgagaagcaggtggaaacatgagcattcagtttcttggtacagtgtacaaggtgaatatcttaaccagacttgccgcagaattgaacaaatttatgctggaaaaagtgactgaggacacaagcagtgttctgcgttccccgatgcccggagtggtggtggccgtctctgtcaagcctggagacgcggtagcagaaggtcaagaaatttgtgtgattgaagccatgaaaatgcagaatagtatgacagctgggaaaactggcacggtgaaatctgtgcactgtcaagctggagacacagttggagaaggggatctgctcgtggagctggaatgaaggatttataacctttcagtcatcacccaatttaattagccatttgcatgatgctttcacacacaattgattcaagcattatacaggaacacccctgtgcagctacgtttacgtcgtcatttattccacagagtcaagaccaatattctgccaaaaaatcaccaatggaaattttcattgatataaatacttgtacatatgatttgtacttctgctgtgagattccctagtgtcaaaattaaatcaataaaactgagcatttgtctaaatattagtttgccctttctttgaatgaagacaatgtacacataggcgaccaggctctgccagtagactaccagcatttctttgtgatccttttaagagattgatataaatgtcagtcagttctctgccttgctttattaaattagcacttgccattttttcatctgattgccttactacttctagaagtgaggccctcactcctggtgctgattttcaaaacttcctaaggaccagagactgcaaatgcagattttggcaatccctttcctgctgtgtctctatgtgggtgtactgttggtggctgactcccctggaggtcaccctgaagcttcctggttggccgggggtgctgtctccactgtttttgtttgttttgaggatgagcgcgctgcctggtcccttccccattgcacaagccagggcagtcacaaggagcttgggctgcctcaccgccctcatcaagcacagggccgccacgagctcatcagctgagacccagcgtagcctttttgtgttttttgtgaagcaagtttccaattaagcaaaagaagctaaaaataatgatcatgtttttgtgccagatgcagttagcgatcacagtctgccattaagttgaagagtaagtgagctctcccaacagagaatgaggttactaaagatcacagcagctgcattttcatttggttctgaaatccttggaatacatttcagactttgctgggaagcagaagcaagagccgtgcaccgagttgaatcgatgctgacaattatcagatggaggtgggtagtaattggtacttcgtgccttgctaaaattattttaagtgctgtttgtttgtatttggaagctaagcttctgtcaggcctgaagaacaaattactaatgcattggctcttctttgaaaggactcacccccaaatgctctcccttcagggggcagggacggggtctggctactgagatctgggctcagataaacttccacttgaagtccgggcgctcagctgtgtctaccagcaagtgggtgttcattattttgctagatcagaatgtaaagaaccttctaccaaataagtataccaaaaaacgtgggggtcaaacacagtaccaacacttttatatctgatttcccaaaacatcgacttcaaatttaaataatctttaatatttgctgtgaagcttgatctgaaaattaggaa

SEQ ID NO: 58832 - DNA, 4079 bp, Homo sapiens
cactccacacgagaaaacctgaatgctggcaactttaacttcccttctgaaggacatctggtacgaagcactggtcccggcgggagctttgccaagcacatggtagcccagtgtgtctcaccaaagggacctcttgcttgttcgagaacatacttttttggagctactcatgttccttacttgggtggtgacagcaagctgcccaagaaaactgaacaaattaggctattgtcccagatatatgctgctgttattgaggctgttttggctggcattgcatgttatgctaaaacttccagtctaacaaaggccaaggaggtagcagagcaaactctgggatctgggttagattcctttgagttgattccgtttaaggcagccctgcgctccaagatgacttttcatatacatgctgtgaataatcagggaagaattgtaccgctggacagtgaagatagcttatcctttgtgaagacggcttgtatggccgtctatgacattcctgacttactgggaggcaatggttgtttaggatctgtggttttctctgaatcatttttgacttctcagatcttagttaaagaaaaggatggcactgttaccacagaaaccagctccgtagtcctgactgctgctgtacccagattctgctcctggctggtggaagataatgaagtaaaattgtctgagaaaacccaccaagcagtgaggggggatgagtctttcctgggcacttatctaacaggaggagaaggagcatatctttattccagcaatctacagtcctggcctgaggaagggaatgttcatttcttctctagtggccttctgttttctcactgtcgtcatggaagtatcatcatttccaaggatcacatgaattccatttccttctatgatggggattccaccagtactgttgctgctcttctcatagacttcaaaagctcattgcttcctcacctcccagttcatttccatggatcaagcaattttctgatgattgcccttttccccaaatcgaagatataccaagcattttactcagaggtcttctccctctggaaacagcaggataactcagggatctctttaaaagtgatccaggaagatggattatctgtggaacaaaagagattgcactccagtgcacagaagctcttcagtgccctgagccagcctgctggggagaaacggagttccctaaagttactctcagccaaactcccagagctggactggtttctccagcatttcgccatcagcagcattagccaggagcctgtgatgcggacccatcttcctgtgctgctgcagcaagctgaaatcaacactactcacagaatagaaagtgacaaggtaattatcagcattgtaaccggcctcccaggctgtcacgctagcgagctctgtgcttttctggtcactctgcataaggaatgtggcagatggatggtgtatcgccaaatcatggacagctctgaatgttttcatgctgcacacttccagagatacctttccagtgccctagaggcccagcagaaccgctctgcgcgccagtcagcctacatccgcaagaagaccagactgctggtggtgttacaaggctacacagatgttattgatgttgtccaggccctgcagacccacccagactcaaatgtcaaggcctccttcaccattggtgccatcacagcatgtgtggagcccatgagctgctacatggagcacagatttctctttcctaaatgtcttgaccagtgttcacaaggcctggtgagtaacgtggtattcaccagtcacaccacggagcagcggcaccctctccttgttcagctgcagagcctcatcagggctgccaatcctgctgcagccttcattcttgcagaaaatgggattgtcaccaggaatgaagacattgagctgattctctcagaaaacagtttttcaagtcctgagatgctacgatctcgatatttaatgtatcctggctggtatgaaggtaaattgaatgctggatcagtctatcccctaatggttcagatctgcgtatggtttggccgtcccttggagaagactcgctttgtggccaaatgtaaagcaattcagtcctccatcaagccaagtcccttctccggaaacatctaccacatcctgggcaaagtgaagttttcagactctgagaggaccatggaggtctgctacaacacactggccaactccttgagcatcatgccagttttggaaggacccacaccaccaccagactccaaaagcgtatctcaagacagcagcgggcagcaggagtgctaccttgtgttcatcggctgctccctgaaggaagacagcatcaaggactggctgcggcagtcagctaagcagaagcctcagaggaaagccctgaagaccagggggatgctgacgcaacaggagatcaggagcatccacgtaaaacgccacttggaacccctacctgcaggctacttttataatggcacccaatttgttaacttctttggtgacaaaactgattttcacccactcatggaccagttcatgaatgactacgtggaagaagccaaccgggaaattgagaagtataaccaggagctggaacagcaggagtatcatgacctctttgagctgaagccctagaggaaggctgggcccgtacgtcctgcagaatgtccaccttggagatggacgaacgggtgtcttaacctcagctctcctggaggcctctcccttaaggggctgtctttgttctccttggcctgtgtgggctggcttgagtgcatgttgtctttattccctgtatagcgctgaagagcatcacctgcaccattgattttgggggtcgggggaatactcaaggatgagcagatggggcctgcccgtctacgtgtgcaactggcagtccaggagctctgggtttctgataacaggatctcctttgggctcttgaggttggggagaagcattaggattacacagaggagctactgggacttagaaggaaccctggctgcctgaactgtggccgtgtctgggaggcgaggccacgacaggcctcaagcctcagatgctgctccacgagagccatcttccccagtggagtgcctgcctcccctgctaggcccgtttccctgaaggagctggccgtactggccgtgggcccagtcctgggaggagcagcacagccttgcccaggcccagtccacagagccagcagcttgggttgagatgaatgatgtgttcacaaatgaggggatttcccttctggactaaactgaaggagaggcttgttgctttccagaggtgtgtggctcttaagttgacatcagcttttccccttgtgggtggttctttagctctcctgtcacaccattcgggtgtcctaatgtagggacaagagcaagcctgctgctcaggccccctggcgaggcttcacctcactgtggaagggggcgtcctgcagctggttagtcttaggcctggtggctgatcacttgtggggtcagtctccagcacccagcgctcccacaagccttgccaaggaaggcctgcttttcagccacaaacttcaggaaactcatccccccgctccccaaagtgttgttgctggccctgggcttgtgtggctcctgaggattgggaatttcaaataattgcaatacctgagttagaattccttctaatggcatcgttttaagctggaccataaagcagaggggaattacaagtgtgtcccatgcctgaccttcataattggtgtgggggacaggggagtcacagccactgatatttaggtgatgtctcttaggacttcagtgcctcagctgcctgaactgtaaatgttttctgaatttcacatatttttttttgcatgccttaggaagaagcacataggtaaaaccagcagtttccagtaatatagggggtttttgagcaaggcccctggagcagcggagagacaagatggagcacatgtagtctgtgtgcctggtcacacagaggcctgcatgcaagtagcaaagcagctctcaagggcttgtcagtaaaatatattaaaaaaaaaa

SEQ ID NO: 58833 - DNA, 1839 bp, Homo sapiens
atggaacgctgtggtatcgaaccgcagttgcagggtcgacccacgcgtccgcggacgcgtgggggggtgcggaggtgtgcagcgcgctgtcagactggctcgcaggcggcgcggccggcggacccgttcgagacagcgcgggcggctcgggtcccctggggctccgcagcaggaggacgccatggacgacaaggagttaattgaatactttaagtctcagatgaaagaagatcctgacatggcctcagcagtggctgccatccggacgttgctggagttcttgaagagagataaaggggagacaatccagggtctgagggcgaatctcaccagtgccatagaaaccctgtgtggtgtggactcctctgtggcagtgtcctctggcggggagctcttcctccgcttcatcagtcttgcctccctggaatactccgattactccaaatgtaaaaagatcatgattgagcggggagaactttttctcaggagaatatcactgtcaagaaacaaaattgcagatctgtgccatactttcatcaaagatggagcgacaatattgactcacgcctactccagagtggtcctgagagtcctggaagcagccgtggcggccaagaagcgatttagtgtatacgtcacagagtcacagcctgatttgtcaggtaagaaaatggccaaagccctctgccacctcaacgtccctgtcactgtggtgctagatgctgctgtcggctacatcatggagaaagcagatcttgtcatagttggtgctgaaggagttgttgaaaacggaggaattattaacaagattggaaccaaccagatggctgtgtgtgccaaagcacagaacaaacctttctatgtggttgcagaaagtttcaagtttgtccggctctttccactaaaccagcaagacgtcccagataagtttaagtataaggcagacactctcaaggtcgcgcagactggacaagacctcaaagaggagcatccgtgggtcgactacactgccccttccttaatcactctgctgtttacagacctgggcgtgctgacaccctcagcagtcagcgatgagctcatcaagctctatctgtaacctgtgagccctttcctgccaaggtgcagcttacgtagttgaggcagggtgagtagctgcttgacaccccagtgagtcaggccaaaactgagatgtgtttaatgaagatttatggagtaaggacttaaaatcatacatcttggagaacctttcttactcatttcagtcccatctaaaaatgtgtcagctattctaaatcccaacttaaattgttcttacggtttctagaaactttccttttcagtttccagaaatacaagttagataattggctacttaactgatgaaagatgagcccaagtccacctgtcttcatcctcccctgcactccagactgatctgcctaaagcacgcgagatgcaggcgaaaagcagccacacccctctgccacaaatgaccaacagctggtcaggacgttacacgcggtgccttgtaagaggcaagaaacacttgccgaatctgcatctggcttccagtggtaagcacattcctcagcaggatcaagccaaacagtaaaaactaccaagagaacacgaggaaggcagaaacgatgtttagcaacagtattctgcatggttcactgcttaagaaaatgccttctggaatatttgtaaactgaaattctgtatgtgtaagagatgtttaaatatgtttgggtcctaaacagctttttaaaattatacttgggaataaattcagcatcttttcaaataaactctatgaaagacgcaaaaaaaaaa

SEQ ID NO: 58834 - DNA, 573 bp, Homo sapiens
ggcacgagggggcgtaagacggggagagtggcagctccgagtacacggagaagaactggaaacatgcaaaaactccaaacacggtcccctgccatgtccctgtctgacccaggcctggggtaccaccccacgtgctggaccctacgctggccacccctgtgctccctccacgccctccacgtgttccactgcctcttctcttctcgcttgggaactccagtctcacctcggcttgcaatggaccccaactgctcctgcgaggctggtggctcctgcgcctgcgccggctcctgcaagtgcaaaaagtgcaaatgcacctcctgcaagaagagctgctgctcctgttgccccctgggctgtgccaagtgtgcccagggctgcatctgcaaaggggcgtcagagaagtgcagctgctgtgcctgatgtcgggacagccctgctgtcagatgaaaacagaatgacacgtaaaatccaggatttttttttttctacaactccgactcatttgctacattcctttttttctgtgaaatatgtgaataataattaaacacttagacttgaaaaaaaaaa

SEQ ID NO: 58835 - DNA, 798 bp, Homo sapiens
aggcccccacaggatgccgctgtacctcttgaaagtgcaggctccgtaggacccaggggcgagggaggggttgctcccccaggggcagaaagcgctgtcccgctgtacagaatcagcttcagctacggtctcctccaagcggctgccgaagatggcggaggtgcaggtcctggtgcttgatggtcgaggccatctcctgggccgcctggcggccatcgtggctaaacaggtactgctgggccggaaggtggtggtcgtacgctgtgaaggcatcaacatttctggcaatttctacagaaacaagttgaagtacctggctttcctccgcaagcggatgaacaccaacccttcccgaggcccctaccacttccgggcccccagccgcatcttctggcggaccgtgcgaggtatgctgccccacaaaaccaagcgaggccaggccgctctggaccgtctcaaggtgtttgacggcatcccaccgccctacgacaagaaaaagcggatggtggttcctgctgccctcaaggtcgtgcgtctgaagcctacaagaaagtttgcctatctggggcgcctggctcacgaggttggctggaagtaccaggcagtgacagccaccctggaggagaagaggaaagagaaagccaagatccactaccggaagaagaaacagctcatgaggctacggaaacaggccgagaagaacgtggagaagaaaattgacaaatacacagaggtcctcaagacccacggactcctggtctgagcccaataaagactgttaattcctcaaaaaaaaaa

SEQ ID NO: 58836 - DNA, 1771 bp, Homo sapiens
agcggccgcggcggcagggcggggccggagcagcgggcggcggcggaggcggcgcccgggagcgctcttcgcttccctcggggtcttgctcggacctcggccaccgcctgggatccccaggactcgtgcgtgcagcatgggcggcgtcggggagccgggaccgcgggagggacccgcgcagccgggggcaccgctgcccaccttctgctgggagcagatccgcgcgcacgaccagcccggcgacaagtggctggtcatcgagcgccgcgtctacgacatcagccgctgggcacagcggcacccagggggcagccgcctcatcggccaccacggcgctgaggacgccacggatgccttccgtgccttccatcaagatctcaattttgtgcgcaagttcctacagcccctgttgattggagagctggctccggaagaacccagccaggatggacccctgaatgcgcagctggtcgaggacttccgagccctgcaccaggcagccgaggacatgaagctgtttgatgccagtcccaccttctttgctttcctactgggccacatcctggccatggaggtgctggcctggctccttatctacctcctgggtcctggctgggtgcccagtgccctggccgccttcatcctggccatctctcaggctcagtcctggtgtctgcagcatgacctgggccatgcctccatcttcaagaagtcctggtggaaccacgtggcccagaagttcgtgatggggcagctaaagggcttctccgcccactggtggaacttccgccacttccagcaccacgccaagcccaacatcttccacaaagacccagacgtgacggtggcgcccgtcttcctcctgggggagtcatccgtcgagtatggcaagaagaaacgcagatacctaccctacaaccagcagcacctgtacttcttcctgatcggcccgccgctgctcaccctggtgaactttgaagtggaaaatctggcgtacatgctggtgtgcatgcagtgggcggatttgctctgggccgccagcttctatgcccgcttcttcttatcctacctccccttctacggcgtccctggggtgctgctcttctttgttgctgtcagggtcctggaaagccactggttcgtgtggatcacacagatgaaccacatccccaaggagatcggccacgagaagcaccgggactgggtcagctctcagctggcagccacctgcaacgtggagccctcacttttcaccaactggttcagcgggcacctcaacttccagatcgagcaccacctcttccccaggatgccgagacacaactacagccgggtggccccgctggtcaagtcgctgtgtgccaagcacggcctcagctacgaagtgaagcccttcctcaccgcgctggtggacatcgtcaggtccctgaagaagtctggtgacatctggctggacgcctacctccatcagtgaaggcaacacccaggcgggcagagaagggctcagggcaccagcaaccaagccagcccccggcgggatcgatacccccacccctccactggccagcctgggggtgccctgcctgccctcctggtactgttgtcttcccctcggccccctcacatgtgtattcagcagccctatggccttggctctgggcctgatgggacaggggtagagggaaggtgagcatagcacattttcctagagcgagaattgggggaaagctgttatttttatattaaaatacattcagatgtaaaaaaaaaa

SEQ ID NO: 58837 - DNA, 1470 bp, Homo sapiens
cccacgcgtccgagaagatatggatcacaaatctccaggcaacaaaggatcattggtttatgcaggaattaaatcaattgtaaagtcatcgttgggaatggtggaaagcagcagacataattggagtgggttggataagcaaagtgatattcaaaatttaaatgaagagagaatcttagctttacagctttgtgggtggataaagaaaggaacggatgtagacgtggggccatttttgaactcccttgtacaagaaggggaatgggaaagagctgctgctgtggcattgttcaacttggatattcgccgagcaatccaaatcctgaatgaaggggcatcttctgaaaaaggagatctgaatctcaatgtggtagcaatggctttatcgggttatacggatgagaagaactccctttggagagaaatgtgtagcacactgcgattacagctaaataacccgtatttgtgtgtcatgtttgcatttctgacaagtgaaacaggatcttacgatggagttttgtatgaaaacaaagttgcagtacgtgacagagtggcatttgcttgtaaattccttagtgatactcagttaaatagatacatcgaaaagttgaccaatgaaatgaaagaggctggaaatttggaaggaattttgcttacaggccttactaaagatggagtggacttaatggagagttatgttgatagaactggagatgttcaaacagcaagttactgtatgttacagggttcacctttagatgttcttaaagatgaaagggttcagtactggattgagaattatagaaatttattagatgcctggaggttttggcataaacgagctgaatttgatattcacaggagtaagttggatcccagttccaagcctttagcacaagtttttgtgagttgcaatttctgtggcaagtcaatctcctacagctgttcagctgtgcctcatcagggcagaggttttagtcagtatggtgtgagtggctcaccaacgaaatctaaagtcacaagttgtcctggctgtcgaaaaccacttcctcgatgtgcgctttgtctcattaatatgggaacaccagtttctagctgtcctggaggaaccaaatcagatgaaaaagtggacttgagcaaggacaaaaaattagcccaatttaacaactggtttacatggtgtcataattgcaggcacggtggacatgctggacatatgcttagttggttcagggaccatgcagagtgccctgtgtctgcatgcacgtgtaaatgtatgcagttggatacaacggggaatctggtacctgcagagactgtccagccataaaatgttaccaccttaagagaacccttcaagtgtggagctttctagtaggtgtccttcatagctcagaaacatacctcagaacaagccattcatgacttacctgtaatgggaaaataaatcattctatcagaaaaaaaaaa

SEQ ID NO: 58838 - DNA, 595 bp, Homo sapiens
cagaacacaactgccagtgggtgtgagctcatgcacactgagatgcaggccctgcgtgccgactggaagcagtgggaagacagtgtattccaaacgcagagctgtttggagaacctggtcagccagatggccctttcggagcaggaattctcaggccaagtggctcaactggagcaggccctggaacagttcagtgcccttctgaaaacctgggctcagcagttaaccctcctggaaggcaagaacacggatgaggagatagtggaatgctggcacaaaggacaagagatactggatgctttgcaaaaagcagagcctagaacagaggatctcaagtctcagctgaatgaactttgtcgattttccagagacctgagtacctacagtggaaaagtttctggcttgattaaagagtataattgtctttgtttgcaagcatccaagggctgccagaataaagaacagattttacagcaaagatttcgaaaggccttcagggatttccagcagtggttggttaatgcaaaaatcactaccgccaagtgttttgatatacctcaaaatataagtgaagtttcaactagtcttcagaaaa

SEQ ID NO: 58839 - DNA, 2329 bp, Homo sapiens
  misc_feature (1)...(2329): n = a,t,c or g
ccggaanaaccgggtcgaggatttcgtcgggcgagtctccgccccgcttttgcagctaggggtgtgtttcaggggggattggggcaagccaagcaggcgaggacccgggcctgtgccgctttgcctacccctcatccctcggcaccaaggctacttgagccccagggtgttttttccttgttcccgccacctcctggtccctggcccaacatgatactgaccaaagctcagtacgacgagatagcccagtgcctagtgtctgtgccgcctaccaggcagagcctgaggaagctgaagcagaggtttcccagtcaatcgcaggccactctgctgagcatcttctcccaggagtaccagaaacacattaaaagaacacatgccaaacatcatacttcggaagcaattgaaagttattaccagaggtacctgaatggagtggtgaaaaatggagctgccccagtgctcctggacctggccaatgaggtggactatgcgccctcattaatggctcggcttatactggagaggtttctacaggaacacgaggaaactccaccctccaagtctattataaatagtatgctacgggacccttctcagattccagatggagttctagcaaatcaggtctatcagtgcattgtgaacgactgctgttacggaccactagtggactgcatcaagcatgccattggtcatgagcatgaggtcctgctgagagacttgcttctagagaaaaacctgtccttcctagatgaagatcagcttcgtgcaaagggttatgacaaaacaccagacttcattttacaagtaccagttgctgtagaagggcacataattcactggattgaaagcaaagcctcatttggtgatgaatgtagccaccacgcctacctgcatgaccagttctggagctactggaatagatttgggccaggcttagtcatctattggtatggatttatccaggagctggactgcaaccgggaaaggggcatcctgctcaaagcctgtttccccacgaacattgtcaccttatgccacagcatagcttgaccctgaagatcctggaagagaagctgggaggaaaaggtgaatccggaagcaattttactttcctgcactgtaagatcctggcaacatctgccctgaacttcagctgaactcttgctgcccgtagtcacaccactacctctttagacaaacatatcaagagtttctgttttccttcatcccttgctgatgtgaacagccaagaactacagacacaacccactcattatcagcatttctgtctctgtcaaacaattagtttatagatagtcataatctttctttcttccggatggtttatccttgtatgctgaacaaaagaaaaaatgtgaagactgaaaggtgtgatttttcaattctcctcccagttaccgaatcaccctcttatttttttttccctaagcctccgttcactgtctctccctctccctttctcttcatgtgcactcacagagacccagcattgcattaccatcgtggaataatctagcgcaaacctaggaaagctgaagccacaaagtccaaagccacctttgtactcacctgcagagctccagaagaccttgatggcagcctgcctatgctgggggtttgctatattcaatctttacggcttcctgacttctgtgacagtaagccaagtgcaaaaatacacttgatgagaatttcctcttttaataatgttatttgaacaccacatattttagatttatcttatttgaaagtattagttccattgtgcctggaaaccacactcctttagattgggggccgagaggcgacaacccaacattgaggagagtttatttttaaacatggctagttgtcagtatgtacgtgagctagtatttttatgagtcgagttttttaaaggcacattctgtatactgcttagtatatgcattttataccatgtaattataaaacactcgagtaagttcagcattagaaatgtttagctttgtatgaactgagtgtgccagaaataaacctggagcaatttttaaataagcaaaataaaggagatttttctatttgttcactttaatttattcacttttgtgtacttttatgtactgcaaatcagatttcagtctaaagcgaaacatcagtaagttaataataaacctatctttcgggaagttgaatattaatctgtacccaaaacgtatttagtaaaatatttgcccccgccaccctgccatgctgacataacaacttttataatgttgaatagatgatatgggaaatactaataacaacaatgtaatttttg

SEQ ID NO: 58840 - DNA, 1262 bp, Homo sapiens
gacgccggcgctgatgggaaatccagttatcaaaattgactcaagaagagagaacctaacagaacaataacaatggaagaaattgggaacattatcacaaagctatcatcctgccaaactccaggctcagatgtcacaggttaaaaaaagtccttcatgaaaaagaaagatcttaagcagcatgatggattcagaagctcatgaaaagaggccaccaatactaacatcttcaaaacaagatatatcacctcatattacaaatgttggtgagatgaagcattacttgtgtggctgctgtgcagccttcaacaatgtcgcaatcacatttcccattcagaaggtcctctttcgacaacagctgtatggcatcaaaacccgggatgcaatacttcagttgagaagggatggatttcgaaatttgtatcgtggaatccttcccccattgatgcagaagacaactacgcttgcacttatgtttggtctgtatgaggatttatcctgccttctccacaagcatgtcagtgctccagagtttgcaaccagtggcgtggcggcagtgcttgcagggacaacagaagcaattttcactccactggaaagagttcagacattgcttcaagaccacaagcatcatgacaaatttaccaacacttaccaggctttcaaggcactgaaatgtcatggaattggagagtattatcgaggcttggtgcccattcttttccggaatggactcagcaatgtcttgtttttcggccttcgaggtcccattaaggagcatctgcctaccgcaacgactcacagtgctcatctggtcaatgattttatctgtggaggtctattgggtgccatgttgggattcttgttttttccaattaatgttgtaaaaactcgcatacagtctcagattggtggggaatttcagtctttccccaaggttttccaaaaaatctggctggaacgggacagaaaactgataaatcttttcagaggtgcccatctgaattaccatcggtccctcatctcttggggcataatcaatgcaacttatgagttcttgttaaaggttatatgaaaaaaaccaacagtttagtgccatttatcaactgaatagaccttctaagaagaatgcagtttggcctctttcttagttggccaaatacaagttggtgtcataactccaggccacagtgagttatgggcaaagctgttttgcttaagcctcaataaaacagaataaaagattccaataggaaaataaa

SEQ ID NO: 58841 - DNA, 1665 bp, Homo sapiens
agccacggtttttcccaaaaggattaaaatggggttcccccggggttttccccccccccggggtttaaaacccgcccccggaaattaaatttggggcccccaaaaaaaaaatataactttcccccccccggggcaaaaaatttgttcccttaaaagggccccccctttttttttttttgaatgagaaaacatttattccgtctccaaacagcatcccaggccgggcatctcccccacgattttataatacactcggcacagacagagtctgggagccatggggcacccctgccctccccaggcttcctaagtaacaactgcagaatatttacataaagctgggtgttgtcaggcaaagcccttccctgctgccaggggtgggagcaaggaggaagtgccatgagcaccagccccgccctcacaccacgggaggcagcccagaggccaccggcacagggtggtggcccccagatcatacagcagtgggcacaggggaagcaaacctgagtgaggacacaagagcctggtccggctccgctgcacagggcaggtgtgatggcccccacgagtctttggcagagaacgcagataatagcggctcccacggcctgacccgggccggggggaagctgaggcacttgtcagtagcacatgggcacctgctggcttctagccactgcaggcggggctgaggtcattaaaagcgaggaaaaacactagctaaaaaccctttcctaaaagtgccctggaggagtgagcggctgactgaagccctctgggcacaggcacttggggtgtggctctgccagcccccgccaggctatgaggctccttagctgtgtgtcagctgcacaggatggaacaggtgaaagagaggggctggcagttccaggaggctcatgggaaagtccagggcagaggggagggccctctctgtcccccttcccacgctaaccgccgctcagtacacagggggcggctggtagccctcggtggtctccgcgttctgggtgaagggtggctgttggtagttgtccacagatgcacctgggtaggaggcgtaggcagtgttggggtccggagtggggtcaacgtaattctggatgaagtcgtccacgccagccttgtagcgctggtaggccagggaggccagcacaccccaggagaagatggaaaagaagctgaaggtgatggctgccctcacagagtcggcccccaccagcacgtccttcgggttggtgactgcccactggttggtgaggaagcagaaaccaacaaaccacaggaaggtccagagagctgagaagagcaggtcaccaatgaccaggtacttgcggtcagtggcgttgctgatctgggggaaatacgcgtcgaccaccaagaagaaggccgaggccaggaaggccagcaccccgatggcactgccatagcggcaggcatcctcgttgcggttgaacacgcagtacatctgcttagactcgtgggcattgctgtagccctcaccatagatgcaggagaacacgatcaaggcgaagaccaagcacacggcgcgcgccaccacctgcggctgcgtcaggaagcgccgcaggtcgaaggagccgcccgccttggccgcgccgtaggccccgctctccatgtcgccgtcgccgccgctgccgccgccgc

SEQ ID NO: 58842 - DNA, 955 bp, Homo sapiens
gaaaaaagagaccatagacttccatcctggcctagagcggcccttaaagtgccagggagaggagggcgggtggggaccactccagaattggccgctggcggtatcatggcgacccggaacccccctccccaagactatgaaagtgatgacgactcttatgaagtgttggatttaactgagtatgcaagaagacaccagtggtggaatcgagtgtttggccacagttcgggacctatggtagaaaaatactcagtagctacccagattgtaatgggtggcgttactggctggtgtgcaggatttctgttccagaaagttggaaaacttgcagcaactgcagtaggtggtggctttcttcttcttcagattgctagtcatagtggctatgtgcagattgactggaagagagttgaaaaagatgtaaataaagcaaaaagacagattaagaaacgagcgaacaaagcagcacctgaaatcaacaatttaattgaagaagcaacagaatttatcaagcagaacattgtgatatccagtggatttgtgggaggctttttgctcggacttgcatcttaaggacatgaatattctcccataacggattcaactatgagaagagaagtggcagcaataaggcagtctctcaaaagtcatactgccagagtctctagggcaaggagaaacaactagctggacaatactcaattcacaacttagcattttgccatctgaagcttggcaaactagtatctgctgtaaaacaacctatatggtatgtgaaccgtagtattcctgagcaaaacgtggctttcatcgctttgtaaaaatttgcatctgtttagaaactagcctataaaatatcaccattggatgtagatatggagagaaaagaaatatgttgggtttattgcttagcgaaatattctctttttatttaaataaaatgttcttcattgtg

SEQ ID NO: 58843 - DNA, 3454 bp, Homo sapiens
ttttttttttttgtagtacagaggtttactaactctgtgaatgggaagatcacttggctacccagtgctctcttataaacataagtacaagagtgtttcatgaaatccgtttttaaaatgaacatctctgtgtgccacagttcctaggactggggcaaggacacagtgtcaagtcttgttttgaggatgagtctctgaagagacagaattcctgccagaatgcgcacagaacataagtcagccaagtgtgtcgtgccagggatactttgactttggtttgctgctgctgctgctagggatattgggagggttatcctttccaggttgtaggagagggttgtgggtaaagggtcttgtcgtaaagggaccccctgggcctgcctagcctcccaacctgaattcccggcatggcggttgtttcacggctctccgcagctgaacgcgtcattttcagcatttttccagcctttttttgaaacctcctcctaaggaaacccttccccgtgggaaggtaaattttgtccccggtccatgtaacaaacacgctggggggatttttaagtacagtggcgtactggctggaattccgagaaaaggataacttgggaccaggggaaaaacaaattggaaggaagagcccagtaccataaaaacactgccccgtgggggaaaatgccatggtttatggggccaaggtttatccaggggccatccattcctgaatgaacatttcctccatcccactgaaaggtccagaactttgcaacacctgtcctcagcaccctagctcaagaacagccccacattgtaagcagtgactgcccagtgggtaatatggtagatgggatccgatacccgtgagatccctggaaccaccagaggccacctgtcttgcaggcttgggcacaggacaggttggccatctctctcaaaggcattgaaggaaggagatgaagattggggccttgagtcacaggggagaatgaggagggtttataggagtttaataccatgttttttcttggtaaagtgccatctcccgaggaagccttgtaatactcaatatggtctcctgctaacttggcctctctgattcgactggaaaacttctggatctctggcaagtgattgtggatcctggctgcctctcgctggccccttcacgatgagaggaaaaaatcaggcaagcgggcaaaagactgttacatgccagcaatggcccccccacccaaggtaggccccaagatcaacatgcattaaattccagtaaaatttctggatcaagtcccactggggtgtatgacccccagccccagttcaggcgaagctctgctctgcagcagtttggactacatctgcaagtctctccagaagccacctcaggtattgctgtgggtgagggagttgcagcaacaacaggaggggcctgaacctggacttctgcaaaagagatagcagggccctcgcaatggcttgggaaaccgctgaccacacggctcctattcccagcagccccgtgctgctgtcgcccacactacctcttccttgcggcttccggcccccgcagcctcagtacctctgctatctcttttgcagaagtccaggttcaggcccctcctgttgttgctgcaactccctcacccacagcagtacctgaggtggcttctggagagactgcagatgtagtccaaactgctgcagagcagagcttcgctgaactggggctggggtcatacaccccagtgggactgatccagaatttactggaatttatgcatgttgatctgggcctaccttggtggggggccattgctgcatgtacagtctttgcccgctgcctgatttttcctctcatcgtgacgggccagcgagaggcagccaggatccacaatcacttgccagagatccagaagttttccagtcgaatcagagaggccaagttagcaggagaccatattgagtattacaaggcttcctcggagatggcactttaccagaaaaaacatggtattaaactctataaacctctcattctccctgtgactcaggccccaatcttcatctccttcttcattgctttgagagagatggccaaccttcctgtgcccagcctgcagacaggtggcctctggtggttccaggatctcacggtatccgatcccatctacatattaccactggcagtcactgctacaatgtgggctgttcttgagctaggtgctgagacaggtgtgcaaagttctgaccttcagtggatgagaaatgtcatcagaatgatgcccctgataaccttgcccataaccatgcatttccccacggcagtgtttatgtactggctctcctccaatttgttttccctggtccaagtatcctgtctccggattccagcagtacgcactgtacttaaaatcccccagcgtgttgtacatgacctggacaaattacctccacgggaaggcttcctagagagcttcaaaaaaggctggaaaaatgctgaaatgacgcgtcagctgcgagagcgtgaacaacgcatgcggaatcagttggagctagcagccaggggtcctttacgacagacctttacccacaaccctctcctacaacctggaaaggataaccctcccaatatccctagcagcagcagcagcaaaccaaagtcaaagtatccctggcacgacacacttggctgacttatgttctgtgcgcattctggcaggaattctgtctcttcagagactcatcctcaaaacaagacttgacactgtgtccttgccccagtcctaggaactgtggcacacagagatgttcattttaaaaacggatttcatgaaacactcttgtacttatgtttataagagagcactgggtagccaagtgatcttcccattcacagagttagtaaacctctgtactacatgctgcttcctgatacttattgaacagggaaatgagtgtgcacttcagaaaactgaagaatacccagcattttgggaggccgaggtgggtggatcacctgagatcaggagtttgagaccagcctggccaacatggggaaacgccatctctgctgttttacaaaaatagccacacgtggtggtgcacacctgtagtcccagctactcgggaggctgaggcaggagaattgcttgaatccgagaggcggaggttgcagtgagccaagatcgcaccaccgcactccagcctgggcaatagagggagactgtctcaaaaaaaaaagaaaacctgaagaatagagtgagtcatgattgcttttgctggcccatggccttggaaaatataatgttttaacctggcattaagggtttaaacttccacccaggcgcagtggctcacgccagtaatcccagcacttttgggaggccaaggcgggcggatcacgaagtcagcagatcgagaccatcctggccaacatggtgaaaccccgtctctacta

SEQ ID NO: 58844 - DNA, 2128 bp, Homo sapiens
acggccccggaattaccgggtcgacgatttcgtctctgagaagccggactacgcggcagcggctcttcaaagcggagccgggagtttttgctacagttttcgccaccatgagtcgcagctataatgatgagctgcagttcttggagaagatcaataaaaactgctggaggatcaagaagggcttcgtgcccaacatgcaggttgaaggtgttttctatgtgaatgatgctctggagaaattgatgtttgaggaattaaggaatgcctgtcgaggtggtggtgttggtggcttcctgccagccatgaaacagattggcaatgtggcagccctgcctggaattgttcatcgatctattgggcttcctgatgtccattcaggatatgggtttgctattgggaacatggcagcctttgatatgaatgaccctgaagcagtagtatccccaggtggtgtcgggtttgacatcaactgtggtgtccgcttgctaagaaccaatttagatgaaagtgatgtccagcctgtgaaggagcaacttgcccaagctatgtttgaccacattcctgttggggtggggtcaaaaggtgtcatcccaatgaatgccaaagacttggaggaggccttggagatgggggtggactggtccttaagagaagggtatgcctgggctgaagacaaggagcactgcgaggagtacggaaggatgctgcaggctgaccccaataaagtttctgcaagggcgaagaaaagaggccttcctcagttggggaccctgggagcaggcaaccattatgcagaaatccaggttgtggatgagattttcaatgagtatgctgctaaaaaaatgggcatcgaccataagggacaggtgtgtgtgatgatccacagtggaagcagaggcttgggccaccaagtagccacagatgcgctggtagctatggagaaggccatgaagagagacaagattatagtcaatgatcggcagttggcttgtgctcgaatcgcttccccagagggtcaagactatctgaagggaatggcagctgctgggaactatgcctgggtcaaccgctcttccatgaccttcttaacccgtcaggctttcgccaaggtcttcaacacaacccctgatgacttggacctacatgtgatctatgatgtttctcacaacattgccaaagtggagcagcatgtggtggacggaaaggaacggacactgttagtacacaggaagggatccacccgcgctttccctcctcaccatcccctcattgctgttgattaccaactcactggacagccagtgctcattggtggcaccatgggaacctgtagttatgttcttactggcactgaacagggcatgactgagacctttggaacaacctgtcatggagcgggccgtgcattgtcccgagcaaaatctcgacgtaatttagatttccaggatgtcttagacaaattggcagatatgggaattgcgatccgtgttgcctcacccaaactggttatggaagaggctcctgagtcctataagaatgtgacagatgtggtaaatacctgccatgatgctggaatcagcaagaaagccattaaactgagaccaattgctgtgatcaaaggatagaaccttggacagcagggctgcctgacaccaccaaccctctctgaagtggaagtggactgacatgctcttctgacatcagactcaaggcgggacaagttgcaaagtgtgcagctgtaactgctcacgccaaaatggctgatggggaggctgctgctttcaggggcccgtgcttgtaaaataaccttccaggaagaggcacattgcccacctttggaaagggaggaatatgccttctccttggttgttccacagagttttaggaaaatctgttagggatgggtagatgtcaaactgccttacgcagtcatactgatctttagccatcagattgatcttcttcacaccaagctctgtttacattccgagaggtgtcatgaagaaagttctgttcaataagaaaaaaaaaaaaaaggggcggccgttttaaaggatccttgggggggcccaagtttacgcgggcatgcaacgtaatagctttttccttatagggagccgaattataa

SEQ ID NO: 58845 - DNA, 7752 bp, Homo sapiens
cagagacgtcagcatctcaagggcactgtggtatggaaaaggacgccacatgagtaaattttaaaaatataaatattttaaagggtaaaaatgagggtccctgtatttgaggatataaaagatgaaactgaagaagaaaagataggggaagaagaaaatgaagaagaccaggtcttctataagcctgttattgaagacttaagcatggaattggccagaaaatgcacggaactcattagcgatatccgttataaagaagagtttaaaaagtccaaggataagtgtacatttgtgactgacagtcctatgctaaaccatgtaaaaaatatcggtgcttttatttctgaggcaaaatacaaaggcaccattaaagctgacctttctaattctctttataagcggatgccagccacaattgacagtgtttttgcaggagaagttacacagctccagagtgaggtggcctacaagcagaaacatgatgctgccaaaggattctcagattatgcccacatgaaggagccccctgaggttaaacatgccatggaggtcaataaacaccagagtaatatttcttataggaaagacgtgcaggacacccacacgtacagtgcagaacttgaccgaccagacatcaagatggcaacccagatctctaagatcataagcaatgcagaatacaagaaaggacaaggaataatgaataaagagcccgctgtaattggaagaccagattttgaacatgccgtggaagcttctaaactttctagtcaaattaaatacaaagaaaaattcgataatgaaatgaaggataagaaacatcattacaatcctcttgaaagtgcttcttttaggcagaatcagcttgctgctacactggcgagcaatgtgaagtacaagaaagacattcaaaatatgcatgatccagtttcagatctcccaaatttgttgtttttagaccatgttttgaaagccagcaaaatgctcagcggccgagaatataaaaagctctttgaggaaaacaaaggaatgtatcattttgatgcagatgctgtggaacatctgcaccataaaggcaatgccgtcctccaaagtcaggtgaaatataaagaagaatatgagaaaaataagggaaagccaatgcttgaatttgttgagacaccatcatatcaagcttcaaaggaggctcaaaagatgcaaagtgaaaaagtttacaaagaggattttgagaaggagattaaaggaaggtcatcactggatttagacaagactccagaatttttacatgtaaagtacatcaccaaccttctgagggagaaagaatataaaaaagatttggaaaatgagataaaagggaaaggaatggaacttaattcagaagttcttgatatccaaagagcaaagcgggcctctgaaatggcaagtgagaaagaatacaagaaagacctggagtcaataattaaagggaaaggaatgcaagctggcactgacacccttgaaatgcagcatgccaagaaggctgcagagatagcgagtgagaaagactataaaagagatctggagactgaaattaaagggaaagggatgcaggtgagcacagacactcttgatgtccagagagctaagaaagcatccgagatggccagccagaaacaatacaagaaggacttagaaaatgaaattaaagggaaaggaatgcaagtgagcatggatatcccagatatccttcgagccaagaggacatctgaaatctatagccagagaaagtataaagatgaagcagagaagatgctttctaactattctaccatagcagatactcctgaaattcagagaattaagacaactcaacaaaacattagtgcggtattttataagaaagaagtgggagctggcactgcagtgaaagatagcccagagatcgaacgagtgaagaaaaatcagcagaatattagttcagtgaaatacaaagaagagattaaacatgcaacagccatttctgatcctccagaactaaagagagttaaagaaaaccagaagaacatcagcaatctccagtataaagagcaaaactacaaggccactccggtaagcatgaccccggagatagagagagtgaggcgaaaccaggagcagctgagtgcggtaaaatataagggagaacttcaacggggaactgcaatttctgatccaccagagctgaagagggcaaaagaaaaccagaaaaacatcagcaatgtttattacagaggtcagctgggaagagctaccactttaagtgtaactcctgaaatggaaagagtgaagaagaatcaagaaaatattagctcggtaaaatatacccaggaccataaacagatgaaaggtagaccaagtctgattttagatacacctgctatgagacatgttaaagaagcacaaaatcatatttcaatggtaaaataccatgaagattttgaaaaaacaaaggggagaggctttactcccgtcgtggacgatcctgtgacagagagagtgaggaagaacacccaggtggtcagcgatgctgcctataaaggggtccaccctcacatcgtggagatggacaggagacctggaatcattgttgacctcaaagtttggcgcacagatcctggctccatcttcgaccttgatcccctggaagacaatattcagtctagaagtctccatatgctctctgaaaaggcgagtcactataggcgacactggtctcgatcccattccagcagtactttcggtacaggtctcggagacgacaggtcagaaatctccgagatttaccctagcttttcatgctgcagtgaggtaacaagaccgtctgatgaaggagcacctgttcttcccggagcctatcagcaaagccattcccaaggctatggctacatgcaccagaccagtgtgtcatccatgagatcaatgcagcattcaccaaatctaaggacctaccgagccatgtacgattacagtgcccaggatgaagacgaggtctcctttagagacggcgactacatcgtcaacgtgcagcctattgacgatggctggatgtacggcacagtgcagagaacagggagaacaggaatgctcccagcgaattacattgagtttgttaattaattatttctccctgccctttgagctttattctaatgtatcccaaacctaatctttttaaaagatagaagatacttttaagacaacttggccattattttacaatgatgtatccttcctttgacaattagacacacaggtaccaggaagaaggaatgacctctgggctgaaaacagcagcattttcagtaattcctacaaacaaaaatctttgtgtctggacgcctggtgctgctaattgtgttcatggtttcctttgattggctattgaacccttctgggaaatgtatttttgtagactttaatagagaagttgattgtcccttaaatgtagcgtgtgtttgaaacttcttagctgtcactttggaatcaccccaagccaattctcttaactctgtaatgcagccaataatttcaaacccgttttgcttttgagtcatgaggcaatttccaatattagtgaaaattgcccaatataataagtgtaaacagtggcagaaggacagtctggttaaaattatattgactggtggccttagggatctagaaacttctactaaacagagaaatttccttgttccctaggctgactggtatctatttatttctcatttgtaccaaggcatctcctactctccatttatattctatggacccaagtctatgctcagttccacagaatgtcaggaccaaataacttcacagctactctgcaaagggcaaattataatgtcattgatataatttccctagtagcatttaccctgttgcatgtcatgtagattcaagcttctgtaacataggcagctgcactgcgcgttcctattattgaagcaaaaagggtgactgatacctaaaagccctttcttcctctagtcgccagctcatcagaaaaacatactttgaaaagatgcttgagattttcctgctgcatcgcactctagtttggaaggatttacatcttaggaaataacatgtatactctagtaaataagcgatttaggtgttccattgaacagctttgattaacttaatgccaccattgatttcaaagtgaagaaaatgtaacagaagccagtgaagcaatggaagctggagtgtgactggaaaaatactcagcaaacaaagttaccaattccatacagagatgatctggtgtcttcttttggaaaatggtattcaaattctggaatggaaatctagccaccaaaacgggttaatcaaaagacgtccttttccatttttttttgcttttattttctaaatcatttttaagggaatgaaacaggaatgtcatcagagattttttagtacaggcccaagagcctgttctctaagaaagaaattgttgccatgttttgattttcgaataagtgactttgcaggcttttgctagcccttgctggtggagagtgaaattacatccagagtctgcagtccaggtcaccaagccagcggcacccgtcggcaaccctgtgtttttctgattgtgccgtttactgtgacctgcaacggggtggcattcacttagggtctgacttcacagctatgacaaaaccgaaaaagcaaaactgcaaaaaagtactaagatgtacgggtcttggggatatctgccttatatgttatattcaaggaaattaacaaaacatcctgtaaaacatcgtttaaggaaacgtttactagtccaaaggccaaagctaatttatttccactttagaaaagttagcacatgcttttgaaaatctgtgatttcattttattaggctaaaagggtaaataggctttattacactgaagctgcatctatatgtcactgacataaagttgaaaaaataaatgcaggcaaataactagagacttcttttaagggggtttggctggttttctctcactgaaatggccagtcgtgattaaagtgataaaaccccatatctgttttggtatattgtacacaaacctacaaaaataaactgaacttgcaatatttttgcaaaaaaatctgtccgttaaaactgaggataaaatacctgctcaattttattttactaagtatatatttacatttcacccaggcaggccattttcttttgtgattataagaaagagtagttgttgattaaattttcagactaaatataggacaggtacaattttggataaatagcagatttataagaaccgcaatgaaaactgacttgaaataatgcttgtaatcaggaaagtaatttcatccaccgatttcaaaaccagattcactgagcataaaagtcaatacatatttgaggaataagtctcctaaaattttaagcttcacgtaataatgtttgcatagcaaaatatttctgcttcaagcctttaggaattaagatctgatcagaatttaactaaagggtagttgttttacaatgaagactaaaactgaacaagatgttgcatgctcttgagggccataatttgggtagtgttgggcagttgttaataaaggcttgtcagggatgttaaggcatcttcagggaggaaatattggaaaattatatgtataaaaccaaagtgctgtttttaaaagcatcatttaaaaaaaaatgacatgcctgaacaacttttccactttccacgtgcttccctcccacctttggtttggcaacaggtatctcgtgcatgaagctgacagctaaagaagattttaaaaattgagttaaagatgactgtgtaaatgtccaagcacagagagcatgcacctgactttctaaagtttgatgtgttctcaagcctgacagaagcacaaggaacagtttgatacacttttaaaaggttctgaaaacaaagctgtatagggatcctctctctcttgagcaaagtataggcaacagaatatattgcttttgttgtaagcttttgtagtacatgtttttactaataatttcttgttctctaggaaggctttctatttccgccctatgggcaaatggaatccttcatgtcttcttgtcattgttgacacacttgcagtgtagcccagtttggaaatatttatttgggttatcaactgcccatggaggaggctcttgatggatcccagggtctcctccgacctccatacaccacacaggcatttgtaagcacagtttccacaagcaccttgtaggaatatgggataagattagaccagcccctctctgtccactgggtttatttcttgacgaaggatgcagatcttggttgttccaatgtgccacagtctttccttatcctctccatgctgagcttgacaacactctgggaatgaggaacaagactttttctaaaaagatagtggaagttcaagggatgtacctcgttttcaggttcatccatctccagtggaatgttttcaataaaagatgaagaaaatgtgtgtgatctttaataacacatccctatagaaagtggataaaagatataccaaaactgtaatacagatatatacaaatataggtgcctttttgattactcttgtttgtctagtatggtcttggaaagaaaaccaagcaagcaagttgctgcctattctatagtaatattttattacacatgattgatatttttgtggtagggaagtgggatgctcctcagatattaaaggtgttagctgattgtattttatctctaaagatttagaactttagaaaatgccgacttcttccatctatttctgaaaggttctttgtggatttatatagagttgagctatataaacattaactttagatttgggatttaaaatgcctattgtaagatagaataattgtgaggctggattcactacacaagatgaacttcacttcataaattaattataccttagcgatttgcttctgataatctaaaagtggctagattgtggttgttttggttaaggtgatatggaggtgggagagcttttagttaagtaagaagctatgtaaactgacaaggatgctaaaataaaagtctctgaagtattccatgccttttggaccctttcctcgcaactaactgtcaactgttgatcaaaaaagtcaaggcattgtatgttgcttctgtggttattattctgtgatgcttagactacttgaacccataaacttggaagaatctttgagcaaattttctcagttgtctgtatgacttcagtatattcctgggaatgccataggattttttgtgcttgatacatggtatccagtttgcatagtatcacttctttgtaatccagttgctgttaagaatgatgtactttaaaggaaaagagaaaactgcatcacagtcccattctccagtgtccatgcaatgaattgctgagcatttaggaagcagcaccaagtctattacaggcatggtgtgaaacttgatgtttgacctgtgatcaaaattgaaccattgtacagtttggcttctgtttgcttcaaaatatgtagaattgtggttgatgattaatttgcgagactaactttgagagtgtaacagttttgaagaaaacattgaatgttttgcaaatgaaggggcttcacggaatgttacaatgttactaatataatttggcttttgttatgcaaattgttaacaccagctattaaaatatattttagtagaaaaaaaaaa

SEQ ID NO: 58846 - DNA, 1645 bp, Homo sapiens
cattggagtcaagatggaggagtacgcgcgagagccttgcccatggcgaattgtggatgactgtggtggggcctttacgatgggtaccattggtggtggtatctttcaagcaatcaaaggttttcgcaattctccagtgggagtaaaccacagactacgagggagtttgacagctattaaaaccagggctccacagttaggaggtagctttgcagtttggggagggctgttttccatgattgactgtagtatggttcaagtcagaggaaaggaagatccctggaactccatcacaagtggtgccttaacgggagccatactggcagcaagaaatggaccagtggccatggttgggtcagccgcaatgggtggcattctcctagctttaattgaaggagctggtatcttgttgacaagatttgcctctgcacagtttcccaatggtcctcagtttgcagaagacccctcccagttgccttcaactcagttaccttcctcaccttttggagactatcgacaatatcagtaggacttctttcctaggatttctttaacagaacgagttgtggttcgagaaggatttcagaagatcaagttacagtctgtttttaaaaccataggtgggacagctatggccaataggctataaagagacatttagcacttttttctatttaaaggaacaagcggggaagggtgctaaaagataatacgtttatttattcacacttgaattgcatttgtgatcaaaataaatgtttaaatcgctaaaggaaaatacagtaagtgcttgaaagatgaaggaccaaaaggccaaaaaacagtgaaatatgatcatcatttccttgcggacttctctgcctggttttgtgtgttctgttattcaaacaataaaaagctggtggaacttactctttcttttaagataagttgtagacttcgatgtttcatgctcatgtacttcaaataatgcatgttttatagttagtccctcatcacttgaagtgacttctgagaattatgcagagtcaacatggatcatttcacagtgagatgctttatggattgaaggatatggtaaaatgtttatagtttactttgaaagtaaaatatactatgtcttggttttgaggatattggatacaaaactctcttcctttagggctactgagtcttgattcctgatcatcagaaatttcaccagaaacaacttgcttccaatatacccaattctatatgaagaattcatggagagtgtactggcactggaagagtttagtgtttcttgtatgcttgaaaataaagtatgtactgttttgaatgtgttccaagtcctctgcataaacgatgtattttggggtctggttgggcctggaaaatggatgagcacttcagaacaggtcattttccctgatattggaagtgacatgtggccctataggaggcatgatgttagttaattacacatttgcctacatctgtgggaaatggagaacaaagccatgtgggtactgtaaacacacgtttatcttttggcccaatgccatacatatggtaggcatttaattactgattgtgtttggataatttgggaatttttgactgtggtaaaatatacataaaataatactttttaaaaaaaaaa

SEQ ID NO: 58847 - DNA, 2307 bp, Homo sapiens
gacccacgcgtccgcgcagtttgctctccttgttttgctttcgagctggactgttctcaggcaagccggggagtaacttttagttttgctcctgcgattattcaactgacgggctttcatttccatttcacacaccctagcaacacttataccttgcggaattgtattggtagcgtgaaaaaagcacactgagagggcaccatgccggtggaaaggatgcgcatgcgcccgtggctggaggagcagataaactccaacacgatcccggggctcaagtggcttaacaaggaaaagaagatttttcagatcccctggatgcatgcggctagacatgggtgggatgtggaaaaagatgcaccactctttagaaactgggcaatccatacaggaaagcatcaaccaggagtagataaacctgatcccaaaacatggaaggcgaatttcagatgcgccatgaattccttgcctgatattgaagaagtcaaggataaaagcataaagaaaggaaataatgccttcagggtctaccgaatgctgcccctatcaaaacggccttctaagaaaggaaagaaaccaaagacagaaaaagaagacaaagttaagcacatcaagcaagaaccagttgagtcatctctggggcttagtaatggagtaagtgatctttctcctgagtatgcggtcctgacttcaactataaaaaatgaagtggatagtacggtgaacatcatagttgtaggacagtcccatctggacagcaacattgagaatcaagagattgtcaccaatccgccagacatttgccaagttgtagaggtgaccactgagagcgacgagcagccggtcagcatgagcgagctctaccctctgcagatctcccccgtgtcttcctatgcagaaagcgaaacgactgatagtgtgcccagcgatgaagagagtgccgagggacggccacactggcggaagaggaatattgaaggcaaacagtacctcagcaacatggggactcgaggctcctacctgctgcccggcatggcgtccttcgtcacttccaacaaaccggacctccaggtcaccatcaaagaggagagcaatccggtgccttacaacagctcctggcccccttttcaagacctccccctttcttcctccatgaccccagcatccagcagcagtcggccagaccgggagacccgggccagcgtcatcaagaaaacatcggatatcacccaggcccgcgtcaagagctgttaagcctctgactctccgcggtggttgttggggcttcttggctttgttttgttgtttgtttgtattttatttttttctctctgacacctattttagacaaatctaagggaaaaagccttgacaatagaacattgattgctgtgtccaactccagtactggagcttctctttaactcaggactccagcccattggtagacgtgtgtttctagagcctgctggatctcccagggctactcactcaagttcaaggaccaacaagggcagtggaggtgctgcattgcctgcggtcaaggccagcaaggtggagtggatgcctcagaacggacgagataatgtgaactagctggaattttttattcttgtgaatatgtacataggcagcactagcgacattgcagtctgcttctgcaccttatcttaaagcacttacagataggccttcttgtgatcttgctctatctcacagcacactcagcacccccttctctgcccattccccagcctctcttcctatccccatcccatcccatcccatcccatcccatcccatcccgctcttttcctacttttccttccctcaaagcttccattccacatccggaggagaagaaggaaatgaatttctctacagatgtcccattttcagactgctttaaaaaaaatccttctaatctgctatgcttgaatgccacgcggtacaaaggaaaaagtatcatggaaatattatgcaaattcccagatttgaagacaaaaatactctaattctaaccagagcaagcttttttattttttatacaggggaatattttattcaaggtaaaattctaaataaaatataattgttttttatcttttctacagcaaatttataattttaagattccttttcttgtttatcagcagttgttattacatccttgtggcacatttttttttttaattttgtaaaggtgaaaaaagcttttatgagctcatgtagcaatcagattttcctgtggattgataataaatgaatatgatatatagttaaatttttaaggggcatcaaaaaaaaaaa

SEQ ID NO: 58848 - DNA, 1404 bp, Homo sapiens
ttttttttttttaaaaagagaaacctttatttacaaccatgggagtcccacaggagtacacaaaacacacaatgtgcacacacacaaaatgaaccttttaagtcaataccatgcgtgctcctggccgcgcgccacccctcagtgccctatccgcaccaccatcacagtgacgttgtcggccgagccccgctgcaccgccttgttggccagcctgttgcaggctgcttcgtagcgggcgtcggctgcggacttcccttcccgggtctggatcttttcatcctcgagacaggacaagatgaagttcacggcttcttctggggtaaagaccttgaagagcccatcacaggccaacaaaatgaacctgtcattgggggtcagctggcagcgtctgatgtcgggcacagaggtgacaccgcagcgcttgtactgcccgtccccaatggagcgtgacacctctagcacgcccaaaacacgcccatccctgacgtttcctccagccttctgtatcctcatccgctcttcatactgagttggattatgctctttgctgaggcttaaggctgcatgtttttgactctcctcattataacgacacaagattgcccgactatctccgaggttggcaatataaagaatgttgtctacagccagaacacacgtggcagtggacccatctttccaggcaggcttctggctggaagcttgtttaaggaactcttcatcagtatgcttgaaagtgtccaaaaggcatctcttcacggttttctctacactgattacatctcctttaggaaattttctgattaagttttgatgcaaattctgtgcagcaaattttgaggctcgaattcctccatgtccatcaaaaacagcaaaatatgaaacccgagtaatgagggacgatgggggcctacactcctcggtgatgtcgttcaggatgacgtgggcatcctgcatctcctccctctcacccttccgctcagccacatagcccttcagaccaaagatcaccgaagaggctttacaaactttcttttccacaagctcttcactgccattcttctcttcctcggaggtttttctctttgctcctttcccttcagtctttaccatctgggatattgatgtggcaagagaacctgaatcgccactgctagcgggtgggagatcatcaaaaagcaaaggtccccctgatcctgagtcagtactgctggccggagggaggtcatcaaagagcaggggtcctttctgagcttctttcccggcagccgggcgcggcgagcgctcgggctccggcaggtccccgaagaggtccatggcggaggctgggtggaggcggcagcagcgacagacactcagcccgcgagcagcggccgggctccacgaaatcgtcgacccgggaat

SEQ ID NO: 58849 - DNA, 991 bp, Homo sapiens
cccacgcgtccggcgaggcgcccgaagccgtcgcggcggggaccatgttgcttccgaacatcctgctcaccggtacaccaggggttggaaaaaccacactaggcaaagaacttgcgtcaaaatcaggactgaaatacattaatgtgggtgatttagctcgagaagagcaattgtatgatggctatgatgaagagtatgactgtcccattttagatgaagacagagtagttgatgagttagataaccaaatgagagaaggtggagttattgttgattaccatggttgtgatttcttccctgaacgctggtttcatatagtttttgtgctgagaacagataccaatgtattgtacgaaagacttgaaacaaggggttataatgagaagaaactaacagacaatattcagtgtgagatttttcaagttctttatgaagaagccacagcatcctacaaggaagaaatcgtgcatcagctgcccagtaataaaccagaagagctagaaaataatgtagatcagatcttgaaatggattgagcagtggatcaaagatcataactcttgacttataaggctagctacttaataatcactcttgttgatatctctgccgacatcatagaaattgttcaagtgtcagtaacactttattaaaatcatgttgcagaaccagcaggtggatagtatataggtttatgcctgtgtttctttttctccatgagaaagctaaacatgaaatataatgaatatagtattattaaggattgagacaaaaactgtgattttaatacttaaattgctaaagaataaataaatctgacaaaatgggtggatatcttttaagtttattacagaaaaaaatgcagatgatctcttaaaataaaactaaagataaagcaaaaaaaaaaaaaggggggggccctttaagggaaccaagttttattcccgggggggggggagggtaaatttttttatatggggccccaaattcct

SEQ ID NO: 58850 - DNA, 791 bp, Homo sapiens
ttttttttttttccaaaaaaacagcctttattgagcagctattgggcagtgacgctgccgaggcgggaatcccaccacagtcctgaccgcagctgggacccctttgcctcctctgacacccccacctcaatttgatacccacttcctgagcaaatgtgacccctagggcctgggattcccaaaatgaccaccccgaaatgcagcggccccaccgtctcctgaggccggtgaggccagggggcagcagtgcggctcagcaggtgcgaggcaggcttaggatttcggaatcaccacctggaacttacagacgggcagggctgccacggaggcggtgaccacgctctcaatgcccagggtatagagggcgccgcgcaggaggccgcaggtgaaggccaggaacttgggtgcttcctccagatactgcaggccagaggccatcgggaggaggagggggaagctgttgtcttgcaggacgtaggtcccctggtgattggtgcgcaggctgtccatctgcttctggaacaccgccacccacaggtctttgcacaagaacttgaggacatccagctcctccctgaaggccagcgtctcccggggcagcctctcgcctagagcctggcccacacggaaccccataccctccaggaccgacaggctcatcttctgtccccccgggccggggtcggggtcgtgagcccacagctcagccaccatctccgtgtgaagaaactcaaacaacacagtatccgccatgccccctcctcgcacgcctaaagatgcgccctcgtgcc

SEQ ID NO: 58851 - DNA, 624 bp, Homo sapiens
ttttttttttttgggggtggtggggcgagtttaattcataaagaagcctcctgatcagaaaggggcctaacagcctgcccttggagagaagtccttccttgaggataaggcctcccaggggaggaggtgctgggggccagtgttaggcttcaggccatccctggaggccagtcctgtgctcagcaagtagtggcagagcctggagtgatgagtgggatggccttctcaggtacaggactgtgctgcttctggctgctcttgcatttgcatttgccactcagaactgccgcgatcccagcaatggccaggagccctccgcagatcagtccgctcagctgcaggtttttccagtcatagtagaagggatcgtctttattggcaaatgggtcattggcttccaaggcagtcaggcctgccagtaggagaagggccagggtcactctctccatgtcacagttcgaggggcagggctgcagggggagaggcactggggcgggggtctgcagcccacggatctgctccaggctcacagctcaattggtcaactgtgtgactctgcaggttcctcactgctccttcaccagtgtcctgcgaggtcaccttggcgagggctcacctgagctg

SEQ ID NO: 58852 - DNA, 2902 bp, Homo sapiens
tgggaccaaaacaaaggagcggcggccgggagcggacttaccttaccttctctgccttcggcgcgcttctcagccgggccgccgacccaaaggagccgtccgactatgtctaacatggagaaacacctgttcaacctgaagttcgcggccaaagaactgagtaggagtgccaaaaaatgcgataaggaggaaaaggccgaaaaggccaaaattaaaaaggccattcagaagggcaacatggaagttgcgaggatacacgccgaaaatgccatccgccagaagaaccaggcggtgaatttcttgagaatgagtgcgcgagtcgatgcagtggctgccagggtccagacggcggtgacgatgggcaaggtgaccaagtcgatggctggtgtggttaagtcgatggatgcgacattgaagaccatgaatctggagaagatttctgctttgatggacaaattcgagcaccagtttgagactctggacgtccagacgcagcaaatggaagacacgatgagcagcacgacgacgctcaccactccccagaaccaagtggatatgctgctccaggaaatggcagatgaggcgggcctcgacctcaacatggagctgccgcagggccagaccggctccgtgggcacgagcgtggcttcggcggagcaggatgaactgtctcagagactggcccgccttcgggatcaagtgtgacggcagaacccgctctgaggtttcctggccatagccaccctttgaaatgctctctgtgtgttagagagatactataccctagaaactctgaacacgccagaatgctgaaatgcccttctacctttgggtttacagccccctccacataaattaagaaattcagtatttctgcactcttagctggattctaaagttctgtatagctcgtaatgatggtatttttatagcagccttttaacagaactagttaatttcgtgtatatgaatctttctcgaagatctggtcaaaactgtattcagtttcctgcccagaatgatcagattgaaggtggttggtttttattattatttagtgtgattgatagtatctagaatggcaggtggtgcataaaagttaaagagaggggaaagattacttagtttggttatacagttataaacaccatgcagtgtattcggtggactgtgctatttctgtttatcctttggggtttggtttttgttttttttttttgccttcacagtgagactgcaaatgattgttctcataacgtatattattaataaatgtggtcctataatttatactgaaattaccttaggatatttttgcataatactctcttactgcttacattctataaatttttcacgtgataattgtctttgcgtaactgggaaaaatgccgaataacttcctttattatctggaaaaattaaatttgttcatttatattttctacttactaaattgagtttttaaaaagacttagtgtgacatttgacagtgtctttcaaacgaacttctctaacaagtttatagttattttcctgtttcaacactattagaagtcttataaattatgctaattagcatggcagtcatgttacacactcttaacattgccaaagaactgttgatttcgtttgagaaaaccctgggactgtgtgtgtgtaggttttgttttgattttaacaaccaaaaatagaaataaaattagaactgcgttttaagttctaatttgcatttattaatttgtccaaaagcaagaactcttggaaatccttgaaaatataagctggaatgttttacttagccatgcaagtcatttatgtatacatccagccagctggaaatctgagaagtaaagaggtaggactggaaggaaggagaaagcttgagtctttaaggctagagcccagctgtgctgcctgccatcttctcaggaatggcagtgcgtattttctggctgaaaagtaaagcatgtatccaccgctttctcatagcctcgaaacatggagaaaagcaacttgcttttgccttggcaagcatgctaacctaagttaattcaagttttttttaacttaccctttccttcactggaagatttttccataagagaattccattgtttcagaaaataattataggggcccttccaagttctttgaaagattcataaccaactattcactattataacatgtttcccagtgtaaatgagtaaggaaaaaaaaagtgtaacaggtgcgtgcagatgaggagtgaccctcatatttaagttattttatatttgactggacattgttcagaagtgtgctttaagggacacttgttggttgtctgcccagcatctctcaagaatatccctcctgtcctccacatggttgtgcagggccatgtgtgaagacagcatgagtcttaacccctcttttattttatttttgagacagagtctcgctctgttgcccaggctggagtgctgtggcgcgatctctgctcactgcaacctccacctcccgggttcaagtgattctcctgcctcagcctgccgagtagctggaattacaggtgtgcaccaccatgcccagctagtttttttgtatttttagtagagacagggtttcactatgttggccaggctggtcttgaactcctgacctcaggtgatccgcccacctcagcctcccaaagtgctgggattacaggcatgagccactgcacctggccttaacccctctttagattggaaaaaataattacaactttaaaaatagcttagtgttgaaccctttggtaaactaaagacccttttataatgcacatattcccaacaaaattaatatattttgtgagattaaacaatgcttgtatatgcttgaactttcttaaaatatgtccatgtcatactattat

SEQ ID NO: 58853 - DNA, 1445 bp, Homo sapiens
ttttttttttcagaatgaaaacacttacaaatcatttttattatgaataatttaggatatttgggacattcatttctgagtaaaatagttcaaaataggattttgttgatacctgttgatacatatttagaaacaaaaatgagatatccttttgaaagtttgcctttgtagtaaattcagtcattcaaattgttttctctcaagacccaaaaatgccaggggcattgccggctcttgagtttattctttgtttcttcatcaaattcttccatgggactctattaggtttcccgggggtcccagctcacctaggggggaaaggggggtaatcgggttccccaaaatgactttatcctttcctatggacatctggttaacagcttgaggggacagaggatcatgaaccaaagcatctgtgtaaaaggaaccaaggtatttcttcgggttcatggggttgtcctgggcacacagatctgggcgcatgctgaatccatgggagattcttcccactgtgaaggggaaggcaccaccaccatgtgcgaaacacactttcagtttgggaaacttctcaaatactccacccatgatcatggagcaaatggctatggtggtctctgctggcattcctacaagccaagggagccagtatttggccattcgtccatccatctgcatgtcccagggatgcacgaacagggaacacttcagcctttcggctgccgcatagacaggaaagagctcctgcgcgttcaggtcccactcgttgacgtgggtgccaatttggaccccgggaaagcccagctctttcacacagcgctccatctccttgaccgccagctcaggggcctgcatgggcaacgtccccagacccacgaacctcctggggtagctcacaacggtgctggcaaggtcgttgtttaaaagctggcacaggtttaaagtgtcctcaggtttggcccagtagctaaacatgacaggaactgtggaaagggcttgcactgttactcctttttggtccatttctctaatacgaacttctggatcccagcaattctctcgcaccactctgaagactttcccatctttcaacaactttgcttctcccttgctgtggtgttggagctgcacccagcctccgtagccaaacctctttcactggctgccctgttttccctgtctcacttcctcactctactggtgtttcctgggatcacctccaaagcaaactacttgcatctgaatccttgtctcagggtctgcttttttagatctggccattcttttggtagaatatgactatggatgtcaattttcatctccacaggatcagagaagcatgcaaggaaagaagttttgatatcaagagacctttgtgaaaactgtggagttaattgatttacttagtccctttacagcaaccttcaggcagcagtcagtaggcctgc

SEQ ID NO: 58854 - DNA, 1565 bp, Homo sapiens
gcggacagagggctggaaacaagacgctccagaatcaggagcttcccctcaggaaatagcatcctgtgtccccgcactgcagttgtctggtctctccagcagtttggtacttccggctgctgcaatgcgtgtggtggtgattggagcaggagtcatcgggctgtccaccgccctctgcatccatgagcgctaccactcagtcctgcagccactggacataaaggtctacgcggaccgcttcaccccactcaccaccaccgacgtggctgccggcctctggcagccctacctttctgaccccaacaacccacaggaggcggactggagccaacagacctttgactatctcctgagccatgtccattctcccaacgctgaaaacctgggcctgttcctaatctcgggctacaacctcttccatgaagccattccggacccttcctggaaggacacagttctgggatttcggaagctgacccccagagagctggatatgttcccagattacggctatggctggttccacacaagcctaattctggagggaaagaactatctacagtggctgactgaaaggttaactgagaggggagtgaagttcttccagcggaaagtggagtcttttgaggaggtggcaagagaaggcgcagacgtgattgtcaactgcactggggtatgggctggggcgctacaacgagaccccctgctgcagccaggccgggggcagatcatgaaggtggacgccccttggatgaagcacttcattctcacccatgacccagagagaggcatctacaattccccgtacatcatcccagggacccagacagttactcttggaggcatcttccagttgggaaactggagtgaactaaacaatatccaggaccacaacaccatttgggaaggctgctgcagactggagcccacactgaagaatgcaagaattattggtgaacgaactggcttccggccagtacgcccccagattcggctagaaagagaacagcttcgcactggacctttaaacacagaggtcatccacaactatggccatggaggctacgggctcaccatccactggggatgtgccctggaggcagccaagctctttgggagaatcctggaagaaaagaaattgtccagaatgccaccatcccacctctgaagactccagtgactgctgcctccccccacaagaactcccttctcccctcagccaatgaatcaatgtgctccttcataagccattgcttctccctcacttctttcctcaaagaagcatgaggtgagagaaagccacaaagtcagtgcctggagaagggttcagcccaacatggggcccctctcatcactgaaatccctctaccttctctgggtctggcattataaagaacagctgaggctgtcattccatgagtcttcagaagaaaggacagctcagaaaatcaaagaggccaactgcccagagccacagaaaatggaggataattgaggctaagtaacctgattacaagttgtactaacatattaaaggttctgaaaagtcctgcagcaaagacaaa

SEQ ID NO: 58855 - DNA, 1823 bp, Homo sapiens
cggacgcgtggggcggcaactcgcgcactcaaagatggtccccatccctgctggagtatttacaatgggcacagatgatcctcagataaagcaggatggggaagcacctgcgaggagagttactattgatgccttttacatggatgcctatgaagtcagtaatactgaatttgagaagtttgtgaactcaactggctatttgacagaggttgcagctgctccctggtggttacctgtgaaaggcgctaactggagacacccagaagggcctgactctactattctgcacaggccggatcatccagttctccatgtgtcctggaatgatgcggttgcctactgcacttgggcagggaagcggctgcccacggaagctgagtgggaatacagctgtcgaggaggcctgcataatagacttttcccctggggcaacaaactgcagcccaaaggccagcattatgccaacatttggcagggcgagtttccggtgaccaacactggtgaggatggcttccaaggaactgcgcctgttgatgccttccctcccaatggttatggcttatacaacatagtggggaacgcatgggaatggacttcagactggtggactgttcatcattctgttgaagaaacgcttaacccaaaaggtcccccttctgggaaagaccgagtgaagaaaggtggatcctacatgtgccataggtcttattgttacaggtatcgctgtgctgctcggagccagaacacacctgatagctctgcttcgaatctgggattccgctgtgcagccgaccgcctgcccactatggactgacaaccaaggaaagtcttccccagtccaaggagcagtcgtgtctgacctacattgggcttttctcagaactttgaacgatcccatgcaaagaattcccaccctgaggtgggttacatacctgcccaatggccaaaggaaccgccttgtgagaccaaattgctgacctgggtcagtgcatgtgctttatggtgtggtgcatctttggagatcatcgccatattttacttttgagagtctttaaagaggaaggggagtggagggaaccctgagctaggcttcaggaggcccgcgtcctacgcaggctctgccacaggggttagaccccaggtccgacgcttgaccttcctgggcctcaagtgccctcccctatcaaatgaagggatggacagcatgacctctgggtgtctctccaactcaccagttctaaaaagggtatcagattctattgtgacttcatagtgagaatttatgatagattattttttagctattttttccatgtgtgaaccttgagtgatactaatcatgtaaagtaagagttctcttatgtattattttcggaagaggggtgtggtgactcctttatattcgtactgcactttgtttttccaaggaaatcagtgtcttttacgttgttatgatgaatcccacatggggccggtgatggtatgctgaagttcagccgttgaacacataggaatgtctgtggggtgactctactgtgctttatcttttaacattaagtgcctttggttcagaggggcagtcataagctctgtttccccctctccccaaagccttcagcgaacgtgaaatgtgcgctaaacggggaaacctgtttaattctagatatagggaaaaaggaaccgaggaccttgaatgagctatattcagggtatccggtattttgtaatagggaataggaaaccttgttggctgtggaatatccgatgctttgaatcatgccctgtgttgaataaacgtatttgctaaatcaggaaaaaaaaaa

SEQ ID NO: 58856 - DNA, 1590 bp, Homo sapiens
ttaaagaaaatactttattatgtcatgaaaaaaaaggcctcaaccaactagattcatacttgatttgaaaaaaaaatggaaaatttattaattagacagtatgtgggcatcctgttccacatgggaatgagaagatgctataggttctctaagtattgcacagtctgaaaaaataacaaaaaaagggaaggggaggaaaaaaaaaatcacatgatattgggaaccatctcacattatgaataatctaccaagaaacatttaaaaaagaaaaccctttgtttctacagtagctttaagtttatagttcttggaatgactgtattccattgaagacatctcagtaacaggaagctgttttagcaatcccatgtgcaaatattaataaaaaatatataaaataatgcaattcatctcttgccttcaccccggcaatcatgacatttctgagaactgttttgcttgaaaatgggttaagctgtaagttttgcctgaagctccatctctgcagcccgtttgagtgcaacatccactagaagctgaaatccactgaagtcctggttgaggtccggtggagtagggggaggagtgttgaaaagaccactctgtgtattcgtacttggtccagatttacaagtgtcctctgggtacatgagagaggtgtctgtgaagtttttggccgctatctgctgtatatctgtgttttgtcccacaccgaccgactggcagagagagaaagggacatctttcaatgcagtcacagtggtatggcagatcactgatggacgagccaaaactgatcccggggatgacggcttaggagacagtggcctccctagggttgggtttggcccagctgtacaggaatgaaatggggtctcctctagagctggcatgaagtttttgatgcccatcacggactccacagagctcgtttcagaaatcttggccccacggcgggaaattgtgaactgatttggatctttgccatcctttctcagcatgtcagggaggagcctgcggcgggcgttgatgaaccagttacagacctgtagcgtagacaggtgtgtttgctgggacagcaacgctttttcttgctctgaaggataggcattgtaacggtgctcatacagccaatcccgaagaatctgcacagactccttgggtaggttgccccttctccttctcttgcctgagccagcggatgaagaaaggtccaagggaatgtccatgctgtcctcatcctcagtctcactgccagatgctgcaacaatacctttcttgcctttcattctggatctcccctcccagcgcgaggcaaggcgggggtctggaggggccaggagcggggacacaggggataagcgaacgtctccttcacagccgactctcccgtaacttgtaggacgtgctccagccgttattgctaaacaggacgctctgatcccaggcgcccgctccttgggtggaattcaagtgacacttgggcttcctcccgccgggatcttctggcagccggccgggggctctccctcgcccaactctctcccctcccctctccgctcctttgttccctgctcctgctcggcgcac

SEQ ID NO: 58857 - DNA, 1129 bp, Homo sapiens
aatgaatacaggtaacacaggtataattttactgctattctgattttatgaatgaggaaactacgtctcagagaggtcaagctgcttgcataaagtcccacagagagttagagagggattaaaatacagttcccctgcctggttgttcttctcttttaccatatcacttactagggctttgtttcattatccaaaaattcaggtacagcatctaattagttactaagtaacaattttcaaaggctaaacatgattcttaaattttaaaacttaccgtggtatccacagccttgactttctctgtgggaatgtgctttggctcaggttctgtctgtgacagcaccacacatccttcagcccctaaggtaatgattaccacctggcagccccttttcaagagcactaatgcagcctccccagcatctgcagcgctgcccaccgtgaggccagttaaaatctcagcctcactttcattgcagcagaacacatctgagagggtgtagaactggggatccaggtcagcaatggcaggggctggattgaacaaggttttcactccactcctgcgggccattgttagggcttccaaagaagttgctggagttatttcgagctggcagaccatgactttggctctgctaatgacattggctgctgccctcagatcctccgtattcaaaagtaaatttgctccagccactatgacaatgatattctggccttcattattgacaattatagaagcagttcctgtagcagcatctttagtctgatatgtaaattctgtagaaatatcattctgttttaagttttctatataatcattgccaaaagaatctttgccaaccttacacaccatggacgtcattgctccaagccgagcagcttggacacactggttggcacctttccctccaaagccaataaaaaacttatgtccatggatggtttctccagtttttggcaaacgagaagtaagactgaccaggtcggtcatgcaggagcccaccactaccaccgccgccacctcctcttgccactgcctctggggttccccagacgccgccatcgctcaaaggtgctgctgtccaacctggacggtgaccccacgcgtccgcccacgcgtccg

SEQ ID NO: 58858 - DNA, 1353 bp, Homo sapiens
gcatctctgcacaggtctccgattggtgcacagcacagcctggccttttagggactgttgtcgcgcgtttaaagtgatagggaaagggtccagtggctgcttttatcgaccaatcaaatattttcctgacagatcccaaaatattcctgggccaatggagggaggagcccaagatgcctctgctgctccttggagagacagagcctcttaagttggagcgggactgccggagcccagtggagccctgggctgctgccagccccgacctggcacttgcttgcctgtgtcactgtcaggatttgtctagcggcgcattccctaacaggggtgtgttggggggagtcctctttccaactgtcgaaatggttatcaaagtgtttgttgctacatcttctgggtccatagcgattaggaagaaacagcaagaagtagtgggttttttggaagcgaataaaatcgactttaaggaattagatattgctggagatgaagacaacaggaggtggatgagagagaatgttcctggagagaaaaaacctcaaaatgggattcctttgcctccccagatcttcaatgaggagcagtactgtggggattttgactctttcttctctgcaaaagaagagaatattatttattccttccttggtttggctcctcctccagactcaaagggatcagagaaggctgaagaaggtggagaaactgaggcacaaaaagagggcagtgaagatgtgggcaacctccctgaagcccaggagaagaatgaagaagaaggagagacagccacagaagagacggaagaaatagccatggagggtgcggaaggggaagccgaggaggaggaagaaactgcagaaggagaagagcctggagaagacgaagattcctaggccttttcatgcttcatttcttccacttctccagaaaatggaagctatgaagcaacatttcaaatgtctctccacaaaccaaactcaacagaatactttggcttgaagccggcacacccagggttactgaggacttatgctgcctgacctggttagatgtacatggacggtatctcccgaatcatacaaaattaaatgtgaagaccgtttatgcataccttcatgtgcctgacagtcttggcttttgaagattttttttttcttttttgctctgcatagctagaccatcttattaataatactctgaaaaaaatgatttcaaggcatggaagttctctgtgatacaacaatagtatttcttcaaatgcgccttatgctacttatctcagaaacaggttttaaaatgaagtgctttccagagaaccatcatataaataaagattaatagaaaaataaaaaa

SEQ ID NO: 58859 - DNA, 1502 bp, Homo sapiens
atttacttcaggtgtaaagaatattttatttcaatacttcaatattgaaatcagctatcacacatatccaccaactgatatttcattgtccatctctcaggagatattcaaagtgagattaatttaatgaagccttctcagcaaacctagaacactgtacttcatcttcaaatttaagtcatagcctttaataagttacttcctagtcattattttatagtatttatgaaatagtgcaatatatcaatgaggtatcatttaagaggcaaatactctatagatttggatttgtcatcccaattccttggcattcaataatataagtatctttagcggcgtcttcttcatcttctgatttcttcacaataaatttagcctttgctatttgttcagcaaaatgtatcgcggtttgcgtatggagtgtaactggtcctgtttttattctggaaactccattggctaatgccatgaaaacaatcagctggtcttgcagatactcatccacagtaccaccatgtctaagatttgctaatagcatttcggcagcttcaattccaactttgtctgcatttacacctcgtttaccaagcgatgatccagcaaacaaacagccagtggaggtctcagcaataattattattccatttccattgccaaatgcttggtctttaggttcttgaacaggctggatgttaacatacaaatcccggatctcctttctgatgcatctaactgctgccgctgccatatcttttgctactttaaatggcaaaacaccagcaacgaaagctcttccatatatcttagtcacacagccacgctcagttaaatttatagggttcaattgtttaactggtgacattcgaacaatcacttcaccacccccttttgggtaatatccccttgttttaatgtcacaattaaatatgaaaccaaatttttcaacaattggcttgaagaccatcactgtataatcgatctgtggtgccatttcagcattagttccacctttcaaatgaagttctgatggagaagcagcaaagagaacacacggcattgagacctgcatcaagaggcacacactccctgctgtcttggtatctgctgtgtggattccacctttgatcttctctggtgtaaaggttatttctgttgagccaatttctgccccctccagttgcccatcacacaaatctcgaatcatttccagtccagataaatgttgaggcctcaggcctggcgtgctccggccggctcggatcttctgcacccgcaaggggaggcctaggagacagctcaaggccgtagagactctcaggatctggccgcccccttccatgatgctgccatcgacctccacccgcggccccgccatgggggacaccctggggcccagcccgcagcgacaaagcctccgccagagcgggagaaagaagagacgttggctcccgcccagtagttcagaaaccttggttcatgcctggggttgcaggagcctgacg

SEQ ID NO: 58860 - DNA, 750 bp, Homo sapiens
ctcgaccgcctgatgactcccctcaggaaacgcgcccaagacgagattaaccaacgcagatataggaacaccaagcaatcttcagcacattggacatgttggttgggatacaaatacaggctttgatctgaataatttggatccagaattgaagaatcttttcgatatgtgtggaatctcagaggcacaacttacagacagagaaacatcaaaagttatatatgactttattgcaaaaacaggaggcgttgaagctgttaaaaatgaactgcggaggcttgggtgcgttcaagattcaacttcacccgtaacccaccgccatggccgaggaaggcattgctgctggaggtgtaatggacgttaatactgctttacaagaggttctgaagactgccctcatccacgatggcctagcacgtggaattcgcgaagctgccaaagccttagacaagcgccaagcccatctttgtgtgcttgcatccaactgtgatgagcctatgtatgtcaagttggtggaggccctttgtgctgaacaccaaatcaacctaattaaggttgatgacaacaagaaactaggagaatgggtaggcctttgtaaaattgacagagaggggaaaccccgtaaagtggttggttgcagttgtgtagtagttaaggactatggcaaggagtctcaggccaaggatgtcattgaagagtatttcaaatgcaagaaatgaagaaataaatctttggctcacaaaaaaaaaa

SEQ ID NO: 58861 - DNA, 1619 bp, Homo sapiens
ttttttttttttacaaaaccaaaaaaccaaaaatattttattgctgagtcatcctggggttccataaaggaccccaagccttgcttggagtctatagctttgctaggactcccatgacatcaggatagagattgaggcacggggtcctttgggttccgattaaggaactatctactctgattctgttgatcttattagtccctccaggtcacctctacttcatctgtccgatacctctgtgtaaccccagaatcactgagtggggtcctgtgtccagcccgaaacatctcccagccagcctgggctatcatcgctccattgtcaatacagaatctctcatctgtagcaaaaagccgggctccacgttcctggcacattgttgccatcatctcctgtagcctcacattacaccccactcctcccacaatgagggcctcctgggagccacaatgtgccatggctcgctctgtgatctctaccagcattgcaaacacagtttcctgcagggagaaacacagatcctcaggagtacactcgcctgtggccagcatccgatgggctacatcctcaatgaaagacaggatccctgagaatgagacgtccatcccctttacagtgtatggcagctcaaccagcttcttgcctcgctttgccatctgttcaatgttgtatcctggacttgggtcgttagaaatcttcagcactcgagcaaaacgatccagacaattacccactgcaatatcgatggtttccccaaagatacggtaacgatgttccgagtatgcaatcacctgcgtatttcctccactcacatacaacacggttgggctggtggctccagtgatgaggcggcccatctcaatgtggcctatacagtggttcacacccaccaatggcttattccacagctgggccacagtacgggccacaacagccacagaaaccagtggggcacccatgccagggcccttggtgtatgcaatgcagtcgatatcctgggaggttaatccagactctgttagtgcctcctgcagcaggtctaggataacagctcggtgatgcctggctgtatcacctggaaggaatcctgtgccaggaggcgtgacgtaagtccgccgcgggttcgccagcaccttgccatcccgcaccacgcccacgccaatcttattggcgctgccttcaaaacccagcaccgccggcatggcggaggctgggagaaaacgccgacaggactcctggcaatgtcaggagctgtggaggtcctcactagtccgcgctgggccgcagctttccggagcgcagaggaagctggccagcctgcagatagcactgggaaagacaccgcggaactcccgcgagcggagacccgccaaggcccctccagggacctgtcttcctaactgccagggacgccgagccaactctgtgccttacattcgtatccgttttcctatctctttcccgtggtccagcccagccttctccactgtttttttccctcttgcacagagttagaatcttaagtcagtgtcacacaatgtgctgtgcatctggcacaacgataaacagcccgagggagggttgacgagatcgtcgtcccggaaattccgggagtgcac

SEQ ID NO: 58862 - DNA, 1339 bp, Homo sapiens
ccgcgtacgcgcgctcgcacgcatcccggcctcactgcccctcgactcctgttccgttggaggggcctgaggcgagcctgagcgcgctgttggccggagggaagccggaggagaccgggtcgactgggcagagcggcagagggtcgaggagcctgctctgcacgcccagggagtagaagtgggcagggagcagggtcacgtgagggagcgcgccgcgactgagcttgggtccgactggagctcaggctcgcgacccagactggtgggccaggcctccaagccggccttacacccaatccaaggaggacagaccggacacagagggacggagcgagcaaggagacatggcttcatcattcctgcccgcgggggccatcaccggcgacagcggtggagagctgagctcaggggacgactccggggaggtggagttcccccatagccctgagatcgaggagaccagttgcctggccgagctgtttgagaaggctgccgcgcacctgcaaggcctgattcaggtggccagcagggagcagctcttgtacctgtatgccaggtacaaacaggtcaaagttggaaattgtaatactcctaaaccaagcttctttgattttgaaggaaagcaaaaatgggaagcttggaaagcacttggtgattcaagccccagccaagcaatgcaggaatatatcgcagtagttaaaaaactagatccaggttggaatcctcagataccagagaagaaaggaaaagaagcaaatacaggttttggtgggccagttattagttctctatatcatgaagaaaccatcagggaagaagacaaaaatatatttgattactgcagggaaaacaacattgaccatataaccaaagccatcaaatcgaaaaatgtggatgtgaatgtgaaagatgaagagggtagggctctacttcactgggcctgtgatcgaggacataaggaactagtcacagtgttgctgcaacatagagctgacattaactgtcaggacaatgaaggccaaacagctctacattatgcctctgcctgtgagtttctggatattgtagagctgctgctccagtctggtgctgaccccactctccgagaccaggatggctgcctgccagaggaggtgacaggctgcaaaacagtttctttggtgctgcagcggcacacaactggcaaggcttaatcaaaagactggaaaactgcagtctgtaatagcataaggcttccattatgaaagaaaactaccaaaaataatacttcttttccacccgtctttggtatgtattggctaataaaatcagttctgtggaactgggaaaaaaaaaaaaa

SEQ ID NO: 58863 - DNA, 3122 bp, Homo sapiens
cgtccccggcgcataaggcttcgcgggcgcaccaggatacccgaagtcacctcctgtagcttccccaggagctgcggtgccttctctggtgtctttttctgcggggctcacccagaagcctttccccagtgatgggggcgttgtcctctttaacaaagtgctggtgaacgacggggatgtttacaaccccagcaccggggtcttcacggctccttatgatgggcgctacctgatcacggccaccctcacccccgagagagacgcctacgtggaagcagtgctgtcggtctccaacgccagcgtggcccagctgcataccgctgggtacaggagagagttcctggaataccaccgccctccaggagctttgcatacctgcgggggcccgggggcattccacctcatcgtgcacctgaaggcgggagatgcagtcaacgtcgtggtgactgggggcaagctggctcacacagactttgatgaaatgtactccacatttagtggggttttcttatatcctttcctttcccacctctaaggtggctggggagatgtcaggggaaagatagatagttgtaaaaactctaaagctttaatatattcggtttgtatgtaatggaagcacggggctagagtttccacataggccccaacataaaggccttccctcgctgttgaggccaccatgccttactgcatccagccaggctgcagggagtgaggcacacggtgaacatggccactgacttttctgccactctaactggacaactggaagacttggaaaggcctccacctgtatctacactctgagggccctggactgggcctgagcttgccacagaggctccgtctgactgtgggctgggaggagggaggcaggggagagccggtcacggtggctggtctttactgcagggcagcactgtggccagctgtctgtctttacactgcatgcagaagtttaaacactgaagtgccgaagtggcccgtgccgccgcacagagaccccgactttagtttgggctgttccacgcttggctcaccattgccgcctgggacttaacctgctcaggcgggccttcgcccagctgcaaatagggatgcgttagagactgttcccaaagcttgttgggctccttaaatggcatgtacaatttaagtgcaaagacagggagtgtcaataaagatggaaagccatttccagttaacttttgttaatttaagtgtggtcccttacagatcgggagttgttgctaaaaagcaaactgaagaaatgttttgtttcaaaaagggctacagaaagtaaccttgagtaaaattaatctcagctacaaaactgttacccctccgcatccaagctatacacttgggttttgtttctggcttgtgaagacggaccagatgtgcacggaggtcacggccccatgtcatctgcagctggagcggctcctctggggatgctgcactcagatcccacagcagctgcccaggctaacttgatccctgctgcttcactgcaccaatctccagcagacacagctcgccgagctcttgggtttctaagcagcaggaagctcaacctaacgctggccacacgctgacagctgagcccatctgagaacacggcatcttcacacagcgagacgcctccactgaggggaggcccgggagtatcaatctgtcaccagtggccacggagacctctcagcacccttagttcaaggtagtctctgtggatcaggttggtaacacctactggttaatcaagtcccactggggaaaggtttggacggtagaatcaagagctgcagtttccttggcccacaagatgctcttatgctgtaaaaaaaatgctttaagaattgtttgcaaatgaatttacagggtggccactggacacttcagagttcctatttactccccccgccacagctaggaagaccagcaagaactaaaggtttgccgttttactatttaaaatgtggacctctttgtccaggagcgggagggagaatggcatctcaccccattacaacagctggggaactggctaaagagagctgtcagagagtatccttggctgtcctaggaatgactcatggaaagcgccccagtgcagcagtgttttcaggaaaacccagtgggcacgcgccatcgccctctcctctcctctcacgctccttttgaaaagaccgcactcggcgcccaaggggacgtgctcaagagctgcaggggcagggcccaggcaaaaggtgggtgatgactacctgctgctttccctactccgtagatgggtctggaacatcgggtaaaacccagtcctcctctcagtgcatctctactcaccaacaatggtgaatctcagctctgtgtattcaagacaggcaaaacagaatatgcctcattatggctggagcgtgcctctactttgagataaagctggatgacaggtggatcctggcccacttaggagacatctttagaaagggaaaggctgtctttttgtacaggtagtagaacaacaaggtcagctgagcttaaggctgtggggttcgaagcagcccttcaagaagtcatcacccctgaagtagtgcctgcgagtcagtcagaggcataccaaaccctgagacagaatcaggcacaagttcacaactttttttttttttgggggggagacagtcctactctgtcgcccaggctggagtgcagtagcgcgatctcagctcactgcaacctccgcctcccgggttcaagcaattctcctacctcagcctcccgagtagcggggactacaggtgcatgccgccacgcccggttaattttttgtattttagtagagatggggtttcaccgtgttgcccaggctggtcgcgaactcctgagctcagccaatccgcccacctcggcctcccaaagtgctgggattacaggtatgagccaccatgcccagccaagttcacaacttctgatatcaagttgttgctgagaaaaggtcaggacacttcttaagtagagaaggactgtgacatcccctccaaacctccatgtaacactaacaaatggcctcatttacacgattaaaaacaaaatggtatcgtcaataaatgcaaaccttaaactgc

SEQ ID NO: 58864 - DNA, 5172 bp, Homo sapiens
ggaagaagtacctacacaggaatcagtgaagtgggaaattaatgttattattaaaaatcctgaaattgtgtttgtagctgacatgacaaaaaatgatgctcctgctttagtcattacaacacaatgtgaaatttgctataaaggtaaccttgaaaatagtacaatgactgctgccattaaagatctccaagtgagagcctgcccgtttcttccagtcaagagaaaaggcaaaatcactactgttttgcagccctgtgacttgttttatcaaactactcagaaaggtacagatccacaagtgatcgatatgtcagtaaaatccctgacactaaaggtttcaccagttattataaatactatgattaccataacttcagcactgtatacaactaaggaaaccatcccagaagaaacggcttcttctactgcacatttatgggaaaagaaggatacaaagactttaaaaatgtggtttcttgaagaatcaaatgaaactgaaaaaatagctcccacaactgaattggtacccaaaggcgagatgataaaaatgaacattgattctatttttatagttcttgaggctggaattggtcatagaacagtacctatgcttctggcaaagtcacgtttttcaggggaaggcaaaaactggagttccctaataaatctgcactgtcagcttgagctagaagtgcattattataatgaaatgtttggtgtatgggagcctttgcttgaacccttagaaattgatcagactgaggattttagaccatggaatcttggtatcaagatgaaaaagaaagcaaaaatggccattgttgagtcagatcctgaagaagaaaactacaaagtgccagaatataaaactgtcatcagtttccattcaaaagaccaattaaacattacattatccaaatgtggtcttgtaatgttaaacaatttagtcaaggcatttacagaagctgccactggatcttcagctgacttcgtaaaggatctagcaccatttatgattttaaattcccttggacttactatttctgtttcgccaagtgattcttttagtgtactcaacattcctatggcaaaatcatatgtattgaaaaatggagaaagtttaagtatggattatatccgaaccaaggacaatgatcatttcaatgcaatgaccagcctaagcagcaaactcttcttcattcttcttacacctgttaaccattctactgctgataagattcctttaacaaaagtgggacgacgtctgtacactgtaagacacagagagtctggcgttgaaagatctattgtttgtcaaattgatacagtagaaggaagtaagaaggtcacaattcgctccccagtgcagataagaaatcatttttcagtcccactgtctgtttacgaaggggataccttattgggaactgcctcacctgaaaatgaattcaacataccattaggatcttaccgatcattcatttttctgaagccagaagatgagaactatcaaatgtgtgaaggaattgactttgaagagattataaaaaatgatggtgctcttctaaagaagaaatgtagatctaaaaacccttctaaggaatcatttctcattaatattgttccagaaaaagataatttaacatctctatcagtgtattcagaagatggttgggatttaccatacataatgcatttgtggccacctatcctgctccgaaatcttcttccttacaaaattgcttattatatagagggaattgaaaattcggtttttactctaagtgaaggacattcagcccagatttgtactgcacagttgggtaaagccaggctacatttaaaattacttgactatctcaatcacgattggaaaagtgaatatcacataaagcctaatcagcaagacattagttttgtcagttttacttgtgttacagaaatggaaaagactgatttagatattgctgtccatatgacttacaatactggtcagacagttgtggcatttcatagtccttattggatggtcaataaaactggccgcatgttacagtacaaagcagacggaattcatcgaaagcatccacctaattataaaaagccagttctcttttcttttcagccaaatcacttttttaataacaataaggttcaacttatggtaactgatagtgagttgtccaatcagttttcaattgatactgttggtagtcatggagctgttaaatgtaaaggcctgaaaatggactatcaagttggtgtcactatagacctgagcagttttaacattactagaattgtgacatttacccctttttatatgattaaaaacaaaagcaaataccatatatcagtggctgaagaaggaaatgataaatggctctctcttgatttggagcagtgtatccccttttggcctgagtatgcttctagtaaacttcttattcaagtcgaaaggagtgaagatcctcccaaaaggatatattttaacaagcaggaaaattgtattctattgcgtctagataacgagcttggaggtattatagcagaagtgaatttggccgagcattctacagttattacatttttagattatcatgatggagcagctacattcctcttaataaatcacacaaagaatgaacttgttcaatacaatcaaagttctctcagtgaaatagaagattccctccctcctggtaaagccgtgttttatacatgggctgatccggtgggctctagaaggctgaagtggagatgtagaaaaagccatggtgaagtaacacagaaggatgatatgatgatgcctatagatttgggggaaaagacaatatatttagtttcattctttgaaggtttacaacgcattattttattcactgaagatccaagggtatttaaagtaacatatgaaagtgagaaagcagagttagcagagcaagaaattgcagtggcattacaagatgttggaatttctcttgtcaacaattacacgaagcaagaagtagcctatataggcattacaagttctgatgtggtttgggaaacaaagcccaagaagaaggcaagatggaagccaatgagtgtaaagcacactgagaagttagagagagaatttaaggaatatactgaatcttctccttcagaagataaggttattcagttggacactaatgttccggttcgcctaacccctactggtcataacatgaaaattctgcagccgcatgtaatagctctacgaagaaattatcttccagcattaaaagtggaatataacacatctgcacatcaatcatcatttagaattcagatttacagaatacagatccaaaatcagatacatggtgctgtatttccctttgtgttttatcctgttaaacctccaaagtcggtcaccatggattcagcaccaaagccctttacagatgtcagtattgtcatgagatctgcaggacattcccagatatcacgtattaagtatttcaaagtattgattcaagaaatggatctcaggttagatcttgggtttatctatgctttaacagaccttatgacagaagctgaggtgactgaaaatacagaggttgagctttttcataaagatatagaagctttcaaagaagaatataaaacagcctcattagtagatcaatcacaagtcagcctctatgaatattttcatatatctcctatcaagttacatttaagtgtttcactgagttccggcagagaagaagctaaagattcaaaacaaaatggaggactgattccagttcattctttaaatcttttgctgaagagtattggtgccacactgacagatgtacaagatgtagtttttaagcttgcattttttgaactcaactatcagttccatacaacatccgatctacagtctgaagtcataagacactattcaaaacaggccattaagcagatgtatgtactcattcttggacttgatgttttgggaaatccatttggcttaattagagaattttctgaaggtgtagaagcatttttttatgaaccttaccagggagccatccagggtcctgaagagtttgtggaaggaatggcactaggacttaaggcactagttggtggagctgttggtggattggctggtgctgcctccaaaatcaccggtgctatggctaagggggtagcagctatgaccatggatgaagactaccaacagaagagaagagaagccatgaataagcaaccagctggttttagagaaggcatcactcgtggaggaaaaggcttagtttctggatttgttagtggcataacaggaattgttacaaaaccaatcaaaggagctcaaaaaggaggagcagctggtttctttaaaggtgttgggaaaggtttagtaggagcggtagcaaggccaactggaggcatcatagacatggctagcagtacatttcaggggataaaaagagctacagagacttctgaagtggagagtctgcgacctcctcggttcttcaatgaagatggagttatcagaccgtacaggttgagggatgggactggaaatcaaatgttacagaaaattcaattctacagggagtggattatgactcacagtagcagtagtgatgatgatgatgatgatgatgatgatgatgagtcagatctaaaccattaaaattcatatgttctttattttacttggaatgtttcattaacatgttttgtatgacttataccataatgcccatatgtccatttatagggaggtaaaacacattttcttttaaaatgttttcctacacattttcataaagcaaaataattgtattatttaagcacagaaaaaaatgtatcttacatccaaagtagggagggcatccaacatattatagatttgcttttatatattttatagctttgtattgcatagtttgtctttaagagttcaagttagacttaaatataattttgatgttcactggttttattttaaattgccttcttatttgttagcaaaatgcctttttttaatggtctctgtaaattttctgggctttaatgtaatgccactgtgtaaaaaaaaaggaagaaaatagtaatagccatttaatgttttatatttatcattttaaagatatttttgtcaaatttcttttaataataataaacatatgtaatcta

SEQ ID NO: 58865 - DNA, 1321 bp, Homo sapiens
ttttttttttttcttcaactttgatattttattgaaaaaagtacacaaaaaccactgaggtacacaagcccaggtaagcataccaagcaagccccctcacaccttttgtctgaaaaaagcttgacttctttgcagcaatgtctcgcccattccagcagcagtatctcagttaacttggttccttttcctccaggctcaaaacaaaatcaaactcttcctgggtcaggggctggattgataatctctggcgagtgaagagaaccatattttttaaggggccaccagtagctttgtgagcttgatgataggatttgagctcagccaggggaatgaaacgtttcatcatccgaacaaactgtacatccaccatggaccacttagggttgtcctctttgctagatgggtcataatggggattgtttttctcaaactgtgtgtggtctgggtaagcctctttcacgatcttcatgagtcctgcgatgcctggctctttgcagttgctatggtagaagaaggcttcttctcccagcttcatggctctaaggaagttccgagcctggtagttacgaacaccatcccagcatgttgtctgtttgggctgtgctttgagatcctcaatgctgaacttcacatctacacctttctctaggcggctctctggctctgacttcatcagccagtggctgcttagattcttcaaacagtttttagtggctgaagtcttctgagggttggagtcctccactttagctaatgcctcacctgagttctcagttttggtgcgttttcctgatagtcccttgtctgaaccagaagtcccagccagcctcttccggggtctcgacatggtcacgctgcaggggactttagtgcggacgattctggaatcaacggagatacaagaaagaatgctaatgtcctccaaaacccgcgcagagcgagatggaggcaacgagaggcagcctagaacgtctccaacttttgcgaaacacagacgcctacgtttgagccctcaaatccttccctccgttatctgcgccatttccatctcgcataacctgcccctaaactcttctcggttctgtccttggtccttctcatccaggaacccctatctcagtatgtagttcactgggaagtggctccacagagacacttttgttgggtgaatataagtaagccttgtgttaccttgttatccttgctaattaggatcaactgaatggataatctagatgatgaagtaatttgctggctacagacccaacactctgcagactcgactgcggtccgcctccgctgcgccgcaggctgtgcagcg

SEQ ID NO: 58866 - DNA, 1477 bp, Homo sapiens
  misc_feature (1)...(1477): n = a,t,c or g
ttttttttttttcaaagtattcaagggctttattggggccgccctggctgcccctcacagtgttgcaagaacccgctggtcttgctgttgcctttgctctttgggggcttgagaggaaaggcagagggaggaccaacttatctgggagagagaaggcccatctttggggctaagaccaggtggtgcggaagcagatttagggaggggagggcctacttaggggctggaaggggatggggctgcctcctggagtgtggtggtcacagagtgttggctttgtgggagggaaaggaaagggaggcacacaagaagtcaggaagagtggatgggcggtgcttcctgggcactgaacatgtgcactgcccagggcacgagggccaggactaggcatggccagagggtgtacttgaggaaattgaaaatgtagaagaggctgatctgaggggggtggcccagccagtccagggggcccagcagccccatggccagcacaaggcaggctatcttctggccatttcccagctgtgcccgacgcacctgggcatagcagggagagtgcaaggcaatgcccaggcccagggcagcccctgagtcacggctcagggaggcaaagggccggctatccacgtgtatccactcaggccgctcacaccacttgaaggctaggctgatggaccaagaaagatccaggcccagtgtaaagagggtccaatagatgaggctggtgcctagcatgagggccagtgcagtcaacccatagaagcttagctcccgctccataggcactcggggagtcatcagccagcccaggacagcgccagttattaggccagccagcacctggtgagggaaatgtgctaagatgaagattcgcgacaagccaaccgccaaaaggaaggtgcaataagccaggctaggcatcacccttacccagcggctgcgggcccgagtggccacctgcgaagacagggctgtcattatgggccagagggctgctcctgtgatcatgcagtgtccagaagggctgcctggaccagtctcacaagaagaggggaactggtgaacctgggctggagcctggctgtagtaaccagactcatggacccaccaaaagggcctgtctccaaaaagaaaccacttgaagatgaggttgagccactcggtgatgaggctgatccagagcaccgcgatgcccacacggcgggaggcgtagtaggccgcggggaagtagaacagaaagaggatcttgggatcgcccagaaaggtgatccagagccacacgttctccagccaggctagctggttctgtagcgcctcggctatcacgatgcccgcgcccagcgtggactccatggcggcccagctgccgaccaggccccggcttgctccagggcggaaaccagagtccaggcaacgaagcagcgtcgacctcgtgccgaattcctgcagcgcggtgcagaccgntcaattccctcct

SEQ ID NO: 58867 - DNA, 695 bp, Homo sapiens
ttttttttttttgaattacaaagctacttttaatactttggggtgagccccacaggaataaaaaacactgggaaggggtaaccccctcacccccgggagtggcccagggggagagaggctacctgaggggaaggaagcacaaaagggacccgctgcagactcagggcaaagggaatgccatcggtgctgggacctgtgagcactacaggaggaaacgcgagcgtggtgggactggctccaggcacacaggcgaagggcaagagggttggacacgaagccacaaagctacttgggttcctccttcttctcgtttgcctttttctgcttctgctgcatgatctccgagtccctgggggtagagtccctctgcttgcgggcggcagcagaaagcccgtcatctcggcgctttcccttaaccgagtcgctctgctttttcatattcttctggcgggcgagctcacgctggttaccgcccgggagggtggtcccgtgaagtagccgtgggcaaagggctcgatttccgggcaccgagtgtgagggtggccacagagcgcgcccagagaaacgccttgctagggaagctacggaaggtcaaagccggcgcctcgccggtggtgtttagggtgaacggaaagaaaagggcaaggagaagggctcgtgccgagttcctgcaggcgggtcaattgtgggggcgc

SEQ ID NO: 58868 - DNA, 2384 bp, Homo sapiens
  misc_feature (1)...(2384): n = a,t,c or g
ttttttttttttgagaggttccaatcaacatttattgccttattctttttatctcattcctttttgaatgtgtttatctcctaagattttatctgtgatggaaatgggatgcctgtgaatacaaaagttgcagtggtggcaccagggtgggggggtgcggccggggccaccatggtctcccctgagagggggtgctgtcttaggtgccccaagaggccctcgggcagcaagcgtggggtgctgccaaaatacagctccccctgggtgggcaggacacacgtggcctcctggcagacaggtgcctgggtgagcccgctgctcctgattagtcatgaatggcacctggtctgggcgacagtcacccgcaggaagccctgagctggccaccatcaccctgggcagtggctcccggggtgccaacaagacctgggcccctcgttctttggtgctgagagccccagctgaggctgtggaggaggccctggacctggtctggtgtctgtcagaggcaggtgcccagtcctttgacttgcttctctgaattgtcataattgtgctggaattgtgccagaaactggtagtgataacagctcctggaaggcctgtggctgctgagggctgcctggtccccctcaggacggccgggggagcctctccagaagcaccagctttgtctgcaggtggacgttgaaggggggcagttgggtcaggttcagactcacacctgtggtccccacgacgctggccaggacccggtgtgtgtccctgtagagggccaggagcccaggggccgcctccatgaggatgtgtgtgtatgccagcatgcctgtccccggctgcacatcctccctcttgtcgtacctccaggcgctgttgacttggagaaaccgagacacacctgtctgggcggctgccacgtcaatgtgcagaaggacgtctgtctgggggggcaccagctggtgcagcctctgcattgcgacgccacctgggtagttgaaatgggacacatacagggccgtggctgagtaggcggcattcaccacgaggtgtccgatcacaagcagagaccccgctttgtacagccaagactttttatagttattcagcaggtaggagcagcctctggcagccgtgatgttgagcatggggaaggcatagatgatgaagcgtagctccttgtgtggcaggagggagtagagtgccatgaagcccagtgccagcaccgtcggcgcgtgcgtccttctgtctaccaagcccagggggatgaagagcaggctgcagcccaggccgcggggcagggctgagtagaagtaccacagcagcggggaggtcccccagttggagcttttgttcaggacagtgttgtaccaaagcacctttccttccggccaagtgagctgccgccaaaaataagagtccacagcaaccgtcagtcctaaacagaggatccctgccgggacggcgtggcgaagggctctgactacagaaacctttcggttgcccaaggccagcagcagcaggaggcccaggaacaggcacagctccaccctgaacacgatgatggcgaaggctgacagccagatgaagcgggcccactcgtgccgcagccaggccgcgagggccagcaggactacaggcagggccagcacattgggcagtgtccgcgtgcagtagaacatcaggtggaactgcatggccgtcacccagcagaacatggtggccaccatggccccgaagtgccgtctcacttccttttgtaacgtccagagtccaaaaatcacgccgagtccaagcactcctctaactattagctgagagtaaaacttggacatttctaacagcgaaagcacgtaaaccgcggggctggagaacactgcgatcaccactggcccgaggaacgtcctggggacgactccggggaactcaagatggtcgtactgctccaggtcttgccagtggtagagcaggtcatgtgtggcctgcaggttgaagctctcctccactttggtgtagggacagatgaccaggtggacagtggctacggccaccagcagccccagcagcaggggccgcctgcctgatgacccctttccagccattccaggctttcagcttcacgtaccttcacaggccaacagtgcgagacaccagccgttagcactgccactccacgcatgctccgcagctcccggcggcgtccttcgaagcgcggctgcctgggccagcctcggcaggaagcaggacggcggaaacagaacagagcccgaatctaaagtccttgcccaaatctaaagtggctaccgcagccccggccgctacggccgcagagaccctctgtgccctgagacgaaatcgtcgacncgggaattccgnaccggtacagc

SEQ ID NO: 58869 - DNA, 4120 bp, Homo sapiens
acgcctcgaagaatccgctatcggctgtctgcacaaccggaatcatgtcgagtttggcggtgagagacccggcaatggatcgatcactgcgttccgtgttcgtggggaacattccatatgaggcaactgaggagcagttaaaggacattttctcggaggttggttctgttgtcagtttccggctggtatacgatagagagacgggaaaacccaagggctatggcttctgcgaataccaagaccaggagaccgcgcttagtgccatgcggaacctcaatgggcgggagttcagtgggagagcgcttcgggtggacaatgctgccagtgaaaagaataaggaggagttaaagagccttgggcctgcagcgcccattattgactcaccctatggggatcccatcgatccagaagatgcccctgaatcgattaccagagcagtagccagtctccccccggagcagatgtttgagctgatgaagcagatgaagctctgtgtccaaaacagccaccaggaagctcgaaacatgttacttcaaaatccacaactggcttatgcactgttgcaggcacaagtagtgatgagaatcatggatccagagattgctctgaaaattctgcatcggaagatacatgtcacaccactgatcccaggcaaatctcagtctgtgtctgtctctggccctggccctggccctggccctgggctctgcccaggacctaatgttctgctgaaccagcagaatcctccagctcctcagcctcagcatttggctagaagacctgtgaaggacattcctcctctgatgcagactcctatccagggtggaattccagctccagggccaataccagctgcagttcccggagctggtcctggttccttaactcctggaggagcaatgcagccccaacttggaatgccaggggttggcccagtgcctttagagcggggacaagtgcagatgtcagatcctagagctcctatacctcgcggacccgtgactcctggtggtctgcctcctcgaggactgttaggagatgctccaaatgacccacgtggagggactttgctttcagtcactggagaagtggagcccagaggttatctgggtccaccccatcagggtccccccatgcatcatgcctctggtcatgacactcgtggcccttcctcacatgagatgaggggagggccattaggagatcccagactgctaattggagagcccagaggccccatgatagatcaaaggggtctacctatggatggtagaggtggtagagattctcgagcgatggagactcgtgccatggaaactgaggtcttagagacacgtgtaatggagaggagaggaatggagacctgtgcgatggaaaccagagggatggaagcaaggggcatggatgcaagaggattggagatgaggggccctgtccccagttcaagaggccctatgactggtggaattcagggtcctggtcccattaatataggggcaggtggccctcctcagggacccagacaggtcccaggcatttcaggggtggggaatcctggagctggtatgcagggtacaggcatacaaggaacaggcatgcagggagcaggcatacaaggaggagggatgcagggggcaggcatacaaggagtcagtatacaaggaggaggtatacaaggaggaggtatacagggggcaagcaagcaaggtggaagccagcctagcagttttagtcctgggcagagccaggtcactccacaggatcaggagaaggcagctttgatcatgcaggttcttcaactgactgcagatcagattgccatgctgccccctgagcaaaggcagagtatcctgattttaaaggaacaaatccagaaatccactggagcgtcttgaaaggttttagaaaatatttggctgtagtctcaaattttattctgtagcatggagaatgggtgcaaaaagctgacttctgtatccccacacttggattagggtttccctcctcctagaacctaatcttattttttgttctttttctttctttctgttttccttttttttttaattgagggtggggggaggagggagtgcgtctgttcactttaagttactttaaaataactctgaacatgattatattatgccaaataagattacaaagaataagcagcaatattgaagcatctacagtatgttaactacattttttaaatgtcgagtaaaacttcgtgaaaactgctcataaagactaaaagttgacctgttaaaacgttaatgtactaagatagttttaagatttttggttgtataacaaaataaaagtttacccaaaagtataagatacattttttggtaaaccatttaaaatacaaaatcctattttggaggcaataggataagcattgtcttagtgttttagaattatttttgaaacagagttaacaggataaggttacacttgtattagaattgtttttttctaaagttatgttacctgaaaaatcaaggagtgcacctgatttactgttgcttcatttatcccatccttcagagaccagcaaggttctgccaggccccaagcatctgagcatgatgattttgctgtgacaattctaagatcaaccaggttacttaagtccgctctgatgaaacccagtctctcaataccttcctatttctcaatagtctttaagccctaaatctgagtcagtaattctctaaaaatccttcccaaaaatcagtgtctagggactggttgatctagatgagttataaatggtatttgacttttcataagtagtggaaggtttcactaagtaaagatctgagtttcttggtatctgacgtttgtatacagatggtgtccatttgctcaaccagacaggagttaacttgtattagaattgttttttctaaagttatgttacctgagaaattaaggactgcacctggtttaatgttgcttcacttatcccaccctacagagaccagcaaggttctgccaggcctcgagcatccaagcatgattttgctgtgacaaatctaaaatcaaccaggctacttaagtctgctctgatgaaacccaataatctctcaataccttcctatttctcaatagtctttaaaccctaaatctgagtcagtaattctcttacatccttcccaaaaatcagtgtctagggactagttgatctggatgagttatacatgatatttgacttttcataagtagtggaaggtttcactaagtaaaactctcagtttcttggtatctggctttcttatacagatggtgtccatttgctccaccagacaggagttaaaaacctttaaagagcatttaacatgccttttagttttcttatttcataatctacttttctatcattaatcatcttaccaggaataatcaaggcccaggtaggtagaagtttttatatagcctgaatactcacttgacttactgctcattttactttttgcatggaatacagccatttagtcctaatatacataccaatgagacaattaaaaattggttggaagatggagcttatcacattgtgctactacgactttattttttcttgaaaataaagccttgaggatgtgaacataaatgttggtatcataaaacaagtagtaataaaagcataaattatcaaatatcaggtgatcttactatggagaagaaaaaccaatatctagttacagatgaaaaaatgtttaatacaaagagctgaaaatgtagaaattgagttatcttccctttgcaaaatttttacactttaaattagtaattctttgtttgcaaggttttcatccctatgctgttgttttctactacctgttttactcttgttcatactgctactttccccatgtttccctatatgccctcccctatattggagaggataactcgcgtttacatatgtgatagttatgcttaatactaattcacagagttggctcgatcattttgagattctagttgctttatctcaaagctttcactgaagggctgtaactgaaaattattaaatgttagtctttagtcaaatctctgcattgtttcatgcagaaaataaagatacaattaaggctgaaaaaaaaaa

SEQ ID NO: 58870 - DNA, 840 bp, Homo sapiens
atccaataccggagtgacttggaactccattctatcactatgaagaaaagtggtgttcttttcctcttgggcatcatcttgctggttctgattggagtgcaaggaaccccagtagtgagaaagggtcgctgttcctgcatcagcaccaaccaagggactatccacctacaatccttgaaagaccttaaacaatttgccccaagcccttcctgcgagaaaattgaaatcattgctacactgaagaatggagttcaaacatgtctaaacccagattcagcagatgtgaaggaactgattaaaaagtgggagaaacaggtcagccaaaagaaaaagcaaaagaatgggaaaaaacatcaaaaaaagaaagttctgaaagttcgaaaatctcaacgttctcgtcaaaagaagactacataagagaccacttcaccaataagtattctgtgttaaaaatgttctattttaattataccgctatcattccaaaggaggatggcatataatacaaaggcttattaatttgactagaaaatttaaaacattactctgaaattgtaactaaagttagaaagttgattttaagaatccaaacgttaagaattgttaaaggctatgattgtctttgttcttctaccacccaccagttgaatttcatcatgcttaaggccatgattttagcaatacccatgtctacacagatgttcacccaaccacatcccactcacaacagctgcctggaagagcagccctaggcttccacgtactgcagcctccagagagtatctgaggcacatgtcagcaagtcctaagcctgttagcatgctggtgagccaagcagtt

SEQ ID NO: 58871 - DNA, 2092 bp, Homo sapiens
aaatctccccttctacagagttcctccggcgcttcctccaccccgggatacacagaacctcatctcctacggtgctgaagcctgcagcagggcaggatgggcaggagagcagagccgcggagtctgcggcgcgggtgaagagcggcgcgtaattcccgcagcaagattgttccgcgcccgcagcccctggactagcaggatccgaaccccggcggctgcgtgcttataggcgcagacgtcagagagcccgcggcttaaagcgcgtcgcctggctagcgccaccccctagccttcttcaaggcctccagggctgggcccaagcgcccgtcgacggcaccctgggcccagaggactcgcgggcctcatctccaatgattcagaactcacgtccgtcgctgctgcaaccccaagatgtcggagacacggtggaaacgcttatgttacatccggtgatcaaggctttcctgtgtggctccatcagtgggacctgctctaccctccttttccaacctctggatctccttaaaacacgcctgcaaaccctccagccctcagatcatgggtctagacgtgttgggatgttggctgtactcttgaaggtggttcgcacggagagtcttttgggcctttggaaagggatgtccccttccattgtgagatgtgtccctggcgttggaatctactttggcactctctactctttgaagcagtatttcttgcgaggccatcccccaaccgccctggagtcagtcatgctgggggtgggctctcgctctgttgcaggggtctgtatgtcacctatcactgtaatcaagacgcgctatgagagtgggaaatatggctatgagagtatctacgctgccctgaggagcatctatcacagtgaggggcaccggggcctcttcagtggcctgacagcaactctccttcgagatgcgcccttctcaggaatctacctgatgttttacaaccagaccaaaaatatagtgcctcatgaccaggtggatgcaacccttattcctattacaaatttcagctgtgggatatttgctggtattctggcctcactggtaactcaacctgcggatgttatcaaaactcatatgcagctttatccactgaagtttcaatggattggccaagcagtgacacttattttcaaagactatggactacgtggcttcttccaaggtggcatcccccgagccctccgcagaactctaatggcagcaatggcgtggacggtgtatgaagagatgatggccaagatgggcctgaagtcctgaccaagagaggactgggaacgggtgaaatctgttgccctgcttggtttctgccaagggctgctgcttcttactattctgcagtaagatgaagtcctacctggaaaaccaggcagaaattgtgttgcctttgccttcagtaatccccttaaggagaaaatatatggacctgatttcagccttcagaatctccaaaagaggagtcatcaattcatagagcacactagggtgttaggagagagctttgcatactctgagaggctacttggaaaggcattttcccaggagagctctgtcaggtggctgcgcttcagccccacccctacaccacagggtctccttgggtatgttcttgggcaagcaatcacaaagccagagaagctgtaagctgcctgccgggcctgaggagctccaaccagggaagactggatgtgaggagaggagtcactgtcaccaggtcacagactgactgaggtgatggtaggatgaggaggaacagatgcccttctttaattggttctcagttaacttctcagaggctctggagaacgggacagtggctttctagcctctgaatgttccaaataaaattttttggtcttggcccctgtactgttttacctctaaattctggcatttttttttccctgcaattaaagtgctgtactttatttattgaactttatcattgaaagctgtttggaaaacctaaaagatgttgtcacacttctgttttctttacctgtgccttataaaaatggaccaaacccttttctaaaataaaatagttctagggtggctggttattg

SEQ ID NO: 58872 - DNA, 2200 bp, Homo sapiens
ttttttttttttgcgctggttagatcaggatttctttttattcctcgttggtttaaaatggctaatcagaataaaaaataaaagggcctctttgtggaggctgggatctcccctatttagaggttagaacccaggtatcccctctacccagcaccatagtgaggtgggctgaggggtaacccccaagggacaatcggaggggcctaggcctgccactccttctctctatcccccgtttttggcatgtgatgaaaaatattgctttttggattcttctctcctggccttggattttaaaatcaagttaactgtgtaagctaggggaggctccaaggggccagtaggagcacactctaatccctctcccccaaggaggggattatccaatattgtttgagctaggccaagttattttcctgatctcccaccaccaccagtgtcttgaagttttgacccctttcctagggaaactaaatgccaatgagcctagaaaactaattctcctctccaagtccttccctcttgtgaccaaaattccagactcgcctctccccaggcttcttcctaatcacacttagcaccagcagaggatgctatttccgtagttagtaactgggacaaatgagagggaaccacaggaaaaagactgacgtctcccctcttttcctgctggtctgaggaatgggaagagtaagatccccctccgtatatgtatccctccctcattttcccatcccaggatagatatataatttctttgatatttataatatatatatatatatatattatatgtacacacacacctggtaacgcagaagaggaaaaaaatagaatccgtaacaataataaaaaaaattatttctggtttaaaaatgatctggttccctccagggcgagcaattgcacaaatgtccactgagtctggtccagggatcaaggaagggaaggtcttaaaagataaaagggggggttgctaccccagtctcagggccccaactctccgactccccaagcctactgcattttagaaaacactcctcatcctcttggaatcggtggtttaaaaaatgtccatgcacgggaggggagccccttgagggaaggaaggtggccacctggggccctttggtgtaggcgcagaggcgttggggaggggaggtgccgaaggctcacaccgaaatctcataggtggtaccaccaacccctgacaccttcttgactcctcccctcgtggggctactgagaggtggctggcctgggccaggggaggctgagcctaagctcttgggctgcccgttggatttgctgtaggtggtcttcagctgtacttcatctttgggtgtcagtaatggctgcaaggccacttcttctgtctcagagacaccaggttgggctttttggctgctgtaagacatcgatcggcccaggtatggggctgttgggcctggttcaggggaccctactccccggccccttagcccatctggcttgccaaaacgggggacagctgggcgtcccagtggagtcttgcccaaaggtgatctctttgaatcatctgaggaggaactagtacgaggggcatggcccgagcctggtgttgactgaatgcctgagtcccccaagcctggttcttcctcacggcccgggagtgggggtgactggcgcagcaacttctctcgttcctggagagaggccacaatgtggcgcgacagattgtcgtaacggactggtgagggctctcggtgtgttgggccagttggcaccaaacgtgggtgcctctcagcttcccgttgctgggccagcctggctgacaggaagggagaggtatagcctaaaggtgggtctggctcaggccctgcctgcactgactcaaaatcagggctgtctgaaggtgtgagcaagctgtcataagataggcttccattgcgtgtctggttggccaggctcttataggaggtggaggtggtgccctctgaacgaatggattgcaactggcccagctcaaagcctgtgccctgggctgacttgaggctggaggagcgtgagccactggatagtggatcgaagtgaaaacttttgccaaaggtaggagaacggaagctctctggttccaagctgggctctgagcggtagctggggtgacggctgctctctgcaattgaggttggctccttcaagctgtccccacgctcgtgcc

SEQ ID NO: 58873 - DNA, 2251 bp, Homo sapiens
ccagaaatgcagaggagaaaaagcgtttatctcttcagcgagaaaagattatcgcaagggtgagtattgataacaggacccgggcattagttcaggcattaagaagaacaactgacccaaagctctgcattactagggttgaagaactgacttttcatcttctagaatttcctgaaggaaaaggagtggctgtcaaggaaagaattattccatatttattacgactgagacaaattaaggatgaaactcttcaggctgcagttagagaaattttggccctaattggctatgtggatccagtgaaagggagaggaatccgaattctctcaattgatggtggaggaacaaggggcgtggttgctctccagaccctacgaaaattagttgaacttactcagaagccagttcatcagctctttgattacatttgtggtgtaagcacaggtgccatattagctttcatgttggggttgtttcatatgcccttggatgaatgtgaggaactttatcgaaaattaggatcagatgtattttcacaaaatgtcattgttggaacagtaaaaatgagttggagccatgcattttatgacagtcaaacatgggaaaacattcttaaggataggatgggatctgcactgatgattgaaacagcaagaaaccccacatgtcctaaggtagctgctgtaagtaccatagtaaatagagggataacacccaaagcttttgtgttcagaaactatggtcattttcctggaatcaactctcattatttgggaggctgtcagtataaaatgtggcaggccattagagcctcatctgctgctccaggctactttgcagaatatgcattgggaaatgatcttcatcaagatggaggtttgcttctgaataacccttcggcattagctatgcatgagtgtaaatgtctttggccagatgtgccgttagagtgcatagtatccctgggcactggacgttatgagagtgatgtgagaaacacggtaacatacacaagcttgaaaactaaactttctaatgttatcaacagtgctacagatacagaagaagtccatataatgcttgatggcctgttacctcctgacacctattttagattcaatcctgtaatgtgtgaaaacatacctctagatgaaagtcgaaatgaaaagctggatcagctgcagttggaagggttgaaatacatagaaagaaatgaacaaaaaatgaaaaaagttgcaaaaatattaagtcaagaaaaaacaactctgcagaaaattaatgattggataaaattaaaaactgatatgtatgaaggacttccattcttttcaaaattgtgatgagtatatgcttatgttctcataaatgaaggtctgtttagaagatcaaccacattcaataaggaattgtggggttcgacatgagttaactttgaaatacgtatgaattctggagaatcctgaaaaagacggtgcttcaaccagcttgcatagcacagagaatattcttggttacagaattcatatgggaactaggcttttaagatgttaataattagctaagctttagtaacccttactgtgctagtagattttagtagatattggtgttatattgtttgatgtttgaaaatatattaatatatgtgccgaacaagaaaccgaaagctatattgtactgtgtatttttactttagtcctcataatcatgttgaatttatgtgatcattgattttatttcatatggaaaagctaatttcttcttaaatttacattacctaatattctcactagctatgttctccaatccacactgccttttattgtaatatcatctaaatagatgcagaaaaatggaattttctctattaaagtattttacatttgacataaaaaagaaccagatacagttttctattcagatatgtttattttaacattgtttggttaaaaaaggtgaagttccagtcaaccactttttacccctgaaatttcaagataatgctatattaacttttccagatctaacactagcttattcttccctgttataaaatggtttgaacttactgaggagatattcctatcattaacaaaaataaactatttaaataatctgttgttaaaaggctaatgtcattttaaaattaatttttgttcataatgtagctcccctttagcctttgaatacacctggcagcagtatgcttaaaaataagaagttagttgcctggcgcagtagctcacacctg

SEQ ID NO: 58874 - DNA, 4345 bp, Homo sapiens
tcttgaattcccgggtcgacgatttcgtgccgcggctgctgcgggaagtggccagttcaggaggcggaccccccgagggcagcgctgcggggccgttttccggccctcctgacgcgacactgcccctctccgagagctgagaaggaaaagaggagcttgcggaggtgcggctgcaggccgttgttggtcgagctggcgggtcccgcgggccaggccgtggaggtgttacctcattttgaaagtcttgggaaacaggaaaaaattcctaacaaaatgtcagcttttcgaaatcattgtccacatttggattcagttggtgaaataacaaaagaagatttgatacaaaaatcccttggtacttgtcaggattgtaaagtccaaggaccaaatctttgggcatgtctggagaatagatgttcatatgttggctgtggtgaatcacaagtagatcacagcaccatacattctcaggagacaaagcattatctaactgtgaaccttaccactcttcgagtatggtgttatgcttgcagcaaagaagtatttttggataggaaattaggaactcagccttcattgcctcatgtaagacaacctcaccaaatacaagaaaacagtgtccaggattttaaaatacccagtaatacaacattaaaaactcctctggttgccgtatttgatgatctggatatagaagcggatgaagaagatgaacttagggccagaggtcttacaggtttgaaaaatattggaaatacttgttacatgaatgcagctttgcaggctctttctaattgcccacctttgacacagttttttcttgattgtggaggactagctcgaacagataagaaacctgccatttgtaaaagttatctcaaactaatgacagagctgtggcataaaagcaggccaggatctgttgcgcctactactctgtttcaaggaattaaaactggaaatccaacatttcgggggtattctcagcaggatgctcaagaattccttcgatgtttaatggatttgcttcatgaaaaattgaaagagcaagtcatggaagtagaagaagatccgcaaaccataaccactgaggagacaatggaagaagacaagagccagtcggatgtagattttcagtcttgtgaatcttgtagcaacagtgatagagcagaaaatgaaaatggctctagatgcttttctgaagataataatgaaacaacaatgttaattcaggatgatgaaaacaattcagaaatgtcaaaggattggcaaaaagagaagatgtgcaataagattaataaagtaaattctgaaggcgaatttgataaagatagagactctatatctgaaacagtcgacttaaacaaccaggaaactgtcaaagtgcaaatacacagcagagcttcagaatatatcactgatgtccattcgaatgacctgtctacaccacagatccttccatcaaatgaaggtgttaatccacgtttatcggcaagccctcctaaatcaggcaatttgtggccaggattggcaccaccacacaaaaaagctcagtctgcatctccaaagagaaaaaaacagcacaagaaatacagaagtgttatttcagacatatttgatggaacaatcattagttcagtgcagtgtctgacttgtgacagggtgtctgtaaccctcgagacctttcaagatctgtccttgccaattcctggcaaggaagaccttgctaagctgcattcatcaagtcatccaacttctatagtcaaagcaggatcatgtggcgaagcatatgctccacaagggtggatagcttttttcatggaatatgtgaagaggtttgttgtctcatgtgtccctagctggttttggggtccagtagtaaccttgcaagattgtcttgctgccttctttgccagagatgaactaaaaggtgacaatatgtacagttgtgaaaaatgcaaaaagctgagaaatggagtgaagttttgtaaagtacaaaactttcctgagattttgtgcatccaccttaaaagattcagacatgaactaatgttttccaccaaaatcagtacccatgtttcatttccgctagaaggcttggatcttcagccatttcttgctaaggatagtccagctcaaattgtgacatatgatcttctgtcagtcatttgccatcatggaactgcaagtagtggacactatatagcctactgccgaaacaatctaaataatctctggtatgaatttgatgatcagagtgtcactgaagtttcagaatctactgtacaaaatgcagaagcttacgttcttttctataggaagagcagcgaagaggcacaaaaagagaggagaaggatatcaaatttattgaacataatggaaccaagcctccttcagttttatatttctcgacagtggcttaataaatttaagacctttgccgaacctggccctatttcaaataatgactttctttgtattcatggaggtgttcctccaagaaaagctggttatattgaagacctggttttgatgctgcctcagaacatttgggataacctatatagcaggtatggtggaggaccagctgtcaaccatctgtacatttgtcatacttgccaaattgaggcggagaaaattgaaaaaagaagaaaaactgaattggaaatttttattcggcttaacagagcgttccaaaaagaggactctccagctactttttattgcatcagtatgcagtggtttagagaatgggaaagttttgtgaagggtaaagatggagatcctccaggtcctattgacaatactaagattgcagtcactaaatgtggtaatgtgatgcttaggcaaggagcagattctggccagatttctgaagaaacatggaattttctgcagtctatttatggtggagggcctgaagttatcctgcgacctccggttgttcatgttgatccagatatacttcaagcagaagaaaaaattgaagtagaaactcggtctttgtaatttttaggatgtagagagttctaatgaggaatcattttcatgtgccctgacatgtacacatgcgaaaacattcctaaaagcgtgtttatttgctttattttttttcatcatttatcccatttatttcttcttagtgggcattatggaagaatatattaaaatgtgtaatataccacaggttggtatatttagttttaaatacttaccataaagtctttcagtgtaatttttttttgagacagagtcttgctttgtcacccaggctggagtgctgtggtgttacctcagctcactgcagcctccacctcctgggttcaagcgattctcctgcctcagcctctcgagtagctgggattacaggcacctgccaccatgcccggctaatttttgtattttagtagagatggggtttcaccatgttggccaggctagtctcaaactcctgacctcaggtgatccacccacctcggcctcccaaagtgctgggattacaggtgtgagccacagcgcctggcccagtgtaatatttttgaaagaggagggacaattgtgaaatcagtaggttatctttaatctttacactacatgcagatccatagtatcctttgtagtgttgtaaatacttttgctttgaaaactttttcattgtcctaaatcaccctgactctgaccagtctttcagttctccaaaagcccaatttaattgtatagttttgtcatggcttcatataataaagagcctattttaagttgaaagtagtagtcagaaaattgttaatttcctaaagctcaggaaactagggtgtcactttttttgcactgcagcatatacactaactagcttattaaaatttacaaaatgtctttttgaatgtatcaaggatatatttagtttgagtggaatttgtcagcagatatcagtaacttattgccgcttatattgtacaatgttaaacttcaattcctgtaacctggttagtattaatgtcagtgactaaaaaacttagagttagttttagggcactttttattttgagagcatgaagtgtggaatgtgtcactacgattgttgataaagctgaggccacttgcaacttgattttttaaatgaaatagataaagtctttttgaataatatagtatgcactgctatttgcttgattatgtaatgtcaaaagtttaactatattccaagtacaaaaacatactggattacattgaggatgttgaatagcattcatgatggctttgttttggtttggggcagctgtcaccagctaaagcaatgttgttaaaattagctcaataaaaatgtctttaaaatgcaaaaaaaaaa

SEQ ID NO: 58875 - DNA, 1196 bp, Homo sapiens
tacaaggggctgtgctgagaggcgctgctgggcgtctgggcggaggactcctggttctgggtgctgggagagcgatggggctctcagcggtgggaaggacccgagctgagtctgggacagcagagcgggcagcaccggtttttgtcctgggcctccaggctgtgagcacagatacgcagtattttggcccaggcacccggctgacagtgctcgaggacctgaaaaacgtgttcccacccgaggtcgctgtgtttgagccatcagaagcagagatctcccacacccaaaaggccacactggtatgcctggccacaggcttctaccccgaccacgtggagctgagctggtgggtgaatgggaaggaggtgcacagtggggtcagcacagacccgcagcccctcaaggagcagcccgccctcaatgactccagatactgcctgagcagccgcctgagggtctcggccaccttctggcagaacccccgcaaccacttccgctgtcaagtccagttctacgggctctcggagaatgacgagtggacccaggatagggccaaacctgtcacccagatcgtcagcgccgaggcctggggtagagcagactgtggcttcacctccgagtcttaccagcaaggggtcctgtctgccaccatcctctatgagatcttgctagggaaggccaccttgtatgccgtgctggtcagtgccctcgtgctgatggccatggtcaagagaaaggattccagaggctagctccaaaaccatcccaggtcattcttcatcctcacccaggattctcctgtacctgctcccaatctgtgttcctaaaagtgattctcactctgcttctcatctcctacttacatgaatacttctctcttttttctgtttccctgaagattgagctcccaacccccaagtacgaaataggctaaaccaataaaaaattgtgtgttgggcctggttgcatttcaggagtgtctgtggagttctgctcatcactgacctatcttctgatttagggaaagcagcattcccttggacatctgaagtgacagccctctttctctccacccaatgctgctttctcctgttcatcctgatggaagtcctcaaacaccatttccatacccaggcattctgggtccccactggagggttagtctgaagggcaatggctgggctttggaaaaccag

SEQ ID NO: 58876 - DNA, 4888 bp, Homo sapiens
tttcgtgctgtggctgcggaggttgaggggcgtccgaggcgcggaggggctggctgggcaggaggggttggcggggcagcagggccgcggccatggggagcttgaaggaggagctgctcaaagccatctggcacgccttcaccgcactcgaccaggaccacagcggcaaggtctccaagtcccagctcaaggtcctttcccataacctgtgcacggtgctgaaggttcctcatgacccagttgcccttgaagagcacttcagggatgatgatgagggtccagtgtccaaccagggctacatgccttatttaaacaggttcattttggaaaaggtccaagacaactttgacaagattgaattcaataggatgtgttggaccctctgtgtcaaaaaaaacctcacaaagaatcccctgctcattacagaagaagatgcatttaaaatatgggttattttcaactttttatctgaggacaagtatccattaattattgtgtcagaagagattgaatacctgcttaagaagcttacagaagctatgggaggaggttggcagcaagaacaatttgaacattataaaatcaactttgatgacagtaaaaatggcctttctgcatgggaacttattgagcttattggaaatggacagtttagcaaaggcatggaccggcagactgtgtctatggcaattaatgaagtctttaatgaacttatattagatgtgttaaagcagggttacatgatgaaaaagggccacagacggaaaaactggactgaaagatggtttgtactaaaacccaacataatttcttactatgtgagtgaggatctgaaggataagaaaggagacattctcttggatgaaaattgctgtgtagagtccttgcctgacaaagatggaaagaaatgcctttttctcgtaaaatgttttgataagacttttgaaatcagtgcttcagataagaagaagaaacaggagtggattcaagccattcattctactattcatctgttgaagctgggcagccctccaccacacaaagaagcccgccagcgtcggaaagaactccggaagaagcagctggctgaacaagaggaactggagcgacaaatgaaggaactccaggccgccaatgaaagcaagcagcaggagctggaggccgtgcggaagaaactggaggaagcagcatctcgtgcagcagaagaggaaaagaaacgccttcagactcaagtggaacttcaggccaggttcagcacagagctggaaagagagaagcttatcagacagcagatggaagaacaggttgctcaaaagtcctctgaactggaacagtatttacagcgagtacgggagctggaagacatgtacctaaagctgcaggaggctcttgaagatgagagacaggcccggcaagatgaagagacagtgcggaagcttcaggccaggttgttggaggaagagtcttccaagagggctgaactagaaaagtggcacttggagcagcagcaggccattcagacaaccgaggcggagaagcaggagttggagaatcagcgtgtcctgaaggaacaggccctgcaggaggccatggagcagctggaggagcttgagttagaacggaagcaagcacttgagcagtacgaggaagttaaaaagaagctggagatggcaactaataagaccaagagctggaaggacaaagtggcccatcatgaaggattaattcgactgatagaaccaggttcaaagaaccctcacctgatcactaactggggacctgcagctttcactgaggcagaacttgaagagagagagaagaactggaaagagaaaaagaccacggagtgactgagcttgctggcagtcacgtcagttatgtagatactgcatggcaggagagctttacgctaaagacaaaagaaacagctttgggggccgggcgtggtggctcacgcctgtaatcccagcactttgggaggccgaggcgggtggatcacctgaggtcaggagttcaagaccagcctggccaacctggtgaaaccctgtctctactaaaaatacaaaaaaaattagctgagcgtggtggcgggcgcctgtaatcccagctacttgggaggctgaggcaggagaatcacttgaacgtgggaggcggaggttgcagcgagctgagatcatgccgttgtactccagcttgggcaacagagtgagactccatctcaaaacaaaacaaaacaaaacaaaaaaacccggctttgctgcttttaactcttcttccttctgtgcctctctaagtgggtcagtatcctaaggaagccttcttatttatcttcctgcaaacaagggttacctgaaaagaaaaaaaaagtcaacattgtcaagctgtttgtttactctttctttgaaaacatcaccttctgaaatttgtcttttagctctctcagattcttccccaaatgaggcagggtgcagacagcacagtcagctctgcagagtttggaggggctcactgccactgggtactcagaacctctgtggactggatgtcagctctttcctttggcagcgtgtttccttttccgagtatgtgctgttaaactagattggccggttcgctttccatttcctgacacttgacatggaatgcctttgaccattggtgctctgacagagaagtcatggagtcattgccatttcctggttgcccttttggaatgtgatcctgttagtagaggttttctagcttctactaagatatttctttccctaaccatcatacacttggcatgtttcattcccatctcctttcccctcaccttaaaggagactacccctttgccccatattgtcaacctaattttctctcgtactctctctagtgaatgatgtgctaccaagtatatgccaggctgtgagaggattatactgagtagtagaaagaagctaatttgaaataaaaattatttgtataattaagaaagcagattagatgcacatggtcaacaggaagttgactgtatgtctgctagttagattcaaaacatcataaagatgatagcatgtcaatatattagcctagccattatgttagcctttgttaggtgggcagcttttctgctttttcccttcctctgtggtgacaacggaggaaatatccaacagaaatacgtctaacagggaaattgggatcatagtttatatgcatctgatttgaaaggagtattgaggaaggttttcatatatgatctatctttggattaaaaagaacatttatgaaatcaagccttctaacactagttataattgagaagcaacagtaactccgtggacagcaatcaagcttaaaattgtaaataaatatggggataattcagttgttgcaaaaaaagggcagaattcagtagaataaagtccttttctcttacaggtattaaatgaggacagagaacctcaggtgttcttatgctagtgcttgctgagtgcatactaagaaagcaattccaaatagatgtatacatctagagagagtggtattagagattcagtgtatgtatttatttacatgagaggaaactggaatataatcccataaattattggaatataatcccataaattatcaccttttatgactggaaaatatttgccaatgaagaaatggtctgtaggtatttgtcttaagatttttggctgtttaataaaaatgtaactttaacggtttcttatagttgcctttataaagtgtattgtctaaaatatttttgtatcatgtgcctttgaaatttgacagctgatttgggtgttggatttctgcccagccatttatcagtattatcattttattcagtagctggcaggtgtattagacaaacgagacttaggtaaggaatggaacctttcctgtggtttgactgcacatcacaccagaagactccagtatccctcattccagaatgaggaaaaagtattctacaaagaacctaatcacctctgtgaaatctatgggatggaaacagtgtggccttaggagtcaaatagtctctgcatggtggggaggatcatgatggaatatgtgaatttctacttctagaagttgtgaaataggtcctgcacttttgcagaatgtccttctttaaacctggcttattccacagctgtagctgataacatgacctggggcttagctgctctagccctgggttcttggagacctcacactgcctggcccctggccatccacctaaggactgcctgctttctggtcacatgtggaccttgatacgactaagcggttacatatgtggttgtgcaaaagctttctgtttaatgcatagtgttaccgatttacatcttggttttcagtggcactatgtctaggaggcaatatccttttaaacagtgctttggctaagatagatacttgtgaatcaaagatagcacagaaatgaactaagtatatcccatttggaattatattttgatactatttaaaatggtttcacctgttaaagggccaacagaactcttggttttacttttgtaattactgtacagaaaatttcaagagtgtttgagtgcttgtcatcaggtgttttccttaataagtagggatatgatcatttacaggaattatatatgaaaaaagtttttgaaatgtatttttgtgatgtgctatgttgaggggaaaccaaatatttatgattttaaaacattcgtatgaaaacattgtacaatgtaatatgctcaactttctcaattttttgctaatttttctaagatacattaaaaatgttttatatttttttttaagtaaaatggacccagtaagaaaattaaaaataccagaacatacactttaaactgtctgatttaataaaacagtggggggt

SEQ ID NO: 58877 - DNA, 1497 bp, Homo sapiens
ctcagtctttggtggaaccatcactaggccccaatcccttagtccctcttgcgtcgaggctgcaaaatggttccattcgccaggagacgctcctgagagaagggcgcgcgcggcacaggggccttccttgcacctcggagcaaagcagctcggatagcgccacacgtctgcgccctgcgtgggaagggcagggctgacagcacttcctccccggggcagagacctggagcccgggtgcggcagtctgcaccgcgcgtcgctttcccggccggagtctcgccgccttcccgcgccccgcagcgccccgcagagcagtcgagatgggtgagtcaagtgaagacatagaccaaatgttcagcactttgctgggagagatggatcttctgactcagagtttaggagttgacactctccctcctcctgaccctaatccacccagagctgaatttaactacagtgtggggtttaaagatttaaatgagtccttaaatgcactggaagaccaagatttagatgctctcatggcagatctggtagcagacataagtgaggctgagcagaggacaatccaggcacagaaagagtccttgcagaatcaacatcattcagcatctctacaagcatcaattttcagtggtgcagcctctcttggttatggaacaaatgttgctgccactggtatcagccaatatgaggatgacttaccacctccaccagccgatcctgtgttagaccttccactgccaccaccacctcctgaacctctctctcaggaagaggaagaagcccaagccaaggctgataaaattaagctggcgctggaaaaactgaaggaggccaaggttaagaagctcgtcgtcaaggtgcacatgaatgataacagcacaaagtcactgatggtggatgagcggcagctggcccgagatgttctggacaaccttttcgagaaaactcattgtgactgcaatgtagactggtgtctttatgaaatctacccggaactacaaattgagaggttttttgaagaccatgaaaatgttgttgaagtcttatcagactggacaagagacacagaaaataaaatactatttttggagaaagaggagaaatatgctgtatttaaaaacccccagaatttctacttggataacagaggaaaaaaagaaagcaaggaaactaatgagaaaatgaatgctaagaacaaggaatccttacttgaggtaaggttaattttgcagagtggaagaaaagagaaggacgtttgctctatttttaagtcatttgcttccgagaacaatggaaaaatctaaagacatacactgaaattttaagttggggtgttaaaatcaaattatttctaaattatagctatttagataattcaactgtttttcttttttgagtcatttgttacaacatgtggctttagataaatgaagctggatttgtaattcttgacttttaaaaaactctagcattccaagtttccattactta

SEQ ID NO: 58878 - DNA, 1970 bp, Homo sapiens
cgacctcccgagtagctgggattgcgggcacttgccaccatgcctgaccaatttttgtatttttagttgagacgggattttgccatgttggctaggctggtctcgaactcctgacctcaggtgatccgcccacctcagcctcccaaagtgctgggattacaggcatgagccactgtgcctggccgtggaccttcttttcaaagaattatggaggcttattttagttcccctaacttggaaatctcctgaggaagaaaggtgactacaggcatttgtcaaaaatttgtaaaggcaagtttattagcctctgccatcgggggcaaagaataatagctaaggcaaacaatagacacaccaaaaagcctgggaggaaaagctggaaagtaagatattttggagaataaaggcttttaaaacttccacatattcttgggaatccaaaaggccacatgtacatgcagggtgagcaaatagagaagacttgagaaagccttaaactctcacctctggctaaccatcaggcttgctcaaataggaagtgaaaactaaggtgaatttgttgcttagctgaatgttgaaggtgtgccccaacacttacacagagcctactggtaaagacagagtgttttctttttgtcttggtttcaggcatttaaggaaatctgtttctcttttggatcactagctgcaaattaagctaacagaacaggagctcagctggtcacacacagcaacgaatacagactttataaagttcagaaaagttaccaaacagtggtaaccataacaagtaccaacaatgaactatggggagggaggagaatctgatttccagagttaccacattataatactattcaaaatgtcacatttttagcaaagattacatgacaaggaaaaaccagaaaagtatggcccatacacaggtaaaaaaagaaattaatagaaactacccctgaagaagcacagacttcggatgtacaaaacaaagacttttcatcaactcttttagatatgctagaagagctaaaggaaaccatggacagagaacaaaaaaattaggaaagcaatgtctcatccaatacagaatatcaataaagagattgaaattgtagaaaagaaccaaatagaaattctggagttgaaaagtattataactaaaactgaaaattcactagaggtattcagcagcagactggagaagtcagaagaaagaatcaacaggcttcaagataggtcaattaagattatacagtctgaggagcagaaaggaaaaagaatgaagaaaaatgaacagagcataaaagacctctgggactctatcaagcataccagtatatgcatgaggggagtcccagaaggagaagaaagagagaaagggacataatatttgaagaaataatggtagaaaatgtcccagctttgatgaaatacatgaatctagatattcaagaggctcaaagaaccctaaatagggtaaactcaaaaagacccacaccggaatgcaaaagtgagctgggtgtggtggcacgtgcctgtggtcccagctactcgagaggctaaggcaggaaaatcgcttgaacccaggaggcagagattgcggtgagccgggattgcgccagtgcactccagctgggcgacagagcgagattccatctcgaaaaaaaaaaaaaccaaaaacctttggctgcagcctttcaaagggaaagggggaaagaataatattacctgatttcaaaagggacttgaaaatgggaatcatttttttggctgaaaaaatcttaactctttgaaattactttttgtggctgtggccatactctaaggggccaaactgcggaaaattttttatcagggaaggggaaccatgtgttttgttgtttgggaaatttttatcaagaatcttcaaaaaaaataatttcctgctttatcttcaaaaactggaagggaagggtcaaagaaaagacagt

SEQ ID NO: 58879 - DNA, 1266 bp, Homo sapiens
agcttggctctgccttctgcagtgtgagtaacacactgaagccagaagctgtgggctgtggggaagtggctgcatcgccacccaagggaccctggactttgccagacgtcagggttgagaggagccactagcaccatcccagagctgtcagcaccggcctcagcccaggcggctctctccctgagcttcctgtaccctgaccctctccagcctcagacctgagacagggctggacaaggaagcagagagcagaagaaaagcagaagcgaagctcagatctgctgggaggagactacattttgtcccctcctggggtcttgcacagtggcaggtgacattcgtgttacaggaatgactgccagggcctgggcctcgtggcggtcttcagctctgctcctcctgcttgtcccaggctattttcctctgagccaccccatgaccgtggcgggccccgtggggggatccctgagtgtgcagtgtcgctatgagaaggaacacaggaccctcaacaaattctggtgcagaccaccacagattctccgatgtgacaagattgtggagaccaaagggtcagcagggaaaaggaatggccgagtgtccatcagggacagtcctgcaaacctcagcttcacagtgaccctggagaatctcacagaggaggacgcaggcacctactggtgtggggtggatacaccgtggctccgagactttcatgatcccattgtcgaggttgaggtgtccgtgttcccggccgggacgaccacagcctccagcccccagagctccatgggcacctcaggtcctcccacgaagctgcccgtgcacacctggcccagcgtgaccagaaaggacagccccgaacccagcccacaccctggctccctgttcagcaatgtccgcttcctgctcctggtcctcttggagctgcccctgctcctgagcatgctgggtgccgtcctctgggtgaacagacctcagagaagctctataagcaggcagaattggcccaagggtgagaaccagtagcatctgctgtccatcaaggccctgtgcttgcaacagagcccttttggggaacttggaatgacctcctgaccatcaaggcctgcaacagagcccctctgggggactggaatgacctcctgaccactccctcccgggctgctctctccaacatctcctggaatcctttgtgagcctccttcagccttttccctgtgcccgatccaacatgtgacacatgaggactttagagcacaatggatc

SEQ ID NO: 58880 - DNA, 1761 bp, Homo sapiens
ctgagtggttgttagccaagatggcggtagcgatcgctgcagcgagggtctggcggctaaaccgtggtttgagccaggctgccctcctgctgctgcggcagcctggggctcggggactggctagatctcacccccccaggcagcagcagcagttttcatctctggatgacaagccccagttcccaggggcctcggcggagtttatagataagttggaattcatccagcccaacgtcatctctggaatccccatctaccgcgtcatggaccggcaaggccagatcatcaaccccagcgaggacccccacctgccgaaggagaaggtgctgaagctctacaagagcatgacactgcttaacaccatggaccgcatcctctatgagtctcagcggcagggccggatctccttctacatgaccaactatggtgaggagggcacgcacgtggggagtgccgccgccctggacaacacggacctggtgtttggccagtaccgggaggcaggtgtgctgatgtatcgggactaccccctggaactattcatggcccagtgctatggcaacatcagtgacttgggcaaggggcgccagatgcctgtccactacggctgcaaggaacgccacttcgtcactatctcctctccactggccacgcagatccctcaggcggtgggggcggcgtacgcagccaagcgggccaatgccaacagggtcgtcatctgttacttcggcgagggggcagccagtgagggggacgcccatgccggcttcaacttcgctgccacacttgagtgccccatcatcttcttctgccggaacaatggctacgccatctccacgcccacctctgagcagtatcgcggcgatggcattgcagcacgaggccccgggtatggcatcatgtcaatccgcgtggatggtaatgatgtgtttgccgtatacaacgccacaaaggaggcccgacggcgggctgtggcagagaaccagccctttctcatcgaggccatgacctacaggatcgggcaccacagcaccagtgacgacagttcagcgtaccgctcggtggatgaggtcaattactgggataaacaggaccaccccatctcccggctgcggcactatctgctgagccaaggctggtgggatgaggagcaggagaaggcctggaggaagcagtcccgcaggaaggtgatggaggcctttgagcaggccgagcggaagcccaaacccaaccccaacctactcttctcagacgtgtatcaggagatgcccgcccagctccgcaagcagcaggagtctctggcccgccacctgcagacctacggggagcactacccactggatcacttcgataagtgagacctgctcagcccacccccacccatcctcagctaccccgagaggtagccccactctaaggggagcagggggacctgacagcacaccactgtcttccccagtcagctccctctaaaatactcagcggccagggcggctgccactcttcacccctgctcctcccggctgttacattgtcaggggacagcatctgcagcagttgctgaggctccgtcagccccctcttcacctgttgttacagtgccttctcccaggggctgggtgagggcacattcaggactagaagcccctctgggcatggggtggacatggcaggtcagcctgtggaacttgcgcaggtgcgagtggccagcagaggtcacgaataaactgcatctctgcgcctggctctctaaaaaaaaaa

SEQ ID NO: 58881 - DNA, 5716 bp, Homo sapiens
agcgctcaaaccacacgcaccgctgctcggggcttggagatttgcgcaggctgggctcccggacccggcggaccgacgcgcggaggatcgggatccggcgctgtggggctggggtgggcgggggaggctgcccccggtgcctttggcgcgacacccgcatgaggacgcgagtgaaatataccaaggtggaatttccaagggaaaagcttcggggtggttttggtccatttctccagcgaagaagttgacatggcgagcgactccccggctcgaagcctggatgaaatagatctctcggctctgagggaccccgcagggatctttgaattggtggaacttgttggaaatggaacatacgggcaagtttataagggtcgtcatgtcaaaacgggccagcttgcagccatcaaggttatggatgtcacaggggatgaagaggaagaaatcaaacaagaaattaacatgttgaagaaatattctcatcaccggaatattgctacatactatggtgcttttatcaaaaagaacccaccaggcatggatgaccaactttggttggtgatggagttttgtggtgctggctctgtcaccgacctgatcaagaacacaaaaggttacacgttgaaagaggagtggattgcatacatctgcagggaaatcttacgggggctgagtcacctgcaccagcataaagtgattcatcgagatattaaagggcaaaatgtcttgctgactgaaaatgcagaagttaaactagtggactttggagtcagtgctcagcttgatcgaacagtgggcaggaggaatactttcattggaactccctactggatggcaccagaagttattgcctgtgatgaaaacccagatgccacatatgatttcaagagtgacttgtggtctttgggtatcaccgccattgaaatggcagaaggtgctccccctctctgtgacatgcaccccatgagagctctcttcctcatcccccggaatccagcgcctcggctgaagtctaagaagtggtcaaaaaaattccagtcatttattgagagctgcttggtaaagaatcacagccagcgaccagcaacagaacaattgatgaagcatccatttatacgagaccaacctaatgagcgacaggtccgcattcaactcaaggaccatattgatagaacaaagaagaagcgaggagaaaaagatgagacagagtatgagtacagtggaagtgaggaagaagaggaggagaatgactcaggagagcccagctccatcctgaatctgccaggggagtcgacgctgcggagggactttctgaggctgcagctggccaacaaggagcgttctgaggccctacggaggcagcagctggagcagcagcagcgggagaatgaggagcacaagcggcagctgctggccgagcgtcagaagcgcatcgaggagcagaaagagcagaggcggcggctggaggagcaacaaaggcgagagaaggagctgcggaagcagcaggagagggagcagcgccggcactatgaggagcagatgcgccgggaggaggagaggaggcgtgcggagcatgaacaggaatacatcaggcgacagttagaggaggagcagagacagttagagatcttgcagcagcagctactgcatgaacaagctctacttctggaatataagcgcaaacaattggaagaacagagacaagcagaaagactgcagaggcagctaaagcaagaaagagactacttagtttcccttcagcatcagcggcaggagcagaggcctgtggagaagaagccactgtaccattacaaagaaggaatgagtcctagtgagaagccagcatgggccaaggaggtagaagaacggtcaaggctcaaccggcaaagttcccctgccatgcctcacaaggttgccaacaggatatctgaccccaacctgcccccaaggtcggagtccttcagcattagtggagttcagcctgctcgaacaccccccatgctcagaccagtcgatccccagatcccacatctggtagctgtaaaatcccagggacctgccttgaccgcctcccagtcagtgcacgagcagcccacaaagggcctctctgggtttcaggaggctctgaacgtgacctcccaccgcgtggagatgccacgccagaactcagatcccacctcggaaaatcctcctctccccactcgcattgaaaagtttgaccgaagctcttggttacgacaggaagaagacattccaccaaaggtgcctcaaagaacaacttctatatccccagcattagccagaaagaattctcctgggaatggtagtgctctgggacccagactaggatctcaacccatcagagcaagcaaccctgatctccggagaactgagcccatcttggagagccccttgcagaggaccagcagtggcagttcctccagctccagcacccctagctcccagcccagctcccaaggaggctcccagcctggatcacaagcaggatccagtgaacgcaccagagttcgagccaacagtaagtcagaaggatcacctgtgctcccccatgagcctgccaaggtgaaaccagaagaatccagggacattacccggcccagtcgaccagctagctacaaaaaagctatagatgaggatctgacggcattagccaaagaactaagagaactccggattgaagaaacaaaccgcccaatgaagaaggtgactgattactcctcctccagtgaggagtcagaaagtagcgaggaagaggaggaagatggagagagcgagacccatgatgggacagtggctgtcagcgacatacccagactgataccaacaggagctccaggcagcaacgagcagtacaatgtgggaatggtggggacgcatgggctggagacctctcatgcggacagtttcagcggcagtatttcaagagaaggaaccttgatgattagagagacgtctggagagaagaagcgatctggccacagtgacagcaatggctttgctggccacatcaacctccctgacctggtgcagcagagccattctccagctggaaccccgactgagggactggggcgcgtctcaacccattcccaggagatggactctgggactgaatatggcatggggagcagcaccaaagcctccttcaccccctttgtggaccccagagtataccagacgtctcccactgatgaagatgaagaggatgaggaatcatcagccgcagctctgtttactagcgaacttcttaggcaagaacaggccaaactcaatgaagcaagaaagatttcggtggtaaatgtaaacccaaccaacattcggcctcatagcgacacaccagaaatcagaaaatacaagaaacgattcaactcagaaatactttgtgcagctctgtggggtgtaaaccttctggtggggactgaaaatggcctgatgcttttggaccgaagtgggcaaggcaaagtctataatctgatcaaccggaggcgatttcagcagatggatgtgctagagggactgaatgtccttgtgacaatttcaggaaagaagaataagctacgagtttactatctttcatggttaagaaacagaatactacataatgacccagaagtagaaaagaaacaaggctggatcactgttggggacttggaaggctgtatacattataaagttgttaaatatgaaaggatcaaatttttggtgattgccttaaagaatgctgtggaaatatatgcttgggctcctaaaccgtatcataaattcatggcatttaagtcttttgcagatctccagcacaagcctctgctagttgatctcacggtagaagaaggtcaaagattaaaggttatttttggttcacacactggtttccatgtaattgatgttgattcaggaaactcttatgatatctacataccatctcatattcagggcaatatcactcctcatgctattgtcatcttgcctaaaacagatggaatggaaatgcttgtttgctatgaggatgagggggtgtatgtaaacacctatggccggataactaaggatgtggtgctccaatggggagaaatgcccacgtctgtggcctacattcattccaatcagataatgggctggggcgagaaagctattgagatccggtcagtggaaacaggacatttggatggagtatttatgcataagcgagctcaaaggttaaagtttctatgtgaaagaaatgataaggtattttttgcatccgtgcgatctggaggaagtagccaagtgtttttcatgaccctcaacagaaattccatgatgaactggtaacagaagagcacttggcacttatcttcatggcgttatttctaatttaaaagaacataactcatgtggacttatgccagtctagaggcagaatcagaaggcttggttgaacatatcgctttccctttttcctctccctccgcccctcccagtacagtccatctttcaatgttgcagcctggttgagaaggagagaaaaaggtggcaggaatttcccaggagatccccaagaatgctgccttgtctgtggacaaagatggaccatgtgcccttcggaattagggatagaaacaaatattgtgtgctcttaacgattaagctgtgttatggggggttttcaggtttttaccttttttctttacccctttactctgcaagaatggggaaagaatgcatactgcgaaaatgagtcttttaaattctgtctgcctactagttttaagtatatggtatgttgtaaaatttccaatgatgagagacagcacaataaatgtaccttatctccttaggctgaaggccataactacatagtggagtaatttaagaactctcttgccttcaccaacccaaaaggttgctttttgatagcaactggctaatgaatttttaaaaagagaagaaaaatactagttttcccctcttttgggaaatagattttaaatggctaaactactagccttaaaactactagtctaataaaatcaactaccacttttgtgaatctgacaggccacatttttatatggccctttacagaatggagtgtgttgaacaggatactaacgccattgagttgagctggcctagcgatggagggacactctaacacaactttccctcagctattatgcaacagatcagggaaaaagatgggatgacagatggggtcagacagaaagagcttctgggaaacaagcttacatagtcttttttaaaatgcacaaagcctcccagctaagaggtcacttggtttgggcttcattaggactgagactttgttgagttctttctgggacttggagagtggatgatattcaggctctgaacattcccagcgctctcccgagggtgccactttctcaagatgaaaactgtgactgaaaaaattaataataaatgtttctgagcttgcctgtgttctcccctgtgtgggtgagagaagggactagactccctaaagcctgcctcagatacaagaggcatcattggctccaattttagagaacttgaaagcaaggctttggacaaaattttgagaccctaatcactttaccttcctccaaaattacccaacatacggtaaacaacatttgtgcagaagtatgtatgtatttagttcaggttgacttgtgtccttataaactcttactcaaatgatttgaacttt

SEQ ID NO: 58882 - DNA, 1550 bp, Homo sapiens
ttttttttttttataaatattgattttatagaaaggaccaattcaaaattggtcagatgccacacgctagaaagcttccagaaccacgatggaaagaaaaaaaagaaaacaaaaaacagagagaacaaacaaaaataccccagaccaaaatgcctgaaaaatcaaggtcctggttgaccaaaggattcttaaagaaaacatgtggctggggtgaggagaccccaatgcctgaacgagaccccagagtggaaggaaaaacaacccagaaatgcaaatccgaagtccctgcccacggggcccccccacgctgtcaaaagcgaggcaaagggcttcacagctttatagggggtggggttgatggcagtagcttaaataataacgggaggaaggagggtttttatacttcagctttttttttgtctgcccccctcttcctctacgcggaagaggagagactggtagcttgaggttaaggagaaaacagtatttcccccccacttctttaataggcaaaccatctagaaatggactgtcataaaaaaatgccagatcccacctgtgacctgacagcccccaattcctagagaggtgagagctgtcgtgtggcaggttaggagaggtgccaaccttgggcgatgcggcttcttgggaaataacagctccagcgagaaagaattggggtgagggagaggatgggggccagaatggggggacccttaagtggtaccaaaattagctgccgtttggtccctgctggtgggtccctggggtggaaagcatggcaaggagggggttggggctgaatggagaagaaagtgagatgctgataaaaaaaaaaaaacacccttctcagagggtccacggccctggttctgaagagtagaaaatcaacaggatcaagcagagggctttcctgggtcacccctgctgaaccccagctcagttccggtgagggatcaatgctgcctggagtaggggaatgggcaggcggcccagtccggaccctcggctcccgggggagaggggaggggtgggcgtggtgggctctccccggccctcccccggcttcacttcccttcctcccggccggcccggcccccgcctggcccattgcagggcagcacccagttgttatcgtggaggcccaggcggcagccgggagtctcgcggtcggctcgacggcagcacatccagtaggaacgtccgtaaggcaggtcatggtggtagggcttggggtgccagcggcagagcgacacgtcgcccttctcgtatctcttgcggcactgtttgcacggatcatcgcggtagagcgggtctcggctccagcgcgagtctgtggcccgcacgccaaacgcctcgatgatgcccttgaagtggtggcaggtgcacttgagggcggccagcgcgcgcgtgggcaggaagctgaagatcttgaccagcacgtgctcgggcagcagcagcatgtactgtcgcggctccagcagccgctgaatcttgaagcggatctctaggaagtcgtgcgacacgtgccggtacaagcggcacaggga

SEQ ID NO: 58883 - DNA, 6740 bp, Homo sapiens
cgcgcgccaatgatgactaaggctgtgccggaggaaccccgaaagccaggaaggctgacccaggccctgaactcacccctcacctgggagcatgtttggatttgcgtccccggcggcactcctgactgtctgacagacaccttcagagtgaagaggccacatctcaggcgctctgccagcaacggtcatgtccctgggactcctgtctacagagaaaaagaagatatgtatgacgagattattgagttaaagaagtcattgcacgtgcagaagagcgacgtggacctgatgagaacgaagctccggcgcctggaggaggaaaacagcaggaaggaccggcagatagagcagctcctggatcccagccgcggcacggattttgttcggactctggcagagaaaaggcccgatgccagttgggtcattaacgggctgaagcagaggatcctgaagctggaacagcagtgcaaggagaaggacggcaccatcagcaaactccagaccgatatgaagactaccaacctggaagagatgcggatcgccatggagacatactacgaggaggtgcatcgtctccagaccctcttggcaagttctgaaaccaccggaaagaagcccctgggggagaagaagacgggcgccaaaaggcagaagaagatgggcagtgccctcctgagcttgtcccggagtgtccaggagctcacggaagagaaccagagcctgaaggaggacctggaccgcgtgctgagcacctccccaaccatctccaagacacagggttatgtggagtggagcaagccccggctgctgaggcgcattgtggagctggagaagaaactaagtgtgatggagagctcaaaatcacacgccgcagagccagtcagatcacacccgccagcctgccttgcatccagctctgcgctgcacagacagccacgaggggaccgcaacaaggaccacgagcgtctccgaggggctgtgagagacctgaaggaagagcggaccgcgctgcaggagcagctgctgcagagagatttggaggtgaagcagctcctgcaggcgaaggccgacctggagaaggagctggagtgcgcgagggagggcgaggaggagaggagagagcgagaggaggttttgagagaggagattcagacacttaccagcaagctccaagaattgcaagaaatgaagaaagaagagaaagaggattgcccggaagttcctcataaggcccaagagctcccagctcccactcccagcagcaggcactgcgagcaagactggccgccggattccagcgaggaggggctcccgcggccccgctccccctgctctgatgggagaagagacgccgcggccagagtcctgcaggcccagtggaaggtgtacaagcacaagaaaaaaaaggctgttctggatgaggcggctgtggtgcttcaggcagctttcaggggacatctcacgcggacaaagctcttagcaagcaaagcacatggctcagagccacccagcgtgccaggcctcccagaccagagctctcctgtgccccgcgttccgagccccatcgcccaggccacgggcagccctgtgcaggaggaggccatcgtcatcatccagtccgctctgcgggcacacctggcccgggccaggcacagtgctaccggtaaaagaaccaccaccgcagcttctaccaggaggagatcggcttcagccacacacggggacgcctcctccccacccttcctcgcagctcttcctgacccctctccctcagggccacaggccgtggcacctctacctggggatgacgtcaactccgatgattccgacgatattgtcattgcaccgtctctgcccacgaagaactttccagtttaggtccccgtcactgtctccacgctgtgatggcagcgctgccgaggacataggaaccacgactggaaagataatttatcgtgttaggagaagaacgatgatacctacttaacacctcagcatctgcgtggtgtctctttgtgcttttgtttgtggaaggagacccaaatgcctttactttattctctggggagggccagcggctcgcatccccctcatctccagctgcagctcggatggtggattttcagtgccaacagacacatctgccgtgaactcgcagatgccagggagccctgtagtgacacgttctctgacagcaccttgccgcctgcccacgaccttgaccgtgaggagctgctatacgcaaccagcgccgacaccatgccccctcttcctggtgacaccctcaacaaccaggatttgctcgatctcagcccagcaggccaggcagacacaccccgctgtgccttaggaaggtgtgagaccggcttcccccatccccacagcaaaacacggcctgtcccaagccagtgaggagctaaagacacccaggtccccaaatgatcttactccatgccccacccgctcacaccgtcctttcccgtcacccttgctatcccctggagcactgccctccagagctgcccttcccaggaaggaatttggttggattctgtcactgtggagaccaagattttttaaaattcccaattacaaaagcagcatcacacttgcttctgagaacagcagggtgatgtctgttcccaagctggtggcgggagccttagcctgtgtggggccacccggggaagaggaggagaggagggtgaggaggcaggctcgccgttccaagggacagcataggctcgtggtggggcgtgttgcatctggtgtctgggacagtccccgtcaccccatgtgtgcggcctctgcactcccaagctccatggctgggctgggctgggctgggctgggctgggccgggcgtgcggagcctgtggagccagcagctgcagaggcctaggagggagttcctgggggaagcgcacagtgtccagtgcccatctcttgcttgtgtgtgagattagcccttgctggggcgtcaagaggaagagccttagacctgggcgggccttcaggggcatctagacccctgcacagcccaggcctggtgtctgcatttccacagcacccctgtggggactcctgccggggctggccgctgtctcaggagagacccaatggttagaaagcccctttttacacagctgacagcttctcccaaggcttccgtccacggggacaggcttaacccctgggcgccttttctgcagcatggcggccttctgagtcacctaagctgagcctgggtcattctctgtggcggtcagaaggccgatggccccaacacagtggcttgtgaaagggagagaggaggctctgcatgtccacctgctctatgggaggaggacacaggtgtccccagcccagcctgttctctcccagtcactcagggatggggccacccaaagtgcaggacccgccccaccctgcggttcgaagcctggcccctgtctccacttagcttctgtttctgcagtgggtggaagcgagtcagcggggggcctggcttgtgtacgtgttttccttatttggtctgtgggttgccaagtccatttttttttccactgaactggctggtaacttgatggactgtgtaactgacacaggccctctttagacccctgccttcaccccacccgcccgggtccactccctggggcgctgtcccaagccatccctgcttgccagctcaaagcttcaggtcctaggagccagtccacctcgaaagccctgagaaagtgagacacctgcacattcgctgggggagaccctccgttctcttgtggcagctgctcccacttgttaaaccaagctgtttctgcgggacgtgctcactcttgggaaccagtggcctagagctttgggttacaggcatggagagggctttcctgcctcaggcttggaggccaatgttccatacataaaccgccatgtcctctggtgcagctgggctgctcttttaaaagccagcatccatcttgaagctcgctgggtaaatggcaatgcattctcaagccagtgtcttcagctgatgcccagtgtccagtgctggtcaccagtcccctttgctgggtacagcctgcctggctgttctgtggtcctggaacgctgcagtgtggttttgttccatggagacagtaccaagcggagaggcctccttgcccacggccccagggcctgggggccaggggttctggccctgcggggacttaggcaggaggggaagagaagcccatggagccatgggaggggtgagctgtgggcggggcctagtcatgggaggggtgagctgtgggcggggcgagctgtgggtggggcctagccatgggagaggtgagctgtgaatggggctagctatgggtggggtgagctgtggacagggcctagccatgggaaaggtgagctgtgggcggggcctagtcacgggagaggtgagctgtgggcggggcctagtcatgggaggggtgagctgtggatggggcctagccatgggaggggtgagctgtgagtggggctgagccatgggagcagcaagctggtggagtgggctgggcggagctgtgggggctgctggcagggcctaggaaagtagacaactcccgggggagacgaagtagagagtgagtccccaagaaagggactcctgccccagcgtcaagtgccaaagcaggccccatctaccacttcagggtcgacgttggtggcaggtgttgttcacggtgtactgattgtcactgcaacacctccacatcaccttgaacttcaagaacagcagcaaagctgtatctgctatcagaggctgttaggtagtccagctttaaaataacacactctttctctatcccatgccctttaaacaagcagccacaggagatgtcagtctccagggcctggccccactgtgttgacagcagtcatgtctgttgagctgacactgctgaggctgaagctggccctgtgcaggtggctggtgagccacaggtgcagtacccggaggtgtgctctcccctagaggcctgtccccaactcctcccctagaggcctattcccgctgctcacagacctcagcagaggcaccagctggagggctccagggacatccttggaaatacaggaggctttcctggcacagggcacagctcttaggaggcctttgtaggacgctgtctccccagcgtgtcctgctcatccaggatggggagaaagaggaggaggccccaggctcagaagccagggacagactgccgacgattaccaaactgaatccaggcagtgccatgaccctgggtgtcccttggttcacatcacccaccagacagctgcggagagagtgcagggaggggctgggaccaaacaggccagaaaccagcagaaaagaggcagaagtgaggtgggtgtgcctggggcacgaagccagcgccggggggatttcagtggagccttacagccaggctccgtgcggactgtgatgccagagaggcgtgcagcctctgggcaagtcgggagagggcttgggtggtccccacaaggcagaagaggtggaagggccagagaagaccaccaagaccaccgttcccgcaggcctggggtgagtgacctgactgagactagcgggcagagccaagcagggctaaactccaacccagggcccggtgttggacaaagtagctttttctttgctcgtttgtctgtgtattaagaagagactaaaatagccaaacgacgctggtcgcatgcgctggctgtggtctgtctgctgaatgtctatttttgtctcctgacgagacgtgaggaccatgcccttgatccctccgatggaccagaaacccccttccttgcaaaaaaaaggcaattgaattaggaaaagatagcccaacctagctcagatccaccaagataagcacagcaaagcttggctgcatttttgaggaataaaaacctgcagaaagcaccgataaccttcaagatctgaatgagattctattataacccgtctaaacgattgcaaaattcctcctttggttttggaagcagcgtttgctctcccgtggctcggattctctgaggaccagggagttgacacacaaaccccgccatgggtccgagccagctatttctcaaggctcccacctcgccaagctcccaagggcctgctggcagtgcctacgctgtgccaactaccctgtctggtacagaccacggctgggtaagcacccttaaaagcaacagaaatgacgtctggaagctgaaatgtgaaactgtcaagatggcttaaggagaggaaggagtggacccgctggtctttggcattttgtatttagaattattctaactttatacataatgtataggccgatcttttggaagggataaggttttcattcttgtgcaactcattattctcattattggccttttaaataaaaagttgttttgcagtgtgccttgagtgccccgtgaaaacttctctttaatgacctccaggtgtgttcctgccccacgcactcgggctgaacaaacgatccgcttcaaaaaccccgcttctctgggcttctggcattttgccgtggtcgtaatgcaggcttggggttggagagccagctggagggacgggtcccgccgccagctccctgccacgcatgaactcggatacatctgttgacaccccggtcccccgtcaaatatctattccctctgcctgttgagtatgggtgtatccacggttccgtccccaacac

SEQ ID NO: 58884 - DNA, 1634 bp, Homo sapiens
cggacgcgtgggtttttttttcgccggaaatcccggaagtgacagctttgggggtttgctgctggctctgactcccgtcctgcgatgggttgcgacgggggaacaatccccaagaggcatgaactggtgaaggggccgaagaaggttgagaaggtcgacaaagatgctgaattagtggcccaatggaactattgtactctaagtcaggaaatattaagacgaccaatagttgcctgtgaacttggcagactttataacaaagatgccgtcattgaatttctcttggacaaatctgcagaaaaggctcttgggaaggcagcatctcacattaaaagcattaagaatgtgacagagctgaagctttctgataatcctgcctgggaaggggataaaggaaacactaaaggtgacaagcacgatgacctccagcgggcgcgtttcatctgccccgttgtgggcctggagatgaacggccgacacaggttctgcttccttcggtgctgcggctgtgtgttttctgagcgagccttgaaagagataaaagcggaagtttgccacacgtgtggggctgccttccaggaggatgatgtcatcatgctcaatggcaccaaggaggatgtggacgtgctgaagacaaggatggaggagagaaggctgagagcgaagctggaaaagaaaacaaagaaacccaaggcagcagagtctgtttcaaaaccagatgtcagtgaagaagccccagggccatcaaaagttaagacagggaagcctgaagaagccagccttgattctagagagaagaaaaccaacttggctcccaaaagcacagcaatgaatgagagctcttctggaaaagctgggaagcctccgtgtggagccacaaagaggtccatcgctgacagtgaagaatcggaggcctacaagtccctctttaccactcacagctccgccaagcgctccaaggaggagtctgcccactgggtcacccacacgtcctactgcttctgaagcccgcactgccaccgctcctgccccagaaggttgtttagtttccacgtaggcaggtcgctttgtgcctctgagtgcgctgctgtgtgttctctctatagttctgtgtcataaagctgtcctggccagccttcaagctggtgtggccactcttgatgtgaggcgtgtcggttccaggggggacatgggaggggctgcacagtggcccgaggtcatgcttgcttccacctgcaggtgcatttggtcctttccatggccaggaagccctgtgggctgcactttttatgcttgcagtaacaagagactccagagtcctcaccggtgcagagttggcacatattaattaactaaaattctaatgatcttgctaccagcaataaatcaagtaggccaagtgaaactgggctttaaaaaggatggatttcaaatacactgtgcccactagaagcttcgaagggcctcgtccctctgctacagccctgggaggagccaggatccttgttggtctagctaaatactgttaggggagtgtgccccatctcatcatttcgaagatagcagagtcatagttgggcacccagtgattgggttcaaaaataaagctggtctgcctcttctcaaaaaaaaaa

SEQ ID NO: 58885 - DNA, 1057 bp, Homo sapiens
  misc_feature (1)...(1057): n = a,t,c or g
ggcggatggggaaacaattgagattgagggaggcaggcagagcggagcgaaaacaggaggacagaaatagcgaagcaaggccaagatcgggacccccaccagggaggtgcccagtacagacatgaaagtaaggcgggaaagcagctcaagcctcacccaccgccctgcccccagccccgccactcccaggctcctcgggactcggcgggtcctcctgggagtctcggaggggaccggctgtgcagacgccatggagttggtgctggtcttcctctgcagcctgctggcccccatggtcctggccagtgcagctgaaaaggagaaggaaatggacccttttcattatgattaccagaccctgaggattgggggactggtgttcgctgtggtcctcttctcggttgggatcctccttatcctaagtcgcaggtgcaagtgcagtttcaatcagaagccccgggccccaggagatgaggaagcccaggtggagaacctcatcaccgccaatgcaacagagccccagaaagcagagaactgaagtgcagccatcaggtggaagcctctggaacctgaggcggctgcttgaacctttggatgcaaatgtcgatgcttaagaaaaccggccacttcagcaacagccctttccccaggagaagccaagaacttgtgtgtcccccaccctatcccctctaacaccattcctccacctgatgatgcaactaacacttgcctccccactgcagcctgcggtcctgcccacctcccgtgatgtgtgtgtgtgtgtgtgtgtgtgtgactgtgtgtgtttgctaactgtggtctttgtggctacttgtttgtggatggtattgtgtttgttagtgaactgtggactcgctttcccaggcaggggctgagccacatggccatctgctcctccctgcccctgtgggccctccatcaccttctgctcctaggaggctgctttgttgcccgagaaccagccccctcccntgattttaggggatggcgtaggggtaaggagcaaggggcagtggtnttcaagtngttttnggtt

SEQ ID NO: 58886 - DNA, 1071 bp, Homo sapiens
ttttttttttttcaaactgagaaaggttttacttttaagacaaaacaaatagcattaacacacatccaaatgccagtgcaggagttcactgggtttataaaagagaaaactaaactcaagtgtcaaataaaaactggagccgtcaagaatgactgcttgtggcaacacaggtgtaacatgtgcttgtctaaagtcgttctgtgtttgtggatatgtggaaatgcatgacgagggaaacgatgcaaggcaaaatggcaggtgctcaaagctttaagatccttttcttcacgcttgtgtgctcttgttttgcttttgagaattagggtaattcgcaggtcattttacaaagaactgtaatatcaaagaacacttccaaacggctaaaataggctcaaggtcactattaaagtgataaagggaggtccgtgggggaaaagtttgtgttctcaaaagccagatttcacaccatggcaggcactaaatctagttacatgtgcttgcagtagaaaaagaagacactgatcttaatagaggctggtctttttcatgatgcgcaggaactcttgctcactgacctctccatctccatctcgatcagcttcatcaatcatttcctgcagctcctcatcagtcaggttctcacccaactccttggccacgcgtttcagatttttgaacgaaatcttcccagtttcatcatcatcaaagagcttgaaagctttcaggatttcttctttagtatctttctcagacattttctgggtcatcacagttaaaaagtcaccaaagttcatttttcctgtcccttccttatcaatttcacttatcattttcttaatttcttctttcttgggttcaaagcccagggccctcattgccaccttcagttctttaacatctatggtgccagttccatccgcatcgaaaagatcaaaagcttcccggatctcctgcttttgctcttcagtaagctcaggcttagggctcattctttttcgctgagaacttgatgccatgtttgccttcttaaagttggaggccatagccaaaggagtccgctgctcggttgtt

SEQ ID NO: 58887 - DNA, 2118 bp, Homo sapiens
gctcgacttttttttttttttaacaaaactaagatggacatttcacacaacgcagagctacgagaacatctcttatgctccttgccatgggattttaatgccccaaggttcataactacagcaaagaaagtaagtcaaaaataaactgagcttaaagaaggtggcaggccaattttcccaaaaagactgtggactgtgggctgctgtgtagcctttgctacgaggctgaggaagcagaagaaagatgaattgggcaattggtgatgaaaagtatttgccattttcaaaggcttctcagtgtggccatagattttgctagtcaatttttaaaaaattatatttttagctcaacacacagctctaaagcagggttcagtgtagtgtgttctctaccgaaatggttatatacagatggtatggaaatggttttaaagattactcataaactatccttttaaagaaaaactagactcggtcatatttgttaaaatgagcaatgtcaccaaacagaaatgtaggtgggaaatactgaaccacaaacatttggagttgcaggcatagactagcagagcatgaacagtcatcactgtttttataatactgaaacactcaaatctgtttctgaggtttaaaacacagagctatattatattcataaacttccccctccacttaagttatatttgcctaacacataatggacaaatcaatagagccaaagcaaatttgcaaaaggctcaggtcaacatgaaaattttaaccttagtattaggaaactcttagaatacttacaaattaaaaaaacacacaataaaacacacatacacatataaaccagtgcaataagaactttagacaagggcagtgcatctctggtttaagaaaacctatttgtagcttgattataataaattaactctattctagatgatggtttaattttacaagcagcatttgaaacacattgtatatgtatgctcaaaacctgaaaaccaattcaccagtaacaattctcaatcagtaacaaattcctactttaattgtatattgcacatacttttagtgtctacgttaaaataaatttaactcttcttaatgtaaatatcggaggaccatacctgttgcccttgtagaaataatttaccttgaataacagattttcctttcttgacaaacaagaatgagaatagatttcagcttcgttagtccaaaactattttaaagaaaatggctattttatgtggcgaagacactggaaatggattgttaaacacaaaatccttggtttatccattgttgccattttgaaaaacatttctatggtcagagtgtttaaaagtctgaccctttttttaaaccaccaaatagtccctagagagattagctgtctccttgactgctctagaatgctgcttggagagtggacacagagaaaaagctttggataaaatggcatgaaacacaaatggcattaaataggtcatctatttcacgtaaaaataaaatgactagcacctccttccggctcccaaagtgacaggccctaacaggccacatgaaacatggtttatgatagtaagtttcattattcatacagtattgagaaatccattacattaggggggtcccacatctaaagccttcacttcaaggctaccgtgtaaaagtgaactgaagggcacaaggagagaacggcggacacaggcccaagaaggtccttgcgaagggtgcgaggagacctttcagggactctcctgcatcccgtcctctgtttccagttctgccaactgccttcgaaggatattgacttttgcttgtaattctttattatattcaatgatgttaaccatttcttcatatgcttcatccaaatacttagaggatctattccaacgtaggaaaataccttcccacagtggaagactctgcggagcaactgaaggccagatgacaaggttgttggcttcaaagaggggattggtgaatttactcagctcactgggctgattaacccaggaccacaaagacatcgtcttctgctgtagcttcaacttacatctttcactttcattgttgcccagaaatgttccaaactgtgaggcataagcatgctcaaag

SEQ ID NO: 58888 - DNA, 6703 bp, Homo sapiens
attgattctaattagcacattttgtgcctcagctagtagctccccgttaagctctgcctggagagtttttttttagattccatcctgctcataaacactgccacctcctccctccttctctctttacaaatgttacaacacaatcagaaatttcctcttttctttccttcctgcattttcagcaggttcccttgcgtcagaagcccaggaggaaaactcaaggttttctcacgatgagtcggaggaggatatcgtgtaaagatctgggccatgctgactgccaagggtggctgtataagaaaaaggaaaagggaagtttcctaagcaacaaatggaaaaagttctgggtgatactgaaggggtcgtcactgtactggtatagcaatcaaatggcagagaaagctgatggatttgtcaacctgcctgatttcactgtggaaagagcatctgaatgcaagaaaaagcatgcttttaagatcagccatccacagatcaagaccttttattttgcagctgagaatgtgcaggaaatgaacgtgtggttaaataaacttggatcggctgtaatccatcaggaatccactacaaaggatgaagaatgttacagtgaaagtgaacaggaagatccagaaatagctgcggagacaccaccccctcctcacgcttcccagactcagtctttgactgcacagcaggcatcttcatcctcacccagcctgagtggaacgtcgtattctttctcttccctggaaaatacagtgaagacacccagcagttttccttcctccttatctaaagagagacaatccttgcctgacacagttaacagtttgtctgctgctgaagatgagggacaaccaataacgtttgctgtgcaagttcattcacctgtaccctcagaggcaggcatccacaaggccctggaaaacagttttgtcacatcagaaagtggatttttgaactctttatctagtgatgatacttcttcattgagtagcaatcatgaccatcttactgtcccagataagcctgctggatcaaagatcatggacaaagaagagacaaaagtgtctgaagatgatgaaatggagaagctgtacaaatcattagagcaagctagtctatctcctcttggggaccgacgaccttcgactaaaaaggagttgagaaaatcctttgttaagcggtgtaaaaatccatctataaacgagaaactccacaaaatccgaacattgaatagcacattaaagtgtaaagaacatgatctggccatgattaaccagttgctggatgacccgaagctgacagccaggaaatacagagagtggaaagtcatgaacaccctgctgatccaggacatctatcagcagcagcgggcttcgcctgcccctgatgacactgatgacaccccccaggaactcaagaaatcaccttcttctccctctgttgaaaattccatttgagacaaagtcagggttttctcctcttatattttatcacaagcaactcttcaagatgttgcaaaagcttacatttttccttaaaaggaaaactgaaacccagtccttcaagcatcagcttcccatctaaagatgcacgttagatgaagataatcaccgaatacaccagggctcctcatttcagtcgtaacgcatccattgagattggaatgattgagttcagttgaaaggcgttttttgtgttcctactgggagctcacggtgatgtggggctctaggggggatgtgagaaatgtctcttctgttcattgctctccagagaatgctatggacaagaatcaaattttaccaggagtaattgcccatggaaacattctgtttttcaaaagaagaatgtacatattccacttgactgggaagctgtgtggcccaaatcactgtttgagtggaggaatgttttctagagcagtgactggaaggacaaacgtggtgttgcagaacaaaaattccttgcctttggtatggaatggtggtgccttttccatgtgatgagaaatgcttcatagacagtggcatgtgggagagctgaaggaggaggcgtgttccatattccactcattcaaaggacagcttggtgttttcacactttatgcaggttaggggatctgattaatgtttcctttccttacaacagctagagaaaacatctcatcacaattggagacctctacttcctttgagctttcctactcaatggtaggagataggaatatgttccgcaaagaatgtctactgctcttgtccttggctgtgatccctatacatagtgtgaatttatatccaggtttcccaggatcaatattgacaagacgactttggcatctgaattgttttaatatctttactcaaaaaaacaaaaaaacaaaaacccatggaagcaacaaaagagttaaacatgagggatttatttttgtatgtttatatgtcacttgtgtgctatgtgaatagctatgtttgttatttaaatatatttatagaagttcaaattactagtgtttaaaagatgatatactattatatattgtgcttagtatatatttgatgagtctatactttttgcttgagaaaaatagaaatactattgattcactggtgttatgatgttgcactgtgtctgaggaatgctcaggaaatcttgtgggaaaaaaatggggcatgcattcataatttttcattttcttccccaccccaacccccatgagctcttaaatttagatttctatctcttgtaagtcactcttttaaccagcaaaggactttcatcttagattatcctttctattaaataaactttaagctttgtgccatttatgcctgcaaaccttagaccaaaggcaacacaactaatgtcatcttttcattaaagactaatagaaatttagaaatcattgtgttaaagagagctatagagaaacaatatgaaagtcttcccttactaatcaccatgaatatttctcaccataggaataaccacaacccaccaagtacccatgttggccctgcctacccgtaacaaattgttcacacaacctattttgttttatagcttcaaagtgtggcttgacattcaaatggaaggaaccacctgaattatatctgcaaacaaaatggaaatagttgttgaatagttccccaagctttactaagaagccttaatactctgtaaacaaacaaacaaacaaaaaacaaccttagcattaagaaataaaaacaaaaaacaagaagcaagttgtactgctagaaacttctctaagataagaggccaggccagtcagtttggcccagcaaacatgtgggtacttctccacctagggaagccactgaagatgagtttgacctgtggtgacctgacagagagaacattcagatcctcagattgcaccctgatgccctggtttaggaaagcagtgctttaaccttttgcccctggaaattactgattctttctgtgattagcagataccagaagggaaattatttaggattggcaatgtaaagagtattgaaggaacaacaaataacaatagcagaaataacagtgtgacataaagtgcccttccacctatttttctttggtttgcaacaccagcctgtagacttccagtttttcttaaattgaagagctccagacacttttgagcagggtttgtgaatagctttgaatgctttcctttggcttttcgtgaagacatatttccccagcctttcaactgtaaactcctttagtaccattgaaacttaaggcaaaaaagatccctgggattacttagccaaggcttaaatttatttttcaaagtcaagaacattagcctagaagtttttgctttgctagttaaagcttactttgcagagcttcccaaagtgaaagggaaactgaacttcacaattttgcacctggctttctggagccccattgcctgctcattcgtgtttttccccctgtaaattattttgcttttgaccaggttgtgctagaaagtagggctgcttctgtgagttctcagcctaggctgtggccactaagacgtgggtggggggatagacaggagtgagagggagagtgggtgacactttccgtgacacttaatgtaggaagacatgggcttctctctcttggcctcaagccacttttctggtccaaagaatattgggaaaactggattactttcagtatatttcttgagaccgggtcatctctgaaatgcatttggggtagtttcctgggggtccaagggccaattcctatacccagtcctggcagtgtctgtgagctgtgggaatgagagagaaaaccatgggcttgcttcagggaagggaagtgggagaatctcttcagcacacgtagatcccaaatctgtgggcacctgctaaagattaggatttggagaggactcctctttggggttgtgaagaggaccttttccctctgttgttagcctgtagatccagaacggagcctgatgtgatgccttcactggttgatatattgcaaatagacactctgagccctgcattgcaagggcgtcttttgctttaaagaattcttagttttgccacaacagctcaaatctcagaataggatcaaaggcctagaaagactcctaaagtataggattacaaagactccaggaagcgtaagaaagagattgtgtttggagtcagatttcaatgtgaaacccatgccttacatttacacagcactttgtagtttgcaaattggtgtgttttcagccccctcccgctgccccatgctctgagatgattgtggattattacagtgaagtgcctggcccggagcccccagtgatgaagcaggaacttgagtctcaggactcccagcggctctctgcccattttctcctctccgccccccacctcgcttcacctgttaccttgtgaagttgctgttggcacatagcccactaggaaaccaagaagtttgactgggagcgtgtgtttcattgcactgggcttagcatacggctggccctggtggctgtttgggcctaaattcccccatttgaaaccctaaagggcccctcctccgtgcttgagcacagtctccctccctagtggccctgcctcaacctgctggcgggctgtctatggattggggtttcacctaatcatgctgtgtttcctttcttttctttctgtacattagactacttgggaggtgctgtgtgatccttggatgaaaaacatatatttaaagaaatggagagtgtttattttgtttgctttttgaggcatgtgctgtcaaatgttagagaccaaacttagtgattagaggttggtcctttgaccttcttctcttaattgcttttcatgtaatcatgataatttactcaggtagcactccagtcacaaacaatgtcacagagatgaaacagattcaaagaaaaaatatttttaagtcttttgaaaagaagtgctattcaaatttaagacatgtttaaattcataggtacattatctcttagtaagaaatacttttttttttctttttttaaacagagtcttgctctgttgcccaggctggagtgcagtggcacgattttagctcactgcaacctctgcctccctggttgaagtgattctcctgcctcagcctcccgagtagctgggactacccccggctaatttttatatttttagtagagaccggggtttaccatgttgcccaggctggtttcaaactcctgacctcaggggatctgcctgcctctgcctcccaaagggctgggattacaggggggagccaccacacctggccgaaagacagtattttgatatagccacatacatgatttaatgagtaatgttaagtacagaaaagctgccatatccacatagttttagggggcatttcttcttcagtctaacaagaatatggatatccaattgtggttttccaatttatttctcttccaatttcttttgtatacctcacaggagaaattgaatcctaaaactgggagatgactgccctgcccagggttttgtaatacataattgaaaataaaagtccctgaaactaaatgtttgcagcctgtatgaaatggactgtggaagggggataatttctctcctcacagaaagccactcgtctccttgaatgaggcattgagcagacacacgtttctctgtgtcgtggggcaggaagcaattcccttgcctcttcagcacatctcagttctttcccacatgaccccagaaccacatagaaaacattgaaaataatggattcttcattgtatttgaattttttttttttaacctttagcccaaaagggaagtgtgcctcgtggaaagagcaaatgccgtaaaataaaaaccaggagttttaatcgccatatattttaatgggcttgcatgatgggaatgtgacttttagcactgcatggggtttgggggcaagatattaatgtggaaatcttagcttaagttttactgggctctcatcctgtgtcagctacccctctaaactgaaaaagaggcatggctcatttctctcctgctttatgtttttgaggttgacttgtaagataaaaataaaaataagaaaaaaatatatctaggcaaatgacatgaaaaaaaagttgaaatatactactggtgttcatttttgtcctgcagtgttgctttctcaaagaaataaacatgtggctggaagtgtttaa

SEQ ID NO: 58889 - DNA, 2712 bp, Homo sapiens
tcccgggtcgacgatttcgtagcggatggagctgctacagtcagcgcttggggctggcctcagcttgtagacccgagccctgcagaacaaccccccgtggcgcaggagagcagaagaaagggggcctttatgcccttttgagggaagcacacattctgcaaggccgtggaaacaaagggaggaactgtttgtagccctcgtccagacgccccaaacaaacagagccaagttacaccctgtttaaccctgccttcaaagggacgactctgtaagattctctgctacttattcaagttgacacgatgcccttcacactccacctgaggtcccgccttccctctgccataaggagtttgattctacaaaagaaaccaaacatcagaaatacatccagcatggctggagagctccgaccagccagcctggtggtcctgcccaggtcccttgctccagcttttgaaagattctgccaggtcaacactggtcctctacccctgctgggccagagtgagccagaaaagtggatgctgccccctcaaggtgctatctcagagaccaggatgggccatccccagttctggaaatacgagttcggtgcctgcaccggcagcctggcttcgctggagcagtactcggagcagctgaaggacatggtggccttcttcctgggctgcagcttctccctggaggaggccttggagaaagcggggctccccagaagagacccagcaggtcacagccaggcgggtgcatacaagacaacagtgccttgtgttacccatgctggcttctgctgccctctggtggtcacgatgaggcccattcccaaggacaagctggaagggctggtgcgggcctgctgctccctcggaggtgagcaggggcaacctgttcacatgggcgacccagaactgttgggaatcaaagagctttccaaacctgcctacggggatgccatggtgtgtcccccaggggaggttccagtgttctggccttctccgctgaccagtctcggagctgtcagcagctgtgagaccccactggcttttgccagcatcccaggctgcacagttatgactgacctgaaggatgcaaaggctccacctggttgtctcaccccagagagaattccagaggtccatcacatttcccaagatcctctgcactacagcatcgcgtcagtctctgcttctcagaagatcagagaactagagtctatgatcggcatagacccagggaaccgggggattgggcacctgctctgtaaagatgagctgctgaaggcctctctctcgctgtcccatgcccgctcagtgctcatcaccactgggttccccacacatttcaatcatgagcctccagaagagacagatggcccaccaggagctgttgctctggttgccttcctgcaggccttggagaaggaggtcgccataatcgttgaccagagagcctggaacttgcaccagaagattgttgaagatgctgttgagcaaggtgttctgaagacgcagatcccgatattaacttaccaaggtggatcagtggaagctgctcaggcattcctgtgcaaaaatggggacccgcagacacctagatttgaccacctggtggccatagagcgtgccggaagagctgctgatggcaattactacaatgcaaggaagatgaacatcaagcacttggttgaccccattgacgatctttttcttgctgcgaagaagattcctggaatctcatcaactggagtcggtgatggaggcaacgagcttgggatgggtaaagtcaaggaggctgtgaggaggcacatacggcacggggatgtcatcgcctgcgacgtggaggctgactttgccgtcattgctggtgtttctaactggggaggctatgccctggcctgcgcactctacatcctgtactcatgtgctgtccacagtcagtacctgaggaaagcagtcggaccctccagggcacctggagatcaggcctggactcaggccctcccgtcggtcattaaggaagaaaaaatgctgggcatcttggtgcagcacaaagtccggagtggcgtctcgggcatcgtgggcatggaggtggatgggctgcccttccacaacacccacgccgagatgatccagaagctggtggacgtcaccacggcacaggtgtaaccgtccatgttccgtgtgagcagagtccctaccaacgggcaggtctgcatccggggagaatgcagctgcttctggcgacaatcctgctagtaaacactggtcttcgggtgaagcaaacggaaaactcgccctggccctgggaaaactgcatgccccactttcctgggaggggttagtgcaggtgctgtggacaaaggacaacatttctctggggctttttaacttttattcctaagactctaaaggcgttgatttcaaccctccttcactctggcttcttcaggcaacccacgtggtctcctgtgagaatcttctcgacagttacttatggggacacttgtgaacaattaactgccaggcagagcatgagaacaaacattcccaggccatgtaggataggatactccagactccagtcatcctcccccatccatggtttctgttactcatggtttcagttactcatagccaactgcagaccgaaaatactaaatgaaaaatttcagaaataaacaactcttaagttttaaaaaaaaaaaaaagg

SEQ ID NO: 58890 - DNA, 2895 bp, Homo sapiens
ttttatgcttgtttggtcggtggaatatgttgggatttatgtttgcctctgaacaagtgtcttgctcacatcgtaaatgactttctctccgaaacgctaaatattctttcccgcaggagctcatatccttattttccatgacagatcttaacgacaatatatgcaaaagatatataaagatgataactaatatagttatactgagcctgatcatttgcatttcgttagctttctggattatatcaatgactgcaagcacctattatggtaacttacgacctatttctccgtggcgttggctgttttctgttgttgttcctgttctgatcgtctctaatggccttaaaaagaaaagtctagatcacagtggggctctaggagggctagtcgttggatttatcctaaccattgcaaatttcagcttttttacctctttgctgatgtttttcttgtcttcttcgaaactcactaaatggaagggagaagtgaagaagcgtctagattcagaatataaggaaggtgggcaaaggaattgggttcaggtgttctgtaatggagctgtacccacagaactggccctgctgtacatgatagaaaatggccccggggaaatcccagtcgatttttccaagcagtactccgcttcctggatgtgtttgtctctcttggctgcactggcctgctctgctggagacacatgggcttcagaagttggcccagttctgagtaaaagttctccaagactgataacaacctgggagaaagttccagttggtaccaatggaggagttacagtggtgggccttgtctccagtctccttggtggtacctttgtgggcattgcatacttcctcacacagctgatttttgtgaatgatttagacatttctgccccgcagtggccaattattgcatttggtggtttagctggattactaggatcaattgtggactcatacttaggggctacaatgcagtatactgggttggatgaaagcactggcatggtggtcaacagcccaacaaataaggcaaggcacatagcagggaaacccattcttgataacaacgcagtgaatctgttttcttctgttcttattgccctcttgctcccaactgctgcttggggtttttggcccagggggtgaactttatttcatttccacaggttgaaactggtgagtccagctaaatttgcaattccaactttcatcctaagaataataactgtaatggcaaagcggaaatgccagttcctcctgtattccattgagatgggatttcacattttcctctcatcaactcccctgtaatagctagcgtctttctagtgaaagagaagaattcctagaacttatgcatttttttcctgctgaatggaagtcttgagcaatgaagctatattgtccctacatattactatatattgaactgaaagttcttacataatcaatgtcaagttttgtcttattttgttttgtttgtttaaaccagtgtaggaaataaaagtgatgatatttaaaatagttctcagttgaagcagagaaatgccactgtgctagttgcccaaatgttgtatctattttaaatagtttaagctgatgtgtatgggagcctaaacaagtgtagtatcctgaacttctcccattaattgctattcacaattgggaaaagtgtggagattggttcctagtgagttttgtggcctactccacatttgttcttccttcctcagggttagtgatgaaaaaaagtaaatatctttttcatatgtccattagaatgtatgaaaaaaatcattttaactaaaagcaaaagaattttatcttatatctaaaaaatatataacttactatatgtttcagttgctctctgaacaaaaattatcttcaatttaatatgtggaatgtgttttctagctttctttgaattatgtatggcaacctggtttagcactggcatcctgaacagttaagagtcactgggaaattattgtatttctttataaatttactgtcatatcaattgctggaaaatgctatgatttttctattattaccttctaagttgtattctctcttacactgtagcctcaactaaggcaattctgctatgtttgttcttcactatgatttactgtgtgccaaaggagttttgacagggtacagagtattttactaaaagtatttttaaatgtttctcatgtgatttctgtaccttcttcctcctgccccttttgcttttttaaagaaactggggaaggatttatgaatacaccaccaccagagtggataatgcttagaattctttattggtggccctactatggtgatgatctagaactgacttacttcaggacagaagaaaaaacaatcacacccttaacctttaagccagttagatcagggggttgcaacaattgggttaaactttgggtatacattggaagcaccagggcatgtttgctttttttgtttatgtgtttgttttttgagacagagtctcacactgtggcccaggctggactccagcacagtggcatgatctcagctccgcctcctgggttcacgtgattctcatgcctcagcctcccgggtggctgggatcacaggcgtgcaccatcacgcccggctaatttttgtattttcagttcgagaccagcctggccaacgtggtgaaacaccgtctctactaaaaatacaaaaaattaggtgtggtggtgcgtgcctgtattcccggccactcgggaggctgaggcaggggaatcgctggaacctgggatgtggaggttgcagtgagccaagattgcaccactgtactccagcctgggcaacagagggagaccccatctagactccatctcaaaaaaaaaagaacaccaagcgagagaagcag

SEQ ID NO: 58891 - DNA, 2469 bp, Homo sapiens
cgacggcgcagcacggtgcggcgcagctcctgctcgcctttcccttcgctgggcgagaggtgtctatggggcacccgctgccgccgccgctaccgccaccgccaccgccaccgccgccgagtgctgtctctatggcgaggaggaggaggaggagcgcgagctcagcgacacaagtacataaataaaggataaaatattttatgaaacaaatcttcaatcaagtataacattttgatgcttggcatctagactcccttgtgccctcactatgccagcggcaactgtagatcatagccaaagaatttgtgaagtttgggcttgcaacttggatgaagagatgaagaaaattcgtcaagttatccgaaaatataattacgttgctatggacaccgagtttccaggtgtggttgcaagacccattggagaattcaggagcaatgctgactatcaataccaactattgcggtgtaatgtagacttgttaaagataattcagctaggactgacatttatgaatgagcaaggagaataccctccaggaacttcaacttggcagtttaattttaaatttaatttgacggaggacatgtatgcccaggactctatagagctactaacaacatctggtatccagtttaaaaaacatgaggaggaaggaattgaaacccagtactttgcagaacttcttatgacttctggagtggtcctctgtgaaggggtcaaatggttgtcatttcatagcggttacgactttggctacttaatcaaaatcctaaccaactctaacttgcctgaagaagaacttgacttctttgagatccttcgattgttttttcctgtcatttatgatgtgaagtacctcatgaagagctgcaaaaatctcaaaggtggattacaggaggtggcagaacagttagagctggaacggataggaccacaacatcaggcaggatctgattcattgctcacaggaatggcctttttcaaaatgagagaaatgttctttgaagatcatattgatgatgccaaatattgtggtcatttgtatggccttggttctggttcatcctatgtacagaatggcacagggaatgcatatgaagaggaagccaacaagcagtcatgacatgaaatagtccttttatttttatttcgagctacacacatgcttgtatataggttttatctctggttgaatccctcgaacaatagacagtacctttcccccccctttcatggcccattttattgtctgcctttcagtactaagtatgaccgttcctatctcagatcttaataaaaagaaaaaaaaaaacgcattcaggttaaatttggccttaatttaatatacttgttagcaagcgtgtgtgacagagagtggggaaagctacatcattgaatattttgataaactttaccgacttgagtttggtttatttttcccttttcctaaattaactagcactgactgtaatttatttccctgtttcacgtctctcccttccattctgcaggagttttagctatttgagatcgtggaccatcagttttgcactttagagagtgtttctgactctaaacctgttttatcagaaaatttgttttttcttgatcttagctggaaaaatctgccaactttacacagtatttacttggttttgacccacagaatatagcacgttgtgcaaactgtcgattcagcgaaacttaaaaaagacaagaaactactgaggagcttagtaactgctggtttctgtacgtagtgtttaatcttccaagcacatctagtgtctgtcagtttctaattggcatgtgtaggctgctctgtgactgaagaattttcaaaccagctttacacccttcaggaaaaatcccttgtgattggatgtttactatctgccaggaaactggtactcaagatgttgaagctacagttattttatgatagcacacttcccttgatctgcttatttttattccatcaccatttacccttttttttttttaaattttgaagccattcttatgatgctcttgattggtgggttacacaaatcaattttattaaaaatccaaagataagtctttaggtatattttgtcccaaattaaattaaaaaacaaaaatggggctttcatagttgctacaaaggtaaataatggagagatttggtccaaaccaccaaaatatatatatattctcatatatatatatatagctgataaaattacctggggagtgtaatgcttatttttttgtgtatatctttgcaacctattttatatatattgacaaaagagactgtgaaatacttaggccatgcagaatatgtgaccagaccggagcatgtgtaggaagactttacagtaatcattaactctaccccgaaatgatggactacaagttataatgtgtgttacctacacttcaatcagtaatattagcaaatctccaaatgttagtcacatt

SEQ ID NO: 58892 - DNA, 4434 bp, Homo sapiens
tcaacatatgaaaaatcaatgtaatatttcatattaacagttggaagactcacaattcatagtttcagaatttacaacacaaacctacaggaataaagacaatgtagtattagaataaggtcagatatatagatcaatggacagaattgacagtccagaaatacacccatacgattacggtcacctgatttttgactaaggttccaaaacaattcactaggggaaagaatagtcttgtcaaaaaatggtgctcagacaagtggatagccataagcacagaatgagtttggacccctatctcaaatctcaaatacaaacattaactccgaattaatcaaatgcctaaatttaagagctaaaattttaaagctcttagaagaaaacataggtacacatctttgtgactttgaattaggtcacggtttccttgacatgacacttaaaagtacaagcaacaaaagaaaaaaatagataaaatgaacttcagcaaaattagaatgtttatgcttcagaaaacactgtgaagaaagtgatcagacaactcacagaatgggaaaaatatttgtgaatcatatctcttaataagggtccagcagaaaagggcaaaggtggaaatggaggaggaaaacctccttctggtccaaaccgaatgaatggtcatcaccaacagaatggagtggaaaacatgatgttgtttgaagttgttaaaatgggcaagagtgctatgcagtcggtggtagatgattggatagaatcatacaagcatgaccgagatatagcacttcttgaccttatcaacttttttattcagtgttcaggctgtaaaggagttgtcacagcagaaatgtttagacatatgcagaactctgagataattcgaaaaatgactgaagaattcgatgaggatagtggagattatccacttaccatggctggtcctcagtggaagaagttcaaatccagtttttgtgaattcattggcgtgttagtacggcaatgtcaatatagtatcatatatgatgagtatatgatggatacagtcatttcacttcttacaggattgtctgactcacaagtcagagcatttcgacatacaagcaccctggcagctatgaagttgatgacagctttggtgaatgtggcactaaatcttagcattaatatggataatacacaaagacaatatgaagcagaacgaaataaaatgattgggaaacgagccaatgagaggctagaactcctgctacaaaagcggaaagagcttcaggaaaatcaagatgaaatagaaaatatgatgaatgcaatatttaaaggagtgtttgtacatagataccgtgatgcgatacgtgaaattcgagctatttgcattgaagagattggcatttggatgaagatgtatagtgatgcctttcttaatgacagttatttaaaatatgttggttggactatgcatgataagcaaggtgaagtaagactcaaatgtcttactgctctacaagggctttattataacaaagagcttaattccaaactggaactttttaccagtcggttcaaggatagaattgtgtctatgacccttgacaaagaatatgatgttgcagtacaagcaataaaattactcactcttgttttacagagtagtgaagaagttctcactgcagaagattgtgaaaatgtctatcatctggtttattcagctcaccggccagtagcagtagcagctggagaatttctctacaaaaagctcttcagtcgtagagatccagaggaggatggaatgatgaaaagaagaggaagacaaggtccaaatgccaaccttgttaagacattggtttttttctttctagaaagtgagttacatgagcatgcagcataccttgtggatagcatgtgggactgtgctactgagctgctgaaagactgggaatgtatgaatagcttgttactggaagagccacttagtggagaggaagcactaacagataggcaagagagtgctctgattgaaataatgctttgtaccattagacaagcggctgaatgtcatcctcccgtgggaagagggacaggaaaaagggtgcttacagcaaaggagaagaagacacagttggatgataggacaaaaatcactgagctttttgccgtggcccttcctcagttattagcaaaatactctgtagatgcagaaaaggtgactaacttgttgcagttgcctcagtactttgatttggaaatatataccactggacgattagaaaagcatttggatgccttattgcgacagatccggaatattgtagagaagcacacagatacagatgttttggaagcatgttctaaaacttaccatgcactctgtaatgaagagttcacaatcttcaacagagtagatatttcaagaagtcaactgatagatgaattggcagataaatttaaccggcttcttgaagattttctgcaagagggtgaagaacctgatgaagatgatgcatatcaggtattgtcaacattgaagaggatcactgcttttcataatgcccatgacctttcaaagagggatttatttgcttgtaattacaaactcttgaaaactggaatcgaaaatggagacatgcctgagcagattgttattcacgcactgcagtgtactcactatgtaatcctttggcaacttgctaagataactgaaagcagctctacaaaggaggacttgctgcgtttaaagaaacaaatgagagtattttgtcagatatgtcaacattacctgaccaacgtgaatactactgttaaggaacaggccttcactattctgtgtgatattttgatgatcttcagccatcagattatgtcaggagggcgtgacatgttagagccattagtgtatacccctgattcttcattgcagtctgagttgctcagctttattttggatcatgtcttcattgaacaggatgatgataataatagtgcagatggtcagcaagaggatgaagccagtaaaattgaagctctgcacaagagaagaaatttacttgcagcattttgtaagctaattgtatatactgtggtggagatgaatacagctgcagatatcttcaaacagtatatgaagtattataatgactatggagatatcatcaaagaaacaatgagtaaaacaaggcagatagacaaaattcagtgtgctaagacccttattctcagtctgcaacagctttttaatgaaatgatacaagaaaatggctataattttgatagatcatcctctacatttagtggcataaaagaacttgctcgacgttttgctttaacttttggacttgatcagttgaaaacaagagaagccattgccatgctacacaaagatggcatagaatttgcttttaaagagcctaatccgcaaggggagagccatccacctttaaatttggcatttcttgatattctgagtgaattttcttctaaactacttcgacaagacaaaagaacagtgtatgtttacttggaaaagttcatgacctttcagatgtcactccgaagagaggatgtgtggcttccactgatgtcttaccgaaattctttgctagctggtggtgatgatgacaccatgtcagtcattagtggaatcagcagccgggggtcaacagtacggagtaaaaaatcaaaaccatctacaggaaaacggaaagtggttgagggcatgcagctttcactcactgaagaaagtagtagtagtgacagtatgtggttaagcagagaacaaacactgcacacccctgttatgatgcagacaccacaactcacctccactattatgagagagcccaaaagattacggcctgaggatagcttcatgagtgtttatccaatgcagactgaacatcatcaaacacctcttgattataatcggcgtggcacaagcctaatggaagatgatgaagagccaattgtggaagatgttatgatgtcctcagaagggaggattgaggatcttaatgagggaatggattttgacaccatggatatagatttgccaccatcaaagaacagacgagagagaacagaactgaagcctgatttctttgatccagcttcaattatggatgaatcagttcttggagtgtcaatgttttaataccagtacacaattaaatctgtggtgaagtcattttctaagtggaagaggaaattttaaagtgtggtagatacagtgaaattctgtacagatttttctctaaggagaatatgacatgcttatgcttaccaagatcaagtgcattgaggggcagttttgtttgcctgaataaacgtaaaggacaagtaaacaatttgatgataagctacagtttttcttataaagtaaatattttatttatgcgctgttagttggcttttgaatcgattatttcatgcttttttttaaaaaaaaaa

SEQ ID NO: 58893 - DNA, 2957 bp, Homo sapiens
gcaattcgggcgcgtcaggccgcgacgagggcgctgagacaaatttacatgtattggagaccagaccagaagcccttctgaattaagatctcacattcttgaaggtggcattgaagagcactaagatcggaagatgagtgagcttgaccagttacggcaggaggccgagcaacttaagaaccagattcgagacgccaggaaagcatgtgcagatgcaactctctctcagatcacaaacaacatcgacccagtgggaagaatccaaatgcgcacgaggaggacactgcgggggcacctggccaagatctacgccatgcactggggcacagactccaggcttctcgtcagtgcctcgcaggatggtaaacttatcatctgggacagctacaccaccaacaaggtccacgccatccctctgcgctcctcctgggtcatgacctgtgcatatgccccttctgggaactatgtggcctgcggtggcctggataacatttgctccatttacaatctgaaaactcgtgaggggaacgtgcgcgtgagtcgtgagctggcaggacacacaggttacctgtcctgctgccgattcctggatgacaatcagatcgtcaccagctctggagacaccacgtgtgccctgtgggacatcgagaccggccagcagacgaccacgtttaccggacacactggagatgtcatgagcctttctcttgctcctgacaccagactgttcgtctctggtgcttgtgatgcttcagccaaactctgggatgtgcgagaaggcatgtgccggcagaccttcactggccacgagtctgacatcaatgccatttgcttctttccaaatggcaatgcatttgccactggctcagacgacgccacctgcaggctgtttgaccttcgtgctgaccaggagctcatgacttactcccatgacaacatcatctgcgggatcacctctgtctccttctccaagagcgggcgcctcctccttgctgggtacgacgacttcaactgcaacgtctgggatgcactcaaagccgaccgggcaggtgtcttggctgggcatgacaaccgcgtcagctgcctgggcgtgactgacgatggcatggctgtggcgacagggtcctgggatagcttcctcaagatctggaactaacgccagtagcatgtggatgccatggagactggaagaccattccaacttggacgcgttaccatgagagcatatcctatccaaccgtactaacgtggacaccctacacctcccctcagaacttcaaaagggcaagatcttttttccttcacttattgctgaaaccaagagcacaattcccattgagagaaagatctctgtgctgtaaactaaaacaaattgtgcattccttccggggccatcgtctttgttttcttttttgtcttgaatgaattttaaaaggaaatatataataaaaatgttaaccagaaggtaaacttgagtgtaattgtcagacagacacacttttccaccagtgtatttgaattttaaaccagtgaccctgttttgtggcattcatgcaaaacatgctgagggctttgttcatctggtcatcgtgtccaaatttcagtcatgtttgtagcaagattttggaagcattcatatttcctttttaaaatgtattcctttgtgttcaacagttaatcaaaaccagagagtctagggcagcctctctgatgttgtcaatgatgtaaattcagtccctggtttttaattttctgtctgatgtcacagatcattgttgcacacaaacgtggcatagaaaagaacatgttcagaagccatggggccaagcacatgcggggacggtctcaaatgcgtgatcagagaatccttcacctttgctgaaaagtgagctcagatccagcaccatgttcctcctgacccatcctgtctatcttctcagttgagtttttaatctcactttgggtttccttgtgaagttggagggaagtttataatagcctaacactaccccacccccaactaggaggaacctctgttttcaagagagatgcctgtcctgtgcttggatagtcagtcaattatttgtgtatgaaacaatgtacaaatcaatgttttgaaaataatgatctcagactttctaagttaaattttaaaaattttgattgtttgccatattgggtgggtttactcttagaatcgcatgctgtagaaatgctcaaaagtgcatatgggactcagtccttaggtgttctttttcttttaagaaataacctcttacagttgtaaccattgcggctctgtccacttctcgctgtccacttctcgttgctgctctgtggcacatatcggaagcagtacagcgcgcggctctacacgcttgggtagcgggataagtcactgttttctttatttctttaaaaaaaaaaaaagttctgttgcaaacgactgctgttggattctgagggtggggagggagagagagggagggagagggagtgaagagcctgccctcctatatggattcttcagggccctccacatctgaggtggctcattcccatcacacacagattgtcctggtgttcatttcaaggccagtgttcagcagcagcgtttggaaagcaggttctgtgggaccccccgccccgccccccgcactccttcatagcagcagtagtggcttctccatcctgttttctgcaacattctatacaaaactgtgctgtgaccttgcggtaggcctggatctggcaaagagaatacaaatgaaaccccttctttctctttccgtccaacaactctgtagagctctctgcacccttacccctttccaccttttgtatttaattttaaagtcagtgtactgcaaggaagctggatgcaagatagatactatattaaactgtactgttatttaagatgtaataaagcagtttgacatgagggaaaaaaaaaa

SEQ ID NO: 58894 - DNA, 3255 bp, Homo sapiens
aacaagataccaaaatgcatgaaatttataaaggaaatattactccccaattgaataaaaacactcttaaaacttctgctgccacggatgtttgggctgtgtacttttctcaattttggatagattatgaagggatgaaaagtggaaaaggacggccaataagttttgtagactcattccctctttccatttggatttgtcaaccaacaagatatgcagagtcacaaaaagagccgcagacttgtaatcaggtatctctaaatacatcacaaagtgaatctagtgatctggctggccgattgaagcggaagaagctcttgaaggagtattatagtacagagtctgagcctttgacaaatggtggtcagaagccttcttcatcagatacatttttcagattttccccttcctcgtcagaggcagatattcatctcctagttcatgttcataaacatgtcagtatgcagattaatcactaccagtatctgcttctacttttcctgcatgagtcacttatcctgctttcagagaacttaaggaaagatgtagaagctgtaactggcagtcctgctagtcagacatccatttgtattggaattttacttagaagtgcagaactggctcttttgctccatccagtggatcaagcaaatactcttaagtctcctgtttctgaaagtgtgagcccagtggtacctgattatttgcctacagaaaatggggattttttgtcttcaaaaagaaaacaaattagtagggatataaatagaattagaagtgtaactgttaatcatatgtcagacaacagatctatgagtgttgaccttagccatatccctttaaaggatcctttgctttttaaatcagctagtgatacaaatctgcaaaaaggcatttcttttatggactatttatcagataaacatttagggaaaataagtgaagatgaaagtagtggacttgtttacaaaagtggctcaggagaaattggatcagaaacaagtgacaaaaaggattcattttatacagattcaagtagtgtcttaaactacagagaagattcgaatatactttcatttgatagtgatggtaatcaaaacatactttcaagtactttaactagtaaaggaaatgaaaccatagagtccatctttaaagctgaagatttgcttccagaagcagcttcactctctgaaaacctggatatcagtaaagaagagacccccccagttagaacacttaaatcacagtcatctttaagtggaaagcctaaggaacgttgcccacccaacctggctcctctctgtgtttcttataagaatatgaaaagaagctcttcacaaatgtcattggataccatttcacttgacagcatgatattggaagaacagttattagaaagtgatggaagtgatagccatatgtttttggaaaaaggaaataaaaagaactcaactacaaattacaggggcacagcagaaagtgtgaatgctggtgcaaacctacagaattatggtgaaacttctccagatgccatcagtacaaattcagagggtgctcaggaaaatcatgatgacctgatgtccgttgtggtatttaaaattactggtgttaatggggaaattgacatccgaggggaagatacagaaatctgtcttcaagtgaaccaggtgacaccagaccaattaggcaatatcagccttcggcattacctttgtaatcgtccagttggttccgatcagaaagctgtaattcattccaaatcctctcctgagatttctctgagatttgaaagtgggcctggtgctgtaatacactctttacttgcagaaaaaaatggatttctgcagtgccacatagaaaacttcagcactgagtttcttacatcttctcttatgaatattcaacattttttggaagatgaaactgttgcaacagtaatgccaatgaagatacaagtttctaacacgaaaataaatttaaaagatgatagtccccggagtagtacagtatcccttgaaccagctcctgtaactgtacatattgatcatcttgtggtagagagaagtgacgatggctcttttcatatcagagattctcacatgcttaacactggaaatgatttgaaagaaaatgtcaaaagcgattcagtgctgctgaccagtggaaagtatgatctgaagaaacaacgcagtgtcacgcaagccactcagacaagcccaggggttccttggccttctcagtcagctaactttcctgagttctcctttgacttcactagggaacagctcatggaagagaatgaatctcttaaacaggaactggctaaagctaaaatggctcttgcagaggctcacttggaaaaagatgctcttcttcatcatataaagaagatgacagttgaatagcaggagtggcagtcaaaactgaaattatagctctgggagtaggaaggttatatttataatgtggatgttaccagttaggggaagacttttattttcatgaaaagacaataaaacaaaatggaatgtgatgaagtggtgactatttcaaagccagtttagaaagtattagtacgggcattacaatcttttggttgttttgtgttttggggcttaaccctcttttaagctgttgtgatcctagggaagtcaacacatagtgtaaaataattaccatgccctaatgaaaagaagatgtcatttcctaattttgatatctcattttcggcattttttaaaatgtaaaaggaaaacctcttgtgttcacacagattgctgaattgatttctccatatttgttaataatttactattatttacaaagattcaaatgcttttatgactaatgtaaaatgaaaagaggcttacattttaaatgttattaaaattatgtacttaaatctataattatttaattattgtaaaaagtccaagcagatcaataaactatataattaatgggtttggaaaatcatcaccctactgaacttacaaaatatcttgaaaatgtgaaaaatatcattttaaataatgggtacattgtataagtggaagctataattttcaacaaaaagatggtacaaatgtaaaagtaaaaagcacaaactatacaaaagcaaaatctatggccaagtgatttaaaagcattacttgtacattcctttaaacatttgttgttagaagcaaaagagtaatttatcctgctaaatttggcaccatttgtaattataaaaattttgattaatactaa

SEQ ID NO: 58895 - DNA, 5523 bp, Homo sapiens
aaagggacagaaatatgattctggccttcttgatggtgaatacaggaacactttcagataaattacaatagagaggagtcagcttatttaaacaaactgaggttaagccagagattgcagttaacagtgaaaaaatttaaagcaagtacctggatggatgcaaagcagtgcccaggagacccaacttacgtgacagagatgatcattgtcactcattcattatgttttgagcaccagccatgtgccaggtccagaactagaagaaacttgggtgtaggtgagatcataggaacagtccctgccccagctgaacatcaggaagccagactgggagcacatgccgtggctgactaggactccagcagggacctggggttccatcagatcagtgtaaagcgatggtttcccaaatgagacctctccagagatggttcattccaccccgcaatggccaccagaaacattgtgctgaccagagggcttcactgccccaaaccccaaaatcacactccaggatgagaaacctaaaagtctatcttgatgaggcttcatagctggaaaccacccctcatggatccacaggctgcatttgatgaaaggagactccaggaagtcgagccattccaggcagacatgtagcaaaagcccgagctggggtccgccctcatgcaataaataacacctgtgcacataagagaggtgacaggcagggcatccctggggacctgggcctgtggcacgtgaagaaacacccaagagagcacgaagtcccaatgccatgaccagatatttcggtgccaggcatgcttctgggtcccagcaaaagacacacaaatccgtgtccttggggacccacagtctagtgacctagggctggccgggtcgcacgcttcttttcaagggctcgaaagcctctgcatggatgcaactttgggggaaaagtaaccctaaccctctgcttctctcatcctcccctcttctgtgtatatgtctgtctctttctctctgtgtgtgcccttccccactcccatccccattcctttttttatttattatattttggtggtgtgtggctcggtttctgttggtcccctcgtgtggcccctcccctgctgcagaactcgtccagctcggcctcctccgaagcctcggaaacctgccagtcagtgagcgagtgcagctcccccacctctgtcagctcgggctccaccatgggtgcctgggtgtccacagagaaggtgaccgcccgggtggcagccacagcggccccactctccctggtccccctgcctgctgctcagacagccctcacagccgcggcaacctggaagctcagaatcgacaccaagagtggggctcctcttggggacagagggtgggacaaggctgagagcattttctagaatgagtgcctggctgctggacaatgaccacatggttgtctcaagggagaggaaggggtatggggaatttggaggtgtgaaggctttctcccagaccaggtgttgcgtgcctgtccatcctcctccctcccttcccgagccacccaccagaccgttggatgagccatgtcactgtgtcagaggctgtgtgcttttccgctttttagtttgcacccccacccccctgcccttgattgagaatgtgctcctgagcaatgcgacgattttggaaacctagaatgaacagattcatttgaagatgctttggaatttttaaatttgcataatgaaatgagcaaatcactatcaccattaaatgaggcttcattagttacattatcaaaaaccattgacaaggccacaaattgagggcactgatcaatttccaaacttctaaaacgtaggtcaaacatagatgcttatttgctgtcaaactcatgtgcattctttgcaccccggctcttttctcttgcatcacagatcatccgtgagcagcagagccccaatgtttgttttatttataaatattcaggtttcccctcccttgaatgtcaatgccattttgtatctccgcactcatcctgttatattaattttttttcctttcccccccctttttttgtttgtttccagttgtctaacgggttttctcactatagtttatcaagtgagtcccacgtggggcccacgggtgcaggccttttccctcattgcctgcctgcctcccgcctgctccctcgggtcacctctgtccaccttccagactacgctcattattacaccattgggcccggcatgttcccgtcatctcagatccctagctggaaggactgggctaagcctgggccctacgaccagcctctggtgaacaccctgcagcgccgcaaagagaagcgagaaccggaccccaacgggggaggacccactaccgccagcggcccacctgcagcagctgaggaggctcagagaccacggagcatgactgtatcggctgccaccaggcctggtgaggagatggaggcttgtgaggagctggccctggccctgtctcggggcctgcagctggacacccagaggagcagccgggactcgcttcagtgctccagcggctacagcacccagacaaccaccccctgctgctctgaggacaccatcccttcccaagtttcagattatgattatttctctgtaagtggtgaccaggaggcagatcagcaggagttcgacaagtcctccaccattccaagaaacagcgacatcagccagtcctaccgacggatgttccaagccaagcgtccagcctcaactgctggcctccccaccaccctgggacctgctatggtcactccaggggttgcaactatccgacggaccccttccaccaagccttctgtccgccggggaaccattggagctggtcccatccccatcaagacacccgtgatccctgtcaagaccccaaccgtcccagacctcccaggggtgttgccagcccctccagatgggccagaagagcggggggagcacagccctgagtcgccatctgtgggtgagggcccccaaggtgtcaccagcatgccctcctcaatgtggagcggccaagcttccgttaaccctccacttccaggcccgaagcccagtatccctgaggagcacagacaggcaattccagaaagtgaagctgaagaccaggaacgggaacccccaagtgccactgtctccccaggccagattccagagagtgaccctgcagacctgagcccaagggatactccacaaggagaagacatgctgaacgccatccgaaggggcgtgaaactgaagaagaccacgacaaacgatcgctcagcccctcgcttttcttaggttcacaagaaatgcgccggtggggaatgaactgtttcattaataaaacctaatttgtcttgatccattccactctataataaaacaaaagattttgtaggcaactcggaatatagctcttttgaaagtactcgacacctttagataagaattaaaaccaacctatgtaactgacataatcttgatcttttaatttgtaaatattgacaattttctttctgcacattttaatcttagtttcccttttgatttttctgaaggtgccaaattccatttaacttttttacaagtctttgtaaaattttaaatgcataaagggggttggggcaggggaaccacgaagtagttaattttagaaaaggatttactatacttcactcttctttttttttccccacaagcttttgtagatgcattgtagtagtctagcttagaagcaaatgcaagttattttaatgtacaaactaaatgggtaagaggtaaaatcttcatttaaatatactatgttctggatgaaaagagcaggagtaacaattgatgagcaatattcagagtgaagtaaatctggaaatggtagactgtgttgggattggggggagggccatgggaggggtacatcgtcaacatagccgatcctgttacatttaagagtagcctcgtaggttgaatttcttctggtagcttcatggtaaatgcatccgaataagccatactggattgcagtgtttgtttctgtagggtgtttaaggacttgacttcctttctcccatgattcctctggactgcacacagcacccacaaccagccccatgcatgctgctgcctctgggcagtcgtagaatctcccacttcagtttctcgttgattgtactcacctttatggaatccaaatacatccaaaagggtaaggcagttttaaaaatgtgaaaacatttaaaaatgataatagcagggaattcttagattatagtaaatgccttttacttaactgtgcccagcaggctgggtgcgttaaaaagcccaagtattttgaaaaaactcgaacagatttgacaagggtagccagcttggagtctagcaacttgccaatgtgtttaccaatctgggggcttgtttttcttttcttctttcaaataaatggcagttaactggctttacagtaaacattgaagagaggaggatttgtttattgtcactgggaatctgaccactatactgtcctttttttgtattctgggtaaatgttttttggaaaagatttgtcttttctaagtggaagttaaatttgttatactgcccatcccctaaagccaacagagatttgtagatttaaagggatcacatttgaagacaatagtgtttaagaaagcaagcaagtcccttagcagtcaggtcataacagggcacatttctgaccgaaccctctcaaggcagaggaggagtttggtgggtttcatacaccctgcagattcctgttggctctaaccctcaattacctaatcttatgctttaacacataactgcattggatgtgagagtaacgtaccgtatggtcattgttctatatattaacattgaacactgctgcgattgctcaaggacattttatgttacggctttaaagcaaaggcatgattattagaaactatttaagcttttttctttgaaaaacaagctccttttacagaatataaacaacagtagtgcctgtggtttagcccaccaatcttgatgactaaaagtagctgatgcattgtgcatatgatgcttgagatggtttttgcaaaagcagaaatcgctgccaaggtaatcacaatagataaaagtggtattttaaacctttgaaataaatggatgtaactgtaccttgggtaccagcttttcacttgtttagtttttaaacgttagtataatctgaataaataaaatgttgccaaattcaatgtagaaagaatgtgacaacacaccttgggtagttctgcttgtgtttttgcatattgtaaaagcagtgtcacagctaaaaagaaagaaatcgtttctaacagtaaattattgtgctttagttgctagtttgtactgagagttgacctctccctgtgcagttttttgttctaaacttgtataaataacaattgtgtaatgtgtctccctcctacattgtaacaattgcttcagcctacgttataaataaagaaccactagattaaaaaaaaaa

SEQ ID NO: 58896 - DNA, 1997 bp, Homo sapiens
gagaggcggaagtaaaagcgaactacagtggatgggtgcagttcaggagatagctgttctccagcctttctggagggatgcagagcctttccttaggacaaacaagcatttcaaaaggtttgaactacctaaccattatggcaccaggaaacctctggcatatgagaaataactttctctttggttcaagatgttggatgactcgattttcagcagaaaacatcttcaaatcagtttcatttaggctttttggtgtgaagtgtcataatacagacagtgagcctttgaaaaatgaggacctactgaaaaacttacttactatgggagtagatattgacatggcaaggaaacgacagcctggagtttttcataggatgattaccaatgagcaggacctgaagatgttccttctttccaaaggagctagcaaagaagtgatcgctagcatcatatcaagatatccacgagcaataacacgtactcccgagaatctttcaaaacggtgggatctgtggagaaagattgtgacatcagaccttgaaattgtaaatattttggaacgttctcctgaatccttttttcggtccaataacaacctaaacttagagaataatataaagttcctctactcagttggattgacccgtaaatgcctttgtcgattgttgaccaatgcccctcgtaccttctccaatagtcttgatctgaataaacagatggttgaatttttgcaggcagccggtttgtcattgggtcacaatgatcccgcagattttgtcagaaagataatttttaaaaacccttttatcttaattcagagcaccaagcgggtgaaagctaacattgaattcttacggtcaactttcaatttgaacagtgaggaactgctggttctgatatgtggtccaggagctgaaatcctagacctttccaatgactatgccagaagaagctacgcaaacatcaaagagaagctgttttctcttggatgtactgaagaagaggtacagaagtttgtcttaagctatccagatgtgatcttcttggcagagaaaaagtttaatgataaaatagactgcctcatggaagaaaacattagcatttcacaaataatcgaaaatcctcgggttctggattcaagcataagtactttaaaaagtcgaatcaaagaattggtaaatgctggctgtaacttgagtactttaaacatcactcttctatcttggagtaaaaaaagatatgaagctaaattgaaaaagttaagcagatttgcctaaggatgccaatgtttttaattctcaggaactgtgaatatgttatgccacattgcaaaagaattttgcagaagtgattaatttaaaatgttattaagggccttgagatggggagattatcctgaattactttggagggcctaatataattgtagggatctttaaaagttgaagagggaggcaaaagaggaggtcagagtgatcctgtataagaaagacaactacttttgaaggaagttaaaaggtggctttgaaggaggaagacaccttgagccaaggaatgaagggggcctgtaaaaaaagattgaaaaggcaaggaaacagattctccattagagtccccagaaaggaatgcagccttgctggcacctttttagcccagtgagatcaatgtcaaacttctgacccacagaaccataagatggtaaatttgtgttgttttaaaccactgagtcagtgataatttgctgaagaagcaaatagattaacatagcaactaagtacatgattagttgcattataggtgaagtcaaaaatacagtcctttagtaaagtctctatttcttccttttataagagtaattatatttaaaaaaatctacctacccttctggaattgctaatgttagtgtttataaagtcttaaatgtgtgcataaaaaacctaaatgtgaatataaaatctaaataaaggaatatgtttgcctaatatagtttaaaaaaa

SEQ ID NO: 58897 - DNA, 1176 bp, Homo sapiens
ttttttttttttttagtttctaaaaatattgttttattaaataactgttaaataggatttttacaaaataaatggcatagaaaagggtaaaaatgtttatgttcccagaactttctatgccttttcaacagaaaggaaaaggcacagaaagttgtcagctgctattacttctggagagctgccacaactggacggtgttggagtatcaccagttctctctctcatgggaaagaaggggatcaacactttgtagagaggtagcacgtcttcaggtaacagctgctacacacagctggcttcaactttagctcccctgttgatgactgtcagcttcaaggtgtagcatcccatggcactcaggaagaattaaggagctgcacgaggttttcaagacatttcaaataataggcatttagagggtttgcttctgagtttgggaaagttttctttgctaaggagtatgcttcatccactcttctttttactgatgggcttttcaaagctgtttttgccttctgataattgtaaatcagagcccaaagggcagctgctccaatcctctgagcattttgattctcactttccagacaggcagcaagcacagtaatgactttttcattagccaggatcttgggtttatttgcaggactgaagcaaacattatgaaagataagaagaggcaataaagggctgctcttgtgcttgtatttgctcatctctgttagtaagtctagacagccatcaagcctcagaatcatttgttgcccatcttctccagatgatatattcaggagtaacttcaaccaaagaatagtcagattacttagatgtttatttcctccttttggcaatgctagagagaggaagttctgtaagaagttactcttctgaattactcctttacagtcatgcgacaaggccaggtttgaaagaagcataaaaaccatctgctgaaccgtggtgttctccagtggcatctgggaagccaactttaggatacacagcatcagagagttgctcacggctcctctatgtgtagcttgaacagggtgttgtccacaacttgaccaacaaagagaactgcaaccatttggaaaatttgcagtatagacacaaaggagctgcagagaaatttgcatcaatgaatcatccatcaaaatccaaggccagagagag

SEQ ID NO: 58898 - DNA, 1595 bp, Homo sapiens
ttttttttttttcagagttttagatattatttattttaaactaaagcaaataacaagttaagtgaaatttgcagttttcactttgcattgtctatttaaaaggcctaggtattggagctgaaatgctgaagaggctaagtcaggtatgtattacaattagtattgatattctatacattaaccttttcttaataaatattcacaggggcataaattaaatcattaatctcaccatttggaacataaccccaacatatacttcaaatttcctacccaaattaaactggggttttcaaatcaggatggatcatataccagtatatggaattataggtccaattaaaaattggatttatatataatccccacaacccacacctatacacccctttttgcctatcaaggggaaaggtaggaagggagggaggtttaggaaagcatttttgtttcaaaaacacaggctcacagtatgaatattacaagactataaaagcaagatcttcttgtattttggaaacatatgagaacatgtgttcttttaggtacaccttttctgtatgataaaggctttgcaaatcagttttgagattttaaagagggctttaaagctcagaacagtgagacttttttctttttacagctatagaaaagttcaaaaggtaactactatatttggaagtattattcacacatagtgtcttgcatagagtagaccttcaataaaatatatgtgttaacgaagattatactttcaaatgaaagtaatatttgcttgtttgtttttaaacagatagccatcacaactcaatgtaactgcatgcactttcttgtcgtcatttggaaccaggcttctatcaactactatactagtcgaggggctttagacctttcctctgaggagggctggcatctcttcaggtttaacagagaagaactcctggacatggcatgggaagaatgaaagaggctttgtaacaactcatcccaacacagcctccaacatttgactgtcacctgagtctaacagcagtttgactttgttgtacaatacagcaagtgatcatcacattcttgtttgagcagatcttttattttgaaacagattttgtagctctagtcaactttccattatccaaaccaatattctaacggctagtagcagtagtgataatccaaaagagcagataatttaaaagtcacttatacttagctttgcgctattttttacctatcatatttcatcaaaattaaggtgcttttcacaatttgacatatctgatgtcgggataaatgtaatgatcaactggcagcattttttgtttgtttgtttttagaggcaggatcttgctatgttgctcaggctggtctcaaacttttggcctcaagcaatcctcccacttcagcctcccagacacaagcaactctgctcagcctttttttttaaattaaaggtatatgatatgccctagatccgatgaaatatgggtgtttgaatatattcagatctgaggtttaaaaaaattcatttcaaatactggagataaactctgaagagcctacccatgaaaaactagcaagtaaactgcttccctacg

SEQ ID NO: 58899 - DNA, 2034 bp, Homo sapiens
  misc_feature (1)...(2034): n = a,t,c or g
ccggattccgggtcgacccacgcgtccgctccgaagtggcagcagccagagagggagtcggtgtggacgcgaggagccgggcgcttagaacagaggcttgcacaggtggagatgtggaagtctgtagtgggccatgatgtgtctgtttccgtggagacccagggtgatgattgggacacagatcctgactttgtgaatgacatctctgaaaaggagcaacgatggggagccaagaccatcgaggggtctggacgcacagaacacatcaacatccaccagctgaggaacaaagtatcagaggagcatgatgttctcaggaagaaagagatggagtcagggcccaaagcatcccatggctatggaggtcggtttggagtagaaagagaccgaatggacaagagtgcagtgggccatgagtatgttgccgaggtggagaagcactcttctcagacggatgctgccaaaggctttgggggcaagtacggagttgagagggacagggcagacaagtcagcagtcggctttgattataaaggagaagtggagaagcacacatctcagaaagattactctcgtggctttggtggccggtacggggtggagaaggataaatgggacaaagcagctctgggatatgactacaagggagagacggagaaacacgagtcccagagagattatgccaagggctttggtggccagtatggaatccagaaggaccgagtggataagagcgctgtcggcttcaatgaaatggaggccccgaccacagcttataagaagacgacgcccatagaagccgcttctagtggtgcccgtgggctgaaggcgaaatttgagtccatggctgaggagaagaggaagcgagaggaagaggagaaggcacagcaggtggccaggaggcaacaggagcgaaaggctgtgacaaagaggagccctgaggctccacagccagtgatagctatggaagagccagcagtaccggccccactgcccaagaaaatctcctcagaggcctggcctccagttgggactcctccatcatcagagtctgagcctgtgagaaccagcagggaacacccagtgcccttgctgcccattaggcagactctcccggaggacaatgaggagcccccagctctgccccctaggactctggaaggcctccaggtggaggaagagccagtgtacgaagcagagcctgagcctgagcccgagcctgagcccgagcctgagaatgactatgaggacgttgaggagatggacaggcatgagcaggaggatgaaccagagggggactatgaggaggtgctcgagcctgaagattcttctttttcttctgctctggctggatcatcaggctgcccggctggggctggggctggggctgtggctctggggatctcagctgtggctctatatgattaccaaggagagggaagtgatgagctttcctttgatccggacgacgtaatcactgacattgagatggtggacgagggctggtggcggggacgttgccatggccactttggactcttccctgcaaattatgtcaagcttctggagtgactagagctcactgtctactgcaactgtgatttcccatgtccaaagtggctctgcctccaccccctccctattcctgatgcaaatgtctaaccagatgagtttctggacagacttccctctcctgcttcattaagggcttggggcagagacagcatggggaaggaggtccccttccccaagagtcctctctatcctggatgagctcatgaacatttctcttgtgttcctgactccttcccaatgaacacctctctgccaccccaagctctgctctcctcctctgtgagctctgggcttcccagtttgtttacccgggaaagtacgtctagattgtgtggtttgcctcattgtgctatttgcccactttccttccctgaagaaatatctgtgaaccttctcttttgttcatgtcctaaaattcagaaataaagtgagnactatggttcacctgtaaaaaaaaaa

SEQ ID NO: 58900 - DNA, 6077 bp, Homo sapiens
gaagttccacgtcagtcagtctgacggtcagtggatcggtgggtttatctcaaggcctgagtagccggtaacaaacgagggttcccgggattggaccgacgcagccatgcctctgcgacttgatatcaaaagaaagctaactgctagatctgatcgagttaagagtgtggatctgcatcctacagagccatggatgttggcaagtctttacaatggcagtgtgtgtgtttggaatcatgaaacacagacactggtgaagacatttgaagtatgtgatcttcctgttcgagctgcaaagtttgttgcaaggaagaattgggttgtgacaggagcggatgacatgcagattagagtgttcaattacaatactctggagagagttcatatgtttgaagcacactcagactacattcgctgtattgctgttcatccaacccagcctttcattctaactagcagtgatgacatgcttattaagctctgggactgggataaaaaatggtcttgctcacaagtgtttgaaggacacacccattatgttatgcagattgtgatcaaccccaaagataacaatcagtttgccagtgcctctttggacaggactatcaaggtgtggcagttgggctcttcgtcaccaaacttcactttggaaggacatgagaaaggcgtgaattgcattgattactacagtgggggggacaagccatacctcatttcaggtgcagatgaccgtcttgttaaaatatgggattatcagaataaaacatgtgtgcagacactggaaggacatgcccaaaatgtgtcttgtgccagctttcatcctgagttgccaatcattatcacaggttcagaagatggaacagtacgtatttggcattcaagcacctaccggcttgagagcacactgaattatggaatggagagggtatggtgcgtggccagtctaagagggtcaaacaatgtcgctttgggctatgatgaagggagcatcattgttaagcttggtcgggaggaacctgccatgtccatggatgccaatggaaagataatttgggccaagcattcagaagtccagcaggccaacctaaaagcaatgggagatgctgaaattaaagatggtgaaagattgccactggcagtaaaggatatgggcagttgtgaaatataccctcagactattcagcacaatcctaatgggcggtttgtggtggtgtgtggtgatggggagtatatcatctacacagcaatggcattgagaaacaagagctttggatctgctcaggagtttgcatgggcccacgattcttcagagtatgcaataagagagagcaacagcattgtaaagatatttaagaactttaaggaaaaaaaatcatttaaaccagattttggagcagaaagtatctacggcggcttcttattgggagtcagatctgtaaatggcttagccttctatgactgggacaatacagaactcatacgaagaattgaaattcagcccaaacatattttctggtctgactctggagagctagtctgtattgctactgaggaatcattttttatccttaagtatctgtcagaaaaagtcttggctgcacaggaaacacatgagggagttactgaagatggcattgaagatgcctttgaggttcttggtgagattcaggaaattgtgaaaacagggctttgggtaggcgattgcttcatttacacaagttctgtgaacagattaaattattatgttggaggagaaatagtcaccattgcccacttggacaggacgatgtatctcctaggctacattcctaaagacaacaggctttatctgggggataaagaattgaacatcattagctattccctgctggtttcagtcctggaataccagacagctgtcatgcggagggactttagcatggctgataaggtccttcctaccattccaaaagaacagaggaccagagttgcacactttttggaaaagcagggcttcaagcagcaagctcttacagtatccacagatcctgagcatcgttttgagcttgctcttcagcttggagagttaaaaattgcataccagttagcagtggaagcagagtcagaacagaagtggaaacaacttgctgaacttgccattagtaaatgtcagtttggcctagcccaggagtgcctgcatcatgcacaggattatgggggcctgctgcttttggccactgcctctggaaatgctaatatggtgaacaagctagcagagggtgcggagagagatggcaaaaataatgtggcattcatgagctactttttacagggcaaggttgatgcctgcctagagctcttaattagaactggacggctgccagaagctgccttcttggcccgaacttacttacccagtcaggtttcaagggtagtgaaactctggagagagaatctctcaaaagtcaatcagaaagcagcagaatcccttgctgacccaacagagtatgaaaacctgttccctggattaaaagaagcctttgttgttgaagaatgggtgaaggaaacacatgctgatctgtggccagccaaacaatacccacttgtcacgccaaatgaagagagaaatgtcatggaagagggaaaagactttcagccctcaagatctacagctcaacaggaacttgatgggaaacctgcttctcctactccggttattgtggcctcccacacagccaacaaagaagaaaagagtttactcgaactagaagtagatttggataatttggaattagaagatattgacacaacagatatcaatctggatgaagatattttggatgattgactgtaatgctttccatttacctgactaaacagatcattattatatataggtattgattgctaccctgaccacagtgctttggactatgagaaacttcttagatttttatatgtaaatgctgtggaccactgggagcacaatgcccacatcatcttaagaagagtttatgtgcagcatttaaatcactgtgttttccttgttaactaaaacagacatgggctttgatttttttcatactattagaccatatctcataaaaccttttgaattaatgaaggtacttgtttcctttctcaataatgaaaataggcttctagttttagaaggctgagccgaaactacaccttgcctagggatcagccccactgtcttttctttgtataactaaatctgcattttcaaatgttgtcaatcacatttttcttagagctgaatatccaggctgtaattctctaaaccctttttcttgacctcattgcatcattccacaggtcttgccccgattttgtctagcagctacccatttctggagtcaggatgtgaaacctctgttcctctgacctcattaagctgggggtctgtctaagttaacgtttgccctatttggtaacacaaaaacacaccagactttttaaccgtacgctcatctaacatgatttgagaaattcataaccaggcactcaaatatccttgtagcctacgaaaagtgagtagggtaataatttttgctttgtagggagaactacaaattgatatcttttaatctggccattttttaacatttagctcaatattaacagagaaagtgggtaggtccagtatttagtaaaataaatgtatttttaaaatatttttaggaagctgcagaatggcgactgagtgcttcttgataagtctgcaggtgttagttctatataggctccctttccgtgcttctgtttttgcaaagacctttgattaaatttatttccctcagcagcctgatccttggccccttgagccgactggccatctgggatggagcacgtgatacagctgggaccaagttggttgcatcatcgattaaagctctctgaatctgggtcaatcagcaaaccatcaatctttttattatttacaaaataccacaccatttccaccaaagtatcttgttgaacgtaaaaggtcatattttccacgtttatctatatcttcataggtcttgtgatgaacctatccacataaaatgcaactcttcagaaacatgaaaataagaagtatgcagcattattcaacgtacactgattagcatgagtgctgcccaagcaagtaaaaccaggtctacttacagttgcctccatatcattaaccaattggtatgatttaaaccattcctagtacaacccaccttaggtgggaaggaggattctattaagaaagaattttggccaggtgcagtggctcatgcctgtaatcccaacactttgggaagctgaggttggaggattgcttgagcagtcctcatctctaggaaaattttttaaaaaattagctgggcatggcaggccacagaataagaccctgtctttaaaaaaattaaaagagaagaatttgtctaaatgacagcaagtctgtgccttctccactgtagaagtatgtggcagcctgaagcaaaataccaaacatttatagccatattaagtactttttggcaggccaactacaatttattaagcaccgattatgcatatagagaccactggaaataatgtagcacccacttcttggtcactatggcagaaaagaaatcaagtattttttcactactctccctttcccctatccctccccccatcaactaccctattctaccagctagcccattccatcttattaactaaaggtccttcagtcctccttccagattgatcttcctaaatgaaggttctgatgggggcattcctctgttcaaaaggctttcaaaggtctgctgactgaattccagattcctcagcctagcatctgaggtcacctatgatgtggctacatccaccttcctaacttaatctttaatcactcccctacatatgcatggcatatataagcaaaccagatcactggccgtttctcaagcctccttttttcctgcctgttgcttatactgttctctctacctgaaacacctcacccagctccacctgccacaacatttcctgcacttctagaaccctcctttacacccctatgaaggctttcttcaaagaatttgtaatcttctcttagtgtctagcattttaggcctgaggagataattatttgtatacttactagcacctttccccacagccatatccggactgctggctttggcacagcatactctatcctagttcgtggcatcacctatactacccaagataataccttacacatagaaggtactaatgaatacttactgagctgtaagacaaacacactgtacttcagcaaaattttagtaaataatttgattcctatacggtaaactgaaaagagaataggctttgtcatcaaacttgggtcctaaccctaccacttagtagctatgcaactttcagcaagctacttaactctacaagcttaaattccctcatctttaatcaagggttgttgtgattataaaatatatatctggcacacaactgtactcaatagattttcaggtatttctcttccctttcccctgtatcaaaacttacaacgaaattcattgagctagattaaaaatcttactcataaccatacttaagcctatattttagaaactaaaatctactcaccctgatatactctgtggaatctggctcaaactgggcaaagcagagattgaggacatcaacatgcctgtcctggctatacatagtctaaaaccacacagcagagttagcatcacatgagaacactgaagttcagcacctgtcctgatgtcatgacaggcctgcccacccacatactggccactctgtgctcctcaagaagcataaagaaagaacacaggctttgtaattgtcacacctagattcaaattccagttaagccaattatgagagaaccctagtacaacccatcttgggtggtaaggaggattctattaagaaagaagtcggccaggcatggtggctcacgcctgtaatcccagcactttgggagtcggattgcgggggggggtgcgaatcccgaggtcaggagttcaagaccagcctggccaacatggtgaaaccggacgcgtggg

SEQ ID NO: 58901 - DNA, 2942 bp, Homo sapiens
  misc_feature (1)...(2942): n = a,t,c or g
ggaattccagagtctggggtccctggactgagccatcagctgggtcactgagacccatggcaaggaaacaaaataggaattccaaggaactgggcctagttcccctcacagatgacaccagccacgccgggcctccagggccagggagggcactgctggagtgtgaccacctgaggagtggggtgccaggtggaaggagaagaaaggactggtcctgctcgctcctcgtggcctccctcgcgggcgccttcggctcctccttcctctacggctacaacctgtcggtggtgaatgcccccaccccgtacatcaaggccttttacaatgagtcatgggaaagaaggcatggacgtccaatagacccagacactctgactctgctctggtctgtgactgtgtccatattcgccatcggtggacttgtggggacattaattgtgaagatgattggaaaggttcttgggaggaagcacactttgctggccaataatgggtttgcaatttctgctgcattgctgatggcctgctcgctccaggcaggagcctttgaaatgctcatcgtgggacgcttcatcatgggcatagatggaggcgtcgccctcagtgtgctccccatgtacctcagtgagatctcacccaaggagatccgtggctctctggggcaggtgactgccatctttatctgcattggcgtgttcactgggcagcttctgggcctgcccgagctgctgggaaaggagagtacctggccatacctgtttggagtgattgtggtccctgccgttgtccagctgctgagccttccctttctcccggacagcccacgctacctgctcttggagaagcacaacgaggcaagagctgtgaaagccttccaaacgttcttgggtaaagcacacgtttcccaagaggtagaggaggtcctggctgagagccgcgtgcagaggagcatccgcctggtgtccgtgctggagctgctgagagctccctacgtccgctggcaggtggtcaccgtgattgtcaccatggcctgctaccagctctgtggcctcaatgcaatttggttctataccaacagcatctttggaaaagctgggatccctccggcaaagatcccatacgtcaccttgagtacagggggcatcgagactttggctgccgtcttctctggtttggtcattgagcacctgggacggagacccctcctcattggtggctttgggctcatgggcctcttctttgggaccctcaccatcacgctgaccctgcaggaccacgccccctgggtcccctacctgagtatcgtgggcattctggccatcatcgcctctttctgcagtgggccaggtggcatcccgttcatcttgactggtgagttcttccagcaatctcagcggccggctgccttcatcattgcaggcaccgtcaactggctctccaactttgctgttgggctcctcttcccattcattcagaaaagtctggacacctactgtttcctagtctttgctacaatttgtatcacaggtgctatctacctgtattttgtgctgcctgagaccaaaaacagaacctatgcagaaatcagccaggcattttccaaaaggaacaaagcatacccaccagaagagaaaatcgactcagctgtcactgatggtaagataaatggaaggccttaacaagtttcctcctccacgttggacaattatgtcaaaaacaggattgtctacatggatgatctcacttttcaggaaacttaaaatttacccattattgggaagcttaaatgaattgaagctatgcaagtcttttatattattaaatatttaaaagtaaacctgtactaatctaacattgcaactgtgttagcattattcacaactgaatctcccaaacccttctggaagctgcaaggaatcactctatgtttcagtagacccagcgttcttctatataggtagatgacctgccttcttcatgactcaacccatgatttcaaaatgaaattggggaaatagtaggttaatgctttatcaaagaaaaatcaatttggtctgataggggactcaacggattagagatcacagactgaggttctagtcccagctttaccacaagcagccttgacctgccctcaacctgggtcccagtgcctcaatgaccctaggcttccatccctgatataggctttcagaagtcagtggaaagattattcatagtgcctaagaaatgcctgtttccaatatttgaccttgtggatctcaggctttggagagcctaataccaacacaccagcctgcagattttgtctttcccaaactgtgttccaggaatgggctcaaaacttcagggctgacgctgtcctcaccccagactattagagtcctgtgtgctcacagagaacatgaagaaggagcaatgtgtagaagacttaactttctcataactgcagcagggactgaaaattgacctccatccaaatgaaaaataatgtttganggatgattctaaagctaaaccctaggcttggtgggaaaaaaaaaaaattgtgattaattggtgatctctgccacaagtgtggggctcagagtgtcagcacatgtacctcatgtttaccaagtctagaagagatttctctgaaaaggtaatgagctgtcttgaaaaatggggagttcaccatcactcaaagtgctcaagggaagactgggtgattactcatcttgactgttgctaagaaaatctgtgtcaactttggaggaaggtgtttggaatagatatgttgaggggctcttctaactcttacatgctaaagttgtttgagtaagatctacttacagcctgccatcgtaatgtgtggcttgtggtttgggcgatttcctatacttgcttctaaaatgaaacaacgtgtcctaaagtaaagtaaagtgcacttgaattagcaa

SEQ ID NO: 58902 - DNA, 1807 bp, Homo sapiens
ccgcctcagccgcctcgcacatttagtcttgccgggagtggtgtgattcccgaccaagatggcggccgtggggcgagtcggctccttcggttcttctccgccgggattatcctcgacttacactggcggccccttgggcaacgagatagcgtcgggcaacggtggcgccgcggcaggcgacgacgaggacgggcagaacctttggtcctgcatcctcagcgaggtctccacccgctcgcgctccaagctccctgcggggaagaacgtgctactgctgggtgaagatggagctggaaaaacaagcttaataagaaaaattcagggaatagaggagtataagaaaggaagaggattggaatatttgtacttaaatgtgcatgatgaagacagggatgatcaaacaagatgtaatgtttggatcttagatggagacctatatcacaaaggcctccttaaattttcactggatgccgtatctctgaaggatactctagttatgctggttgttgacatgtcaaagccttggactgctttggattctttacagaaatgggcaagtgttgttagagaacatgttgacaaactgaaaatccctcctgaagaaatgaaacaaatggaacaaaagttgattagagacttccaagaatatgtagagccaggagaagacttcccggcttctccccagagaagaaatactgcgtcacaagaagacaaagatgacagtgtagttttacctctgggtgcggatacacttacacataacttgggcattccagtactagtagtttgcacaaagtgtgatgccattagtgtattggagaaagaacatgactacagagatgaacattttgattttattcagtcacatatccggaagttttgtttacagtatggtgcagcacttatttacacttcagtaaaagaaaacaaaaatatagacttagtatataaatacatcgttcagaaactatatggatttccctataagattcctgctgttgttgtggaaaaggatgcagtatttattccagcagggtgggataatgataagaaaataggaatattacatgaaaattttcaaacattaaaagcagaagataattttgaagacatcataactaaaccacctgttcgaaagtttgtacatgagaaggaaattatggcagaagatgatcaggtgtttcttatgaagctacagtcccttttagcaaagcaaccaccaactgcagctggaaggcctgtggatgcctcaccaagagtcccaggaggctccccacgaacaccaaatagatctgtatcatctaatgttgccagcgtgtcacccattcctgctgggtcaaaaaaaattgatccaaacatgaaagctggagctacaagtgaaggcgttctggcaaatttcttcaacagtttgttgagtaaaaagactggctctccaggaggccctggtgtgagtggtggtagccctgcaggtggggctggaggtggaagcagtggtttaccaccatccaccaaaaagtcaggccagaagcctgtcttagatgttcatgcagaactagacagaattacacgaaaaccagttacagtttctcccacaacacctacatctcctacggaaggagaagcttcttgaagataccaaataaagccatttattctgttttctgggataatgtaaacatgcctctgccttttccttcaaaagtggaattagaaagctggagtgcttcttcagatggactaaatttatgtcgtgtgtgtgtgtgtgtgtgtgtgtggttacccattttttagaaggagccgatgtatt

SEQ ID NO: 58903 - DNA, 1212 bp, Homo sapiens
ttttttttttttcatattttagtagttttatttcccctatgagaatctcccctgccctagccccttcttcctgcactctggaacagagcctctggcattctgtccaagctctgtctctaagggccactttcccttttctggctttagtattcccaaagggttcctctgggctgtgcctcctttccttggttcacatgggagggggcttccctgtttcagaagtcccttatgggagaaatagagatccaagtttcacttcacctttttcaggcagttctgtttcctgtcctggggctggagtgggagagaggcctcacccctcagcattgctccttctccactagctgtttgggggtgggctggtctcagagtcaaaagcactcttgggaaggaatgaagcctgaagattgaaaagtgttagtgccaggtgagcagggttaggaagcccattatctgtgttttctcagtcaaccattttgtcaaggtggaatgtgctaggctcagggctctcagagcttcccttcgtctagcagcttcctgagtccgtcacagatcttgccaaggtgctgagtgaagtcaggcccatagagggccgtgagcagacctgggtcagagaagtgatcaaacacgtggcggatgcggccatgtgacttgggcgtgaggtggtgttccaccaactctagcagcacatcccggcactcggtcagcaggccagccagaacagcagcctcgaaggtgaagtctacctcaccaaagctaagtgccgtcatggcaccctgccgcagcttctggcgaaagcgggtagccagggccagctcactggggccaaaggagccattgcggtgcagcacagccaccttgatggccactttgatcaggtccttgatcacgcgctgggcctggggccggctgtgcgtgtactccttggacacacggtagagctcatctagcacctcactgcttgtctcatctatgaagagatgagccacagagcgacccgccatcttactcagtagcttcttctctgcttgcagtgccaggctctttgagctgaaggactccatgggtcctggagagtggggtatgtggtcagtcactgctgtgctgggtgccagtcttgccttggatgttcccggaaagcttacagaatggagaagcggacgcgtgggtcgcgccggggtttccgaacgggtatcaaaaagggttttcaaa

SEQ ID NO: 58904 - DNA, 3148 bp, Homo sapiens
ttttggattgtgctgtccttttaaattttaataaaatagattaatttcatattacatagagagcaagtccatccattcatccgtgataaaattttagaaatattttctataaaatgtttagtatttaattggaaatgaatccagtataacatgacttccacagatacagcattcccatcctcactcccattcctattttgagaaattttaaaaatacagaaaagtacaaaaaataagacaagatatccctataccacaatccagaatcaatcagtatcttcttatatttacttgaagtcttttgaaagagaagtggatgtttatataaaaagctgaagtcccctttaaccaatacccatcccacctcccacactcattattttcccttctccactcttcacaggtgaccactatcaagagtttggtctgtatccttccaatccgtttcaaaaacatgtacatgtacatacatatatgcatccattaccaatagatagtactgagttttatgaggaaacttttaattcaaatttacaaaaaagtcattgtactatctgtatcattctgcaacttgatcccccctcaacaattttgggatctttctgttaatacatgtggatttcatttgttgcattttacagatatatagtattacataagaatttcccatattgttcgtgatgggctttctcagttgtttctaatttttggctactacaaatcaagccacagtaaatatcctagtgcgtatttcctgagcattcatactcataagtagaaccgctaagtatttctcaaattgttccaaggaatgtttccctattcccaaggtcatatgcattttagtacatagcttttccatatttctgtttttaatctctggattcacttttgtgtatagttcatggtctatttttcccccttggagaacaaactacctccacttaaaaaaaatagttccattatttcctcatttcctgatgccacttgtatcatattccaaattctaataaatgcataggtctttttttgaaatctcttctgctctgctcaatcaataccacaggagtcttaatattagttgtagatgaccatgtcatctatttttgtctgttcctttccaatatttacaacttaatttttcttgttactggcgaagatctccagatctatggtggtagcaataaaaaacaggcctccattttctgttcccacttttagtgaaaatgtgcctaaactttcaccattatctctgctgcaggtttctctgttggacacagggttttaatcatatgcatgtctttctcttcagtacaaattttctggtgtcccttaagtttttagtacttgttaaagttaacctcattcgtggtgctttgcttcagaaggattatttctggggcatgatgaggtgcaaatttctaatgaaagctttcccactttcaaggctttcatggggtttttagtgagtatgaattttctggtgtctaatgtggtgtgacttctggctgaaagctttcccacattcactgcactgataaggcttcttacctgtgtgtattctcaaatgcagagcaagggttgagaactgagagaaagctttcccacattcattacaaccatagggcttctcccctgtatggcttctcacatgcacagtgagagatgagctctgagagaaggcttttccacaaacattgcattcgtaaggtttatcacctgaatgaatcctcacatgtacaataagtgatgttcgctgagagaaggcttttccacattcgttacattcatagggtttctctccagtgtgaatgttctgatgttttatgaggtacttcttctggccaaaggctgttccacattcactacatttaaaaggcttctctccaatatggattttctcatgctcagtaaggttggatttgccactgaaggtttttccacactccttacatacaaagggcttctctcctgtgtgagttctctggtgtctgatgaggtttgacttctgaatgaaagctttcccgcaatctttacactcaaaaggtttttctccagtgtgaattttctggtgcgtaaggaggttttccttctggctaaatgattttccacattcattacattcgaaaagcttctcgccagtatgggtgttctgatgtttaatgacatactgcttttggctaaaggcttttccacactcgttacattcaaaaggtttctctctcgtgtgaaaatgctcatgctcagtgaggtttgatttgtggctgaagacttttccacataccttacaggcaaaggggttttccccactgtaaattttctgctggctgaggtgtgacatctgaatggaagctttcccacattcacaaggtttctctccagtaaaaatttcttgatgagtgaggatttacttttggctgaagatatttccacatctcttacatttataaggcttctctgtgtatgatctcccaaatgcagagtaagggataaggtttgagaggaaatgttatcatactcagtatattcaatgctttctctctagaaaaattttctaatattcaatgaagtattgctaccttcactagtttctctccagcatgaattttctgcttctcaatgagattgtcatctagctaagggcttgtcaatactccttagaagcacagggtttctcttcagcatgacttgcacgttcgacgaaatgcaacatatgagtaacagttcccccacattcagtaaattcatagggtttctctccagtatgaacactctggtaacagatgaggtacaaacgttttaaaccaaagacatttacacttaaagggggttaataccataaggagtaagctgtggtagagaagctcccaactaagtcccttgatgattctttcctacacaacctccctcatgatttcagtccaggttgtgtttcaaactgaaaacttcaaaaaggtgtggccttaaaacaaatacgatctgagaacagaggaagtattttttcttatattcaacgctctttttctcagtctttcctggagatggatcaacatgcctcccaagtcctggtgcctctcaagtcctggtgcctctctatctgtgcatcatcttctcaggcttcttccgcgcagatccttcccacttcttt

SEQ ID NO: 58905 - DNA, 3154 bp, Homo sapiens
catcgccccacctccggtcgctggacgtgctctcgcgtacctccgcctttcgtaagtccccccgcctcgcatgatggctgcggtgccgccgggcctggagccgtggaaccgtgtgagaatccctaaggcggggaaccgcagcgcagtgacagtgcagaaccccggcgcggcccttgacctttgcattgcagctgtaattaaagaatgccatctcgtcatactgtcgctgaagagccaaaccttagatgcagaaacagatgtgttatgtgcagtcctttacagcaatcacaacagaatgggccgccacaaaccccatttggccctcaaacaggttgagcaatgtttaaagcgtttgaaaaacatgaatttggagggctcaattcaagacctgtttgagttgttttcttccaatgaaaatcagcccttaactaccaaagtatgtgttgtccccagtcagccagtggtggagttggtgttgatgaaggttttgggagcctgcaagttgttgctccgcttgttggactgctgctgcaaaacttttcttttgactgtgaaacatctaggtttgcaagagttcattattttaaaccttgtgatggttgggctggtgagcaggttatgggttctctataaaggtgtcttaaaaaggttgattttgttatatgagcctttgtttggattgcttcaagaggtcgctaggattcaaccaatgccttacttcaaagattttacctttccttctgatatcactgaatttttaggacagccatattttgaagcctttaagaaaaaaatgcctatagcttttgcagctaaaggaataaataaattgctaaataaactgtttttaataaatgagcagtcaccaagagccagtgaagaaaccttgcttggaatttcaaaaaaagctaaacaaatgaagatcaatgtacagaataatgtggatcttggacagccagtaaagaataagagagtcttcaaagaagagtcatcagaatttgatgtgagggctttctgcaaccagctgaaacacaaagctactcaggagaccagttttgattttaaatgttctcaatccagactaaagacaaccaagtattcttctcagaaagtgataggaactcctcatgccaaaagttttgtgcaaagattccgagaggctgagtccttcacacaactttctgaagaaatccagatggcagttgtatggtgcaggagcaaaaaactcaaggctcaggccatttttctgggtaacaaacttcttaaaagcaaccggcttaaacatctggaagctcaaggtactagtttgccaaagaaactagagtgcataaaaacgtctatttgcaaccaccttcttcgtggctcaggtatcaaaacttcaaagcatcatctgagacagagaagatcacagaataaatttttacggagacaaaggaaaccacagagaaagttgcagtcgactcttttaagggaaattcagcagttctctcaagggactcggaagagtgctacagataccagtgctaagtggagactctcacactgtactgtgcatagaactgatctctaccctaacagtaagcagctcttgaatagtggagtttcaatgcctgtcatacaaactaaggagaaaatgattcatgaaaatcttagaggcatccatgaaaatgaaactgattcgtggacggtgatgcaaataaataaaaacagtacatcaggaaccattaaggagacagatgacattgatgatatttttgctttaatgggagtttagatgttcgttcatatgtgagacttttaagtgattaacaaggctagttcagtgttctaagtagaactgctaagatctggaagtaccacctggactcacagaggagctgctttagtgcagcattgcacaggagttcatttcagttcagtctacatttaaagtagcattgtgtcatttcatcaacaagtatttcttttttggcttcaactacatgtcaggtgttaatatgaaaaatctgccacagcctacccttgagaagcagatgtaattccttgagtgaggctagtaagtctctgaaaaactgaataattttatgacttactaggcaatttaataatcgtttgcaaaaaccattgtgtcttgaggtaaatgaggagcgggggtgggagatagcaaggaaacacctgaaaggtcaatttggtcttattggctccattatacataggtccgcctctgaatactaaagtttgtagctcctgacatttatgttttcttgtttatatgttggaattgatcaacaaggtttgccactgcttgtattaccagggactggttacaaccattatttctcttcatttgcttggcttatctcatattaaagtgagtttggagttctccaaaacgttttaattttatttatttgggtaccagtgattgattccaaataaacctttttacaaaaaggcaataaggtggtttatggttacatatgaaatataataggataacaggtagatgagaaagtaaaatgaaaaaatgaggttaggagatacaaagtagacccaggaatgaggctagaacatttataatttggtgttgatgctgtcatctgataggggatgttgctcgtactgttgctctgaggggagtacatcttgagtattttcaaataatgatgtgaagtttgaggtaggtatctttccaatgttctaactttactagaattaggttattaagcttctctagtgcccttaacttttgttacatagagatttaaagaaaaagaaagtagtaccttagtatgtaccgcatccttcttttcctcagccaccctatcataacagaagttatttcccttccattctttatttggctttgttctttccctgtctgccttctccattttctcagttatctctaccagtggttctcaaactttagactttttgagaatcacctggtgggttgctaaaagatgcagattagccctttcccagagactgataaacaggggccagaaacctgcatttttaacatggagcccaagtgattttgatccaggtggcccccaaatccagttatataaacactactttagcttctctcctgaagccttaagtaaactggtttaattcttaatctgtagtcagttttcatattcct

SEQ ID NO: 58906 - DNA, 1839 bp, Homo sapiens; identical to SEQ ID NO: 58833

SEQ ID NO: 58907 - DNA, 2006 bp, Homo sapiens
cagtggaacgcgagcaggagattgaccgctggagggtgaagtgtgtgcaggaggtgggggagaagaagcgggagcaggaactcaaagcagccgctgatggcgtactatctgaagtgaggaaaaaacaagcagataccaaaagaatggtggacattctacgggctttggagaaattgaggaaactgaggaaagaggctgcagcgaggaaaggggtctgtcctccagcctcagcagatgagacttttacgcatcatcttcagcgactgagaaaactcattaaaaagcgctctgaactgtatgaagctgaagagagagccctcagagttatgctagaaggagaacaagaggaagagaggaaaagagaattagaaaagaaacaaagaaaagaaaaagagaaaattttacttcagaaacgtgaaattgagtccaagttgtttggggatccagatgagttcccacttgctcacctcttggagcctttccgacagtattatctccaagccgagcactccctgccagcgctcatccagatcaggcatgattgggatcagtacctggtgccatccgatcatcccaaaggcaacttcgttccccaaggatgggtccttcccccgctccccagcaacgacatctgggcaactgctgttaagctgcattagtaaagatgctccaggagtgtggtccagccagcgctctttccagctgtaaatattagcgatggtgccatcttttgctgtagactaaactgcaacttctaaattccatgtggcattcccctaccctgaatttatgctttccttctgtgctctgtgctggccagaggtgcctcttgaatcagattaatgtggtttttcaggaaaggacttaggtgaactgaggtttttaccacaggcagtgaatgaccttggttcaccaaatttgcctctgttttgaggggcttggtccagagtgacttgttaatttactctaacttccttgtgtgttgatgggtaagtacactcaaacactgaatacaggtgtgtgatgggtagatttcacagcccttctactaatagtgagtgtgaaggcaagcttgatgcaaaacctcctgacctttcctacctgaagagccctttgacttctaggaagaaaggtcaaaaatgttatcttcagttgtgttaatcccagttttagtgcagcttaggaggctgctagttaggaagataacagtggctgtaggctgggttgccagaaaagatggtggcctagtcttattattcagatggagaacttagaaaacctgaagagtacccaaattggattgtattttaatggacaatggctgtattttttccatgttagaaggatcctaatgaaagcacctgttatttttaagtttctaagggtctagttgttcagaatccccaaggatatttccctaacctcactcagtcacattgtaggagccagtgtagctatggaattatcttaggaactcaagcttctaaaactatccatgtagtcaaatctaggggaaaaagcaaataaaaatagtaaaatttggccgggcacagtggctcacgcctgtaatcccaacactttgggaggccgaggcgggccgatcacgaggtcaggagatcaaggccatcctggctaacacggtgaaaccctgtctctactaaaaatacaaaaaaatattagctgggcgtaggtggtgcacacctgtagtcccagctactggggaggctgaggcaggagaatggtgtaaaacccaggaggcagagcttgcagtgagccgagatcgcgccacggcactccagcctgggagacagagcaagactccgtctcaaaaaaaaaaaaagtaaaatttattttttatattcattaataaatgctgttgtgcttggagatgatcactcatataacatgtcatttttttggttctgttttggtttggtttttgccaattattttgttatatttccaaaaaactaaataaaaatcatttttattttttaaaaaaaaaa

SEQ ID NO: 58908 - DNA, 2128 bp, Homo sapiens
tcataatttaggggtttctgtcttttaaatgctatccattgagggcccgaatggaacaaaacagagagacaggagttcgcctccttttgtttttctgcctcactgttgagctgggtgatctcatctcatctttttttgcccttggactgggacttagccccattggccccctggttctcaggccttcagcctgagttacaccaccagctttcttgggtctcagtttgcaaatggcagatcgtgggacttcgcaaacaccatcatcttgtaagcccattcctcctaatcttcttttatatacacaccaattggttctgtttctctggaaaacctgattaatagacctgaggaatgaaactgtaacctctcagtgggttcttcttgcctgagcctggcgtccgtgtggctggcgcggaggatgtggacgctgcggagcccgctcacccgctccctgtacgtgaacatgactagcggcccgggtgggccggcggcggccgcgggcggcaggaaggagaaccaccagtggtatgtgtgcaacagagagaaattatgcgaatcactccaggctgtctttgttcagagttaccttgatcaaggaacacagatcttcttaaacaacagcattgagaaatcgggctggctatttatccaattatatcattcttttgtgtcatctgtttttagcctgtttatgtctagaacatctatcaatgggttgctaggaagaggctcaatgtttgtgttttcaccagatcagtttcagagactgcttaaaattaatccagactggaaaacccacagacttcttgatttaggtgctggagatggagaagtcacaaaaatcatgagccctcattttgaagaaatctatgccactgagctttctgaaactatgatatggcagcttcagaaaaagaaatacagagtccttggtataaatgaatggcagaatacggggttccagtatgatgtcatcagctgcctgaacttgctggaccgctgtgatcagcccctgactttgttaaaagatatcagaagtgtcttggagccaactagaggcagggtcatccttgcccttgtcctcccctttcatccctatgtggaaaacgtaggtggcaagtgggagaaaccatcagaaattttggaaatcaaaggacagaactgggaagaacaagtgaatagtctgcctgaagttttcagaaaagctggttttgttatcgaagctttcaccagactaccatacctgtgtgaaggcgacatgtataatgactactacgttctggatgacgctgtctttgttctcaaaccagtataaacacgtggaggtcgaagtcttcagagtccgcaccctccgggatgtgcccttggaagagggtctgtgttcacaattacgtgaagggaggacccttggggaccgccattctaaatatcatgtaggaatttaaaaagccaaaatactaattatttctttgtagtgtgtaaaggaatgtttttaaaagacaaaaacccaactctttgtggatttttatcaactctttactcagagccactctccaatgcaggtcacactccaattatgatggaagatattttttatacttaattgcagtagggactcattcccagacaaagcaatagtcacgacttcatggaaccaatcaatggattgttttttgaagactggcaataaagctgtccattcaattccaaatactggttttaaggtatagccactgatattctttcatgtttagaaattctttctgttattattcaagaaaatgtttttaatcatgctaataaacttttttggagatgactttggcatcatgtttgaattcatataaagctcccctagcattttttattggtttggcttcaggagtacccaaatagtagcattatgagaatgacgcagacaatttgaataggggggaaggaaggcttcagacttgggggaaggggagattattgcaaattgcagtgaacactgagtcagtaaaaaaaaaaaacagaaacaagatcacccagcatccttccccaccccagctgtgtatttatatagagggaaatatactttatattttgtatcatcgggcctatagccgctgccaccgtgtataaatct

SEQ ID NO: 58909 - DNA, 2503 bp, Homo sapiens
acccaccgcacctacagggcggtcgagtgagggagctgctggcgggtgggtctggcaactctttgggaggccgacgcgggcggaccggcgggtgctgggaaccgagcctcggcttgcggccggcagtttccgtgggtctgtgaagaggtcggcggcccctgcgggcgccagtcagctttaagaaaaagtagagatcacttctgactgtactgaacagcaaaaattaagtgacttgctgccctgcacatcatggcactgccattccgtaaggacttagaaaagtacaaagaccttgatgaagatgagctccttgggaatctgtcagaaacagaactgaaacaactggaaactgttttggatgatcttgaccccgagaatgcccttctgcctgcagggttccggcagaagaaccagacatcaaagtccaccacagggccatttgatagagagcatctcctttcatatctggagaaagaagcattggagcataaagacagggaagactatgtgccctacactggagaaaaaaaagggaaaatatttatccccaaacagaaacctgtacagacttttacagaagaaaaagtgtctcttgatccacaattagaagaagctttgacaagtgcttctgatacagaattgtgtgacctcgcagcaattcttgggatgcacaatttgataacgaatacaaagttctgtaatataatgggaagtagtaatggtgttgaccaagaacatttttcaaatgtggtcaaaggtgaaaagattcttccggtatttgatgagccaccaaatccaaccaatgtagaagagagtttgaagagaactaaagaaaacgatgctcatcttgttgaagttaatttgaataatataaagaatatcccaattccaaccctaaaagattttgcaaaggctttggaaaccaacacacatgtgaaatgtttcagtcttgcagccacccggagcaatgaccctgttgctactgcttttgcagaaatgctgaaagtgaacaaaactttgaagagcttaaatgtggagtccaactttatcacgggagttgggattctggcactgattgatgcgttaagagataatgaaaccctggcagagctcaagattgacaatcagaggcagcagttggggacagctgtagaattggaaatggccaagatgcttgaggaaaatacaaatatccttaaatttggatatcagtttacacagcagggaccacgaaccagagcagctaatgctataacaaaaaacaatgacttagtgcgtaagagacgagttgaaggagatcaccagtaagtctgcaaaggtgtaatctttggaagacttcagaagatcaccaagggctcatgttggtgacatcatgtaaaattttcctgggtagaagggaaaagactggaaaaatttttttagtgacatgcattttttttttagttgttatcaaattgtaaaatcagtaatgtgatattttatattctgaaacatttctactttctgctaaaatccaattttaatttaggtttaattggaatggatttatggatgaatcttgggcaaaaaaatccaactgtaaaaaatttcacaggtcatttgtgtagaataatttgaacattgtgaggaccaatcttttttaaatcaaaagggatgttgctggtatcagaattgatattgcttcatttacacataaaacacttaagtgttttcttcactccgtgacctggagagttttccattttttaaaatacatgaacttggcaagggtgtgatttttctttatcaagagaacaaaatgccagaatgttaaaacagttaactcaaaatctagtcatctgtgtaggagctaaagcaggtctccagggagagagggtggtcgtctgtgcattccaggttactgcacttgtctgatgtgacgtagcaacacccacgtcttcttaaaacaaagtcatcagctttgccaggttacatactttatttaaaagtatagtgaggtcgaagttcattccagtgtttcattttaataatgtgggcattattaaatttttgtggaagctaatagtaaaaaataaaagctgttttcaccacctccctccccaccccccaaaaaaggcgtacagccaactcttagttatttagggtaagagaaaaaagaaaactgttaaacaatgaaatcaaagataataaatatgatagatttccagtatgaggcactttgcaaaacagtcatttaaactgatggttactgtaagtcagttggaagctggcatgtatgtaaaatttacttgggtgttacaccatatccggaagaagttcctatgtggcagtggcaggaattgcattaaacagtatttcaatcactgctacaaatcttccaaccaagaagggaaaactgctattcttcataaatctaatttttagtatatgcttcctttcatcttatacttttatcaatatttataaaagtcatttctataataaaagcagtctttcttgctca

SEQ ID NO: 58910 - DNA, 1458 bp, Homo sapiens
tctgaggcgcgtgcggcggccaccccagcctagtcctcttcttggtgccactggctaactaggttgagaaaccggcgccacaggcggcagcacctggcccggagctggcccgctcctccccgccgagccggcgccccaacaacgcgccctctcccagtcctcacaaaggggcctagtccggcccccggctctggccgtgagggagcgctgtgggggcgcgctgcctttctgcctggaaagtgttggcagggtggtgggagaagcgtcaggcttgaacaacatgattttaaagcacgtgtctgtctgtcgttttttacttttagggttttggccaaattgggcgagggcacaaaataaccacttaccccttctcaccgaggaagagcgggagaaagggtatggcacagtcacaagggtgggtgaaaagatacatcaaggccttttgtaaaggcttctttgtggcggtgcctgtggcagtgactttcttggatcgggtcgcctgtgtggcaagagtagaaggagcatcgatgcagccttctttgaatcctggggggagccagtcatctgatgtggtgcttttgaaccactggaaagtgaggaattttgaagtacaccgtggtgacattgtatcattggtgtctcctaaaaacccagaacagaagatcattaagagagtgattgctcttgaaggagatattgtcagaaccataggacacaaaaaccggtatgtcaaagtcccccgtggtcacatctgggttgaaggtgatcatcatggacacagttttgacagtaattcttttgggccggtttccctaggacttctgcatgcccatgccacacatatcctgtggcccccagagcgctggcagaaattggaatctgttcttcctccagagcgcttaccagtacagagagaagaggaatgactgcatgaatctacctgagttgctggcattgggaggccagttactggaaaggaatggaaaaaagaagcctccaaaagggaaaaacttctgacaatatgatgctgtgcgagaaatatttacagcacattaagacgatctgtattattaaataaataattttcaaatgttaaacagtattaaatggcacctgattttgtgttaaattttagttccctgttgtttaatgcccccaaaatatgcagacctttgggaatataaaaatattgcacccacatgtcttaatggggctgaatttcagattatttgttacatatacttattatattgattgttgggttttgattttggtgcttgctgctgaaataaattgaaaattaatattcaataaaaatgatgtatttgtcacttgctgttaaggtagaacaagaaggaacacatattatacacataatgatgggaattacattgtgatttgtactatctacaaaggagtaactgccagttaggaagaacagtaaacagtgatgttaaa

SEQ ID NO: 58911 - DNA, 3651 bp, Homo sapiens
cgggagcaagtgtgaatcattgccggggctgggaaaggaggaaggcgcatttaaccccctcccacccctctccatgtccgtgtgtcactcggctcggtccacctggcgcggccggtcctggggctgctgctgctgttgacgacgacgacgacgacgggggctgcctctgctgtcccgggagtttcctcctgctccggccacacagctcctggggattgttcctcttcgaaccagaacctcggcctgaccggcactttggctccaaaataactttatttttgggggagaaagcacatcacgaaccagtcaaaatcgtggtttatttctgtaacgtgaagacttctgctcttttttctttgtttgtttttttcgtaaacatctgggtgtatatcaaacggcaagatgtccagtaatgtcccggcggatatgataaatttgcgcctcattttggtaagcggaaaaacaaaagagttcctgttttctcctaacgattctgcttctgacattgcaaagcatgtatatgacaattggccaatggactgggaagaagagcaggtcagcagtccaaatattctacgacttatttatcaaggacgatttctacatggaaatgtcacattaggagcattaaaacttccttttggcaaaacaacagtgatgcatttggtggccagagagacattaccagagccaaactctcaaggtcagaggaatcgtgagaagactggagagagtaattgttgtgtaatcctgtaaacactgtctgcctagtgtgatgtgatatagtctttgtctttcatgctgctgggacagaaaagacccgacattgcttcagaaaccgttcagaacagtctgcctgtaaacacatggaactgaattaccacatgaacactgtcatcttttctcatgaaagtaaaaagaaccaagaacatttttcactctgattttttatttcttggattttttggtgagctgttttaacacatattggtttttgaatgcagtcaatctccaggggaaaagttaacaagttatctttcgtagcagaaaccattttgctgccacaaaattttcatcatcagaactaataaatcaagtgttccaaatacaatttgcactaaaaagattggcattattttcctcatcagcagaatttataacagtgtgtggtatctagaaatacttatatatacaattccacactggaagacactcagcaattaatgaagttaattactgggccaacttgagaggaaaaaatggaaaagaaactaaaatgttgggtgaattctaccaaagtcagccgtggtggctgcactggcacagaatactaaactgagtgtgactattttcactgcaacaaatgaaaaaacaaaatgtgcctgtttaaagcactcagtagagggctgatgaaactaattttttttcctttaagacatgcactcttgagtcctacagtaactgagtgtttgtttagacagcacaagaaggggtgagagtgcgtctcctagccttaatgtgggagggtagtttcagtcactcatcggctttcattattgtgcagaaatattagaaaacctcattgatcaattttatgtatttgaatatcagcaaattgaaattttccataattatcattaatttgtaaccacatccagtgtcatgcttactccttagagttcagatgaattcttaaaattaaaaaaaaactccatagtactaattttgtttctttatatagtttgcgtttgatattagtgcttgcaattgtattaaagtcaaaagctgatttttatggcatacacaagaatgccactttttcttttatttcataccaataatttaaagattgatatgctaaaaacaatttgcacagcactaaagcatgagctactttcatctaaacctgtaaaaatatgaaagatttttatattttttcactgggaagaaattcttcctggatgaaattacaaatatgtgtagaatatatttaataaaagacttataaaatacctaactacaggacttaaaatatagattggcgcgtagtatatagaacaatattccatataaataagtttagcctttataaaaatgaagttgcaggctgacattacattctgtacttactaagtgtcaacagcccttacaaacattaaatgtaaatggtttcaaatggtcagcgttgtttaaatgtaatcatgttattttattcattgttaatgctttgatgaaaaggctttatatgcagtagatctacgaaaatattgttcatactgatcagaattaaatttgtatagagcagagttttaaaatgaatgtaaatagcactaaacgttttctttctgcaacctgtacttacagattcttcctgtaaactaaataaaaaaaaaatgatagtgcattttggtggtaattttaaaggtcttgattaggtcaataattgtttaagcaccgtctcattcatgttttctactttcatttcttaagcttttaaaattcatttaattaatattctgttgttgttttggggagtattcccaatgtatctttgatatttaacctggttaatttgtggacagtcacaacaatggatagaattatgtagtctccgttatcactaaaatgttatcttcaagagatgttaaatatttatatgctttgttgactagctgaaatgtgaattctgttagtgttgactaaagaatctggtagttgcttaattgggcaattaaacaatttatggctctattttgtaaaacaaactactggtaattatttttaatacctattttcattctgattactctttttttaagttaaagactatcagttaattaagattgagtttttatgatggttaaaaataattctctattggtttttcaatatatttttctgtgtgttctcagattatatatttccctcaatttagagtttgctaagtgaaataaactggttcactagtagagaaagaattacgtcgcttaatacctaatatccatagttgtacaatatgaaaaaaaagaataaaaagtagcagtaaaattatatactgaaaacaccaaaaatttagatgccttaatagtatatacgtgaaatactcagctgtccctttaaaaataattccttggactgcctggtggttaaaatacgattcctcatatccaaggctacttttgaagatccctctgccaaaaatatagctcacttatctaaaggtgagagctgcatagatccagtaatgtacataaagcctgaatgatgagcctatgtccctgcctaacgctggtgtctcactcatctcttttacctaaattgtcctgaactttgttaagtgttctggacaaggccaagcttttctttattaaaacctcagcatgtctccctgatctgaactatttgctttctcttcaagataagttgtattttaccatggaaaaatacagtatctaacattaccattcacgttaaatgaagtttcctcgataacgatttatctttagttttatgaagtcatcgtgaccaatgttacagtaatttctggttagctgattgtgggtaaacaatgtttaatgtgaaaagaaattaaaactttcttcatctgttgtagaatatttctcttctttaaaatggcttctattcataaaa

SEQ ID NO: 58912 - DNA, 2668 bp, Homo sapiens
atcgttcgacccacgcgtccggttgctcttggtggacgggcccagaggaattcagagttaaaccttgagtgcctgcgtccgtgagaattcagcatggaatgtctctactatttcctgggatttctgctcctggctgcaagattgccacttgatgccgccaaacgatttcatgatgtgctgggcaatgaaagaccttctgcttacatgagggagcacaatcaattaaatggctggtcttctgatgaaaatgactggaatgaaaaactctacccagtgtggaagcggggagacatgaggtggaaaaactcctggaagggaggccgtgtgcaggcggtcctgaccagtgactcaccagccctcgtgggctcaaatataacatttgcggtgaacctgatattccctagatgccaaaaggaagatgccaatggcaacatagtctatgagaagaactgcagaaatgaggctggtttatctgctgatccgtatgtttacaactggacagcatggtcagaggacagtgacggggaaaatggcaccggccaaagccatcataacgtcttccctgatgggaaaccttttcctcaccaccccggatggagaagatggaatttcatctacgtcttccacacacttggtcagtatttccagaaattgggacgatgttcagtgagagtttctgtgaacacagccaatgtgacacttgggcctcaactcatggaagtgactgtctacagaagacatggacgggcatatgttcccatcgcacaagtgaaagatgtgtacgtggtaacagatcagattcctgtgtttgtgactatgttccagaagaacgatcgaaattcatccgacgaaaccttcctcaaagatctccccattatgtttgatgtcctgattcatgatcctagccacttcctcaattattctaccattaactacaagtggagcttcggggataatactggcctgtttgtttccaccaatcatactgtgaatcacacgtatgtgctcaatggaaccttcagccttaacctcactgtgaaagctgcagcaccaggaccttgtccgccacctccaccaccacccagacctttaaaacccaccccttctttaggacctgctggtgacaaccccctggagctgagtaggattcctgatgaaaactgccagattaacagatatggccactttcaagccaccatcacaattgtagagggaatcttagaggttaacatcatccagatgacagacgtcctgatgccggtgccatggcctgaaagctccctaatagactttgtcgtgacctgccaagggagcattcccacggaggtctgtaccatcatttctgaccccacctgcgagatcacccagaacacagtctgcagccctgtggatgtggatgagatgtgtctgctgactgtgagacgaaccttcaatgggtctgggacgtactgtgtgaacctcaccctgggggatgacacaagcctggctctcacgagcaccctgatttctgttcctgacagagacccagcctcgcctttaaggatggcaaacagtgccctgatctccgttggctgcttggccatatttgtcactgtgatctccctcttggtgtacaaaaaacacaaggaatacaacccaatagaaaatagtcctgggaatgtggtcagaagcaaaggcctgagtgtctttctcaaccgtgcaaaagccgtgttcttcccgggaaaccaggaaaaggatccgctactcaaaaaccaagaatttaaaggagtttcttaaatttcgaccttgtttctgaagctcacttttcagtgccattgatgtgagatgtgctggagtggctattaacctttttttcctaaagattattgttaaatagatattgtggtttggggaagttgaattttttataggttaaatgtcattttagagatggggagagggattatactgcaggcagcttcagccatgttgtgaaactgataaaagcaacttagcaaggcttcttttcattattttttatgtttcacttataaagtcttaggtaactagtaggatagaaacactgtgtcccgagagtaaggagagaagctactattgattagagcctaacccaggttaactgcaagaagaggcgggatactttcagctttccatgtaactgtatgcataaagccaatgtagtccagtttctaagatcatgttccaagctaactgaatcccacttcaatacacactcatgaactcctgatggaacaataacaggcccaagcctgtggtatgatgtgcacacttgctagactcagaaaaaatactactctcataaatgggtgggagtattttggtgacaacctactttgcttggctgagtgaaggaatgatattcatatattcatttattccatggacatttagttagtgctttttatataccaggcatgatgctgagtgacactcttgtgtatatttccaaatttttgtacagtcgctgcacatatttgaaatcatatattaagactttccaaagatgaggtccctggtttttcatggcaacttgatcagtaaggatttcacctctgtttgtaactaaaaccatctactatatgttagacatgacattctttttctctccttcctgaaaaataaagtgtgggaagagccaaaaaaaaaa

SEQ ID NO: 58913 - DNA, 2166 bp, Homo sapiens
tttgctctaaaatatatcttgtttttattttgatagttttatatgcatttataaaattattcaggtaatttataaataaatcgtcctaggttatttaaaatatgccattcgtatctaaaacaggcagatcgtttctatatcaaattaattagttgctattgtcagttttaagaataatttctcaatttatctaagatgcctaacactgccaccatgatgtgtagtcaggatacttaataataccttttgtaaaagttagcatttatcttacaccagctctctttttagatagagaacatatataagaaatgagtaagtcgataagccacatttaaccatcactagtgattgttcaatggaaacatataaactcaatgtaaacttgaagttaattccatttaatttacagcttattttataatagtattttattaaggaattaatttacatatagtaaaatcacaaatctaaacatacagcatgaggaatgttgacaaatatatgcagctacataaccatcatccagatcaaaatacaaaaccatttcaatcaccccagaaaatttcctcaggccccttttccattcaatttgaattccctgccctcactctaagcagccactgttctggtatctatcatcaaatattagttttgcctggaagtggctttaatataaaagtaattagatagtatgttatgtttggttttggttttgctcaacttaatgtttttgagattcataccaggttgttgcatgtatcaagcagtcctttttttaaatgaccagtattccactgactatattgtaggtttgtctatccattttcctatggatgggaaatttccactgtttacaattttgtgctattatgaataaagctgctatgagcagtcatttttctggggtatatatctaggaatgaaatggttgaatcacaaggtagtgcaagacagtcctctaggtggccttggacaacctcaattgttccccctttttcacttgtagttttcaagaataactgtactgtgtgctgggaatgcaacatcctggactaagtgactctgagaaacattgtgactttacagatgaaatcatctacaaagaatcatatattttcttgttaatcatatacaatttgccacagatactatattttcagtgacttctatgaagatatttgttgttgaaatgtatgcatgacatcttaaaaaattgatatttattttttgtttatcttaaaaggtatagaggaaaaaatgatcggtatggttatctattactcctatatatcacatttctctattagccacaggtctgattccggttgtttccactcttctccaagcagtgtgttaaaattgaaagacttgaagtattctaggcaatggaaatcaggtttttgtccttgctgcagttcatgctgaggtacaggataaagagcttcataacttcgtttatcttttgatccatgaattgcaaatgaattgaattttgtcacatttggtggaaaataactccaagggagataagctttgccttcccattttgtctctcctctggacactctgaacgataaaggaagttcttgtttccacacatttcttcttccagaaagtaaaagcactaaatgctgtccgtggggacaaagttcaacttctaaatattgctcagttatatcattcaagaaaaatgcttccacaacttcataatcccacagttcattgaaaggttttcctggttctccaagtggggctggaggatccctgaaaaatggagcactaatgtccatcatcactcctctgtcacctggattcagcctgataaatacgggctcatgcttcactggaaaaccatcccaagtgtgttcaattttaaaatccatctgaagtctcttcttgagatgaccaaatccaaacctagaactcctccagaggtacagccttggtgggagattctgaagacgccagtctggcttctatccctagccgcaggaacctgcatcttttacttagtccagaaaggcttagtatattagtaacccaaagatagtgagggcatttaaactgtgtatttcattctctactcacgtttgcattttggttttttgtttgtttgtttgtttgttttaaagaggttgggcctcactacctggagacactgtcccc

SEQ ID NO: 58914 - DNA, 984 bp, Homo sapiens; identical to SEQ ID NO: 58676
  misc_feature (1)...(984): n = a,t,c or g

SEQ ID NO: 58915 - DNA, 2925 bp, Homo sapiens
ttttttttttttgatattttaaaagtttatttctattttaactagcccacagaccccattctttgagggctgatctgatttctgacaaatggtctatagaccctcctctcggaaacttactatccccttccaaaaaagtctgcaccttccatcatgatgcacattttaagttaaaattgcccaataccaccccttaaaatgcaagtttattgaataaagctgagaagagcagtaaacagacaaaaaatgcatccacctaaataaaaaaattcacatatttacatagttcagtaactgttaaaagttttcacatgcagaggttaatgcacaggaaaatgttggtaatagcgtctggatgtcttgaaatgcggaaagcaatgtatagacacacaaacacattaaggtttagctataggtcaattaacaaacctatgcagtccccacagagtcacacattctagttccaattcctccttttaggcacaagcaagttgccacattctttgtaatggttcacactgaccattaatggtgttgaacaacagtagcaagtttaaatatcccttcatttacagaaccatccatcccaccagggtagtatgcaacatgcttcaaagaataagaagagaaatttaaaagcccagattctactcataaaaatatgaatggagaaaagcaagtagtgtctgtgcaacacagtgcagtatattgtacagaatatttttaaggccatggcagtctataaattaaaactgatattcattaaaagaacttactgttgactacactctgagtgctcaacacatttggaaatgcagtctacataagtgctgcttaacaaaagaaacaaaatcacacacagtgtgaggcaacacataagcaggtgtaccatagagttttatctactacagtggtctatatgaataataatttacaaatgaaccagtattaatatgtccctttatgtatacggaagtcgctaaactacaaaacatgtccatttgaagtttttagacatctctgtatcatagaagcaaacaaacagcatcagttcctcagttctctgtgtgactgattattaaacaacctgtagacattgagcatgattacattagataaagcaggcaggtctagagttgtcacaataatcaagatgtctaatggcaccagtcaaaagagtgccaaagcttacatcagtaagagagaaaaataaaaattttttatttgtttataagtatcttttgtgctgaaagtcaactttatgactggatataaaaagtcaggagttaagagtgtcatgcagcagcactgatttaatgactggagatagaacaaacagatgtttgaacaaagactgacattcttaacaggttttattatattgggtggaatgctctaaattcatgaacgcttttggaaaatcttcaattctcaaccccttaaaaaagtatcctgaaccaggaagaaaaaacaagagacagaaataatgatctggacagatacaaaacaggatgctttagttcctcccatatcccaactgccatctggtgatagagttctcagaaagcaggatatctttaatattcatcaggcagaatctcaccagtgcaaagaaccaacattgatctggtgcctccgctcactctctgcagaccattttggattcctaagatgtaattatacatttcacatgcatttgtgagataaaataaacattatgtttacatatatcccacatgagtcattcacgcctaaaggttttctaaatactgtgtgtggcactagaaacttcatgctgtatcaagtcagtgtcagtattaagctactggactctataatgaaatattatagatagacatttactgaaaaccaatataaaaatctggcccagaaagaccagaatggaaatatgcaattttcttgatttaagatggtcataagtatatggggttttttttctgtttttaaagctctacacatggtttaagacaggtatgtgtaagaagcctttttgtgtgtgctgactttatcatgacaactctagctgattctttatgaaggattagggatattcatcttcagcagtgcacatgagaaataaactctgaaaaaggcaatttctggggtttaggaaggaccgtattctgggaattacttcagaggaacggacaataattctaggattatagccaagaaggactggaagacttcaggagatgcttcagcttcttctagattttgaatgctgaataagccactgaagtgtgatatctatattatccttttctttgcaagaaattgaatagcagcaaatttctctatcctgaatagcagacagattcattttttcaattagctgtttctcatccaaggcattaggaagatctctcttgtttccaagcactagcactggaattccttgtaactgtggtttatctagaagattatgtagctcatttcgggaagcttctatcttttcacgatctgcagcatctatcatgtaaacaatagcattgactcctctgcaataccgctcccacatgcttcgaaatcggggttgtcctcctatgtcccagatctttattgtgacgttacctttagttaccttcctcatgttgaagcccactgtgggtatcatatcttcactgaattgacctgacgcgatgacattgacgaaggtggtcttgcccgagtactgcagccccacgagcgtcagctccatctcttccttccagaagagcgaacggaaccagtccagcaggcgggagatgagcgccagcatgatggcggccgggagcgagaacggacgggaggacggacgagcggcggcgtcgacgacttccacacgagcgggcctccgcccggaccctccaacggctccttggtgccccggcgcgacacgggcggacaccggcgggcggcaca

SEQ ID NO: 58916 - DNA, 1429 bp, Homo sapiens
ggcacgaggttgattcccaggagggccgcttttccggtctgggtccccgagaggactgccttgctcacctgtcccctcggcgcggccccggggagctcccgagaggcccccgggatcgctggccctccgaactccacagcaatgagcaagttgggcaagttctttaaagggggcggctcttctaagagccgagccgctcccagtccccaggaggccctggtccgacttcgggagactgaggagatgctgggcaagaaacaagagtacctggaaaatcgaatccagagagaaatcgccctggccaagaagcacggcacgcagaataagcgagctgcattacaggcactaaagagaaagaagaggttcgagaaacagctcactcagattgatggcacactttctaccattgagttccagagagaagccctggagaactcacacaccaacactgaggtgttgaggaacatgggctttgcagcaaaagcgatgaaatctgttcatgaaaacatggatctgaacaaaatagatgatttgatgcaagagatcacagagcaacaggatatcgcccaagaaatctcagaagcattttctcaacgggttggctttggtgatgactttgatgaggatgagttgatggcagaacttgaagaattggaacaggaggaattaaataagaagatgacaaatatccgccttccaaatgtgccttcctcttctctcccagcacagccaaatagaaaaccaggcatgtcgtccactgcacgtcgatcccgagcagcatcttcccagagggcagaagaagaggatgatgatatcaaacaattggcagcttgggctacctaaactaaaacacatttttgatacctaaattaatgagctatagataaaatataaaaaatgtttttaccaagttcagaagttaacaaagactctgctttataattatattgaatgaataattgtgttttaagcctcctaagtaaaagtaaaaaaggagtcatgtgcatacatagaatcagtgatggaggccaggcacggtatctcatgcctataatcccagcactttgggaggctgaggcagttgagaccaggagttcgagtccagcctgaccaacatgaagaaaccctgtctgtactaaaaatacaaaaattagccggacatggtggcaggcacctgtgatcccagctacttgggaggctgagtcaggagaattgcttgagcccaggagatggaggttgcagtgagccaagatcatgccactgcactccagactgggcaacagagggagactccgtctcaaaaactaaaaaaaaaaatacatttagtatagcggggggtgggggggagaaataatgttatttcctatgcgaatgacgtgtatccctgtacccatggtaaatgtaaatatactgtgtctcttttgggagg

SEQ ID NO: 58917 - DNA, 1811 bp, Homo sapiens
gaagcccagactatttattggtgatcaaacaaagaaacaggggaatattgtcctattatgattctcctgaagatgcctggaaaggttgcaaagggagcatacaaatggcagtctgtgaaattgaagttcattctgtagataatacatgcatggacctgataatccccggggaacagtatttctacctgaaggccagaagtgtgcctgaaagatagcggcggctggtggccctgggatcagccaaggcttgcctgactgacagtaggacccagaaggataaagagtttgctgaaaacactgaaaacttgaaaaccaaaatgtcagaactaagactctgctgtgacctccttgttcagcaagtagataaaacaaaagaagtgaccacaactggtgtgtccaattctgaggagggaattgatgtgggaactttgctgaaatcaacctgtaatacttttctgaagaccttggaagaatgcatgcagatcgcaaatgcagccttcacctctgagctgctctaccgcactccaccaggatcacctcagctggccatgctcaagtccagcaagatgaaacatcctattataccaattcataattcattggaaaggcaaatggagttgagcacttgtgaaaatggatctttaaatatggaaataaatggtgaggaagaaatcctaatgaaaaataagaattccttatatttgaaatctgcagagatagactgcagcatatcaagtgaggaaaatacagatgataatataacagtccaaggtgaaataaggaaggaagatggaatggaaaacctgaaaaatcatgacaataacttgactcagtctggatcagactcaagttgctctccggaatgcctctgggaggaaggcaaagaagttatcccaactttctttagtaccatgaacacaagctttagtgacattgaacttctggaagacagtggcattcccacagaagcattcttggcatcatgttatgctgtggttccagtattagacaaacttggccctacagtgtttgctcctgttaagatggatcttgttggaaatattaagaaagtaaatcagaagtatataaccaacaaagaagagtttaccactctccagaagatagtgctgcacgaagtggaggcggatgtagcccaggttaggaactcagcgactgaagccctcttgtggctgaagagaggtctcaaatttttgaagggatttttgacagaagtgaaaaatggggaaaaggatatccagacagccctgaataacgcatatggtaaaacattgcggcaacaccatggctgggtagttcgaggggtttttgcgttagctttaagggcaactccatcctatgaagattttgtggccgcgttaaccgtaaaggaaggtgaccaccggaaagaagctttcagtattgggatgcagagggacctcagcctttacctccctgccatgaagaagcagatggccatactggacgctttataagaggtccatgggctggaatctgatgaggttgtatgatggctgctgggcagcacctcctaacttcagggaataaagtgctaaagtgttttgttgccctacttaatttccagcaacagcctcaaccctctccaaccccttcacctggggggatggacaggaggtggcaaaacccagtgcttttataatttttaaaatgcatatgtgttttgtttaaagatcaaggtgctatatatttcagttcagcaggcctactggaaaccaaatgataagctgctgtagacttgaacagcaagttataagagcagatttaacaaacaa

SEQ ID NO: 58918 - DNA, 1464 bp, Homo sapiens
gatttcctcgcgttataacgaatcggcgtctaagggtttaagtgtcacttgacattactgctcccacgtgttctttcccatctggcggccgcggctcctgtccagaccctgaccctccctcccaaggctcaaccgtcccccaacaaccgccagccttgtactgatgtcggctgcgagagcctgtgcttaagtaagaatcaggccttattggagacattcaagcaaaggttggacaactacttttccagaacagaaaggaaactcatgcatcagaaaaggtttcagggatataatcagaaggtgactaataaaggtaccagaagaatatggctgcacaaataccagaatctgatcagataaaacagtttaaggaatttctggggacctacaataaacttacagagacctgctttttggactgtgttaaagacttcacaacaagagaagtaaaacctgaagagaccacctgttcagaacattgcttacagaaatatttaaaaatgacacaaagaatatccatgagatttcaggaatatcatattcagcagaatgaagccctggcagccaaagcaggactccttggccaaccacgatagagaagtcctgatggatgaacttttgatgaaagattgccaacagctgctttattggaaatgaggactcatctgatagaatcccctgaaagcagtagccaccatgttcaaccatctgtcatgactgtttggcaaatggaaaccgctggagaaacaaaattgctatttaccaggaataatcacaatagaaggtcttattgttcagtgaaataataagatgcaacatttgttgaggccttatgattcagcagcttggtcacttgattagaaaaataaaccattgtttcttcaattgtgactggttaattttaaagcaacttatgtgttcgatcatgtatgagatagaaaaatttttattactcaaagtaaaataaatggaaatatcactgagcagttgtttatactgtatggtaccatagtattctcactggactgtggatacgttgaaatgtttttcaatcaggatcatcctccaagcagtcctgttcattcatgtctgcctcaaattgctggtgaatacataaaatagttacttgctaatcatttcaatgcatgatccttttcttgcctcccttgtgtcagggtgggcattacatatacttttcttttttttttttttgaaaacggattttttttttccccccccaggaggaggggaaggggaaaattttaatttaattgaaccctccccttcccaagtaaagcaatttttgtgccccaaccccccaaggaggggggaataaaggggggggcccccctgccccggtaaattttggttttttaaaaaaaaggggggttaaacaaattggcccgggtgggtttaaaattttgaacctaaggggaccccccggcctaaccctccaaaagggta

SEQ ID NO: 58919 - DNA, 789 bp, Homo sapiens
cgagtggctgccccacaaaatgcctgcttctctgcggaatcctactgttcttcacatgctctctaataccatcttttcatatccactttctcttccatgttgaaaaattaaattgacaggctggattctgcaaagatctttggacatttaagtatcttcgaccggtgcgaaaagaggcggcctgaccttggaagtgggacggggtcctgcagcgggtccttccggcgggtgacattcagccggcggttcggggcgacggactctccattccagaaccatggcccaatttgtccgtaaccttgtggagaagaccccggcgctggtgaacgctgctgtgacttactcgaagcctcgattggccacattttggtactacgccaaggttgagctggttcctcccacccctgctgagatccctagagctattcagagcctgaaaaaaatagtcaatagtgctcagactggtagcttcaaacagctcacagttaaggaagctgtgctgaatggtttggtggccactgaggtgttgatgtggttttatgtcggagagattataggcaagcggggcatcattggctatgatgtttgaagaccaatctttaacatctgattatatttgatttattatttgagtgttgttggaccatgtgtgatcagactgctatctgaataaaataagatttgtcaaaactcagtgttttctccatcagatactccatgaaaggtcacaatttctcttgatattaagctgggttgtctttaaacaaccctaaatacacgtctgtttag

SEQ ID NO: 58920 - DNA, 979 bp, Homo sapiens
gggaccactacaggagggctttctcctcactgaaatcttgttcatctttaggatttctccagcacctcagttcgaattcccactccttatgtgcaagtggcactcttggctttccaattctgttttttatttaggtgactcaatcagtggctgaacttctgatcctgtggcccctttttgtagcttcagactgaaactggatgcctttgtagaacatattcacgcaaggattctgtatgaacagaaaaggatgcaataaaggaggattcctccaaaatgttttaattatatgtccatacaatatataaaatatatgcatcattttagctggataagaaaagcaagtcaaatgaaatgacacttctcgaaacttaagttaaataatcttgtaggaagaggtatattttgtcttttttaaattattttagcattctgtacactgaccaacgaggtaaaggaaaatgactgaaactctacaagtgaaagaacatttcacaattaaaatccacaatttgtatacatttatcttactcacatcgtcaggtgaaaaatcacccaacttattataaaaggaggacaaattgtatcacaaaagaagcaaaaattagaaaaaattcataaaaaaatatatccaactatgaaaagcgttgctctcttggtgtcttcacatccgtctcttctgtgtactgatgtacaacacattgtttcctcggataaatgcatccccatacttattcttcagttgtccatttacatattcttctgtctgctccagggctatattcatgtagccatccaggcaagccaggacccctcgataatccactccagaatttaattttaccacaactggtcgtccgatgatttgctttaagaagtcactaggggtttgcttccgaagactcattttaacaatcctcgccggcgggaaccagaaccctcactccaggcgccccacgagcccggccgccgcggatga

SEQ ID NO: 58921 - DNA, 790 bp, Homo sapiens
gctgttgagcgggggccgaccgacggccaggagtttcttttctgcgcttgtgcgttttctgttcggtttccttcccgctagcggggccacgagggttgctaggcaacagcccctgggtgacttggtcttagggtcctgtccggcttggggctgatgaaaggagctgtccgcgcccgggctcttccgagaagtggttgctgacagccacaaagtgaaagggagtgaggcggcgtggacgagtaaggagtgacagtgaggattcacatttgggttatttcaagatgagcttcctactgcccaagctgactagcaaaaaggaagtagaccaggcgataaaaagtactgctgagaaggtgttggttctcaggtttgggagagatgaagatcctgtctgtctgcagctagatgatattctttctaagacctcttctgacttaagtaaaatggctgctatatacctggtagatgtggaccaaactgcagtttatacacagtattttgacatcagttatattccatctactgtctttttcttcaatgggcagcatatgaaagtggattatggtggagaagatccagccctcagaagcataaaagctgtccgcagaaccagccctgcaggtactttaggagaaaagccagtcaactcctagtaataacaggtaacattgggagggttctgtgtgccaggcactgtgctatgtgctttctgtgtatttactcatttaattcttcaacagcccataagcattgggtctttttattatctaataatcccgttttttataaa

SEQ ID NO: 58922 - DNA, 6677 bp, Homo sapiens
ctcaggtggtcaggaacacttttggaagataaatctaaggaagagagtggtacttagcagctgtcattttcctttcaggctcctgtgacgtttgatgacatcactgtgtacttactccaggaggaatgggtgctgctgagccagcaacagaaggagctctgtggttccaacaagctggtggcaccactgggaccaactgttgccaatcctgagctgttccgcaagttcggacgagggccagagccatggcttggcagcgtccagggccagaggagccttctggagcatcacccaggaaaaaaacagatgggctacatgggagaaatggaggtgcaaggtcccaccagggagagtggacagtccctcccgcctcagaagaaagcctacctttcccacctcagtacaggcagtggacacatcgagggagactgggccggaagaaacaggaaacttctgaagccccggtccatccagaagtcgtggtttgtgcagtttccgtggctgatcatgaatgaggagcagacggctctgttctgctctgcttgccgagaatacccctccatcagggacaaacggtcaagactaatagaaggttatacaggaccattcaaggtggagactctcaaataccacgcgaagagcaaggcccacatgttctgtgtcaatgccttggcagcgagggaccccatctgggcagcccggttccggagcatcagagacccacctggagatgttctggccagcccggagccgctcttcactgcagattgccccatattctaccccccagggcctctgggaggatttgatagcatggctgagctcctgccaagttcaagagctgaactagaggaccctgggggggatggagcaattcctgcaatgtatctagactgcatttcagatttgaggcaaaaagaaatcactgatggcatccacagctcctcagacattaatattttatataatgatgcagtagaatcctgcattcaggacccttctgcagaggggctgtcggaggaggttcctgtggtgtttgaggagctgccggtggtgttcgaggatgtggcagtgtatttcacccgggaggagtggggcatgctagacaagcggcagaaggagctgtacagagacgtgatgcggatgaactacgagctgttggcatccttgggacctgctgctgccaagccagacttgatctccaaactggagcggagggctgcaccctggatcaaggacccaaatgggccaaagtgggggaaaggtcgtcctccagggaacaagaagatggtggcagtgagagaggcagacacacaggcctcggctgcagactccgcgttgcttccaggctctcccgtggaggcccgtgcctcctgctgcagttccagcatttgtgaggaaggagatggacctaggagaatcaagaggacatacaggccccgttccattcagaggtcatggtttgggcagttcccatggttagtaattgaccccaaagagaccaaactcttctgctcagcctgcatagaaagacctaatctccatgataaatcatctcggttagtcagaggttacacggggccttttaaagtggagactttaaaataccatgaagtcagcaaagcgcacaggctctgtgtcaacacggttgaaatcaaggaagacacccctcacactgccctcgttccagagatctccagcgacctcatggccaacatggagcactttttcaatgccgcctactccattgcataccactcaaggcccctgaatgactttgagaagatcctgcagctcctccaaagcacggggaccgtgatattaggcaagtaccgcaatcgcacggcgtgcactcagttcatcaagtacatctcagagaccctgaagagggagatcctggaggacgtgcggaactcgccctgtgtgagcgtgctgctggacagctccaccgacgcctccgagcaggcctgcgtggggatttacatccgctacttcaagcagatggaggtgaaagagtcctacatcactctggcccctctctacagtgagacagcagatgggtacttcgagaccatcgtttctgccctggatgagctggacatccccttccggaagcctggctgggtggtggggctggggacggatggctcagccatgttgagctgcagaggaggccttgtggaaaagttccaggaggtcatcccgcagctgctccctgtccactgcgtggcccaccggctgcacctggctgtggtggacgcctgcgggagcatcgatctggtgaagaagtgtgaccggcacatccgcaccgtcttcaagttttatcagtcctcaaacaagaggctgaacgagctgcaggaaggtgcggcgcctctggagcaggagatcatccgcctgaaggatctgaatgcggtccgctgggtggccagcaggaggcgcacgctgcacgcgctgctcgtgagctggcccgccctggccaggcacctccagagggtggcagaggctgggggccagattgggcaccgggccaaagggatgctgaagctcatgcgcggcttccactttgtcaagttctgccacttcctgttggacttcctgagcatctacaggcctctgtccgaggtgtgccagaaggagatcgtgctgattacagaggtgaacgccacgctgggccgcgcctacgtggcactggagagcctccgtcaccaggcagggcccaaagaggaagaattcaacgccagcttcaaggatgggcggctccacggcatctgcttggacaaactggaggtagcggaacagcggttccaggcggatagggagaggacagtcctgacggggattgagtacctccagcagaggtttgacgcagaccgacccccacagctgaagaacatggaggtgtttgacaccatggcctggccaagtgggattgaacttgccagttttgggaatgatgacattctcaacctggccaggtatttcgagtgctccctcccaacaggatacagtgaggaagctctgctggaggagtggctgggcctgaaaaccattgcccagcacctcccgttctccatgctttgcaaaaacgccctggcccagcactgccgcttccccctgctaagcaagctcatggccgtggtggtctgtgtgcccatctccacctcttgctgtgagcgggggttcaaggccatgaaccgaatcaggaccgatgagaggaccaagctctccaacgaggtgctcaacatgctcatgatgacagctgtgaacggtgtggccgtcacggagtacgacccccagcccgccatccagcactggtacctgacctcctcaggccggcgtttcagccatgtctacacctgtgcccaggtgccagcccgctcccctgcaagcgccaggctcaggaaggaggagatgggagccctctatgtggaggagcccaggacccagaagccacccatcctgccctccagggaagcagcggaggttctgaaggactgcatcatggagcctcccgagagactcctgtatccccacaccagccaggaggcccccgggatgtcctgagggacagggagtccttgggactgccttggagacgcctctgtgatcactgggacaggctctgcagattctaggctgccctaggatcttctgctggtggcgatggtctctaagcaccaggaagtgggcagtggcatcccagagcagcaggggtatcaggaggtgcatgacctgtttcctgaggccccactcagcacagccatgcctcacagcacacaaatgtgccagaaggttctatatctcaagttcatttttaaggtgctgcagaaaataaccccatcatgaaaggtttcagcccctgagttttggtggcaagaggagtgtcctggtaggggagactgttggacatccctggggaatgttccagggaggctgcccacagtctaagtgggaatgggaaagaccaccttgttagagggggaggttgcccctgctctagggacagctggcctggctgcaagagcccccagaggcattgttctgggacttcctaccctggctcccacagcagaagcagtgaggccgtggtctcgtgcggaactctacctcttcccagggcttcctttagggcgaaacaatcacaagccctttgcacagagcacccaagaaagttctcttcctgcagctccagatggtggagctgggctcttctggcagggggtctggtgcttcccggagagccgagccgcgtttaacccgtggcatgcccggcccggtttacccaggagaggatgggacgaagttggagttgggaggcttgggatgcagccccagctctgctgcaggcagtggtctgattaatcccttcctctttgtgcctcagtttccctctccatgaagtggcagcagagatccaagtgcctgctgactccccatctgccctaggattagtgaatgagagcctcgagctccctgaaagacctctggctgcagtgtggacttagctgccatctgccccatcctcgtccttagtgggacaggtaggaatttgtctccaaagtccttgttgtaggagttgctctctgaatgcaccatctgcacgacaggctagtccactcttctctgagctgccctggggactctgcaccaggatctccagggcccactgagacatccccgaatgggcgctcagtgacaagggctttgaacaacctcctccagggactttgggcctgctctagcttcagaaccacagaaccaccgccctagaggcacagaggggcttctggcactgctaggttcacaccctcctcgcccatcttccttccacctaaagtgaagcacttttccttccaagggcagctccgtcttggcaggctcaggaggccgcttatcaggaggaggatgattttgtctaggttctgccttccttaaccatgggcaggaaatgaggcaagtcagcaggcagggtttctctgccctgcctgatacttgttttaaacaggcaggaagtgggcgccatccatcccagcttgcttgctgcctggctcaggcaggtcctgtgctgtgctgcaggcccctgtgggtgggccctttctccatagtctgccgcttcccattcccagggtagatgctggcatctgagcacctgagtacccttcctattcccagggtagaagctgctgtctgagtacccttcccattcccagggtagatgctggcgtccgagcccctccccggtaccgcaggtaccctggtaccccacctgccctttcatccccaccccagtacttagccttagcactgttgctttcgtgtcattttcagttctagtcaggaattcctttcttgctttctgcctttgacctgtggaaatgtctcccagccctgtgggtctggcggtcagagggaccccacaggcctgtggtgcgggagctctgggaggtgttactatctgcgtggctaaggcacacacaggcctccttctccccatcaccgtctccatgggcgttcaggaacttgcccaggtcaggcactgtggatgtgaactcgtggaaagggagggagaaaggcttttttaggtggggctatagcctctgccctacccacagggattccacatcaaggtgctgttccagcacacatgcttcctgcggcctcttcatccttgaagaatccctcagagcaggaggccatcctgtgagcagccgtgagtgggtctctgtgggagtagttctggagctgaggtggaagctaggggaagcaactcgccctctccacgtcagcatcagcgtgctccgaggacaccggccagtgccttccttaggtggtgggaaaggggggtccctgtgcagcggggccactgagaatgctgtttgtcataaaatttgcactacccgatttctcaaggggcacaggcctgctccgttcccctttgtcagccaatggccaagaaggaagaagatgactgccatcttattcctgaacttcctcattcgggacccccgtggaaacacagtgagcatccttatcagaggccctggcccaggctggcccctttgctttgtttggagaggctggctgagtttcagcccctagtgctggagacccccttgttggagaggcttcctgtttatgcctcacaagaagaaaaaccacagggctctgggaggggaagaagcatgcactcccgctttggctggagtcccagcgcttgtcgccaccctcctccttgcctgtagtcttgacagcatccgtatgtacgtgtcctggcatttcccctccctctccctgatgactgatacccaccgggtctgacattccaagtaaccagtatgtaactggtagtttgatcccaatagccatagcgactccaggtgggagtgaggggagcccagccccctgtcctggaagataccttagagtatgtgaccgcgctccagacccttgcttctctctcctgcagaggatgagtttctagggtgctaagtacctatcagaacagtgtggaggggcgggtccctcatacaggtgtgtgcttagccaaatacagtaactgtgactggcccagggatgttctctcctctattttcaaagatgaaaggaggttttaaaaaccatgtttgattcctaaccttttgctacctgaataaagcagagtctatttcaacacaaaa

SEQ ID NO: 58923 - DNA, 1340 bp, Homo sapiens
actgcttgttccggcagtggaagagacgcgccggcgttggccgctgctgctagcagcttgaaccccagggtcgggaccgatgtcggcttgggctgctgccagcctaagcagggccgctgcccgatgcttgctggcacgaggccccggggtcagggcggctcctccgcgcgacccccggccctcccaccccgagccccggggctgcggtgccgctccgggcaggacgctgcactttaccgcggctgtccccgccgggcacaacaagtggtccaaagtcaggcacatcaagggtccgaaggacgtcgaaaggagtcgcatcttctccaaactctgtttgaacatccgcctggcagtgaaagaaggaggccccaaccctgagcacaacagcaacctggccaatatcttagaggtgtgtcgcagcaaacatatgcccaagtcaacgattgagacagcactgaaaatggagaaatccaaggacacttatttgctgtatgagggtcgaggccctggtggctcttctctgctcatcgaggcattatctaacagtagccacaagtgccaagcagacattagacatatcctgaataagaatggaggagtgatggctgtaggagctcgtcactcttttgacaaaaagggggtgattgtggttgaagtggaggacagagagaagaaggctgtgaacctagagcgtgccctggagatggcaatcgaagcaggagctgaggatgtcaaggaaactgaagatgaagaagaaaggaacgtttttaaatttatttgtgatgcctcttcactgcaccaagtgaggaagaagctggactccctgggcctgtgttctgtgtcctgtgcactagagttcatccccaactcaaaggtgcagctggctgagcccgacctggaacaggccgcacatctcattcaggctctcagcaaccacgaggatgtgattcacgtctatgataacattgaataaccaggctacatgtgcccccgggttccttcctagaaatgtggcagcccattccagcacacaggcttctgcagcaatctctgagggtaaagccggtgggaggctcagcaggccaggaggcccaaggacaggacttgcgaccttgaagccaaaggaatctcacttgtggggcctccttgtcagctctgctgctgtctcagagccatctggatgagtgtcccgacaccctctcggatgcagggcaggaccacccagctggtcagactctgatgttgggtagctggcctctgtggggattgtaagtgccctgaggcgctctgtactaaaaactgctcttaataataacggtgattattggttgctgcaaaaa

SEQ ID NO: 58924 - DNA, 2435 bp, Homo sapiens
ctgcaatggcggctctagactccctgtcgctcttcactagcctcggcctgagcgagcagaaggcccgcgagacgctcaagaactcggctctgagcgcgcagctgcgcgaggccgctactcaggctcagcagaccctgggttccaccattgacaaagctaccgggatcctgttatatggcttggcctcccgactcagggatacccggcgtctctccttccttgtaagctacatagccagtaagaagatccacactgagccccagctaagcgctgcccttgagtatgtgcggagtcaccccttggaccccatcgacactgtggacttcgagcgggaatgtggcgtgggtgtcattgtgaccccagagcagattgaggaggctgtggaggctgctattaacaggcaccggccccagctcctggcggaacgttaccatttcaacatggggctgctgatgggagaggctcgggctgtgctgaagtgggcagatggcaaaatgatcaagaatgaagtggacatgcaggtcctccaccttctgggccccaagttggaggctgatctggagaagaagttcaaggtggcaaaagctcggctagaagaaacagaccggaggacggcaaaggatgtggtggagaatggcgagactgctgaccagaccctgtctctgatggagcagctccggggggaggcccttaagttccacaagcctggtgagaactacaagaccccaggctatgtggtcactccacacaccatgaatctactaaagcagcacctggagattactggtgggcaggtacgtacccggttcccgccagaacccaatggaatcctgcatattggacatgccaaagccatcaatttcaactttggctatgccaaggccaacaatggcatctgttttctgcgttttgatgacaccaaccctgagaaggaggaagcaaagttcttcacggccatctgtgacatggtagcctggctaggctacacaccttacaaagtcacatatgcgtctgactattttgaccagctatatgcgtgggctgtggagctcatccgcaggggtctggcttatgtgtgccaccagcgaggagaggagctcaaaggccataatactctgccttcaccctggagagaccgtcccatggaggagtcactgctgctctttgaggcaatgcgcaagggcaagttttcagagggcgaggccacactacggatgaagctggtgatggaggatggcaagatggaccctgtagcctatcgagtcaagtatacaccacaccaccgcacaggggacaaatggtgcatctatcccacctacgactacacacactgcctctgtgactccatcgagcacatcactcactcactctgcaccaaggaattccaggcccgacgctcttcctacttctggctttgcaatgcactggacgtctattgccctgtgcagtgggagtatggccgcctcaacctgcactatgctgttgtctctaagaggaagatcctccagcttgtagcaactggtgctgtgcgggactgggatgacccacggctctttacactcacggccctgcgacggcggggcttcccacctgaggccatcaacaacttctgtgcccgggtgggagtgactgtggcacaaaccacaatggagccacatcttctagaagcctgtgtgcgtgatgtgctgaatgacacagccccacgagccatggctgtgctggagtcactacgggtcatcatcaccaactttcctgctgccaagtccttggacatccaggtgcccaacttcccagctgatgagaccaaaggcttccatcaggttccctttgcacccattgtcttcattgagaggactgacttcaaggaggagccagagccaggatttaagcgcctggcttggggccagcctgtgggcctgaggcatacaggctacgtcattgagctgcagcatgttgtcaagggccccagtggttgtgtagagagtctggaggtgacctgcagacgggcagatgctggagagaagccaaaggcctttattcactgggtgtcacagcctttgatgtgtgaggttcgcctctatgagcgactattccagcacaagaaccctgaagatcctactgaggtgcctggtggatttttaagtgacctgaacctggcatcactacacgtggtggatgcagcattagtggactgctctgtggccctggcaaaacccttcgacaagttccagtttgagcgtcttggatatttctccgtggatccagacagccatcagggaaagcttgtctttaaccgaactgtcacactgaaggaagacccaggaaaggtgtgagctggaagcactgaacctacctcatcctcctggagggtgtggctaccctcgccaccccaaattccatgtcaataaagaacagctaaattctcaaaaaaaaaa

SEQ ID NO: 58925 - DNA, 2819 bp, Homo sapiens
agccggcagaggagctagggagtgtggcactgagccggctcaggcagagacgcggcaccatggctagcaagaaagtctgcattgtaggctccgggaactggggctcagccatcgccaagatcgtgggtggcaatgcagcccagctggcacagtttgacccacgggtgaccatgtgggtatttgaggaagacattggaggcaaaaagctgactgagatcatcaacacgcagcatgagaatgtcaaatacctgccagggcacaagttgcccccaaatgtggtggctgtcccagatgtggtccaggctgcagaggatgctgacatcctgatctttgtggtgccccatcagttcatcggcaagatctgtgaccagctcaagggccatctgaaggcaaacgccactggcatatctcttattaagggggtagacgagggccccaatgggctgaagctcatctcggaagtgattggggagcgcctcggcatccccatgagtgtgctgatgggggccaacattgccagcgaggtggctgatgagaagttctgtgagacaaccattggctgcaaggacccggcccagggacaactcctgaaagagctgatgcagacaccaaacttccgtatcacagtggtgcaagaggtggacacagtagagatctgtggagccttaaagaatgtagtggccgtgggggctggcttctgtgatggcctgggctttggcgacaacaccaaggcggcagtgatccggctgggactcatggagatgatagccttcgccaagctcttctgcagtggccctgtgtcctctgccaccttcttggagagctgtggtgttgctgacctgatcactacctgctatggagggcggaaccggaaagtggctgaggcctttgcgcgtacaggaaagtccattgagcagctggagaaagagttgctgaatgggcagaaactgcaggggcccgagacagcccgggagctatacagcatcctccagcacaagggcctggtagacaagtttcccttgttcatggctgtgtacaaggtgtgctacgagggccagccagtgggtgaattcatccactgcctgcagaatcatccagaacatatgtgagtggggccagggcccaggccaggccgcttttttaccccagtggagaccagcagaagcctggggtacctagtcaccaggatctccaggactcccagggagcagagtcttctcatcttttcactggaggacaggaggctatggggcccagctacgcacctggagatcctgaactgtcaagccactggcagcctcatgccaccacatttgccagaaatgcagttgccctgtccctctccagatgtggggctttctccatatcctctgggaggggtggaatcaagccccagtgcttgcctgctttggtggcgggggtgatgtatgtggagaagggttgggggagaggccggtagggcaggggctgctagtggctgtctcacatacaccagtaatcctgttaaagggctgaagaagtatcttagccacaggagcgatgaggcaaggattgtcagggaggggtctgggcttctgagctgatgcaggccccaaggacccctttgctgacctctgccaggacccacacagcttcgatggatctcagtgtttgttaacaaaatacaaagatctcaaacaaaccccttttagcttctcctagcaacatctgtgtcctcagaaacctctggttctcccccttccccctcccccaggctgccctggcacccaaattgctgccatgctggcatctgtagctcggtggcttgacattctccccagggacttcccggttcctagttctttgccagctcctccccactctgtgcgacctttccaagccttccctcaccctccccgccagcaccctctttggggagcaggaacttaatctgctgacagagctacacctttcataacaggctcagatcactcagctccctgtgacctttgtattcacccaggcttccttctcagtagctctagctgggggaggtgtcagctgggcccctcctgtgctatctccccagaggacatccctgactccacccctttcttcctcccaaactctgcacctcttcctcagctgctccagaccggccagggtaaccagctaaccatgcctggcatctggaagccagcaggccagagggtggcccaaaggctgatgaacggtagggaagggtgagcagattcctatgttggtgggcaccaatattccaagggcagctctctttgctgaatgagggccttctcgtgaggtactgacaacaccagcaactcgagagctgggaaactcaaggaggaggaagaaaatcaaaaccaccctactccctggggtgaggaaagaacaggaggggaggaggaggagtgtgctctgcacttgccttgctccaggatggggtggcagcagaggaatgtcacaggtcagcagcctaggcctccagctataaatagtccggagggcccgagaggctcccgcccgtccagcagggctgtcagcttcctgtgtggcagcacctggcacactggctctggccagcattatgctaaaaccctgttactctccaatgaaccagggaggcgggctcctctctgcgcctatcccttgagaattctgtcttaccagtgaagggtggggctgcccagatcaggcagcaggagtgaggggcacagtcaccccaggccttgctgagcccaggtctgggtactgagtgtccagagctgcctccccaggaggttaaggtgggggcaaaggggaagcttcaagcactttggcct

SEQ ID NO: 58926 - DNA, 690 bp, Homo sapiens
ttttttttttttgcattttggttatttttagttaaagaaaaacagctttctccaagggcgacaaagtgaactgaaggtcagaaggaagctgggtgcgggcttcctgcaagctcttgctccaaaacctggaagtgaggagagggcgctccggagctctggggaaggttggtgcacacaggggttccgttggtgggggagaagagccgccagcccacacacggtcactggattggtgtgagtgggttccaagcgactgccatgtgctagtccactgacatgattgacattaacattcttggggggcattaaattaaggaatgacacagggagccaagagagtggcttattcggttggattctgaatcacaatcaggaaatagtctttatctggtgcaaccataatttcatttttcttggagcgaattcgaaggaaggtgagatcgttctgggggtcgatgtcacgcacggtgctccgtgccttcaggatgaagctgtgcatgaggctggcatactgggtggtggtggggttgtccatggtgctcttgatgggaatgccttctgtgttcacgacgatgattccctgcactcccttctggctctgcagtcgcttcagtgtctcctccacctctgccatttccgaccgatccggtagccccgcgtagcgaacacttagcgagtcctgctcgtgcc

SEQ ID NO: 58927 - DNA, 1775 bp, Homo sapiens
gtccgggtccgctgcctggcgctgcgggcggcgggccatggtggtttggattgagccgggcccggccggggcgccgagtcggagggggtggcagtgagcggcggcagaggctacggggctcggtttggctgactggggagtcggcaggcggcaggaaccatgcgaggccagcggagcctgctgctgggcccggcccgcctctgcctccgcctccttctgctgctgggttacaggcgccgctgtccacctctactccggggtctagtacagcgctggcgctacggcaaggtctgcctgcgctccctgctctacaactcctttgggggcagtgacaccgctgttgatgctgcctttgagcctgtctactggctggtagacaacgtgatccgctggtttggagtggtgttcgtggtcctggtgatcgtgctgacaggctccattgtagctatcgcctacctgtgtgtcctgcctctcatcctccgaacctactcagtgccacgactctgctggcatttcttctatagccactggaatctgatcctgattgtcttccactactaccaggccatcaccactccgcctgggtacccaccccagggcaggaatgatatcgccaccgtctccatctgtaagaagtgcatttaccccaagccagcccgaacacaccactgcagcatctgcaacaggtgtgtgctgaagatggatcaccactgcccctggctaaacaattgtgtgggccactataaccatcggtacttcttctctttctgctttttcatgactctgggctgtgtctactgcagctatggaagttgggaccttttccgggaggcttatgctgccattgagaaaatgaaacagctcgacaagaacaaactacaggcggttgccaaccagacttatcaccagaccccaccacccaccttctcctttcgagaaaggatgactcacaagagtcttgtctacctctggttcctgtgcagttctgtggcacttgccctgggtgccctaactgtatggcatgctgttctcatcagtcgaggtgagactagcatcgaaaggcacatcaacaagaaggagagacgtcggctacaggccaagggcagagtatttaggaatccttacaactacggctgcttggacaactggaaggtattcctgggtgtggatacaggaaggcactggcttactcgggtgctcttaccttctagtcacttgccccatgggaatggaatgagctgggagccccctccctgggtgactgctcactcagcctctgtgatggcagtgtgagctggactgtgtcagccacgactcgagcactcattctgctccctatgttatttcaagggcctccaagggcagcttttctcagaatccttgatcaaaaagagccagtgggcctgccttagggtaccatgcaggacaattcaaggaccagcctttttaccactgcagaagaaagacacaatgtggagaaatcttaggactgacatccctttactcaggcaaacagaagttccaaccccagactaggggtcaggcagctagctacctaccttgcccagtgctgacccggacctcctccaggatacagcactggagttggccaccacctcttctacttgctgtctgaaaaaacacctgactagtacagctgagatcttggcttctcaacagggcaaagataccaggcctgctgctgaggtcactgccacttctcacatgctgcttaagggagcacaaataaaggtattcgatttttaaaaaaaaaa

SEQ ID NO: 58928 - DNA, 1106 bp, Homo sapiens
ggcacgagggctgccacggcatggagaatggctccgcttctgttgcagctggcggtgctcggcgcggcgctggcggccgcagccctcgtactgatttccatcgttgcatttacaactgctacaaaaatgccagcactccatcgacatgaagaagagaaattcttcttaaatgccaaaggccagaaagaaactttacccagcatatgggactcacctaccaaacaactttctgtcgttgtgccttcatacaatgaagaaaaacggttgcctgtgatgatggatgaagctctgagctatctagagaagagacagaaacgagatcctgcgttcacttatgaagtgatagtagttgatgatggcagtaaagatcagacctcaaaggtagcttttaaatattgccagaaatatggaagtgacaaagtacgtgtgataaccctggtgaagaatcgtggaaaaggtggagcgattagaatgggtatattcagttctcgaggagaaaagatccttatggcagatgctgatggagccacaaagtttccagatgttgagaaattagaaaaggggctaaatgatctacagccttggcctaatcaaatggctatagcatgtggatctcgagctcatttagaaaaagaatcaattgctcagcgttcttacttccgtactcttctcatgtatgggttccactttctggtgtggttcctttgtgtcaaaggaatcagggacacacagtgtgggttcaaattatttactcgagaagcagcttcacggacgttttcatctctacacgttgaacgatgggcatttgatgtagaactactgtacatagcacagttctttaaaattccaatagcagaaattgctgtcaactggacagaaattgaaggttctaaattagttccattctggagctggctacaaatgggtaaagacctactttttatacgacttcgatatttgactggtgcctggaggcttgagcaaactcggaaaatgaattaggttgtttgcagtcttcagttgtgttcttatgcttcagtgtcacatttcatttcatttgaaactaaaattttaagtaaagctgaaataaacttctaaaaaaaaaa

SEQ ID NO: 58929 - DNA, 2075 bp, Homo sapiens
tttcaagccgactgtgtggcagctgagaggagttttgcacgtggatcgccgttcgggtgggcgagatggagacagcccccaagccgggcaaggatgtcccgcccaagaaagacaaacttcagaccaagagaaagaaaccgcggcgatactgggaggaagagaccgttccgaccacagccggagcctctccagggcctcctcgtaacaagaagaatcgggagctccgtcctcagagaccaaaaaatgcttacatcttaaagaagtctcggatctctaagaagcctcaggtcccgaagaaaccccgagaatggaagaacccggagtcccagcgcggcttgtccggggcccaagatccattcccaggccccgcccccgtccctgtggaagtggtccagaagttctgtcgcattgacaaatcccgaaagctaccacattctaaagccaaaactcgaagccgacttgaggtggctgaagctgaggaagaggaaacaagtatcaaagctgctcgttctgagctgctgcttgctgaagaacctgggtttctggaaggggaggatggggaagacacagcaaagatatgccaggctgacattgtggaggctgtggacattgcaagtgcagccaagcactttgacttgaatctgcggcagtttggaccctacagactaaactactctcgaactggaagacacctggcttttggagggcgccgaggtcatgtggctgcccttgattgggtaacaaagaagcttatgtgcgagatcaacgtcatggaggcggtgcgggacatccggtttctccattctgaggcactgcttgctgttgctcagaaccgctggctccacatctatgacaatcagggcattgagctccactgtatccgccgctgtgaccgagtaacacggcttgagttcctgcccttccacttcctcctggctacagcttcagaaacagggtttctaacctacctggatgtgtcagtggggaagattgtggcagctctgaatgctcgagctgggcggctcgatgttatgagtcagaacccttacaatgccgtcatccatctcggacacagcaatggtactgtgtctttatggagtccagctatgaaggagccactggcaaagattctctgtcatcgtggtggggtccgggctgtggcagtagattctacaggcacgtacatggccacctctggcctagaccaccagctgaagatctttgacttgcgagggacgtaccagcctctgagcactcggaccctgccccatggagcagggcacctggccttctcccagaggggactgctggtggcgggaatgggtgacgttgtcaacatctgggcagggcagggcaaggccagcccaccctcccttgaacagccctacctcacccaccggctctcaggccctgtgcatggccttcagttctgcccctttgaagatgtgctgggggtggggcacactgggggcatcaccagcatgctggtccctggggccggtgagcccaacttcgatggcctggagagtaatccatacagaagccggaagcagcgccaggagtgggaggtgaaggccctgctagagaaggtacctgcagagcttatttgtctggacccacgagccctggccgaggtggatgtcatctccctggagcagggaaagaaggagcagatagagaggctgggctatgacccgcaggctaaggctcccttccagccaaagccaaagcagaagggccgcagctccacggcaagcctggtgaagaggaagaggaaggtcatggatgaggaacacagggacaaggtccggcagagccttcagcagcagcatcataaggaggcgaaggccaagcccacgggggcccggccatctgccctggacagatttgtgcgctgagccagactccagggttgcctgggaacagtctctccccaagatcacctgtagggaaatgagtgttccctggaacaaggaggtgggggcagtgtggccccttccccaactgggggtggacagctgtctcctggggtgggttggtattaaagaggaaagcgattttttggaaaaaaaaaa

SEQ ID NO: 58930 - DNA, 1489 bp, Homo sapiens
gcggccgctcctaccaccctgggcagccgagcagagtcgtccccagcgggtctccctccctgcctccctgactttgcaacaccgcgttccgggaggaccggcctcggcgagggaggaggcgggggagctgcgaacacccagacccaaaccctgacatgctctggggcggagaggaggaagccaggagctgagcgcagccgcgtgtggctgcttcgccctccggctccgagcgccgggctccgggcgccctgcccttgcgcctggggcagcagcctttgctggtcttgggggcgccccccgcttcccgccccgggggtccgcggccggcaggaccatgctgctgaaagagtaccggatctgcatgccgctcaccgtagacgagtacaaaattggacagctgtacatgatcagcaaacacagccatgaacagagtgaccggggagaaggggtggaggtcgtccagaatgagccctttgaggaccctcaccatggcaatgggcagttcaccgagaagcgggtgtatctcaacagcaaactgcctagttgggctagagctgttgtccccaaaatattttatgtgacagagaaggcttggaactattatccctacacaattacagaatacacatgttcctttctgccgaaattctccattcatatagaaaccaagtatgaggacaacaaaggaagcaatgacaccattttcgacaatgaagccaaagacgtggagagagaagtttgctttattgatattgcctgcgatgaaattccagagcgctactacaaagaatctgaggatcctaagcacttcaagtcagagaagacaggacggggacagttgagggaaggctggagagatagtcatcagcctatcatgtgctcctacaagctggtgactgtgaagtttgaggtctgggggcttcagaccagagtggaacaatttgtacacaaggtggtccgagacattctgctgattggacatagacaggcttttgcatgggttgatgagtggtatgatatgacaatggatgatgttcgggaatacgagaaaaacatgcatgaacaaaccaacataaaagtttgcaatcagcattcctcccctgtggatgacatagagagtcatgcccaaacaagtacatgacaatggatgaagtccgagaatttgaacgagccactcaggaagccaccaacaagaaaatcggcattttcccacctgcaatttctatctccagcatccccctgctgccttcttccgtccgcagtgcgccttctagtgctccatccacccctctctccacagacgcacccgaatttctgtccgttcccaaagatcggccccggaaaaagtctgccccagaaactctcacacttccagaccctgagaaaaaagccaccctgaatttacccggcatgcactcttcagataagccatgtcggcccaaatctgagtaactttatataaatatctcatggggttttatattttcaa

SEQ ID NO: 58931 - DNA, 949 bp, Homo sapiens; identical to SEQ ID NO: 58766

SEQ ID NO: 58932 - DNA, 1363 bp, Homo sapiens
ttttttttttttggtggcaagtgagatttatttaaacaacgacatgtcaacaggaacaggaagaggaacatgtgcgaccactgtagtgaccaaggcttctcaagagtgtgggatgagacctgcggacgaggcccgcccaccgctcagggagcttgcaggtctcctccaggagggcaagtggcttcggcttctggctcggcataagccttcgacagattaataagttatctccttcagcccaagctcatttcctcctttggttgcccagcaaaggcagtaatgccgcatgagctgctccagcagctccatttcatccaggaattcaagtgattctatcctgctcacttcagctcgaggtaacctgttgtacaactccatcatgtcgacggccgatgctgtttcccacccattcgacaggagccgttctttctgtgactctaatgacttgcaggtctccactcccgccaggtcacactggcgtctccgcaggttttcaatcatgatctgcccaaaccgatcacccatgttcacctgttcgtagtttatgaacatggctctctcaaaactgttggctgcccacttcaggaggtttgcggactgctctggagtcatgtaaaccagcacacattcagctatcaggagtgttggcaattgtgtattcatgttacatttctttagcttctcttccagttcagacaggtctcggagatctgctccaataacggcatatctctttgaatccagtatgtgtccatccatctgaagtgtgtcctctgaatgcagttctagaatggggctggataggggaggcttgcatttgatactgtgcagctttctcgtgacaatcattggaaagtcaacctcaaaatatttacttgggagaagatcttcatcctttaatctccagaaggtggtatccatgcctgccccaaggttgacaatttgacaatgacattctgtcttccgtagaaatgcctttataagctgactgacaccatggactcgagcaaaatatcctctgttgatttcaggggctttcctctctttagacagtctcacaaagtgctgtatgtaagggtcatgccagtagccaatgcttactgcaaacctcttgcacagggaagcatcttcgcaggtgccgcgcacgccctcgtcgtctgcgtcgcagctcgaggtggaacagcaggaggtgatagaggattccctctgcctagtggccatgggcgtggaggttcctgggagctgtgtccgccagggacatggaagcggggtcgacgggcggcgggggacggcgcgagccacagggagaaagcaacagaagagggtagggccctacctggctcagctggcgcggctcagtgac

SEQ ID NO: 58933 - DNA, 2152 bp, Homo sapiens
tttcgtggagacctgtgtggccagaggggcggatccgcccccggggagggaggaagctctgcctggccagcgccggcgcaccccctccccgagagagagagagagagagaggctctttgtccgggccggagctgcagcggagggggcggggaggagactccgggcactactccagtgtggtcccctctggagggcggaggggatgaggagctgcgccctaatccttatgtccgctttccttacagatggtgggcagtggtggtgctggctgcgttcccctccctaggggcaggtggggagactcccgaagcccctccggagtcatggacccagctatggttcttccgatttgtggtgaatgctgctggctatgccagctttatggtacctggctacctcctggtgcagtacttcaggcggaagaactacctggagaccggtaggggcctctgctttcccctggtgaaagcttgtgtgtttggcaatgagcccaaggcctctgatgaggttcccctggcgccccgaacagaggcggcagagaccaccccgatgtggcaggccctgaagctgctcttctgtgccacagggctccaggtgtcttatctgacttggggtgtgctgcaggaaagagtgatgacccgcagctatggggccacagccacatcaccgggtgagcgctttacggactcgcagttcctggtgctaatgaaccgagtgctggcactgattgtggctggcctctcctgtgttctctgcaagcagccccggcatggggcacccatgtaccggtactcctttgccagcctgtccaatgtgcttagcagctggtgccaatacgaagctcttaagttcgtcagcttccccacccaggtgctggccaaggcctctaaggtgatccctgtcatgctgatgggaaagcttgtgtctcggcgcagctacgaacactgggagtacctgacagccaccctcatctccattggggtcagcatgtttctgctatccagcggaccagagccccgcagctccccagccaccacactctcaggcctcatcttactggcaggttatattgcttttgacagcttcacctcaaactggcaggatgccctgtttgcctataagatgtcatcggtgcagatgatgtttggggtcaatttcttctcctgcctcttcacagtgggctcactgctagaacagggggccctactggagggaacccgcttcatggggcgacacagtgagtttgctgcccatgccctgctactctccatctgctccgcatgtggccagctcttcatcttttacaccattgggcagtttggggctgccgtcttcaccatcatcatgaccctccgccaggcctttgccatccttctttcctgccttctctatggccacactgtcactgtggtgggagggctgggggtggctgtggtctttgctgccctcctgctcagagtctacgcgcggggccgtctaaagcaacggggaaagaaggctgtgcctgttgagtctcctgtgcagaaggtttgagggtggaaagggcctgaggggtgaagtgaaataggaccctcccaccatccccttctgctgtaacctctgagggagctggctgaaagggcaaaatgcaggtgttttctcagtatcacagaccagctctgcagcaggggattggggagcccaggaggcagccttcccttttgccttaagtcacccatcttccagtaagcagtttattctgagccccgggggtagacagtcctcagtgaggggttttggggagtttggggtcaagagagcataggtaggttccacagttactcttcccacaagttcccttaagtcttgccctagctgtgctctgccaccttccagactcactcccctctgcaaatacctgcatttcttaccctggtgagaaaagcacaagcggtgtaggctccaatgctgctttcccaggagggtgaagatggtgctgtgctgaggaaaggggatgcagagccctgcccagcaccaccacctcctatgctcctggatccctaggctctgttccatgagcctgttgcaggttttggtactttagaaatgtaactttttgctcttataactttattttattaaattaaattactgcagtggaaaaaaaaaaaaa

SEQ ID NO: 58934 - DNA, 1749 bp, Homo sapiens
ttttttttttttaaaaacttttaacaatttattagtcttattttccagtaaaatattcaaataatgtcaaaagaatgaaatgatagcgatatagccaactacctttaattaattccacataaatatttaaaatctaaaaacctcagatcagcagaccgagtcgaaatctgattcttcaaagcaagtattgctttacccttgtcctgaatgcagtccgtcatatgaccactaacttgcatgtgaccaaatgtttgcagagtgttttttagatatgctctcggtgagccgtcatccgtcaatccaagaagaagatgttgttgaactgcgttgcacaaagtttcttgacctcttcatttacttcaatcaggtttgcatttttttgattcaaaataacatagagctcccgccgatcagacttctttccaacaacccagtaatcactcatggccttcacaatgatctcctcatcttcatccactctggtaaagtcactgttgatgtcaccgagaatcttcattaaatccgggtgcacggaagtgagcgacacgctgggcgttttcctcatgtgaactgtgctcttctcggcgagattcatgtggttgaagtagataaacttaaactggggttctttctcagacccggacatcctcttgttgatgttaaactgttcacagatgtcagaggccagcactgtgagctggggcccaacgatgctgtccagtcttcggcaaaaatccaacgttgggtggacagaggcgtcgatcataaagcacacagccgcactcatggccttataaacgattaaatggagctcttcataagtgtcatctgtatttacaaaaattttggggaatctgcattttgcatctggatcattgaggttcaagggtccggtaagaaatcttccatagtgttgaagatttcctggcatttctgctcttattggagaatcccttcctgctaactcaggttcgatgtgccttgggaaaagggaggtggtaaggtatttgtataaaattctcatgtcatcttgttctaatccactccagatgagctgatcgttatagagaaaagcagtgtatttgactatattcaggctttcctccattctattaataaaggactggattttcaaataagtcattttatccaacgggaagaagctgattccaccaaaaatgtcaagtaggtcacatgactgcaaatgtagcgtttgcaaataccgatggaagaatttctctaatctttctttcagaagcttgacgcctccgtcttccatggctttcagaaatgtaccattaaaaagcttgtacatgctgtagcactgccgcagcaccgagctataaaccttgtccaacaactcctcctcttgatattcaataactggttttccatctttactctgtttttcaattataggattccgaacaaccatgaccatccagaaattttcttctggttcattgaagaactgtctgttcttctgtgtatgtaaagattttgcaggttttgatgggctaaatgtccttgtaaactgtacaatagcttcacacaatccgacatttctaatcttctcattcttttctacctcatttggatgataaaataaaatcttattttcctcctgtccttcgcgcggcccgaagcgcgggttgtagatgaagaaactcagcagcgccggcgggaactgcttctcctgggccgcccagggcccgctcccggccccggccgccgctgcgctgcagccat

SEQ ID NO: 58935 - DNA, 3928 bp, Homo sapiens
gggaccggcgctcagctggcggcgcgctcgccggccgaggtgggatcccgaggcctctccagtccgccgagggcgcaccaccggcccgtctcgcccgccgcgccggggaggtggagcacgagcgcacgtgttaggaacctagaaagattgtacaatgaatggtgattctcgtgctgcggtggtgacctcaccacccccgaccacagcccctcacaaggagaggtacttcgaccgagtagatgagaacaacccagagtacttgagggagaggaacatggcaccagaccttcgccaggacttcaacatgatggagcaaaagaagagggtgtccatgattctgcaaagccctgctttctgtgaagaattggaatcaatgatacaggagcaatttaagaaggggaagaaccccacaggcctattggcattacagcagattgcagattttatgaccacgaatgtaccaaatgtctacccagcagctccgcaaggagggatggctgccttaaacatgagtcttggtatggtgactcctgtgaacgatcttagaggatctgattctattgcgtatgacaaaggagagaagttattacggtgtaaattggcagcgttttatagactagcagatctctttgggtggtctcagcttatctacaatcatatcacaaccagagtgaactccgagcaggaacacttcctcattgtcccttttgggcttctttacagtgaagtgactgcatccagtttggttaagatcaatctacaaggagatatagtagatcgtggaagcactaatctgggagtgaatcaggccggcttcaccttacactctgcaatttatgctgcacgcccggacgtgaagtgcgtcgtgcacattcacaccccagcaggggctgcggtctctgcaatgaaatgtggcctcttgccaatctccccggaggcgctttcccttggagaagtggcttatcatgactaccatggcattctggttgatgaagaggaaaaagttttgattcagaaaaatctggggcctaaaagcaaggttcttattctccggaaccatgggctcgtgtcagttggagagagcgttgaggaggccttctattacatccataaccttgtggttgcctgtgagatccaggttcgaactctggccagtgcaggaggaccagacaacttagtcctgctgaatcctgagaagtacaaagccaagtcccgttccccagggtctccggtaggggaaggcactggatcgcctcccaagtggcagattggtgagcaggaatttgaagccctcatgcggatgctcgataatctgggctacagaactggctacccttatcgataccctgctctgagagagaagtctaaaaaatacagcgatgtggaggttcctgctagtgtcacaggttactcctttgctagtgacggtgattcgggcacttgctccccactcagacacagttttcagaagcagcagcgggagaagacaagatggctgaactctggccggggcgacgaagcttccgaggaatggcagaatggaagcagtcccaagtcgaagactaagtggactaaagaggatggacatagaacttccacctctgctgtccctaacctgtttgttccattgaacactaacccaaaagaggtccaggagatgaggaacaagatccgagagcagaatttacaggacattaagacggctggccctcagtcccaggttttgtgtggtgtactgatggacaggagcctcgtccagggagagctggtgacggcctccaaggccatctttgaaaaggagtaccagccccacgtcattgtgagcaccacgggccccaaccccttcaccacactcacagaccgtgagctggaggagtaccgcagggaggtggagaggaagcagaagggctctgaagagaatctggacgaggctagagaacagaaagaaaagagtcctccagaccagcctgcggtcccccacccgcctcccagcactcccatcaagctggaggaagaccttgtgccggagccgactactggagatgacagtgatgctgccacctttaagccaactctccccgatctgtcccctgatgaaccttcagaagcactcggcttcccaatgttagagaaggaggaggaagcccatagacccccaagccccactgaggcccctactgaggccagccccgagccagccccagacccagccccggtggctgaagaggctgccccctcagctgtcgaggagggggccgccgcggaccctggcagcgatgggtctccaggcaagtccccgtccaaaaagaagaagaagttccgtaccccgtcctttctgaagaagagcaagaagaagagtgactcctgaaagccctgcgctaacactgtcctgtccggagcgaccctggctctgccagcgtccccggccacgtctgtgctctgtccttgtgtaatggaatgcaaaaaagccaagccctccgcctagaggtcccctcacgtgaccagccccgtgtagccccgggctgacccagtgtgtgctcagcagccccaccccaccctgccccttgtcctctcagagcctcagcttctgggggagacatgctctccccacaggggggaggcactaagtcatggtcctggctggaaggtactgaaggcttctgcagctttggctgcacgtcaccctcctgagcctcacctttcctgccgtccctcctgttgtgaaatcaccacattctgtctctgcttggcttcccctccaccctaaagtctcaggtgacggactcagactcctggcttcatgtggcattctctctgctcagtgatctcacttaaatctatatacaaagccttggtcccgtgaaaacactcgtgtgcccaccagcggccttgaagaggcaggtctgggccagatgctgggcaggaaaccccagcggcagatgggcctgtgtgcacccaacgtgatgctatgcatgtctgaccgacgatccctcgaccagaatcagattcaggagctcagtttctttttcacttgggtctctggattcctgtcatagggaaggtatatcaggaggggaagaggcctttctagaattttctttgagcaggtttacaatttagcttacatttttcgactgtgaacgtgaataggctgctttttgctttcttctttccagaccccacagtagagcacttttcacttatttgggggaggcttcaggggactgttctcaccttaactcagccagaaagatgccctagttgtgatcaaaggtaactcgaggtggagggtagccctggggcccctcgacatcaccgtcattgatggagcctgaaccgtgtgctcctcggcagatgctgttgttgttacttccctccaagaggctggaaaagggctcagagctgctgagcaggaaccggagggtgacccatttcaggaggtgccggtaccagcctgactaggtacaggcaagcttgtgtgggcccaacaggcccttggtagagctggtgccagatgtgggctcagatcctgggcatgatgggccgagccacctcggatcccactgattggccagccgagcgagaaccaggctgctgcatggcactgaccgccgcttccagcttcctctgagccgcagggcctgctacgcgggcaagcgtgctgcctctcttctgtgtcgttttgttgccaaggcagaatgaaaagtccttaaccgtggactcttcctttatcccctcctttaccccacatatgcaatgacttttaattttcacttttgtagtttaatcctttgtattacaacatgaaatatagttgcatatatggacaccgacttgggaggacaggtcctgaatgtcctttctccagtgtaacatgttttactcacaaataaaattctttcagcaagttccttgtctaaaaaaaaaa

SEQ ID NO: 58936 - DNA, 3898 bp, Homo sapiens
ttagaacggccgccccttttttttttttttcttaaaaagaaatggtttaatttcatttttatctgggaaaaaaaccacaaatacgagtttaaaatgaaatgacaaatacattgacatgtcaagtgtcattttttatggtattatgcttattcaaggtgtgaagatacagaacctctttataaatttctggcatcaaagattcccaccgtagataaaaacaggttggttataaaatgtcaattcattaaatattcaatttttgttctttgtttttataaggaatattttgtagaaacagtataaaatagagtagacttttggaaattgaattataaaattttagaaaaaagtgttaagtcctaacttttctttgcgaaccaacaagagagtctagttttaccttggggagttacctgtgaagtgcattaggcggctagagctgtttcagagccctgggttctatacagtagaagcagccttctttagcacttagaatacgaccccagctttttccagttagcctcaatcagaaaagtttaacatacatgaatatttctatagtgcagtaaaagtgtcattttattaatttgcattatgaaaataagtctgtataccaagtaatgcataatgaatatgaatcatgtaaatttggtcacggtatttgaagttggctttggctctgaagtatttttgaattcatagaaaatattgagcttttaataaaataaataaaacattttaattgatattaataatcaagttcaaattttaatttttcatctgctactcaattttaaaagagaagtcactctcagtagtgttcccaagtgagcgattgcaccttctatgatgtgaaaaagttgctaaagatcctattgccattagccgttcttaagtgctgaacgtaactgagagaattgtttgcaatagacatgctctgtcactggcaggaagtccatcaataccctttgcaggggcactccagaccttgtgttttaccagaaactgaggcaaaccgtggtcctcatgtgcctttctgaagagctcctgcagcaggcccaggctacagtggccaagtctcacttgacagtaatggcattggatggtggctgcagaaggttactgatgtccccgtgggctttcacaggctatgcagatcgggggctgttctgcctagtactgaaaggaccaaggagctctggctgccctcaggaattccaaatgaccgaaggaacaaagcttcagggctctgggtggtgtctcccactattcaggaggtggtcggaggttccgcagcttcatttcgtccagtcctttccagtatttaaagttgttgtcaagatgctgcattaaatcaggcaggtctacaaaggcatcccaagcatcaaacatgtctgtgatgaagtaatcaatgaaagagatttgggatttggggatgctgcaggtatttctgtcaaacactggcatcaccacaggtaagccctgctgcttctcttcatcagtctgagaaaaatattcttccgaaatgcgtgcagcccactcgatgcagtactgcaggggtcggcagggattggacacatcagcacatttaatcagcattcgtttgattagggtccggttctctggagtcctaagcatagtgtttatcacttcctggtttttatcagtttccccattttcttctagtgttgccaagggtttgttgatgctgttgacaaatttgttgacatgctcaaagtgctttgtcatttctgtggctaagaccatgtcgataatcccctggcgcagtgtccgataatcattcctctccatgtttttaaatatattgcatttatcatctccagtggtcagctggaaggccaaggccgcatggtggctctccagcacagcagtgtcattgtacaaaatggccagctcacttccagcattacacaggaaggagttggttctcccagggtgatccacatcatgaatggtggctgcgatgagtgcagcgacctcatcaattggatctaaagtttcctttatcctctccttggagagaaaataggcagtggcatgaagcacatcagcagaatgtgtagaattgtggtagggattggaggaatgataattggcttcgataatttgtaaccatgatcttagcgttgactcggagcagtgtaagaattcacagattccaaagcgagcaaacattttgagaccaagataaatcaaaggcctattgtgggtggcagcctccagttcaaaaatatcaaagtcccagtattcctcattttccatggcccgagctatccgtggtgggacatcatcaagggagatgggagtgattatattgcttgaaaccatttgagtgttttttgttgaaagaacatattcattccctgatagtcttcgcaaaccatcagacattaagcccccaacaaggtcattggcatggggatcatcatctttagcaccaaactgtggtgaatataactcagtggttcttagaatttccagcacacggtctagggcttctgtcacaggcatgggactactttcctgggcagcattgataatattgattaccttggtgatgggcgcctcaattgtcatggaatgtatccgggccatggaagagtgtcgtctctggctggaaacttcagttgcacgggaggcaacagctttgacgtctagtgagccttttctcctgtctttatgtttgcctgtctgattatctgtatgagtgtcagactgaacacattcggatattttctcagccttattgttgccattgcacactctgataatggacacatagtgtctaatttttcctccctgtccaatgacaggtattatcttcacattttgttgtatattatctccgtttttctttttggcatagtaaattccttgccactccttgcctatcctgatgcatgaatttatagtatcgagcaagtcagcctttttttcatttataggcacttctcctaactccttccctattaattcacctgactgatagcccattgttgtttcaaatgcaggatttgcatactgtataaaacggtcttcgcttgtaatttcaattgcatcttcactgttttctaatgcagtgaatactgagttacaagccctgagtttcagttgtgatcgcacctctccaaactccagctggagcagttcattgtagcaggccatgatgttggggttttctacatacctccttgtaaatccagcagaaatgaaaggcattacggacaactcttctctatccaccctgcgtactacaccaacaataactgtgttttctgagagttttgatgatctgatagacctgcacagtgcctctgcatccagctgtcgaggatttctgtggtctatgatgataatgtcatgatgtttgtccaggaaacaggcaaggacagcctgagcctccttggtaactgtacacttaaaccctgctttttcacatgccctgcagaatccattacattggttatcttctttggtaaacactaaaagtacctgaagttgatcttgatgaaatctcatggggccaaactgcacatcagctactgctaccttcttgcccgctgccgttccgaaacccccgatctccaaagagcccggcgccgcgggtccggggcaaggcggccgtcttctggccctgcgggaggcgcggcccgccggacgacagcggcgggtgccgcggggctaggcgcgtcctcggccaccaggcgctcggaaatgtggatgctcggggcacagcccatgctggcggcggcgccgcggacacgctggcgggtagccgcgatccggtcagcaaacggcccacccggcgcctccgggccgccgcgggcgccgtgtcatcgccgcctggaagggcaggcggcgagcgcggatctcgcgt

SEQ ID NO: 58937 - DNA, 1663 bp, Homo sapiens
ggaacaccaatggcggggtacttgaagctggtgtgtgtttcctttcagcgtcaagggttccacactgttgggagtcgctgcaagaatcggacaggcgctgagcacctgtggctgacccgacatctcagggacccatttgtgaaggctgcgaaggtggagagttaccggtgtcgaagcgccttcaagctcctggaggtgaacgagaggcaccagattctgcggcccggccttcgggtgttagactgtggggcagctcctggggcctggagtcaggtggcggtgcagaaggtcaacgccgcaggcacagatcccagctctcctgttggcttcgtgcttggggtagatcttcttcacatattccccctggaaggagcaacttttctgtgccctgctgacgtgactgacccgagaacctcacagagaatcctcgaggtgcttcctggcaggagagcagatgtgattctgagcgacatggcgcccaatgccacagggttccgggacctcgatcatgacaggctcatcagcctgtgcctgacccttctcagcgtgaccccagacatcctgcaacctggggggacattcctttgtaaaacctgggctggaagtcaaagccgtcggttacagaggagactgacagaggaattccagaatgtaaggatcatcaaacctgaagccagcaggaaagagtcatcagaagtgtacttcttggccacacagtaccacggaaggaagggcactgtgaagcagtgaggatttcttgtgccattttcataatggtcattagctccttttaagctagaaacgtagcctgagctcctgaagagttcctgggagatttgagctgattttggagatggagcaggacaagtggggagtctctctctctctttctctctctctctttttaaccaaaaagagatgacaaaactaagttcaggggccatggaaaatgaaaaagtccgctatattgtgatttgggaagagaaagttatcaagagaaagaggtgaggatggaaggatggagaaaaacagactgtgggaaggatcagaaggaatccgccgaggcagggatgggtgtgcccatgtgtgccttgacgggacttcatcttatagactgttaaactgtcacacacaaacaggctttccacccctgctctgagagcaccacgcacagatttccagttcttagtgtggctgtttaaagtagaaaatctgggggctgggtgaggccactcatgcctgtaaacccagggctttagaaggctgaggctgggggattgcttgaagtcaggagttcaagaccaacctgggcaacatagcaacaccccccatgtctacaaaaatgaaaaaccaaaaagcaaaccaaaagaaaaatctgaaatttccatctggggattaacttctgtctttctggtgaacaatatagcaattcacgcattcttcaagcagcaaaagttcccggaacaattagggaagacgtatggtctgaatttatccaggcagtgggtctgctttggtttttgctggaaatttatatcagtgtctgggctcccaagaacataaatgtaattgccaaagcaagcagtgatgtggtgtgtttattttcttttactcatctaggaacttgacgcagctttatatttaataaaataatagagattgc

SEQ ID NO: 58938 - DNA, 2426 bp, Homo sapiens
ttttttggttttgaaatgcttggttaacattgacttgaacagtacagtgtggaggctctcatcacaagcagcacaggacatcctaacaagctttcgctgctgcctgacagcctctcaaacgtggagggagatgaaggcaaacagcgaagggaattccagggcagctgcaggtgggatggcagcacacagaatcccaaggtgggaacagcagtaggcgtcatggtgttatcgtgctgtggaaactaggctactggaatctatacttcaatccacattttctttactcatgaaggaaatacattgaaaaaactattacctctaccagttattcacgaaggaaacacttcggaagaattgattacctctaccacttatctatagtcttatcagaaaacttactatcaggtggttgttttgttacctatttttttcacttaaaagttgtgtaactccctttaatgatccaaaaattagagcggtacttgcatatgcagtgacagtttaaagggtaagtagttagcttgaatttccgaactagggatgaatgaaggtgttagctggctttgcttttaagaaacaaaatgtgacagtagagatttaaatgatggttttggaacaaacataaacacagggtaaagaggccaaaagaccaaagctaacagctattttagttcagcaacatgcatttcacggccactatgatatgtctggcactaattccatacatatccagcaattcctcggacttcccactctggggcactcccgacactgccagcgaatgaacctgaatgtcaggatccatggagacggctgcgcagacagcttccccgatgccaccttgcgggtagtgatcctccactgtaatgatccggccctctgtggcttttgcactggagacgatggtggcgacatccagaggtttaatggtaaacaggtcgatgacacggataaaaatatcttgtttcgaaagctcatcagcagctgctaaggcctcatacacagtaattccagctccaataactgtgaccttgtcactgacacagtggcggaggaccttggcctgtccgatctcaaagcgttcttgtggggtgtaaataaccatagtttctggtcgggtggtccgaatgaagcacatccccttggcattggctgccagagcaacagcatgctccgtggagacggcatcagttgggtagaagatcgtgcacttgggaatggttcggaacatggctatatcctccagggccatctgggaagcaccatcgtcaccaacagataccccacagtgggaaccaataatgttgatgttgctctcagcgaggcctcctatccggatgtgatcaaatgctcgagtcagaaaggcagcaaaggtgctagcaaaagcaatggtccgtccacgggaggcacagcccagagccacgctcaccatgttttgttcagccataaagcactcgatgaagcgctcagggtactccttgttgaatatctcagagaaagtagagtacctggtgtcaccatccagcacaacgactctgttgttcgcgtagcccagcttagccagagccagaccgcatgctttccgagtagctatcttgtcaccaactctgtaatcaggtggagaggtcatccttacatctgtgatgttgacttcaggtgagtcctcaatggggggctgtgggtcaagattcctgctggtctgtatctggctctcaattaatttgataatggcatctgctctttctctcggcattggctttgcatgccaactttctgcatcctcaatacttggggtgccccggcccttgaaggtcttggccaccacagcagtgggcttgtgcttcacctgagaagcctgccagaatacctggcacagtgcctccacgtcccggccgtccaccacataagtgttccacccaaaggcttcgcagcgcctctgatagatgtttatgcagtgctcggcgggcaatgcaccactgtgtcccaggcggttcacatcaaagattgccacaagattgtccagactgtagtaggaagcaaaggccattgcctcccagacagagccttctgaggactcgccatcactcatgaggcagaacacccggtagctggccctgtcgaagtacttgccagtatatgccattccacatgcaactcccagtccttgtccgagccatcctgttgccacatccacaaacgacagtctctttgcgaggacaaatcggtcgttgtccggattctctggatctgactgcttgtacctcatgatgtagaagaacagcacagacatgatctcagaagaactgctacatgatgtagggtggctgaaagacagacatgacactggtcatttctcacagcaactggcttcctagcacacgacctcggcacatggtctcctcatagaagcggtcatttctcccagc

SEQ ID NO: 58939 - DNA, 1820 bp, Homo sapiens
tttttttttttgttatttttatttttcaatataaatagagacagggtcttgctatgttgcccaggctggtctcgaacacctggccttgagcaatccttccacctcagcctcgggaagggctgagattacaggtgggagccactgcgcccagccagcagtttcagttacattatagagagagtttaatggcatttccacagttcaggaccagggaaagaaacacagaggctgcctggccctatgtgaaacttttgggggccgactccaggcctgagcctgctctgaggggatcagtcatgtccccgccttagtcccaggacctgagggagctctggattggtggcttggcccagagccaggtggatggcagtgttgaggggctggtgcttgagactggttggcagagtgggccctgtgctgaggatgggacatcttggtcacaggtcgcatgaggttcctgctgagaagggctaggggatgatcatccatcttcatgggtgtgttccggttgaggaaactcagtcccagaagtgagcttggaaagggcggctcagcccaatgctccggagctgaagtggtgctgggacgtggctcaagacccgagcttgctgcaggagcccattccccttctgtcagagggggtggtccgccaggagacagtcttgcatctggtccaggaagcagacagttcagtctgctcgggtgtccagggccacacagcctgggggtgtcagaggaactgggctccggtacttcaagtaggacaggtacgtgtcccagcccagcgtcaggccgttgatgtaggtgactcgaaattgggggggcacgaagaggaagttcacgaactgcgcagcaggccacacgcaccagtctgccttgtagaattcccagaacttctcccgcagctcctggcagctctcacccactgtctgaccctccaggcagccaaggcccaagaagtaccagacgcccagcaatggagaggctaccagctgatccacgaggaccttcttgaggacatttgggaagcctcggaggccagacgcagggaataggcggtccagcgacaagtaccagtagtgcaggaagggacccatgctgcagcccaccgcaaacatgctcgcggagcgccgtgaaaacactgagctcagttacacttgaattttacagtacagaagcactgggattttatgtgcctttttgtacctttttcagattggaattagttttctgtttaaggctttaatggtactgatttctgaaacgataagtaaaagacaaaatattttgtggtgggagcagtaagttaaaccatgatatgcttcaacacgcttttgttacattgcatttgcttttattaaaatacaaaattaaacaaacaaaaaaactcatggagcgattttattatcttgggggatgagaccatgagattggaaaatgtacattacttctagttttagactttagtttgttttttttttttttccctaaaaccttaaaacttactcagcgggttgcaaaaaaggggagttttcatatcaccaatttgtaccaaaattgaattttttcataaactaaaaggtaaaacccatttgggccttaacccatgaccacttttttatttcggaattttcccccttcactgaaaaaaaagaaggggaacataaggttttattggcatagcctatggaaaagggcaaaaacttcaaaacatgtgtatgtattattgggactatggatccaggttttttgcatgttaatatctttcgttagggataaggaatttacaaaacagtgacatttgattcaatggttgagcg

SEQ ID NO: 58940 - DNA, 2203 bp, Homo sapiens
cgttgctgtcgcctactggtactttgtatttaagatgatagtccaggtgctcaggccactttaaagattgctctaaactgtatggtgaagttggccaagggcaggccccatcttagccagtcagtagttgagaccttgttgactcaattgcacagtgctcaagacgctgcccggattttgatgtgccattgcctggcagccattgccatgcaactgccggtgctgggtgatgggatgcttggtgacctcatggagctgtacaaggtgattggacgatcagccacagacaagcaacaagaacttctggtgagtttggctactgtgatttttgttgcaagtcaaaaggcattgtctgtggaaagtaaggcagtaattaagcagcagcttgaaagtgtctccaatggatggactgtataccgtattgccagacaggcttccagaatgggtaatcatgacatggccaaagagctttatcagagtttgctgactcaggttgcctcaaaacatttctacttctggctaaatagtttgaaggagttttcacatgcagaacagtgtctcactgggttgcaagaggaaaattatagttcagcactttcttgcattgctgaatctttaaaattctatcacaaagggattgcttccttaacagcagctagtacaccactgaatcctttaagctttcagtgtgaatttgtaaaactcaggattgaccttttacaagccttctctcaacttatctgtacttgtaatagcctgaagacaagcccaccacctgcaattgccacaacaattgccatgaccttaggaaatgacctccagaggtgtggtcgcatctccaatcagatgaaacagtccatggaagaatttcgaagccttgcttctcgatatggagatctttaccaggcatcttttgatgctgactcagcaactttgaggaatgttgaactacagcagcagagctgtttactgatatctcatgcaatagaagccctgattttggatccagaatcagcaagtttccaggaatatggatctactggaacagcccatgctgatagtgaatatgaaagaagaatgatgtctgtatataatcatgtcttggaggaggtagaatcactcaatcggaaatatacccctgtttcttatatgcacacagcatgcctctgcaatgccatcattgctttgctgaaagttcccctttctttccagagatattttttccagaaactacagtctaccagcatcaagcttgctctgtcaccatcgccccggaatcctgcagagcccattgctgtccagaataaccagcagctggcgctaaaggtagagggagtggttcagcacggatctaaaccaggactcttccgcaaaattcagtctgtctgtctgaatgtttcttccacactgcagagtaaatctggacaagactacaagatacccattgacaacatgaccaatgagatggagcaaagggttgaacctcataatgattacttcagtactcaatttctgttgaactttgctatccttggaacacacaacattacagtggaatcttctgtgaaagatgccaatggtatagtatggaagactggtcccagaactaccatatttgtaaaatccctggaagacccttattcccagcaaattcgcttacaacagcagcaagcccagcagccattacagcagcagcagcaacgcaatgcctacacacggttttaaccatggaatgaatgcactgcagactctcaagagatcaatcaaattgccagaaacagtttggtttttcatatggaataagtattaaagttacagtgtagttcatttattcattgatttttgtaatgtaatattctggaaaaaattttgttttcttaaaaattttgtctgacagctgggcgtggttgctcacgcctgtaatcccagcactttgggaggctgaggtgggcggctcacgaggagatcaagaccatcctggctaacacagtgaaaccccgtctccactaaaaaatacaaaaaaattagccgagcatggtggcaggcgcctgtagtcccagctacttgggaggctgaggcaggagaatggtgtgaacctgggaggcggagcttgcagtgagccgagactgtgctccagcctgggcgacagagcgagactccgtctcaaaaaaataaataaatacattttgtctgaaaaataaaa

SEQ ID NO: 58941 - DNA, 2030 bp, Homo sapiens
tgtcgtggggctggagcagagcctgccgcgaacccccggagcccacgatccctcgtgccatccctcgaatccaccagcacgagcgtcccacccgcgcctgggaccatggccactgactcatgggccctggcggtggacgagcaggaagctgcggctgagtcgttgagcaacttgcatcttaaggaagagaaaatcaaaccagataccaatggtgctgttgtcaagaccaatgccaatgcagagaagacagatgaagaagagaaagaggacagagctgcccagtccttactcaacaagctgatcagaagcaaccttgttgataacacaaaccaagtggaagtcctgcagcgggatccaaactcccctctgtactcggtgaagtcttttgaagagcttcggctgaaaccacagcttctccaaggagtctatgccatgggtttcaatcgtccatccaagatacaagagaacgcattgccactgatgcttgctgagcccccacagaacttaattgcccaatctcagtctggtactggtaaaacagctgccttcgtgctggccatgcttagccaagtagaacctgcaaacaaatacccccagtgtctatgtctctccccaacgtatgagctcgccctccaaacaggaaaagtgattgaacaaatgggcaaattttaccctgaactgaagctagcttatgctgttcgaggcaataaattggaaagaggccagaagatcagtgagcagattgtcattggcacccctgggactgtgctggactggtgctccaagctcaagttcattgatcccaagaaaatcaaggtgtttgttctggatgaggctgatgtcatgatagccactcagggccaccaagatcagagcatccgcatccagaggatgctgcccaggaactgccagatgctgcttttctccgccacctttgaagactctgtgtggaagtttgcccagaaagtggtcccagacccaaacgttatcaaactgaagcgtgaggaagagaccctggacaccatcaagcagtactatgtcctgtgcagcagcagagacgagaagttccaggccttgtgtaacctctacggggccatcaccattgctcaagccatgatcttctgccatactcgcaaaacagctagttggctggcagcagagctctcaaaagaaggccaccaggtggctctgctgagtggggagatgatggtggagcagagggctgcagtgattgagcgcttccgagagggcaaagagaaggttttggtgaccaccaacgtgtgtgcccgcggcattgatgttgaacaagtgtctgtcgtcatcaactttgatcttcccgtggacaaggacgggaatcctgacaatgagacctacctgcaccggatcgggcgcacgggccgctttggcaagaggggcctggcagtgaacatggtggacagcaagcacagcatgaacatcctgaacagaatccaggagcattttaataagaagatagaaagattggacacagatgatttggacgagattgagaaaatagccaactgagaagctccaccagccactgatgccagccctggcactgcccctgcacaggagacaagtgcgttcagggcacaggccccgacatcaccccaaggacaacggcacaagtagagagaaactacctacctcacttcaaattatgtttggacttgacaaaaatgtatgcaaatgatgggggatggtagaaaaaaattatttacacaaccttggaagattaggcatgaatacacagagatttaccttttggaagtttcatcttttaatttggccagtgtttccttcatgctaatctagatgctgtggctgattacttgcccaggatctcctgtggcagcctctgcttgttctctggcttggagtggatggggcagcctccagctcctgtggaagtaatggaatagtggtggaaagggaacacagagagggaggcttccagtaagataggtgtgtaagcccagccatcatgtttggaatggcatgaggcagca

SEQ ID NO: 58942 - DNA, 1238 bp, Homo sapiens
ttttttttttttgagacggagtctcactctgtcacccaggctggagtgcaagactccgtctctagagaaaaaaagaaaaccagacagattaaaaagttgcacttacaaagcagttggggcatttattgacatttaaacaagggaggagatcctgaacactagtctcgctcagtttataaaaacttgaggccaaactctccatcatctgtacacagcttaaccacggccaggagcaagaattcgagttaaacgaattgaaccagtccaaccacaagacgataaagggaaacagggcgtggggatttccagtttttccttttacattacaaagtttccaacacaagaagccaacaataccccagtgctgcaccaagttacttcccactgtttcccaaggcacagtcaattaataatcagtagtccaagttctaagaacatttcctggaaaacaaggacgcacctcccgtggctctatgcatggcctgccactgatgaatcaaattcttaagaacctacgaccgtctgatacccttgaggagagcaccctcatagaatctccagcatcaggcctcagttttcccatctgtaaaagacagccatgcaaagtgggagatccgctaggcttccagatcgaagtcatcgcgctcctcattgtactctagcacgtgccgcttgatcttggacgagtccacccaagtgacaaagtcctccatgctgcgcgtgacaaggaaggcggggtcggtaaccacgtcagggcccacgcgtacgtgcccttgctccacaaaggccacggcagcctgaaggtgctgcgccatgcgcagcttgaggagcacggtggggaggcggcggcggcagaaggacgaggccgtgacgaagtcgcagagctccagcgaaccgcgcgtgggcaccaagccgagagcatacagcttgtccagcagcgcggccgaagcgcgcacgcggaactggtcgcgttcgggcaggtcgcgcaggcgccgcgccagctcacgcacggcacggctcagctggttgtagcgcgtgtagtcctcccgccgctgcagccggtaacgccgcagcacgcgcagctcgtgcaggttgtggtcggtgacctcccagttcaggaagtccacctgcttcagcagcttctgctcgtggaacttaagcttccgcaccatgatggcggcagccgcagccgcaggacccgaagctgagagcgcgttctggcatccgcgcgatttccg

SEQ ID NO: 58943 - DNA, 1380 bp, Homo sapiens
ttatttcgcagttcatttcattattattttttgcattatttctgctttttttggtctcctttccgaagggtttttatttaggggaacagctcaactccagctccctgggtgcaatgcgagcctgcccgcaccgagcgcgcttgcaaatatgccccccgccctttccctgggttacgaagtgcccctgtaccgcacggggagtgcacgaagacacgcgtgtgcacaggcggggctctgcgtgtgcgtaccctgtgggcactggagggggctgtcaggtcatatctgcccatacacaagatgggcacagccggggctggggcttcctggggtccgaatttccccgcggcgtctgcctaccacgggggcggaactgaccagtgccctcacggtcaggagagtgtgggggcccgtgaggggccaggacacgggaacacgttgccgaaaacatgtgtatatccatacgcggcggaaacgcgtgtgccagggcaggcctcgggccggatgacccctactcccaccattccccactccaagtccagcttcggcgtctatgaggcctagcggcttccggaatccggtatgaatcaggggcacggttcggagagccgggtctcgaaagcagctcttcagtgaggcctcctgaggctggtgtaggggggtggaggtgcgtcgtgtaccccagaggctgccagcgcctgctcataggtggggaggcctgggggtgggattgggactggaggcaggggcgtcggtgggcccagagggttcaaaggactcagagggctaatgagcccggcctcttggggacagggctgctggcctcggtgctgtcgccagcgcagataccaaaaggctcccaggccggccaggacaatgagcaggatgccacatgtcagccccacagccaggctggccacatccactcgtccacgccctcctttgccattgtagatgtagctctcccaaaagcgctccttgagagtgttgtcctcaaaatactccctggcctcttcccaggaacacctctcttccagacactcccgttccaggttccctggtgtgagcagctccaggtcccagtggttggctcttggaatccgggtatggctactcaggaagctctgggcctctgggggacccaggaagacttcttggtctgtctcctcactgggtgaagtatccaggcaggtggttaatgccatatatagcagcagcagagaggggtggcccctcatattttccagacacctgcccagaaatgtgagcactgccccttcctctttaatcgagaactccttggccagctacagccagctgtgaaaggggacagggaagaaagaaggggataaaaaaaggggcgccccactcccggctcgtgcc

SEQ ID NO: 58944 - DNA, 2529 bp, Homo sapiens
gggattgtgggaaaagatggcggctgccgcacaatcccgggttgtccgggtcctgtcaatgtcacgttctgccattactgcaatagccacatctgtgtgtcacggcccaccctgtcgccagcttcatcatgccctcatgcctcatgggaaaggtggacgttcctcagtcagtgggattgtggccactgtgtttggagcaacaggattcctggggcgatatgttgtcaaccaccttggacgcatggggtcacaggtaatcataccctatcggtgtgataaatatgacatcatgcaccttcgtcccatgggtgacctgggccagcttctgtttctggaatgggacgcgagagataaagattctatccgacgagtagtacaacacagcaatgtggtcatcaatcttattggacgagactgggaaaccaaaaactttgattttgaggatgtttttgtgaagattccccaagcaattgctcaactgtccaaggaagctggagttgaaaaattcattcatgtttcacatctgaatgcgaatattaaaagctcttctagatatttgagaaataaggctgttggagagaaagtagtgagagatgcatttccggaagccattatcgtaaagccgtcggacatctttggaagagaggatagattccttaattcttttgcaagtatgcatcggtttggtcctataccccttggttccttgggctggaagacagttaaacaaccagtatatgtcgtagatgtatccaaaggaattgttaatgcagttaaggatcctgatgccaatgggaaatcctttgctttcgttggtcccagtcggtacctccttttccacctggtgaagtacatctttgctgtggctcacagattgttcctcccattccccttgccgctttttgcctatcgatgggtagcaagagtctttgaaataagcccatttgagccctggataacaagggataaagtggagcggatgcacatcacagacatgaaattgcctcacctgcctggcttagaagaccttggtattcaggcaacaccactggaactcaaggccattgaggtgctgcggcgtcatcgcacttaccgctggctgtctgctgaaattgaggatgtgaagccggccaagaccgtcaacatttagtgcctcctgagcagctcttggttttggcgtcttttgggtcggcccatgtggtttgagcacccagccaggcggtctctttagaggatcctgtacacagttccactattaaaacatttcaggttgaattctgcagtattttcttccttgatttacaaaatgagaaatgtagtcacttagaacttgagcatgatttttgttaaacatatttaataatgatatatatacctatttattcctctgaaatgcccagagagtttgaattttccctatgacaaaccacttctatcatacgttctagaagacaaggaccctttttaatgtcaaagtattgtaaagaccccaagtgatatgtgattgttttttaatttccattaaatgagagagcatacagtatcccctaacctgaatgtgtttacactgaaggtgtttttaaaatttattttaataatgtccatatgccttttaaaaatagtagtacatatatagaaaaacattgtccatagattctcaaaccccttgcagtaattccacagtcttcttggatctgagctatctgaggccagcccgatgcccttagtaccacatctggattatttcagacacataggtggagatagattctcttcccatgcaaaggagatgcttcagcttctatgccagcagtgccagcacttaggaattatgaccttctaatgaagttcttaaaattgcagccaagacccagatgaacaattggtttagtgttggcaaatcccaccagtacagtgtgatttaaaactcccacaatttgtggtgaagccaacataccaccatcctaggtgacccagggttggtcattgtgtttcactggacttcagcctcctgatctatatttgggacagggatgtcagtaaaaatgctgtttgatgagggaatgcccgtctccttacagagagaaaggtatatcagtgttgaaggtaagttctccacctgccctttctgcctgcatcagaatctttttatcccaaaacggtcaacagtgagctactccaagtgtggtccatagatcaccagcattgggatcatcttggggcttgttagaaatgcagaacccgggctgggcacagtggctcacacctgtaatcccaacgcttttgagttgctgtggtgggacggtcgcttgaggccaggagtttgagaccagcctaggcaatatggcaagaccttgtctctacagaaaaatttcaaaaagttagtagggcatggtggcacgcacctgtagtctcagttattcgggaggctaaggtatgatgattgcttgagcctgggagttcaaggttacagtgagctatgatagtgccactgcacttcagcttggactgaagatcctgtctcagaaa

SEQ ID NO: 58945 - DNA, 1093 bp, Homo sapiens
ggatttaattggggaacccccgggtttttcccccccccccgtttttaaaccccggccccgggaatttaattttgggggccccataaaaaaaattttaccttgccagcccggggacgtaaacttggatcctttaaaacggcccccccttttttttttttttaagtcacaggcgcatttattattgtctggaacatcaaggcctttcctcccctggcagtggcacaagggagggccaactctcaggaggcggccacgctgccaccagcagcaggcccatggggtggcagggtcatgggcggcagaaacagcgccttcagcttgcctgacaggctggcgatctcaggatcctgggcttcgtaggacttgaccaagcgagcaaacttaaggacaccttccccgtcgcagctgaagccataggctttgataacctcctgctggatctgcgtggccacgggcagcacgaattgcagcatcttacccatgtcgttgcaggcgttatcccgagcctcgtccatgcgcactgcattctccggggcggagaacgcctggatcacctccgcgaggaccacctttgcttgctcagcgctcaaggccgccggttgggtcgaggcggacgccatagggcgtctgaagctctaggttcagcggaggtaaatggaaaactcacgaataaagagccacgtcctacaaccgttcccaacgcccctgggagcggaaaggaaacagcatccggcgcagccggaagcgcccaggcgtggcccaaaccttcataccccaagcttacaactgcatcaagaccaccaaaactacccataatttttgcacagtgaaaacaatctatcattggcaacaaacatcataagaggggctttccggtaaaaagccagaaagcctactagacaaattctaaaagagctgtaacactgctgcgtatgtgtttggagagaagatgggatataaaggaactccacaattgatgagggtgagcttaggtgacttttttcttgttcctattactgtataaacaacgacgcatgtggtaactttcagtaggaaaaataatattctaaggaacttacttaagtcattcaaa

SEQ ID NO: 58946 - DNA, 2340 bp, Homo sapiens
ggatgtcccccacagcccaacctgaacaccttgagttgaatcacgctcagcttggcacgagggggaagaccaaattgatagactggactttattcgaaaccagatgaaccttttaacactggatgttaagaaaaaaatcaaggaggttaccgaggaggtggcaaacaaagtttcatgtgcaatgacagatgaaatttgtcgactgtctgttttggttgatgaattttgttcagagtttcatcctaatccagatgtattaaaaatatataaaagtgaattaaataagcacatagaggatggtatgggaagaaatttggctgatcgatgcaccgatgaagtaaacgccttagtgcttcagacccagcaagaaattattgaaaatttgaagccattacttccagctggtatacaggataaactacatacactgatcccttgcaagaaatttgatctcagttataatctaaattaccacaagttatgttcagattttcaagaggatattgtatttcgtttttccctgggctggtcttcccttgtacatcgatttttgggccctagaaatgctcaaagggtgctcctaggattatcagagcctatctttcagctccctagatctttagcttctactcccactgctcctaccactccagcaacgccagataatgcatcacaggaagaactcatgattacattagtaacaggattggcgtccgttacatctagaacttctatgggcatcattattgttggaggagtgatttggaaaactataggctggaaactcctatctgtttcattaactatgtatggagctttgtatctttatgaaagactgagctggaccacccatgccaaggagcgagcctttaaacagcagtttgtaaactatgcaactgaaaaactgaggatgattgttagctccacgagtgcaaactgcagtcaccaagtaaaacaacaaatagctaccacttttgctcgcctgtgccaacaagttgatattactcaaaaacagctggaagaagaaattgctagattacccaaagaaatagatcagttggagaaaatacaaaacaattcaaagctcttaagaaataaagctgttcaacttgaaaatgagctggagaattttactaagcagtttctaccttcaagcaatgaagaatcctaacaatagagattgctttggtgaccatgataggaggaaacgaaacttgtaagattggaacagttgttatttttatgaaattactttaaatatgaattgtactaactgtacctaaatagcaaagccctgtgtagattctggtaatgatctgtctcagggtatgtgtatttttgaagagtgttatgtccttagttttaattttgagtaaagaaaaggctaaaatcatgaattagttacaagcaacagtaccaacttatgtgacccctgaggggtggggctgtgagctcttaatttgtttttgattctgaaaaactctgcttcctggcatccaggagttagagattgagcctttcatcttctttctcaaaactagtttttgatgctttctttcatgggaatagtcacttttttatttagtaaatcgcattgctggaaccaccaaggagtgtggaatgtccttgagtgtattatttatgcaagtcacagtcacgttgccatcatggcagctatgtgaaacactaataaatgtgtttttactttttattcccattaaaactgatgtaaaacaggataaaggcttgttatagtcacttataagtatctgggtctaagtaatttccttagatgtttctaaagaaacattttcagctttgctcccattatgattccaataaggaacgctttcctagtgcaattttaggagtaaagtttgaagagataaaaatagccaaagataggagacgtctgaattttgaatgataaacagtgatgttttaaaaaagctgttgttcttcaggaggcatttgcctaggatattgctggattataccccattggaggcttttaattttatttgtatgaattttccaggatttcattaaaaattattattgtattttttaccttaatgaaagattttgggttcaaatatctttctatattaaaagctgattgagtctgtacatatgtaaattatgcctagtggaggttctgttgactttcttccccactgtggaagaggccagttttgcctccatttgcacattcatttcagttatttctgatccataaatataacatttacaaaattcttccttgagctggtggaaatgcctcaccagtttcctctttaatgaatcaaataaaatctttaactgatgttaaaaaaaaaa

SEQ ID NO: 58947 - DNA, 1142 bp, Homo sapiens
ggaaatccccgggccagcttctgtactgccaggtccgggtcggcggctgcactgcggatgagaccggtgcgactcatgaaggtgttcgtcacccgcaggatacccgccgagggtagggtcgcgctcgcccgggcggcagactgtgaggtggagcagtgggactcggatgagcccatccctgccaaggagctagagcgaggtgtggcgggggcccacggcctgctctgcctcctctccgaccacgtggacaagaggatcctggatgctgcaggggccaatctcaaagtcatcagcaccatgtctgtgggcatcgaccacttggctttggatgaaatcaagaagcgtgggatccgagttggctacaccccagatgtcctgacagataccaccgccgaactcgcagtctccctgctacttaccacctgccgccggttgccggaggccatcgaggaagtgaagaatggtggctggacctcgtggaagcccctctggctgtgtggctatggactcacgcagagcactgtcggcatcatcgggctggggcgcataggtgaggctcccaccggcccgcttgcccgccccggctctcacagcgtggtttgcatccctggcaccacgtgtctgaaggctgagaagacccacatgctgtcagggcactttgcttgcagtagagatatctctaatgagggatacagctttgtaaaacacaggcaaatacataaataaaccaaagcaggattccttaagaactcaccaggtgataaaagcaagttgcctaagggtcagggggcttcatgattccggctccataaagaacagatgaagactacaaatgtgttggggccgttaggagtggttaccgtgagagagcccattcccccgacacctactccggcttgcgttctggaaggtatgtgactcacaaagccctaactcgggccggagggctcagtgggcagagttgatctgcagttctgcagatgaggcagagacacttttcttccagtggcccttatttggagaagcctggcagaagggcgtgagcctatccaagcagctatctattggtggttctctgtcatcctgcctggtgcaggggtgcgggtgagggtggagagtgtggagaacctgtctagccaacg

SEQ ID NO: 58948 - DNA, 709 bp, Homo sapiens
tggaggaccgggtcgagccacgcgtccggcgtttcgcccaccatcttctggggacagggtggagtccatatccgggacgggggggaggtggcggtgcccctcagggctacctctcaagagtgctatcatttccgcaggccagatcagaaaagggagctcaggtaccttccagagagtgagacccagcgcccttgtctcgcacccagtaggctttcatccccgccatggcggagctgatccagaagaagctacagggagaagtggagaaatatcaacagctacagaaggacttaagtaaatccatgtcggggaggcagaaacttgaagcacaactaacagaaaataatatcgtgaaagaggaactggccctgctggatgggtccaacgtggtctttaaacttctgggtccggtgctagtcaaacaggagctgggggaggctcgggccacagtagggaagaggctggactatatcacagctgaaattaagcgatacgaatcccagcttcgggatcttgagcggcagtcagagcaacagagggagacccttgctcagctgcagcaggagttccagcgggcccaggcagcaaaggcaggggctcctggcaaggcctgaccccatggtggggggaggggaggggaggggagggaatgaggcagctctaggatctatactgtagctaataaaatgtaaaaacacctggaaaaaaa

SEQ ID NO: 58949 - DNA, 913 bp, Homo sapiens
ccttgatcgctcgtgcgcctgcggacttcgcacgagcttgcttgtgactctaccaaaaaatatttttgcaaacacttaagtttgtgtttttctaagaaaactccccttgtggccagtgtggatggtcaaatggagcagggaaaaactggaggcaataaattaaatatttattgatagagtttgtggaggcaggaaaatgagaggcgaataattctgtgtagctggagtagattaataataatgtgttgcaatgtgatatagtaaatgagaaaaagctagttacaaaacaatattcagtatgatctcatttttataaaaaatatgtgtgtagaaaaatatctggattgaagacctcaatggctgaaggcgagaggaagacagccctggaaatggtccaggcagctggaacagatagacactgtgtgacatttgtattgcacgaggaagaccataccctaggaaattctctacgttacatgatcatgaagaacccggaagtggaattttgtggttacactacgacccatccttcagagagcaaaattaatttacgcattcagactcgaggtacccttccagctgttgagccatttcagagaggcctgaatgagctcatgaatgtctgccaacatgtgcttgacaagtttgaggccagcataaaggactataaggatcaaaaagcaagcagaaatgaatccacattctagtcctttatgcagtatacaaggagaactgtcctgtaggatattctcttcttgatggtgcagaacccagaattagaagtttgtggttacagcatactctgtccttcagaaaggcgtgattctagctgttgaccccttgcagctgttggaatctctgcaagaacctctgtattcttctaataaattccctcttttatttaaaaaaaaaa

SEQ ID NO: 58950 - DNA, 2155 bp, Homo sapiens
ggctgcgcggcggcagcggcagaaagcgtagctgctttgctgtagtccacgcccccttgccgctccggtgacagtctctgcggaaagtcacgtttgtgatttcgggagagcacagaacgggacgacggcgctcttgctgggtcatctgggccaggtgacgaagaaacagtttcctggtgaagcagtccctcacccctagtcagcccacacccctagggcctaaagatgctgaggtctgtatggaattttctgaaacgccacaaaaagaaatgcatcttcctgggcacggtccttggaggagtatatattctggggaaatatggacagaagaaaatcagagaaatacaggaaagggaggctgcagaatacattgcccaagcacgacgacaatatcattttgaaagtaaccagaggacttgcaatatgacagtgctgtccatgcttccaacactgagagaggccttaatgcagcaactgaattccgagagcctcacagctctgctaaaaaacaggccttcaaacaagctagaaatatgggaggatctgaagataataagtttcacaagaagtactgtggctgtatacagtacctgtatgctggttgttcttttgcgggtccagttaaacataattggtggatatatttacctggataatgcagcagttggcaaaaatggcactacaattcttgctcccccagatgtccaacagcagtatttatcaagtattcagcacctacttggagatggcctgacagaattgatcactgtcattaaacaagctgtgcagaaggttttaggaagtgtttctcttaaacattctttgtcccttttggacttggagcaaaaactaaaagaaatcagaaatctcgttgagcagcataagtcttcttcttggattaataaagatggatccaaacctttattatgccattatatgatgccagatgaagaaactccattagcagtgcaggcctgtggactttctcctcgagacattaccactattaaacttctcaatgaaactagagacatgttggaaagcccagattttagtacagttttgaatacctgtttaaaccgaggttttagtagacttctagacaatatggctgagttctttcgacctactgaacaggacctgcaacatggtaactctatgaatagtctttccagtgtcagcctgcctttagctaagataattccaatagtaaacggacagatccattcagtttgcagtgaaacacctagtcattttgttcaggatctgttgacaatggagcaagtgaaagactttgctgctaatgtgtatgaagcttttagtacccctcagcaactggagaaatgatttttccttcaagaaaaactacagtgggattcatttactttttaaaatacactgggtaaatcacctatacttagagtaacagtttgttatcaaaatgcctgataaaatatattcttaataaaagtcttcatttcataatgaaatcaatttatttggcatcttaatatatttttttagattcatcaacagaccagtttttgtgggcatatatatatacacgtgcaaatatcagaattgttaataatttgttacacatggacatttgttccaaactgactaaaaatcaatatagatattttatatacatatatatatatataaatacaaaattcagtgtactttaccatattaatactgaggaaaaatctgttggagacataggtctaggatgtgtgaagtttggaaaaatatgctatttaattataatgttcccctagactgctgtaaaccagaagtgaatccagacttttcctcccagcctacctttcaaaataataaattatttgtcctcaaatatacccttgatggaggacttttttatttcttatggaaatagtgaattcccaacaactatgatgaactatgttctttgcctatttcttcactatatttttttaaggttttttttaaaaagccttagaaagttccatattggtttaggggctaaaattgggttgatgctgtttccccccctaattacatagttttaatcctttggccataattttaaaaacttcctttgttttgattttgaatccagtgaaaatctttttgcaataaactattttagtaaaataaaaaaaaaaaa

SEQ ID NO: 58951 - DNA, 1785 bp, Homo sapiens
  misc_feature (1)...(1785): n = a,t,c or g
ttttttttttttctgaaaaacaaaaaaaacatttatttctgtaaactgtctgagtgcagagatgttctttacaatcccaatacagtacagatttcttccccaaaacgaaatgagcaaggaaaaacagaaaaagagctatatcaaatgtgctcatgaagaaccaagccaatctcacctttctttaaaaacaaaacaaaacgatccttttgattgtgtggtgcagacgcaggactgaagccacaggcttttggggtgctgtgagcccagggctttgctcagctcacagctagcgcggcgggcagagcaacccttcggcccaagccatcctcgcagcttgcacagaagcttcctgaacctaagggatccgttcccagctctccttaaattcccagtccccaccctgggcctctctccctaacgatcttgtcgctttgggagcccctgaagtgaaccctgaaatactccctccgtcaactctgggctcagacctttgcccttctctgtgtcacaaggaaatttcggtcaagagggtgggaacaggtggtttcagaccgtgcagcaaagccactgccaggtaagttttaaggcaaattttatctcttcttattcagtctgagccggacctaaccttctcaccaccgagcaatcctgcctatgctggacatgcatcttgggcaactccggatggaggtgggatgagggagcccggggcagataccaggaggtctgggccttagtagggaatggacgtgtgtgcttatgaaggctgcaggcaccgggcacagctcctggcccagctgcccctcagtggtacacaggaagcagggcccaggaaaactgagatggcaaaataggcccgggctctggaaagcaacgtgaggtcatgcagatctcactaggcagacctcgtcgcgtggaagagaaatgccaggaaaaggggtcactgcaggaggcacctcggatctgatggcaggcaggaccttgcatcaaaatgacttttctttagaacaaaaaagagggggagaaaagaaaaagaagatcaaagaaagaggttccatgagcgtcatgagataggacacggcagggttctaagggaagcgggaaggtgggggctgtggacacagggtggcgggcgctgcctctcatggcttctcttctccctggtgggctggtgggctagtagctgaggccggcggtcctctcccccggggagcaggcagatgactttggcaaggggtggtgtggcgggggctggggttactccgtctgggcgtcgtaattggctccccccgccttcttcagctcgctcttgatgaaatcttcctccagctccttccgatcactgatcacaaactccttagcgaaattctgtacgacctccttcaccagggtcttgtccgtcccggttttggcgcgctgcagcccgctgacgttctcaccgatccacgtgatgagggcaaacttggacctcttgctcatggcatccccggtggtgaagcgcacgaaggcaaacaaccggacgtcatctgtgcactgctggatgaagtgctggtactccgctccctgctcgccggggacgatggtggagccgtcatatttaaaagtcacccagatgacggccgagccgtcgtcgcgcaccaggttgtacgccgcccggcaagcctctttgtcgatcttggtggccatcgccgcggagccgcagcgggacactgtccggggcgaccgagcgcgcccccgnacgcgtggttctnnngnnnntttcgagggcntcaggatgcttcagat

SEQ ID NO: 58952 - DNA, 2687 bp, Homo sapiens
acccgcgacgacgatttcgtgctccctgagcgccccgcaccgacatggcggccgtcttcgctgtggtgactttaactctcggttttcggttatagccggccggcgctcacttgtcttcaggaagctcggagcctttggtggagccggggagaggaagggtgggtgcaagagtgaaaggcgagaggggactgcaagcatccgggtcggctcctggccggagcaagatggctgagggcgagcggcagccgccgccagattcttcagaggaggcccctccagccactcagaacttcatcattccaaaaaaggagatccacacagttccagacatgggcaaatggaagcgttctcaggcatacgctgactacatcggattcatccttaccctcaacgaaggtgtgaaggggaagaagctgaccttcgagtacagagtctccgaggccattgagaaactagtcgctcttctcaacacgctggacaggtggattgatgagactcctccagtggaccagccctctcggtttgggaataaggcatacaggacctggtatgccaaacttgatgaggaagcagaaaacttggtggccacagtggtccctacccatctggcagctgctgtgcctgaggtggctgtttacctaaaggagtcagtggggaactccacgcgcattgactacggcacagggcatgaggcagccttcgctgctttcctctgctgtctctgcaagattggggtgctccgggtggatgaccaaatagctattgtcttcaaggtgttcaatcggtaccttgaggttatgcggaaactccagaaaacatacaggatggagccagccggcagccagggagtgtggggtctggatgacttccagtttctgcccttcatctggggcagttcgcagctgatagaccacccatacctggagcccagacactttgtggatgagaaggccgtgaatgagaaccacaaggactacatgttcctggagtgtatcctgtttattaccgagatgaagactggcccatttgcagagcactccaaccagctgtggaacatcagcgccgtcccttcctggtccaaagtgaaccagggtctcatccgcatgtataaggccgagtgcctggagaagttccctgtgatccagcacttcaagttcgggagcctgctgcccatccatcctgtcacgtcgggctaggaggggccaagccgaagagccacccaggccacagttcctgtgcctgccttccccaccccagcagtggcccctccccatcccctccctctgttcgtcccgtttgatgagaggctgtttactggggtggggtggcgagatgggcttgagggggctcagagcataaggcttcagggcccaagttgggagaagtgaccaaagtgtagccagttttctgagttcccgtgtgctagactggccagaagagagggtctggggcctggtcactcggccactctctcctgtttctggcctcttctcccttcactcccgtccagtctggttttgagagcaggggctgttctgcagcacctcagggaagggaggagagatacctgctgcttccattgcttttcccttcctggagtcgatgcctttctaagggttggagctgctccttgcaggggcgggtcagtttcccaggccatgccggggtggccatctatgctagggctggaagctgaggctggccgccagctgtgggctggggtggggtgggtggggtcgggtggtggagaggccttagctgtcctggctggtgcccctcccaggctccttttcaccctgccccctgggcctgaggccccctgtgtccaagcctccccctggctcttcagttctctagcccttggctttgctgggtttcctgactgtagccacatctctcccgctccctaagggtaacctagccaatggaagctgccctttgggtaggtgctgggctcctgggagggcccagatgatggggtgaggcatgtctttccagaactttccctggcagggaggggatggcagaaactcagggaggggcttggggcccattgtatctggagagcctggattcctcttggcagtcttaggcccagccacttctgctacctttgcgctgctgtgagcctcaccctgggcccctgggccctgcttctctgctcccctgggtgatgggtgggcccagaaggtggcagtcccacaccttgtcctcccacctccctgaactgtccattgcttttatagggtgaggtaagtgacagcctcccaagcccaggctttggcactcagaatgggcccagtgggggctgggcaggcccattgagggccaccgccgaggtttctcctagggctgttcctgggcctggctcttacaggctcgtcccccaggcctgcccttctccactgccccctcctgtgtctgggtccacacacccttcaggaagggggagcactgagaagcacagcacaggggctcagcctgggatccggtgatggtctgggcagaggctgggtcaggagtcccaaaggtcagtgacagtttctcagaagaggcccagcgtccacctctctcccagggccagacaccccttcctggctcccccatccccctatgggctcccagccccttgcaccctcattgctgttcagattaaagcctctgttttgcacctgtcaaaaaaaaaa

SEQ ID NO: 58953 - DNA, 2155 bp, Homo sapiens
cgcacttccgtagaggtggacatggcgtgcggctttcgccgcgctattgcttgccaggtatggatcccggagcgcgcagaggagtccctgaggagctagggaccccaaaggcctttcaccgctgcgggccagtcctcagtcagctggagggtgggtcccacggaatcctgttagtttctaccacctcctcccccttctctggagctggtggagcttcagaagtcctgtggagcgtcggctgggatcagtttgtctcggtgaaaagtaaactttgaaagctttccagagtgttgaatcttccaccagaaaacttgatcacatcaatatctgcagttccaatttcccaaaaagaagaagtagctgattttcagctttctgtggattctttattggaaaaagacaatgaccattcaagaccagatattcaagttcaagccaagagactagcagagaagctaagatgtgatacagtggtgagtgaaatcagtactggtcaaaggactgtaaatttcaaaataaacagagagctcttaacaaagacagtgctacaacaagtaattgaagatggctcaaaatatggattaaaaagtgaacttttctctggacttccccagaagaagattgtggttgaattcagttcacctaatgttgccaaaaaatttcatgttggacatttgcgttctaccatcataggaaattttatagcaaatctcaaagaagctttaggacatcaagtaataagaataaattaccttggcgattggggcatgcagtttggtcttctgggaactggcttccagctgtttggctatgaggaaaaactgcagtccaatcctctacagcatctctttgaagtttatgtacaagttaataaagaagcagcagatgataaaagtgtagcaaaagcagcacaggagttcttccaacgattggaactgggcgatgtgcaagcactttcactgtggcaaaaatttcgggacttgagcattgaagagtacattcgggtttacaagcgtctgggagtatattttgatgaatattcaggagaatcattttatcgtgaaaaatctcaagaggtcttaaagttgctggagagtaaaggactcctactgaaaacaataaaaggaacggctgtagtagatctctctgggaatggcgacccctcctcaatttgtactgtaatgcgaagtgatgggacttctctctatgcaaccagagatcttgcagctgctatagatcgaatggacaagtataattttgatacaatgatatatgtgacagataaaggacaaaaaaagcattttcagcaagtattccaaatgctgaagatcatgggatatgactgggcagaaaggtgccagcacgtgccctttggagtagtacagggaatgaagactcgaagaggagatgtcactttcctggaagatgttttaaatgagattcaattaaggatgctacagaacatggcttcaattaagacaactaaagaactcaagaacccacaagagactgcagagagggtcgggctcgcagcactcattattcaggacttcaaaggtttactcttatctgactacaagttcagctgggatcgtgttttccagagtcgcggggacacaggagtcttcctacagtacacacacgcccgcctccacagtttggaagagacttttggatgtgggtacctgaatgacttcaacactgcttgtttacaagagccacagtctgtttcaattcttcagcatcttctcaggttcgacgaggtgctttataaatcatctcaggactttcaacccaggcatatcgtcagttaccttctaactttaagtcatcttgcagctgtggcacacaaaacactacaaataaaagatagtcctcctgaagtggctggggccagacttcatcttttcaaagctgtccgttctgtcctagccaatggaatgaaacttcttggaataacacctgtatgtaggatgtaatttccattaaaatggcttttaaaatgtcaaaaaaaaaaaaaagggggggcccttttaaaagaatcaaattttactgccgggggcggggagagtaatattttttttatggggccaccaaattaaaattggggggcgggtttaaaaacggcggggagggaaaaacccctggttttccc

SEQ ID NO: 58954 - DNA, 2126 bp, Homo sapiens
tttttttgccaaagggattaaattggggaacccccgggtttttcccccccccccgttttaaaaacccggcccccggaatttaattttggggccccaaaaaaaaaattttacctttcccacccccgggaattaaaattggttcttttaaaagggccccccctttttttttttttgagagaaataaaacaatttaatgatggcttccttgatttacacacaactctaagacaagaggacaaaattttctctccatgcactggtacaacgaagttcagggacaagaggcaacccaagtacaggggctgtggtgttcagatccacgctcagcctcgagtctcatgttccaaccgaccgtctggctcagtgactgtggacactggggagaggagggactgcccagacccctcaagtgcaggtgaggggaccggcagcagagtatgcatgggcactccatgccccagtgcgagaagtgcacaggggacagcgaacaccagcttccagtgcaccctgaagacccagtgggctcagggggcccagctctcccatcagagctgtcctcagggctggagctgggggctggggctgaggcgctggggctgggagggaggtggtgataaagaaccactgcagaaaggaacacatgctgaatgctgggccatgctttcctcccagacactgagttcctgaagacccagctttatcttccaagggtaacaacattcccaagactcagagctggaaggcggcaagagtggagccaggagagacagatcgcatccactcctgaggccgcctcgaatgtctccattcccttctggcctgccttccccctcccttcaaccccaaagacccaagaagacaacagagatcagagaccacatccctcttccctaatcaaaatagccaagtacaacatttctaaagttagggagaaggaggaaaaatgccacaggcttttaaagggaagactggaaccgagggaagggagaagtagccccctgctttgtccagcctggaagctggcagccatggtgttggggccttgacccaaccacaccagcccatctagctgagcatcttgtgccgatcgaagactgtcttccgctgctcctgcacctgcagcttccaccgctgctgggcaccttccacacgctccaggactgtgtttgctcggggtcccccgagggatgcagcagctgctgccatagagcgagcatcctcattctcctcctcattgtgcagttgctcagtgtatgcatccggctttcggatcagagggtccaccagcatcaggaaggccatgtagagcaacagggcacccaccacggacaggtagatgacaatgatgaccttgatggtggtggtgctgcgctcctcgtacctgcactcgcacagcaggcagtaggcctccacgtcatggccaggcactggcatgggctccaccacgtgcaggcagttgcagtccttctgggatacattctggttgtaaatgtgcccactgatgtttctataaggtggacagatgcatttgcaccggatatcttcagaactctccctcaccttgttggcttcagctgggggcaccagcaaacacccgaccacagccaccaaagataagagcttcatgcttatcaggcttgctgggccagcaaagccggacacctggaaaaagagatacggagtcggagaaggggaaggtggccacaccgcagccagcacgctaggcccttaaccatccggccaagtgggaatggggttgggggctgggctccaggattccaaggcctgctaaacctggtcgccaaaccctgcttccctcccgcccaactctccggctctccgccagccacctggtgagcccggcagaggggtcctcgaggggacaccgctgccaggggcctccagttccttctcaaggcccggctctgacccgcgcatcacgtcccaccgccctccgccatctccgcctctgcccgccccgcagctcctccccgctcgggcccgacgggaacttttgggtgcgagtctgggacccctgctccgacggcgaaggccggtgcccaccacgcccagaggtcttaagccggactgggacccccaatagccccgcgacccccgtcccctcc

SEQ ID NO: 58955 - DNA, 1295 bp, Homo sapiens
ggacgcgtggggaatgaatatattcgcgcgctctttgttgctgcctttattcttccttccccagcatccccgctccgcccggtcacccagacggccttctccagccttgccgagcttaagacccgtccctgctcctgaccatcaccgtcactggggtcactgtgctcgtgttggtcctgaagagcatgaactccaggaggagagagccaatcaccttacaggaccctgaagccaagtacccgctgcccttgattgagaaagagaaaatcagccacaacacccggaggttccgctttggactgccttcgccggaccatgtcttagggcttcctgtaggtaactatgtccagctcttggcaaaaatcgataatgaattggtggtcagggcttacacccctgtctccagtgatgatgacagaggctttgtggacctaattataaagatctacttcaaaaatgtacacccccaatatcctgaaggtgggaagatgactcagtatttggagaacatgaaaatcggggagaccatcttttttcgagggccaaggggacgcttgttttaccatgggccagggaatcttggaatcagaccagaccagacgagtgagcctaaaaaaacactggccgatcacctgggaatgattgctgggggcacaggcatcacacccatgttgcagctcattcgccacatcaccaaggaccccagtgacaggaccaggatgtccctcatctttgccaaccagacagaggaggatatcttggtcagaaaagagcttgaagaaattgccaggactcacccagaccagttcgacctgtggtacaccctggacaggcctcccattggctggaagtacagctcaggcttcgttactgccgacatgatcaaggagcaccttcctcctccagcgaagtccacgctcatcctggtgtgtggcccgccaccactgatccagacggcggctcaccctaacctggagaagctgggttatacccaggacatgattttcacctactaacacctccacgtgctcagcaattttgcatgtcccttttcatctgtttcagagtaagttcaatttcaccacggtaaactgggatgttttcaaaagtgccttgccatgtaccttcgcgcacacactggttctcctcttttggctgtgggcctaacaaaaagggctcaaggggctggagactggctgctggggcctccttgcttggaggctggaaagagctccatttcagtatctttctccgtggttttgtgaaataaactcaagtacaaagcaaaaaaaaaa

SEQ ID NO: 58956 - DNA, 4422 bp, Homo sapiens
gatattagaaaaaggattcccaagccagtgccacccagaaaggaaatggaaagttgatgacgtgttagagagcagccaggaaaatgaagatgaccatttttgggagcttctattccacaacaacaaaacagtaagtgtagaaaatggagatagaggaagcaaaactttcaatttgggcacagaccctgtttctttaagaaattatccctataaaatatgtgactcatgtgaaatgaatttgaaaaatatttcgggcttaattattagtaaaaagaactgttccagaaagaagcctgatgagtttaatgtatgtgagaaattgctccttgatattaggcatgagaaaatccctattggagagaagtcttataaatatgatcaaaaaaggaatgccattaattatcaccaggatctcagtcagccaagttttggccaatcttttgagtatagtaaaaatggacaaggcttccatgatgaggcagcattttttacaaataagagatctcagataggagagacagtctgtaaatataacgaatgtggaagaaccttcattgaaagtttaaagctgaatatatctcaaagacctcatttggaaatggagccgtatggatgcagtatttgcgggaagtccttctgcatgaatttaaggtttggacatcagagagctcttacaaaggacaatccttatgaatataatgaatatggggaaatcttctgtgacaattcagctttcattatccatcagggagcttacacaagaaagattctccgtgaatataaagtgagtgacaaaacctgggaaaagtcagctctcttaaaacatcaaatagtacacatggggggaaagtcttatgattacaatgaaaatgggagtaatttcagcaagaagtcacatcttacccagcttcggagagctcacacaggagaaaaaacctttgaatgtggtgaatgtgggaaaaccttctgggagaagtcaaacctcactcaacatcagagaacacacacaggagagaagccctatgaatgtactgaatgtgggaaagccttttgccagaaaccacacctgaccaaccatcagcgaacacatacaggagaaaaaccctatgaatgtaagcaatgtggaaaaacattctgtgtgaagtcaaacctcactgaacatcagagaacacacacaggggagaagccctatgaatgtaatgcatgtgggaaatccttctgccacagatcagccctcactgtgcatcagagaacacacacaggggagaaaccgtttatatgtaatgaatgtggaaaatccttctgtgtgaagtcaaacctcattgtacatcaaagaactcacactggggagaaaccatataagtgtaatgaatgtgggaaaaccttctgtgaaaaatcagctctcactaaacatcagaggactcacacaggggagaagccgtatgagtgtaatgcatgtgggaagacctttagtcagaggtcagtgctcaccaaacatcagagaattcacacaagggtgaaagctctttcaacatcctgaatgttagaagccttcatacacttgtgaaattggttatacagtttcaaaaaaggagatcagagaaagccaaagaatgtcagaaatttgtagaaaatgacttcttgtttgaatatgtaaaagctttcaagaaaaattaaaacttttcattagaaaatttgtactgaggggaattctattcatctaagtaatatggtgaaaatatttatctggaatttatgttgtttagtgttatattccagacgtgataccaaaattttgttgcaaatataatggacaatatttatttatacccatattcacagtggaatctgaagcttataaaagttgaatgacagcagcattaaacatatatgtgaagagtccccgatgtttgtagaccttatgtgagtatgcaaatatataaatttgagtatgcttgatttgtatattggaactcaacatgatcataaggagaagatacgtacccttaattgagtaactactatggtatttgttaatattttctacactaaataccattggtgtctttataggttgacataattatatatgtgtatgtacatatgtttgtgtgtatatgtaaatatatttctacacacatacttaaatatagtgatgtgctagtataacctcatactgacttaaaagttctgattgttaaattttaaggaattttgtgagccagttattaaaagcagtcattatttaaaatatgtaaacttacagttaaaaacaaaggtaataaatactcagcactcatcacttcctaattattttgctacatttcactattacctttgctgttttacttatttaatctgtatgatgaaaatactgtataatagtgtgcactgcacatctgtctcttcccagctccacattcagtgctgtcttggtagcttggacttagtgggagtgtttacaccatggaaattgacaaactataaatcagggttttaattttctcagagaacctgctgtcaaatatttacagcacatcactgtgtatatatgaaaacgtatttggcaatacaaaccacataccccttctatttcctgacataaataaatggctatggccatttacagctgaaccacgtcttcaagaaagaagccaaaaatatttccgtgaggtttttaactacctctgaatctgtcctactctaaatactaccggagtctctttgtaggttggccagtatatgtttttagtgaaatattatttcacaaagaactatatcacgtacctttcctctgactgtttcctggcatatatgcatgaatatggccattattgaactatcacttcagtaaagaagttaaacagtacttttctgaggtttttcagctacctctgggtcattctgtaatgtaaatgttgttaataggaatgggtttttacataaattatggcaagggttaacaggcaggtaacactgccactcctcaaaaagtggcggtatgtaatgaaaggcccttttgatatccttgatttttcattgtgtatctgtttgggcacggtctatgtaacactagttctgcgtattagtattttagagtatctctgcctcccttgtcctgttgtttcttttgcccccttggaacacattggtcagcagttctaagagacactgcccacatgatgaccattccctacttcatccttgctgagctaaattttatatttttgtgcatccttctcccagatgacttaggtggtaagtccagattagtcaaagctaatcatggaagttccattttaatgattctgttggggtgaacttgggagcaatgagatgtttgggaagtattgtgtagtacttctgggaaagatctccttgatacaacattgtcatgacatgagaagagactctgctgggctttttcatgtctgtaacatggtattggcttatcgtttttatctctgaagggcagtagcctgaagataacagtgcacaaggtgggaaaagccagctcagaggtgacgttgccgagctactctgctctctatacctgttctctactgggactttttataaccctcaataactgttttttatttggtcttagggctgtctgatacttagagctgaaggcattccagctgacacagaggaatatttttctaagtgttaatgttctatatggtaattagggggaagaattatttcttttcacaagttaatatagggatggctgtttgtatcagccatggttctttctggtggaaaacagaattctccaactaaaaatattttaatggcagactgattacagtggtgtgggccagaaacaagggacagtgaaacacccagagacttgtatcagcaggaagccattgccattctgagccttgaagggcaaggagggaaacagtgttaccagagcccagtaagaactgctgtcatgaaggaggggccaccttgtaagagacatcattactaccagaactgtggtgccaaattgctggtgtctctctttggagaaaccaaccagatacatctgctggagagcccaggtgggcacagagaagggtggagagagaatctgggaagagaaatggagaataagcagcacagtgttattcatttctgtaaattcctatgtagaaggctcagtgttagaaataaagttattctactagttgcaagttaagtgtttctgtttgttctgctttcctgttagcataagtaaactccctttggaactacacaggtatgtctctccttcaacatgtgtgaagcagacattatattaaattacattattcatacctccctgtggtgtttcttattgtatgtggtgtaaggtaagcagctctgtattcttccaaataaatagccagttgtccctgcactgtttgattaaaaaaaaaaaaaagg

SEQ ID NO: 58957 - DNA, 2771 bp, Homo sapiens
cccacgcgtccgctccaagatggctgcctccatagtgcggcgcgggatgctcctggcgcggcaagtggttcttcctcagctctctcctgcaggtaaaagatacctgctttcttcagcctatgtagacagccacaaatgggaagcaagagaaaaagaacattactgtcttgctgatcttgcatctttaatggataaaacatttgagagaaagttgcctgttagttctttaacaatatcacggcttatagacaacatttcctctcgggaagagatagatcatgcagagtattacctttacaagtttcgacacagccccaactgctggtacctgagaaactggactatccacacctggattaggcagtgtctaaaatatgatgcacaagacaaagccctatatacccttgtaaataaggttcaatatggaatttttccagataactttacattcaatttactgatggattctttcataaagaaagaaaattacaaagatgctttatctgtggtttttgaggtcatgatgcaagaagcctttgaagtgccttccacccaacttctctccctctatgttttatttcattgcctggcaaagaagacagacttcagttgggaagaggagaggaactttggtgcatcccttttgcttccaggcctaaaacaaaagaactcagtgggtttcagttcccagttgtatggctatgcacttcttgggaaggtggagttgcagcaagggctacgggctgtgtaccacaacatgcctctgatatggaaaccaggctaccttgacagagcccttcaagtgatggagaaagtggctgcctccccagaagacataaagctgtgtagagaagcgctcgatgtgctggatgcagtgctgaaggctctgacttcagctgatggggcttcagaggagcagtcccaaaatgatgaagacaaccaggggtcagaaaaactggtggagcagttagacatcgaggaaacagagcagtccaagcttcctcaatacctggaacgatttaaggccttacattctaagcttcaagctctgggcaaaattgagtcagaaggtcttttaagtctgaccacccagcttgtcaaggaaaaactctccacctgtgaagcagaggacatcgccacctatgagcagaatctgcagcagtggcatctagaccttgtacagttgatccagagagaacagcaacagagggagcaagcgaagcaggagtaccaggctcagaaagcagcaaaggcatctgcctaatagggtcccccagggccccacctgtctcacaagaacttcactcaaccccgtgccaggactcagcagtggcctggacaacagcctcagcttcctctacccatcttcttttcttaaagcaggctatgtgccctacatggcaaggcaccatgactgcccatcgagatgccaagaagggctatggaactatgcaggtggctagtggtcagactgaagtcaccagctgaataccttaaggaggactcttgaggctcataatggagttcctggggcacagggattagttatgagcattaaagttcctaagacccagtgacagtactgggagaaaccaaggcttgaagagtcaggttgaagcacaggcttttgttttttgttgtttttgttttttgagacagagtctcattctgtcacccaggctggagtgcagtggcgcaatcttggctcactgcaacctccgactcccaggttcaagcaattctcctgcctcggcctcctttagtaggtgggattacaggtgcataccaccacacctttctaatttttgcatttttagtagagatggggtttcaccatgttggtcaggctggtctcaacctcctgacctcaagtgatctgcccgcctcagcctcccaaagtgctgggatgataggcgtgagccaccacacccggccaagcacaggcttttgaatggtctccctctccccagcccaggtacatgaggccaaggtgaactgtgcatcctgagaccttgtgtccctgagtctcctttctgagtgcaagctgcactgtgagctggctgtgggatactcacacattcccacattctcctttctgccacatctcgcccttctggacctgcactgggagaaattcaggacaggagtgaactcaaggccatgaactcactggatttccatttttaggcacccatagggatgtttttaggatgtaagtttctgaggagaaagctagctctagcatgaagcttttttggattggcttctccatcgtgttggggtaacattttttttccaattttttttttcccaaaacatcgtctcagctcatttatcaagtaggtaaaatgagccttttgtgtacacacagaggcacatgtgcacgcacacacaacttgtgaacacacatttctgttaaagaagttagaaaatgagagatgggttggggcttgaagtgcatcaaaggtatgaatgttgtaaaactgtcaggagatgtaaaattcctttctgaagtgtctcttctgtgaaagggttcagagcagattttgcttactatgtagtgttgcccttaagtacagtggtgtaattttattcaagattgtgctcttctatcaaaagcctctggaaataaatgttccgggatcatgttagtgtactctttatctttggggaaagggaggagggagagggactcattattgttactatgattttgaggagtgtactttaaaccctcccccattaaactatgggatttattgtaataatga

SEQ ID NO: 58958 - DNA, 1228 bp, Homo sapiens
tttaggaaggtggctttgaaactcgcagggctgcttaaacaagagctacagctattgaacaaactgcttaccatttttagcttcaacacaggaatgaggcagtgttgccaaacgccattttaagaatcctgcataaatagcttagctaccgatgactctgcctgttttagcttggctgaagaggaaataaaaacagaacaggaggtggtagagggcatggatatctctactcgctccaaagatcctggctctgcagagagaacagcccagaaaagaaagttccccagccctccacattcttccaatggccactcgccgcaggacacatcaacaagccccattaaaaagaaaaagaaacctggcttactgaacagtaacaataaggagcagtcagaactaagacatggtccgttttactatatgaagcagccactcaccacagaccctgttgatgttgtaccgcaggatggacggaatgatttctactgctgggtttgtcaccgggaaggccaagtcctttgctgtgagctctgtccccgggtttatcacgctaagtgtctgagactgacatcggaaccagagggggactggttttgtcctgaatgtgagaaaattacagtagcagaatgcatcgagacccagagtaaagccatgacaatgctcaccattgaacagttatcctacctgctcaagtttgccattcagaaaatgaaacagccagggacagatgcattccagaagcccgttccattggaacagcaccctgactatgcggaatacatcttccatccaatggacctttgtacattggaaaagaatgcgaaaaagaaaatgtatggctgcacagaagccttcctggctgatgcaaagtggattttgcacaactgcatcatttataatgggggaaatcacaaattgacgcaaatagcgaaagtagtcatcaaaatctgtgaacatgagatgaatgaaatcgaagtatgtccagaatgttatctagctgcttgccaaaaacgagataactggttttgtgagccttgtagcaatccacatcctttggtctgggccaaactgaaggggtttccattctggcctgcaaaagctctaagggataaagacgggcaggtcgatgcccgattctttggacaacatgacagggcctgggttccaataaataattgctacctcatgtctaaagaaattcctttttctgtgaaaaagactaagagcg

SEQ ID NO: 58959 - DNA, 2113 bp, Homo sapiens
  misc_feature (1)...(2113): n = a,t,c or g
tttttttcacttcaatgctttatttttagatgatattaaaaacctcattaggctccctgagggaaaagagtgttaaccactaacagaggcaggggaaaaataaaggaaacagaaagataagctaaattgttaacaaggaaagctcctcagttggtctgaggatgctgtacaagctaaaagaaacttattaccaagaccaggtaaatgacttgaggttggagcttaatcttttaccctcaggctagtaaggactagtcaggtttgtcaaagtggcatatgtctttattatgatttccagatgggatctggtgggaggcgggtgggtagaagggaaggcagagaaacctttaaagattgtaagctaagtgctctatacctttatacaataccaatgtgcttgagtctcccgttaagaggctgaaaactgggcaggcatacgcaagactgggtgcgagattcaatggaatgtcaaatgaaacttagaatttattaatgtatttacataatttataatctttaagcaatggccccataaatatagactacaactttacatatgctaagcaatagatacttgcttttccccaccaaaatacttgggttaaaaaaaaaattgacagcatttataccaccttcttcacttccactcttcttcctttttaaaccattgctagtcattttagaacatatgaaattcagtttattccgggcagcttctctaccatcaccatcttgatcatgagagcttatttaaaaaggtgccaataacgtgtttggtggcacacacatgacaaggtcagaagcaaacccaggatgagctaggcatctgctgctatcattgttaatttactgtacgtatcctaggctaacatgttcaatgaaaagtgctttagagatggcagagatgaaatcatttccatcagtcctataaataacccattttagcttcagacaataattgtcctccctacacttaaactatcctactatatgttaaatgatacaactccctctaacagtggtaacagaaaccaaggaaattataatctccacaaggtctgtttcttttcccttaagaaccacaaaagtgctaattttccctttacaaatgttacataaaatcttgattacaaaactactcaacaacttaatcctaccatccatacaattatatgttccttttcagcaaggtcaaaagccaacgatgtagtccctttgtacactagagattctttacataatagaagttcacagactgaaatatcattgctgcagtctttggagaacagaactggtccatttctgtgaatcctttttgcacggagaagactcaagactggctaggtgaaaactggtggcagggaccccagccctcctgttaactttcaggaccacctacttcatcatcaagtctgagaggctgaggttcggtcagcagcagctccgctttggctctgaaggctgtcttcggagtttgaagcccttaccgccagatggcaggttggcgtcagtggatggaattcttcgactaatttctataaagagttcatttatgtttatcgcgttttttgcgctggtctctacaaaaattgcatgaatagagtcggcgtagtcctttgcatctctctccatgacttctcttacatcgataagatcacatttatttcctgcaatggcaactacaatattaggtgggccatgctgtcgaagctctttcacccaattctttaatgttgaaaatgtctcttcttttgtgatatcataaacgattatagctgcagccgaccctcgatagtacattggtgctaaggcacgaaatcgttcttgtccagctgtatcccagattaggaatttatgtagctcattttggtactggacagtcttggtcataaaagatgcccctattgttgggttgatgtttggatcaaaactgtcttccacaaaccgccacacaatactcgatttacctacacctgtatccccgagcagacacactttgagctccctcagcgccatggcccgggagccaggggcgcgggcggacgcgtgggcgcacgcgtggatctccgggccggtaccganagcgatcaattggngtcaatnnccccacgcc

SEQ ID NO: 58960 - DNA, 1569 bp, Homo sapiens
atcacgtggacgctactcgctattcccggcctgttggcttcttccgcgctggagtatccagataggcgacacgccggcgggcggctgaggcgggaatggctgctgtactgcagcgcgtcgagcggctgtccaatcgagtcgtgcgtgtgttgggctgtaacccgggtcccatgaccctccaaggcaccaacacctacctagtggggaccggccccaggagaatcctcattgacactggagaaccagcaattccagaatacatcagctgtttaaagcaggctctaactgaatttaacacagcaatccaggaaattgtagtgactcactggcaccgagatcattctggaggcataggagatatttgtaaaagcatcaataatgacactacctattgcattaaaaaactcccacggaatcctcagagagaagaaattataggaaatggagagcaacaatatgtttatctgaaagatggagatgtgattaagactgagggagccactctaagagttctatatacccctggccacactgatgatcacatggctctactcttagaagaggaaaatgctatcttttctggagattgcatcctaggggaaggaacaacggtatttgaagacctctatgattatatgaactctttaaaagagttattgaaaatcaaagctgatattatatatccaggacatggcccagtaattcataatgctgaagctaaaattcaacaatacatttctcacagaaatattcgagagcagcaaattcttacattatttcgtgagaactttgagaaatcatttacagtaatggagcttgtaaaaattatttacaagaatactcctgagaatttacatgaaatggctaaacataatctcttacttcatttgaaaaaactagaaaaagaaggaaaaatatttagcaacacagatcctgacaagaaatggaaagctcatctttagtttcagattaaagaaagctttgttttattttgctttgagagaatggtatgttttcttaactataggttattttatagagaatataaaagtataaaacattaaaaataaccctagatatactttaaaataatgttatatttatgctaaaatatgtaaattacactatacaaccatatgataggttatttctctaaccttgtcttctaacgttttaccaaaaattcataatctaatagtttatcagttttcaatagattaaataaaatgattactttaaaaataataaaatttatctaatttaaagttgatattatttttggccgttagttatctattactagtgatcagttatactgttttctatagctactttatttaacagcacagatttctatgcacctttactctttcctcaacccttgtctctatctgtacataattgctttgtcttgatgtttctatcaactatatcatgactatctattggttccataactctgtatcatgtgtattttcttattctggtataccacaaatgattcatgcaaatgaatttttggtgattgaaaaatattaaattcccaatttaaagtaaaaaaaaaaaaaa

SEQ ID NO: 58961 - DNA, 1690 bp, Homo sapiens
ttttttggtatcgattggggccggggacgcggagcaggtggccgcggcggggcagctgggccgccagcttggtgcctcggggaccgtctcccgctgctttggtcaccagcccctgcccgcccgacccgctccgttctccggcctgcgagccctgccggccggactttgcgccgcgtccggcgctgctgctgcgctcggggccccgctcggcgccggcggtgaccgggaagcccgcgttaaaggggcaaccgggaccctggcccggtatggctgaagtcagcatcgaccagtccaagctgcctggagtcaaggaagtatgccgagattttgctgtcctggaggaccacaccctggctcacagcctgcaggaacaagagattgagcatcatttggcatcgaacgttcagcggaaccgtttggtccagcatgatctccaggtggctaagcagctccaagaggaagatctgaaagcgcaggcccagctccagaagcgctacaaagaccttgaacaacaagactgtgaaattgctcaggaaattcaggagaagctggctattgaggcagagagacgacgcattcaggagaagaaggatgaggacatagctcgccttttgcaagaaaaggagttacaggaagagaaaaagagaaagaaacactttccagagttccctgcaacccgtgcttatgcagatagttactattatgaagatggaggaatgaagccaagagtgatgaaagaagctgtatctactccatcacgaatggcccacagggatcaggaatggtatgatgctgaaattgccagaaaactgcaagaagaagaacttttggctacccaggtggacatgagagccgctcaagtagctcaagatgaagaaatcgctcgacttctaatggctgaagaaaagaaagcttacaaaaaagccaaggagcgggagaaatcatctttggacaaaagaaagcaagaccccgagtggaagccaaaaacagctaaagcagcaaattcaaagtcaaaagagagtgatgaacctcaccattctaagaatgaaaggccagcacggccaccaccacctatcatgacagatggtgaagatgcggattacactcattttacaaaccagcagagttccacacggcatttctcaaaatcagagtcctctcataaaggttttcattacaaacattaaaaacctaggaatctgccttgaaaatggactcactatagcaaatattactgggtgatacagaatgaattctacacttactttttttctcctgtgtttgcattcctgggatttatcctcaagtgcatttctgaccataagtaattttaattcatttcaaatgttttggttattcatgatcacttgggcagtataagaaaatgtagcttctgaatattggccacctctatgctgcatatacttcttgggatatagtatctaagacctttgtaaactgccattttgttaggtatggagtttggtatctagggagtaggccttatttagcaattcaaattttatggagatgaatgatcaaagtgaaacaatgtttggatgcaacgcagaataaaagaatataagaaatagctttttgttgcattaatgtatgatattttgaaggacagagcctttgctttttgtattctttaagaaaagcacaaccataaagtattttaaaaaaaaaa

SEQ ID NO: 58962 - DNA, 2417 bp, Homo sapiens
acagttatgaccatcattacgccagcttggcacgaggcctcgtgccacagccggcgacccggagccgagagcgggcggcggagcctgagctggacgcggccacgccggcgcggcgggatatgtggtgcctgtcataagctccagagagctgccttccacaagaccagcagaagagtgggcaaacatgaaatccaatcctgctatccaggctgccattgacctcacagcgggggctgcaggaggtacagcatgtgtactgaccgggcagccctttgacacaatgaaagtgaagatgcagacgttccctgacctgtaccggggcctcaccgactgctgcctgaagacttactcccaggtgggcttccgtggcttctacaagggtaccagtccagcactaatcgccaacatcgctgagaactcagtcctcttcatgtgctacggcttctgccagcaggtggtgcggaaagtggctggattggacaagcaggcaaagctgagtgatctgcagaatgcagccgccggttccttcgcctctgcctttgctgcactggtgctctgccccacggagctcgtgaagtgccggctgcagaccatgtatgagatggagacatcagggaagatagccaagagccagaatacagtgtggtctgtcatcaaaagtattcttaggaaagatggccccttggggttctaccatggactctcaagcactttacttcgagaagtaccaggctatttcttcttcttcggtggctatgaactgagccggtccttttttgcatcagggagatcaaaagatgaattaggccctgtacctttgatgttaagtggtggagttggtgggatttgcctctggcttgcggtatacccagtggattgtatcaaatccagaattcaagttctttccatgtctggaaaacaggcaggatttatcagaacctttataaatgttgtgaaaaatgaaggaataacggccttatattctggactgaaacctactatgattcgagcattccctgccaatggagcactctttttggcctacgaatatagcaggaagttgatgatgaaccagttggaagcatactgaagtgtcttggtgggcctgagccaagcacaggtgtttgaggactacagttcatctcagggtttcttggagtacaagaccagtgtgaagttattctgatttcttgggaattttgctttttgtcttcccttctaccctacatcttaaactttatggaagaacctctattttgcatcatatcatttctgtccataattgtactgaaatagaaaagtgaccgctcttgctcttggtaaaatatagagtggtcagtagccttatgcacctaattcaaaaggtggaatatagttctgtcagggcttttacgtaaacctccacttgtacatgcaatttggacagttatgtgttgagggaagtacagtttggtaccttgtttatttcaaatatcagaaaaacccagaggtgatcatttctcatgaagatgcttataaatggttgcttaacccattctagatgtagggtctgcttaatgtgtgtacttttctaagtggttgattattttttatttttttgatacggagtctcactctgcactccagactgggtgacacagcgagacttcatctcaaaaaaaaaaagaaaagcaattgtacttcactatgccatatgtatgtattcactgaccaaaaattcactgaccaaccaaccaaactccacacttcatctgatcccccatagacttggggatggacagctgttctttggccatatggtataagaggatcattcttgtcactacttaagttagcctcatcattttgtgctgctccaacaccagcagggtatctcccaataaagtgttcctaagcagcctgtatactgagtgcaagcaggctatcaattttaataatagtccataccatgtatgtgtttctgtcagcagaatgtacatgttgtacaaaacctccaggttccttaagctttttgctgtccatgaatcctctgtggcaactgtaatcacagagccagaagccagagggccagggatatgagaggctgacaaacatcaggggacatctggggaggagatccctgtcatgtctcttgtgccatggagctattatggctggtcttccatttgctttttctttaagtgaaaaccatttttctactttgcttttctctccatacttaaatggtcagtagctactgagtggtgctttatctgaataggcctggatcgaagtaaaatagaaatgggactggctttccacaggaagtaaacttgctttcaggagcccacaagtcccctgctcagtgtccggaaagaagtcagtcatccctgttgggcagtgaaatcttcccacaggcccgtccaattagagaattt

SEQ ID NO: 58963 - DNA, 1586 bp, Homo sapiens
tttttttttttttttttttgcctctaacagaagcatcaagccactgacttaatatcccatgagctcctactatgatgacataacatgtcacatttattgctcttacctacttcctaagttactgcttgcctaataaggaaaagggcaagaaataagagtccaaaagacactcagaacaccagcagcagctttcaagtaaggactcagggtcagggtctcacaactcctccatttcatgtttcatttacattgtcttcgtgctccagcagcaaggctgacatgtgctttggggtaggagcctggagtatttctgccagatggtctgaggtgacgtatactcctagagcccaagtgaccaccagaagggacatgtgagacagcaggcagaggccatacatggaggatcacactccctcagacgtcatcagccccatgctttatcctttgactccccctgatcctcaaggccaggtggggtgcccctgctgcatgctccagagaactgtgggcctctcctaccatggctctcaatgcactgttccataactggcttctcccctggacagagccaccctggtctccttgtaagctttagttgggcttgtccctgagtgtgtggggtaggaataggagtgtgttcttgtgtatgttgcaatctttaggctcaggagacaaggagttagacctgagtcctgacatgtgcactcatttgtactcaccattaccttttatttaattgctttgagccagacaggctgttttttttaccatgaaatatactaatccttcaaaaaagccttgtgtttaagaaggcagcaaaaaacctctcttcaaaaaggcaacttttttttttttcttggcatcaatgaatatgcacttcagaaatctacagagaacttttttcactttgtatttgttccacagcattctagccaggagtacaaaataggagctcttcaagcagcacatgaagatggcccaggagccttcagccatccagagcagcagagcagcacctaaatctccacacacttcccagtataaccactaagaacacactagacccttggcattaggggatttatcatttccagttctattatctgggaatgactccaagggtttgtgacaagcttttgaaacgtaagtgctaagacgagtgtggacaagtcactgagctaatgaagaatagacccactgtctgcttggctctgctattttgtacctgtcttcacatgtggggaaacttcataactgtgcccacaaatcagagaaattcgcaaaggactagacaatgtattgcctgtgaacttcagaggcaactggaaatagtgcaactggaaatcaactagcttcatacataggcggatttgtttccagggaccaaaagcacagaagataagaaaacttttcaggtgatggccatattctcatcatatcctctctgtgtggagtctgcctgttgtcacaaaaaccttgaccctacatcaagttacacccttaacaaagggaagatacaggcatccagataaaaggtacttgtttgaaaggcagcccataagggagaactgaacttaaaaaaaaaa

SEQ ID NO: 58964 - DNA, 1663 bp, Homo sapiens
cccacgcgtccgcggacgcgtgggcgagggtgtaggaaggaaagcccaggacctccggagcagagcacagcagctgcagaggcaaggccagcatgtcgcccaacttcaaacttcagtgtcacttcattctcatcttcctgacggctctaagaggggaaagccggtacctagagctgagggaagcggcggactacgatcctttcctgctcttcagcgccaacctgaagcgggagctggctggggagcagccgtaccgccgcgctctgcggtgcctggacatgctgagcctccagggccagttcaccttcaccgccgaccggccgcagctgcactgcgcagccttcttcatcagcgagcccgaggagttcattaccatccactacgaccaggtctccatcgactgtcagggcggcgacttcctgaaggtatttgatggttggattctcaagggggagaagttccccagttcccaggatcatcctctcccctcagctgagcggtacatagatttctgtgagagtggtcttagcaggaggagcatcagatcttcccagaatgtggccatgatcttcttccgagtccatgaaccaggaaatggattcacattaaccataaagacagaccccaacctctttccttgcaatgtcatttctcagactccaaatggaaagtttaccctggtagttccacaccagcatcgaaactgcagcttctccataatttatcctgtggtgatcaaaatatctgatcttaccctgggacacgtaaatggtcttcagttaaagaaatcctcagcaggttgcgagggaataggagactttgtggagctgctgggaggaactggattggacccttccaagatgacgcctttagctgatctctgctacccctttcatggcccggcccagatgaaagttggctgtgacaacactgtggtgcgcatggtctccagtggaaaacacgtaaatcgtgtgacttttgagtatcgtcagctggagccgtacgagctggaaaacccaaatggaaacagtatcggggaattctgtttgtctggtctttgaataaccaacccagtgatttacatgctgatagctaagtgagtttttaatggccattgtgtatgattttgatgcacaactagttaaaagcctttcataccagtcagtattcccagccttgagcgcacgcgcgcacacacacacacacatacacacacgcattaatttttgtactttgcttcttttatgtttgtaatctgtaaatgaacacatggcagaaaataacccctgattggtaggatcatagttctaaatggaaatgtttgtaattctttgatgtgctacaaacctgaaactggtaagacaagcacaaagcaacgtgcaatacaaaaatcgtatctcaagggaaaatactcaaagaaagaaaagtggcagcacttatattagttttataacaggataaagtcttgtgtatagcaaagtagttgcatctgtttattttctatttattattgttacaataggtaatagttatagcaattatttattgatttgtaacaacttgtttttaaccaaactttgtagcatggaaaaaattttccatccacaaatacaaacatgaataaatacattcagaatgttggccccatgaaaaaaaaaaaaaa

SEQ ID NO: 58965 - DNA, 2712 bp, Homo sapiens
tttgccgggtcgacgatttcgtgcgcgaggtttcaagatggcggtagctgaggggttgaccgagagacccagttgaaggcctttacgaagtgaaagaggccgggagtcgccccctacccgcttctcgtagtcctgggagcacagcagaagtgtttttctttttttaatgaacaagtaaaccatacaaattgtcaacatgggacggagatctacatcatccaccaagagtggaaaatttatgaaccccacagaccaagcccgaaaggaagcccggaagagagaattaaagaagaacaaaaaacagcgcatgatggttcgagctgcagttttaaagatgaaggatccaaaacagataatccgagacatggagaaattggatgaaatggagtttaacccagtgcaacagccacaattaaatgagaaagtactgaaagacaagcgtaaaaagctgcgtgaaacctttgaacgtattctacgactctatgaaaaagagaatccagatatttacaaagaattgagaaagctagaagtagaatatgaacagaagagggctcaacttagccaatattttgatgctgtcaagaatgctcagcatgtggaagtggagagtattcctttgccagatatgccacatgctccttccaacattttgatccaggacattccacttcctggtgcccagccaccctctatcctaaagaaaacctcagcctatggacctccaactcgggcaggttctatccttcctcttcttggacatggggttccacgtttgccccctggcagaaaacctcctggccctccccctggtccacctcctcctcaagtcgtgcagatgtatggccgtaaagtgggttttgccctagatcttccccctcgtaggcgagatgaagacatgttatatagtcctgaacttgcccagcgaggtcatgatgatgatgtttctagcaccagtgaagatgatggctatcctgaggacatggatcaagataagcatgatgacagtactgatgacagtgacaccgacaaatcagatggagaaagtgacggggatgaatttgtgcaccgtgataatggtgagagagacaacaatgaagaaaagaagtcaggtctgagtgtacggtttgcagatatgcctggaaaatcaaggaagaaaaagaagaacatgaaggaactgactcctcttcaagccatgatgcttcgtatggcaggtcaagaaatccctgaggagggacgggaagtagaggaattttcagaggacgatgatgaagatgattctgatgactctgaagcagaaaagcaatcacaaaagcagcataaagaggaatcccattctgatggcacatccactgcttcttcacagcagcaggctccgccgcagtctgttcctccttctcagatacaagcacctcccatgccaggaccaccacctcttggaccaccacctgctccaccattacggcctcctgggccacctacaggccttcctcctggtccacctccaggagctcctccattcctgagaccacctggaatgccaggactccgagggcccttaccccgacttttacctccaggaccaccaccaggccgaccccctggccctcccccaggtccacctccaggtctgcctcctggtccccctcctcgtggacccccaccaaggctacctccccctgcacctccaggtattcctccacctcgtcctggcatgatgcgcccacctttggtgcctccccttggacctgccccccctgggctgttcccaccagctcccttgccaaaccctggggttttaagtgccccacccaacttgattcagcgacccaaggcggatgatacaagtgcagccaccattgagaagaaagccacagcaaccatcagtgccaagccacagatcactaatcccaaggcagagattactcgatttgtgcccactgcactgagagtacgtcgggagaataaaggggctactgctgctccccaaagaaagtcagaggatgattctgctgtgcctcttgccaaagcagcacccaaatctggtccttctgttcctgtctcagtacaaactaaggatgatgtctatgaggctttcatgaaagagatggaagggctactgtgacagcttttgatgccagaaaaggcttctgttcacaacagtggcccatggagaaagaggctcttattaaacttagatgaaagagctgcttccattgtcagggtattttctaatttcagttcaaggaatatcctaaaatttagccttgttcagaatttactgcacataaaaaagggtatttcatccagaatagatcagttattgaagcagtgctgctaacatccattccctttcataccaccattttcaccctgtttcttcccctcctccagttctttggaaatttgtgatcgggggatcttagttgcttatttgttttgactcttgtgtgctgtgggcactggagtagagatttctggagaaaaaaaaacagtttatttcatcttgccttttgtgtttgagttatttttaatattttcctgtaaatattttgtaatattttacttgtaatgaaatggatcacaatgtcatttcctaatacaaggcaggatatgtgggaagaatatgtacaattatttgattaaaattatttcccactgacctaaactttcagtgatttgtgggaaaaataaataaatgttctacaccaagat
